United States Patent Application Publication US 2012/0017338 A1 - sequence listing, part 10

SEQ ID NO: 36184 - DNA, 1056 bp, Zea mays
  Peptide Sequence Number=SeqID_77963
atggaggttgaagttgctttaaacttgtcggctggcaccccccttgatggtgtttttttaccagaggaattttacattgatgagctattagcaaattatgatgatgctcaaaccgatgatgtggatggagcaaatgatgttgatgcacaagctgctgatgtggaatatgttcttgaggctatccctattgtgcaagaagttccattgcgccaggatgttgtaaacaatctgttggtgccaggcagactaagtcagtcgattcattcgtcactattctcaccaacagtgaacttcactgtgctacaccacatacacccagctataaatacacccagctacctctccacacacactcaacaccctcagccaaggcaaacaccccaccctctcagttactccgctctgctggctacacgcatagtgtcgcttcgcctccagtccaccctcctgttattggagtgttcgtgccatctcgtggaggccagatatgcaagtctacgccaggaagtggagctagaagccagttccacgagctctccttccccttcgccggataagcacgtcactcaatctgaactcatacggtccaaccccagggttatgaaggctggggagcaccaggaggataaggagggggaatgttttgtccggtttggacatggtggtggcctgactccttccggtataatcgttaagaaaaaggagatcggcctcctgggactagtaattgtatcacatttgagtcccagaggatctagggcgcttcaggtggtatcagagctgttaggttggccgcaggacgtaacccttagcctaatccaaaagtttttgagtcaatcccttcatttcaaaaatgctttccgcctttccttctctcagaagtcagatggagagaagtgtgtcatgactgtatacattggatccagtccgcaccatgtggaatggagtgtcactgctactgggcacagattcaaagacacctgccaagtcgtcgcccgcaaggcattgagggccctgtgtcagatctatgaagaggaagtggccgacaccgcttag

SEQ ID NO: 36185 - DNA, 306 bp, Zea mays
  Peptide Sequence Number=SeqID_77964
atggatcctcagctgagtataattgattcggatcgccgtaccttcgcggttatgaagacttggtcacttttctacaaccatacccttgagagtcttttccttagtcgggtgaggaagcgacaaatttttgttgcttttgctccaaggtggtacctaatgaggaaaaacaagactgaagtgcgggaggactcggtcctccacttaggatcttttgcttttagcttatcgggaggagtttgtgcctcccttggtttgtataatattattactctgcactcacttttagtctggtctgtaataaaataa

SEQ ID NO: 36186 - DNA, 306 bp, Zea mays
  Peptide Sequence Number=SeqID_77965
atggatcctcagctgagtataattgattcggatcgccgtaccttcgcggttatgaagacttggtcacttttctacaaccatacccttgagagtcttttccttagtcgggtgaggaagcgacaaatttttgttgcttttgctccaaggtggtacctaatgaggaaaaacaagactgaagtgcgggaggactcggtcctccacttaggatcttttgcttttagcttatcgggaggagtttgtgcctcccttggtttgtataatattattactctggactcacttttagtctggtctgtaataaaataa

SEQ ID NO: 36187 - DNA, 474 bp, Zea mays
  Peptide Sequence Number=SeqID_77966
atgaggaaaaacaagactgaagtgcgggaggactcggtcctccacttaggatcttttgcttttagcttatcgggaggagtttgtgcctcccttggtttgtataatattactactctgcactcacttttagtctggaatgatctatggatcgcggatgcagccatccgctacttgcaagaccaactcgcgaaacgagatttagcgctcgattggacggttaactctcgtttactcgcctgggctaaggaagccaaagctcgagcccatgtggaggagcttaacttagccatggataacttgcaggtctattataatacactacatgaagaagctcatgggttgtgttcacaactgcacccgaacgtccctgcagatcctgtcggaatagaagccggaccttctcatgtagcgggagaagcacttgatggtgaactagaccttttcaggaccccctccctctacgaagttggttga

SEQ ID NO: 36188 - DNA, 588 bp, Zea mays
  Peptide Sequence Number=SeqID_77967
atggcggtcagacgggagattcctgcattgctcttcctagaaactgtagcgggttttctgaagctagtggaactaggtaatggcctcatagtgttaccctgcctcgcttccttggaagagtacaatggatcaagcagtctcattagctgtgagaagcagacgattcgaatcgagtttttatccttgcaagtgaccgcacttgtacccaccataaccggaatgggagaccacgtctcaggtcgcgtgaggggtaaagtccactgccaggttcaatcaggctatgtgcacaaggaatcgaagaatggagcagaggattacccggtctacgttcaccggcggtcgggcgaagtccggcgactgtggactggcttctccggcgaagcaaagtccgattccttgctcgggcagcttcaccgaggcgtgcacagtctcttccaagggttgggtgtggccgggaagggctctgttggccggtctacaggggcaggggctcgtgtggccgcgggcacgccgtgcaaggggcaaacgccggtggtttcgggctccggtgaggtcgagcgtgcacggaggagtacggtctacgcctga

SEQ ID NO: 36189 - DNA, 132 bp, Zea mays
  Peptide Sequence Number=SeqID_77968
atggcggtcagacgggagattcctgcattgctcttcctagaaaacgtagcgggttttctggagctagtggaactaggagaagaacaggtggcccaggaggagccacacaatgaggggttcgacttgatctag

SEQ ID NO: 36190 - DNA, 261 bp, Zea mays
  Peptide Sequence Number=SeqID_77969
atgaggcctttacctagttccactagcttcagaaaacccgctacagtttctaggaagagcaatgcaggaatctcccgtctgaccgccatagcagcaaaatcaacccggcaacctccctacatgcctactcccctactgcccttgcccctatcgggttctctggaggacatggttgctggagtgacttggccgtccatcttgccactgggttggacagtcgagtgggatcctgcctcggctgaggaggagcatgaggagtga

SEQ ID NO: 36191 - DNA, 276 bp, Zea mays
  Peptide Sequence Number=SeqID_77970
atggcccaaggactagataatgggcatcacaagttagatggacattgcaaaagtgatactcgggtgcgtagctcggagacaactgatcaagcaaaggacggaggcaagaagagcttcgaggtaccaagtgcacgggagaaggtcaaggagactgaggaacccaaggccaagggtgaagaagaaagcttgcaaagtcaagggatgttggagctaagaaatgtcaacttgatgatttatgagtccaacatcaaagctcaagcatgtgaaatgctatag

SEQ ID NO: 36192 - DNA, 420 bp, Zea mays
  Peptide Sequence Number=SeqID_77971
atggacatcacaagtaagatggacattgcaaaagtgatactcaggtgcatagctcggagacaactgatcaagccaaggacggaggcaagaagagcttcgaggtaccaagtgcacgggagaaggtcaaggtggctgaggaacccaaagccaagggtgaagaagaaggcttgcaaagtcaaggagaagccaagacttagttcagtctggcacaccggactgtccggtggtgcaccggacagtgtccggtgcgccaggctgaactctggcgaactggccgctctcgggaattcaccggcgatgtacggctataattcaccggactgtctggtgtgcaccggactgtccggtgagccaacggtcggccgggccaacggtcggccgcgcgatctgcgcgggacatgtgggcaagccaacggctag

SEQ ID NO: 36193 - DNA, 249 bp, Zea mays
  Peptide Sequence Number=SeqID_77972
atggacatcacaagtaagatggacattgcaaaagtgatactcgggtgcgtagctcggagacaactgatcaagccaaggacggaggcaagaagagcttcgaggtaccaagtgcacgggagaaggtcaaggaggctgaggaacccaaagccaagggatgttggagccaaggaatgtcaatctagatcaagtcaagccgacttgatgagttatgagtccaacatcaaagctcaagcatgtgaaatgctatag

SEQ ID NO: 36194 - DNA, 177 bp, Zea mays
  Peptide Sequence Number=SeqID_77973
atggaggcaagaagagcttcgaggtaccaagtgcacgggagaaggtcaaggaggctgaggaacccaaagccaagggatgttggagctaagaaatgccaatctagatcaagtcaagtcgacttgatgatttatgagtccaacatcaaagctcaagcatgtgaaatgctatggatgtaa

SEQ ID NO: 36195 - DNA, 171 bp, Zea mays
  Peptide Sequence Number=SeqID_77974
atggaggcaagaagagcttcgaggtaccaagtgcacgggagaaggtcaaggaggctgaggaacccaaagccaagggatgttggagccaagaaatgtcaatctagatcaagtcaagcagacttgatgatttatgagtccaacatcgaagctcaagcatgtgaaatgctatag

SEQ ID NO: 36196 - DNA, 177 bp, Zea mays
  Peptide Sequence Number=SeqID_77975
atggaggcaagagaagcttcgaggtaccaagtgcacgggagaaggtcaaggaggctgaggaacccaaagccaagggatgttggagctaagaaatgtcaatctagatcaagtcaaaccgacttgatgatttatgagtccaacatcaaagctcaagcatgtgaaatgctatggatgtaa

SEQ ID NO: 36197 - DNA, 330 bp, Zea mays
  Peptide Sequence Number=SeqID_77976
atgacggaggaggcgctggagctcctgtgcgaggtggtgcgggacacgtcgagctccttcacctcctggcaaggccctgtgaggcattcctgtcacctcttgatccacctcctcttcatcgttcgagttaccgctggccctgctcccttagctcctgttcgattagccctgcaggcaaatctcgactggcgtgtttgtgtcagtgcagtttctgtggttttctcacttgaggatggcccatgtggtaacatctggggagccattggagtaccagtgagcatactacctgaggacgcaaacctacctatttcagtagattggttagagtaa

SEQ ID NO: 36198 - DNA, 366 bp, Zea mays
  Peptide Sequence Number=SeqID_77977
atggagctctttggaccaaggagtgtcatcccgttgcgtttcattgggctcgagggtgatatgatggtcgaagtgatcctccacgtagcgcttctctccgctgttgcgctcgtgaggggcgcatgctgcttggcactaacctcgctggctttgtcctctccatcgccaacgacattggcggttctagaggtttgtttgcattatttctgcagctatgatgtcatacttgtcaattctattgaggcaagaccagtattctcaaggcccccctcagaagcatttcaggttgacagctttattgctaaaagttaccatgaagatgtgaagattagcttgcatgtgaagatcagagtaaaaggactgtga

SEQ ID NO: 36199 - DNA, 2274 bp, Zea mays
  Peptide Sequence Number=SeqID_77978
atgggctccctcgaaaacggagccggagccggagccgcggcggcggcggggagctacaagcgcggcccgggcccggcgctgcgggctggcggcgcacgtaaggcgcgggcgagatccaggctcgcgcgcttcctgctgctggagaaggtggactatctccagtggatagccgccgccgctgccttcttcttcgtcgccatcgtctttgtcgcgttcctcccggggtcgggcgtcatcgagcggcccaggctgacgctcccctcgagccgcgcgggagagggacgcgtcggaggcggggttgaggaccgcagcggcctcgtccggtgggaggcgggcgcggcgttcgagttcgagccggccaggctgagggagaaatgggcgagggagcggagggaggaggccaagagcttggcggagctcgggacgcccgtaaggaggctcggggtacggaagccgcggcttgccatggtgttcggagacctgtatcccagcgcaatgcagcttcagatggttagcgtcgcctcggtgctggaggccatggggtacgaaatgaaggtttgtgtcagtgcagtttctgtggttttctcacttgaggatggcccatgtggtaacatctggggagccattggagtaccagtgagcatactacctgaggacgcaaacctacctatttcagtagattggttagatattatatgtcctgtcctgcttctactgataagatatgtggcctcagcctcactctctaattatttcctcatcagaatactttctcaaagtcagatgtttgatttggaccatgtgtctgtggcttcctacagtcttctgcatgagcctttcaaatctatacctatcatttggactgtgcatgaatattctcttgcacatcgtgctaaagaatataatgtgatgtatgctgcatttgattctggtaactatttcgtgattccaggccccccatcagaagcatttcaggttgacagctttattgctaaaagttaccacgaagacgtgaagatcagcttgggcttgaatcctaaagattttttaattgctattgttggtaattcattttcatacggtgataatttgatggaagaggcacttgtcttgcaagcattgagtcctctgttacagagatatcgctctgagaatagcgcacaatctgaactgaaagtaaagatcttcactgggaacataactgagaagcataggatggcccttgagtctgttgctctaagtgttggcttcccaagaggtgcagtggagcatgttgctgctgaagataaggacaacctccttggtacagctgaccttgttatatattattcttgtctcgaggagcaattattccccagtgtgctagtccaagccatgagtcttgagaagctggttatagccccagaccttgcaattattagaaaacatatcaatgatggagtaaacggacttctgtttccaagaaagaatattggcatgttagctcaagttcttcttcgagcagtgtcaaatagtaaagtgtctctttcagggcaaaaaattgcttcagctgggaaggctcatgccaagaatcttatggcttctgagaccattgaaggctatgctatgctattgaaaaatgttgtcaagctccccactgatgcactaagccctttaactgctgatgagatacctttagctctgaaacaagagtggaaatggcacctatttgacgacgtgaagcatttacaccgtgtgaatacgagtttgtctggctacaagatactccagaaactagagcaggagtggcatagcaaccaaatggaaaactcttctttgagtacaaaaaatatcaatgacgcattctctgcaattgcctgggaggaacagagagtaaatgaggttatggacatcaaaagaaaaatggaggaagacgagttgaaggacaggaatgaccaacctcatggaacatgggaggaggtgtacagaaatgtgaaaagggtagagaggttaaaaaatgaattgcatgaaagagatgacaaggagcttgagcggacaggtcgaagaccaggagcggacgatattgatgcttcttctcgtcttccacttctcaataatgtttactacagagatattcttggtgaatttggagctttctttgctcttgccaacagaattgacagaatacataaaaattcttggatagggtttcagtcctggagagctacagcaagaaaggaaacacgtgcattgagtgcagcgagaacaatccacattgtcttccagaacaattga

SEQ ID NO: 36200 - DNA, 453 bp, Zea mays
  Peptide Sequence Number=SeqID_77979
atggcgggcagtggcgcgttgtgctcgaggcgaagtctggatttggcctactggtttcaaagatatggagctctcaagtctggtctgtctctcagcccgagcccgaggcaaatctttggttttgtcgtgtctagggatcgcgtcccgatgccatcttcagacatgtggagaccgttcgtcagcaaggttcctggaaggagggggactaaaaaggtccagctctccatcaggttttcgagggatgcgctcagttctgccacgcgagctagagctttcgcttcgcagtcccaagctaaagagcacgagttgacggcccaatcaatggtcgtatcgcgttccgaaattccttaccgcaggcgactcacttcggctgatagctccacaatactgtggctatcccgctcatgtaccctattcctgtggcatagttctgaccagagttgctccacctag

SEQ ID NO: 36201 - DNA, 564 bp, Zea mays
  Peptide Sequence Number=SeqID_77980
atggtggtaggaggaggtcggtccacgtgcgcaggcgggggagctcgtcggcggcgaggagtccggcctaaccagggcacgatagatcaattaaatgggtcggggagcttcaccagaggtcaaggaagatgtgcgcgcgaggaattagagaacggctcaccggattgctcggtctacgcgcggccgcgggcgaccgaagtccggcgaaggcgatctctggtctccggtgaagttctgtcgggtctaagagcttggaaagcttcacgggccactggagaagctaaccgagaggctggcgcaacatggacgtggctggagcgagctggccgcgctggccgaggcttgggtagtgatggcgggcggtggcgcggtgtgctcgaggcgaagtccggtgaactttggcttaggcaaggcctaagagcgcgcggggaggatttggcctactggtttcaaagatatggagctctcaagtctgatctgtctctcagcccgagcccgaggcaaatcttcggttttgttgtgtctagggctcgcgtcctgatgccatcttcagacatgtggtag

SEQ ID NO: 36202 - DNA, 192 bp, Zea mays
  Peptide Sequence Number=SeqID_77981
atgccggtcgtgctccgcctcgtgaagcggctcggcgccaaggtggtggtgtccgtggaccgcggctgcgaccgcacggagctgtcgttcgccacgcacctgttacaggcgttccagtcctgcgtgtcctgcttgactccgtcgacgccgtggggggcgcggacgccgatgcgcgcgctctgcctctactag

SEQ ID NO: 36203 - DNA, 1007 bp, Zea mays
  Peptide Sequence Number=SeqID_77982
atgccgttcgcgccgaccatggaggacgccaagccgccgaagcgaccccacccgatggccggcgcgccaacgccgaagctgccgtctttccctgggcctgtcgcccaggcgggtggcgggttcgcgtccgccttgaagcccaaggcgaaggcgggtaacgacgaggcggccgctgcggtggaccagcttgccgagggcccgaggccggcgacgccttcggcgcccgcgagatattggcgcggctcaattatcggctccccgccatccccatggccgggacgccactgctccgctcagccttctacttcaaggaggccctgcgcgttgcgctctccccgaccggcgaggccctggcgcccccgcgcggtgttgacgtcgtacgacgtggtcctgaagctcggcgcgtacaaggtcttctccgaggtgtcccccatgctccagttcgcgcaccccacctgcgtgcaggcggtgctggacgagctcgacgtgttcctccagttcgcggcgtacaacgaggacgccctggacgccgcggagctggtggccatcaccagcggcgacgccgtggccgtacacctccccgtggggtcggcccacgtggccgcaatgccggccgtgctccgcctcgtgaagcggctcggcgccaaggtggtggtgttcgtggaccgcggctgcgacagcacggagctgccgttcgccacgcacctgttacaggcgttccagtcctgcgtgtccctgctgcgtgtccctgctggactccgtcgacgccgtggggggggagcgaacgccgaggcggtcggcaagatcgagcggttgatggacaagccgccaccgctgccgtggcggaccatgctcgcgtcggcggggttcgtgctggtgcaggccagcacgttcgccgagtcgcaggccgaggccctactcaagcggatagcgctgatggagttccgcgtggagaagcgcggcgagctggtctccatgtcgggcgtggcagtgctgaccgtcggagg

SEQ ID NO: 36204 - DNA, 390 bp, Zea mays
  Peptide Sequence Number=SeqID_77983
atgccggccgtgctccgcctcgtgaagcggctcggcgccaaggtggtggtgttcgtggaccgcggctgcgacagcacggagctgccgttcgccacgcacctgttacaggcgttccagtcctgcgtgtccctgctgcgtgtccctgctggactccgtcgacgccgtggggggggagcgaacgccgaggcggtcggcaagatcgagcggttgatggacaagccgccaccgctgccgtggcggaccatgctcgcgtcggcggggttcgtgctggtgcaggccagcacgttcgccgagtcgcaggccgaggccctactcaagcggatagcgctgatggagttccgcgtggagaagcgcggcgagctggtctccatgtcggcgtggcagtgctga

SEQ ID NO: 36205 - DNA, 324 bp, Zea mays
  Peptide Sequence Number=SeqID_77984
atggaggacgccgctgcagggatgccgagcgccgggagcagagggccggctggagcacagggagtttggactccatggctgttggccgagctcccagcaatggggtccagggaggagggcacgtgcgccatggggtctggccaccgagcgtcgagccaagggagcaagggcgccgaccaggaacctgcaggggaaagatgccacaagggaggcagccatgagaggcccttgcttcgtggggaaggagctgatgccctggtgttcaaccgtgtaggagaaggaggaaagaggagggctggtttgggcggctgggggtgggaatga

SEQ ID NO: 36206 - DNA, 312 bp, Zea mays
  Peptide Sequence Number=SeqID_77985
atggaggacgccgctgcagggatgccgagcgccgggagcagagggccggctggagcacagggagtttggactccatggctgttggccgagctcccagcaatggggtccagggaggagggcacgtgcgccatggggtctggccaccgagcgtcgagccaagggagcaagggcgccgaccaggaacctgcaggggaaagatgccacaagggaggcagccatgagaggcccttgcttcgtggggaaggagctgatgccctggtgttcaaccgtgtaggagaaggaggaaagaggagggctggtttgggcggctag

SEQ ID NO: 36207 - DNA, 393 bp, Zea mays
  Peptide Sequence Number=SeqID_77986
atggctgctggaggcgccgagctggaaaggggccgacattggaggaggccgacggcgccggggaagacgagccaccggagcaaacagggatgtcgcgccatggaggaaaaagaccctgctccctgcgcgctgcttcatggaatggggagcgcgagcagaggaggccggctggagcacagggagtttggactccatggctgttggtcgagctcccagcaatggggtccagggaggagggcacgtgcgccatggggtctggccaccgagcgtcgagccaagggagcaagggcgccgaccaggaacctgcaggggaaagatgccacaagggaggcagccatgagaggcccttgcttcgtggggaaggagctgacgccctggtgttcaaccgtgtag

SEQ ID NO: 36208 - DNA, 618 bp, Zea mays
  Peptide Sequence Number=SeqID_77987
atggatgggagaggctcgaccgtggatctccagccatggcgagcagagcatgtcgcgcagggagcaaaggcgagcgctatggctgccagcggccgagagcaaaaggaaaaaaatggagcagggaggggcgctgcttggggctcggctgggggattttctgggcgccctggctgggagcagggaggagcaagacgccggctggagatgttggattggtggccggcgttggaggaggccgacggcgccggggaagacgagccaccggagcaaatagggatgtcgcgccatggaggaaaaagaccctgctccctgcgcgctgcttcatggaatggggagcgcgagcagaggaggccggctggagcacagggagtttggactccatggctgttggccgagctcccagcaatggggtccagggaggagggcacgtgcgccatggggtctggccaccgagcgtcgagccaagggagcaagggcgccgaccaggaacctgcaggggaaagatgccacaagggaggcagccatgaggggcccttgcttcgtggggaaggagctgacgccctggtgttcaaccatgtaggagaaggaggaaagaggagggctggtttgggcggctag

SEQ ID NO: 36209 - DNA, 468 bp, Zea mays
  Peptide Sequence Number=SeqID_77988
atggagcagggaggggcgctgcttggggctcggctgggggattttctgggcgccctggctgggagcagggaggagcaagacgccggctggagatggtggattggtggccggcgttggaggaggccaacggcgccggggaagacgagccaccggagcaaacagggatgtcgcgccatggaggaaaaagaccctgctccctgcgcgctgcttcatggaatggggagcgcgagcagaggaggccggctggagcacagggagtttggactccatggctgttggccgagctcccagcaatggggtccagggaggagggcacgtgcgccatggggtctggccaccgagcgtcgagccaagggagcaagggcgccgaccaggaacctgcaggggaaagatgccacaagggaggcagccatgaggggcccttgcttcgtggggaaggagctgacgccctggtgttcaaccgtgtag

SEQ ID NO: 36210 - DNA, 342 bp, Zea mays
  Peptide Sequence Number=SeqID_77989
atggcgagcagagcgtgccgcgcagggagcaaaggcgagcgctatggctgccagtggccgagagcaaaaggaaagaaaaaaaatggagcagggaggggcgctgcttggggctcggcgggaggattttctggacgccatggctgggagcaggggggcgccagcttgctgctcgccacggagagagggggcgcttgggaagctgcagggggccgacggccatggaggagcctgacggcgccggggaagacgagcatccggagcaagcaggggcgagctcaaggtgctcctggcctgggcgtttcctggccgggcagtgaagagcaggggacgccatgggcatag

SEQ ID NO: 36211 - DNA, 621 bp, Zea mays
  Peptide Sequence Number=SeqID_77990
atgagttatacatcgactgttcatgtttggcggtttttgatggagccagccgtattgaaccgtgaaagagttgcattggacaagaaaaataggatgcctgtgttgttcgacgactatagcgatgacgatttttatggggtacaacggaagtatagtattgtcgctcgagttgaagttaaattcccgattgaaccacgttatcgtgacaggcaacattatattttgtctgacatcaatggagccaagatcgaggccattgcaaatcggtatgagatagtcaaatacttcaacagtttgctccatgaaaagcatgtctacaagatgcacaacgtatggtttggtcttaatccgggtgcatttaattttcgacatctaaatggtaccatggagttgtatttcacccaccaaactatcgtagagccatacgctgtcccagttcaaatgccgccatttccaaagcatatattcttgaaccttgatgatattgccgagctgccaaacaggactttagttgacattatggctattgtagtccaattggatacaatccatcgcacaatgtggggtacatttaggaggattgttatacaggataattggtacaatccattaatatattag

SEQ ID NO: 36212 - DNA, 807 bp, Zea mays
  Peptide Sequence Number=SeqID_77991
atggatgattcgacacaacccggttcaactatagagatcaacaacactgttgatgacgatgatgagggtgtcatattcggagaggataatgatgagaacgagggatatctattcgctggtaaatgtactaatttcttttccaaaaaaatatcaaatgaggacactaacgaggacttcgagataggtggtactcaagatcaatctgttgtcactgatgtgcctgacccgtacgacaaggtctacagtaacatccctgaagaaacacatatgctgaagcatgttcccgactgtggttattgcactgcgaagaagtttgagtatgagccgcctgggttttgctgtcgaggtgggaaggttgagctagccccactagagacccctccccagctcaggaggttgtgggatagtgcagactctaatgctaggcactttcgtgataacatctggttttttaatggccatttttctttcacttccctgtactgttgcctcgacagtatgacaactaatatgagggattctggtatatacacattccgtgcacaaggcatgatgtaccataatatcaagtcattcggtagtgaatgtggggcagagcataaacacctggagctttacttttacgatgatgatcccagtctcgagcatcgataccgtaagtgtcgtgaagatcagattcagaaagaccaagaggttattaaacaaatagttggcatacttcgtggaaatccgtactctgagcaccttaggagcatgggtcatgttgagaaccttgctgactatcacatcgcattgaaccttgactag

SEQ ID NO: 36213 - DNA, 292 bp, Zea mays
  Peptide Sequence Number=SeqID_77992
actgtccagtgagccaacgatcggccgggccaccagccgccgcgccatctgccgccgcaacgccctcccacccgccctctccaactccagatgcattcactcggctcgaagagaagtgggatcaattcgttgtgatgttccaccgctacaaggagaagacagagaaggaactccaagcagcggtgcggcttcaggcggcagcgggagggttcctgacacgccgccaggtacagtcccttcgtggggagaagcaccttgctgtggcctccagggccaccctgagagcacctag

SEQ ID NO: 36214 - DNA, 663 bp, Zea mays
  Peptide Sequence Number=SeqID_77993
atgaagcagagcctctcgcatgctgacaacacctcccttgagaccacgcccatcgacataagggttcttaggcttcaccagtgctcctccgcacaacatatgggccactccacttctccaggttatcctcaccaccaccagccgccgcaacgtcctcccaaggactacactgctatctccctggaccgaaggtccatgacacctggtatcagctccaggttatcctcaccaccaccagccgccgcaacgtcctcccacccgccctctccaactccagatgtattcactcggctcgaagagagttttggccgtttcgcagagaagtgggatcagttcgttgtgatgttccaccgctacaaggagaagacagagaaggaactccaagcagcggtgcggcttcaggtggcagcgcgagggttcctggcacgccgccaggtacagtcccttcgtggggagaagcaccttgttgtggcctccagggccaccacatggccgtcatcacatgagcaggccgtggtgcgcctgcaagccgcagtgcgcggcttccttgttaggcgggcggtgcggaagctgcacttgctgatcagctcatcgctgcaccaactcgcagcctgcgcgcccaaccaccaggtctcgtctatactttttgaaccccctgcataa

SEQ ID NO: 36215 - DNA, 846 bp, Zea mays
  Peptide Sequence Number=SeqID_77994
atgacacctggtatcaaagccaggttatcctcaccaccaccagccgccgcaacgccctcccacccgccctctccaactccagatgcattcactcggcttgaagagaagtgggatcaattcgttgtgatgttccaccgctacaaggagaagacagagaaggaactccaagcagcggtgcggcttcaggcggcagcgcgagggttcctggcacgccgccaggtacagtcccttcgtggggagaagcaccttgttgtggcctccagggccaccccatggccgtcatcacatgagcaggtcgtggtgcgcctgcaagccgcagtgcgcggcttccttgttaggcgggcggtgcggaagctgcacttgctgatcagctcatcgctgcaccaactcgcagcctgcgcgcccaaccaacaggtctcgtctatactttttgaaccccctgcagaagtcgagatctgggtatgcagcccccctgcacggccaaagagggtcgtctccttcattcgggcaactgccttggtgctggacagacccaacataagaacgggctggttcctccttcacctttcatccaacgtgaagtccgtagttcagctctttccttgggatccaggaggacaggaggacatagctgcagttcaaatttatattttagttccacaattattttgtattttcgtcttaaataataaaggtaagccgagatgtaaaatgcttaaccttaagtcgtgtcaggtaagtctatggcaactcgaggacgagctggtcctcaagggagggggagatgtcatgggcataatagggagcgagaagcaacagccaggctgggataaggctagagaataa

SEQ ID NO: 36216 - DNA, 270 bp, Zea mays
  Peptide Sequence Number=SeqID_77995
atgtggcataacaaagcattaccaaaagggaaatcgaagttagaccaaatggtgttcatgcaaataaaaaaatacagggcaagaaccgaaggagcgagcaggatcacagtgagctatgggaagggtccagacctcaagggcttgcagcagcacgggccgctgacggtcctccacaccgacatggacgaggaagggagcttcgactccgttgtcgtccgctacgactacgcatccctcaatgggcttgcagcacattcttccttcggttag

SEQ ID NO: 36217 - DNA, 105 bp, Zea mays
  Peptide Sequence Number=SeqID_77996
atggacgaggaagggagcttcgacgccgttgtcgtccgctgcgactacgccttcctcaatgggcttgcagcacattcttccttcgtctctagatgtttgttctaa

SEQ ID NO: 36218 - DNA, 588 bp, Zea mays
  Peptide Sequence Number=SeqID_77997
atggctgcaacggtgtatgccctgtcaatagcatcagcggtaatagctgattggagaaggagaaagcgttttgggctggacataactctaaggtgggtggtggaggaggaggagagcaagggaggacgacgaggctgcctggcggagccacgaggggaaggtgagcgtcacctgcaaggacacaaccttggtgagactgccaccatgagcgtgccccacggccgccaccaggatctcgagctcgccgtcgatgactttgacgaggagttgatcgaccctgagctacgcttctcgttccagcgcaacagcaaggtttgtggagtggacttgactgacaaagtagtggacataattttccatgtatttgatgctaactgtgatggaagaatgtgctgcaagcccattgaggaaggcgtagtcgcagcggacgacaacggcgtcgaagctcccttcctcgtccatgtcggtgtggaggaccgtcagcggcccgtgctgctgcaagcccttgaggtccggacccttcccatagctcactgtgatcctgctcgctccttcggttcttgccctgtattttttttatttgcatga

SEQ ID NO: 36219 - DNA, 366 bp, Zea mays
  Peptide Sequence Number=SeqID_77998
atggagctcctgcgcgcggggaagaaaaagctccctgctgctgacgtcgtggataagggggcgctcccatgggggccctgctcccgcgatggtgtgctgctgcatcccagggagccgagggggaagaatggcgctgttgctgggtggccatggttggagcagagagacccgcgcccatggagcagggagggcgtcgctggtggctgttgctgccgtgaagaagaagaggcagggaagaaagaaggtggcggctgggaaaaatggaggggtgggagtgcaaaattgccaagggcaagggaaggggtccatatttatagagaaaccctagggttagggttccctagtgggccaaatgagccgagttag

SEQ ID NO: 36220 - DNA, 330 bp, Zea mays
  Peptide Sequence Number=SeqID_77999
atggagctcctgcgcgcggggaagaaaaagctccctgctgctgacgtcgtggataagggggcgctcccatgggggccctgctcccgcgatggtgtgctgctgcatcccagggagccgagggggaagaatggcgctgttgctgggtggccatggttggagcagagagacccgcgcccatggagcagggagggcgtcgctggtggctgttgctgccgtgaagaagaagaggcagggaagaaagaaggtggcggctgggaaaaatgggggggtgggagtgcaaaattgccaagggcaagggattggggtcttttatttatagagaaaccctag

SEQ ID NO: 36221 - DNA, 366 bp, Zea mays
  Peptide Sequence Number=SeqID_78000
atggagctcctgcgcgcggggaagaaaaagctccctgctgccgacgtcgtggataagggggcgctcccatgggggccctgctcccgcgatggtgtgctgctgcatcccagggagccgagggggaagaatggcgctgttgctgggtggccatggttggagcagagagacccgcgcccatggagcagggagggcgtcgctggtggctgttgctgccgtgaagaagaagaggcagggaagaaagaaggtggcggctgggaaaaatggaggggtgggagtgcaaaattgccaagggcaagggaaggggtccatatttatagagaaaccctagggttagggttccctagtgggccaaatgagccgagttag

SEQ ID NO: 36222 - DNA, 441 bp, Zea mays
  Peptide Sequence Number=SeqID_78001
atgcacaacatcgaccaaggcttaaatagattaatccacaaaataccaagtgaacaacctggacgaatcgaggctagtaacatgggctgtccacaaggcttggcgtttcgtcgaatgggccaagcgcgaagcgcggcgtcgaccactagcgagggtcgacggcatagcggacggggctgtgcacaacacattatttctcacgggggagaaaaaggctccctgctcttaacgcagtggagaagagggggcgttgggcagaggaagaagaagggcttgggcgccatggctgaggagcttcagcgcgccgaggaaggagcaggcgcggtggagagagcctgcagagctgcgaccgagcagaggcattggggcctgggtgagctcggccatggagctcctgcgcacggggaagaaaaagctccctgctgccgacgtcgtggataa

SEQ ID NO: 36223 - DNA, 744 bp, Zea mays
  Peptide Sequence Number=SeqID_78002
atgcagtacaatggatcaagcagtctcattagctgcgagaagcagacgattcgaatcgagtttttatccttgcaagtgaccgcacttgtacccaccataaccggaatgggagaccacgtctcaggtcgcgtgaggggtaaagtccactgccaggttcaatcaggtagtgtttgctgggggagcatgattaaacacttagcaaggtcaaaaggtgttaacacaacagcgctgtccagatttggacagattcagacttatgactttaaaaattcattactgaagattcaggcatccaaacaagatgatcctagactttctggaaaggcttggcgtttcgtcgaatgggccaagcgcgaagcgcggcgtcgaccactagcgagggtcgacggcatagcggacggggctgtgcacaacacattatttctcacgggtattccgtcgaacagccaaggggcattgaagagaacagcaagggcgctcagctatgggagggaagcaggggcgccatggaggttgctgccgctgcttggtgttttgaagggtgggctgttgttcttccctgcgcttgaggggtttcctgcgcacgagcagagagggagggaggtgccatggctgccacagagggcgtcggccaagggaactgctccctgcgcgcaggggagaaaaaggctccctgctcttaacgcagtggagaagagggggcgttgggcagaggaagaagaagggcttgggcgccatggctga

SEQ ID NO: 36224 - DNA, 1158 bp, Zea mays
  Peptide Sequence Number=SeqID_78003
atggagaaggcttcgattgccgcagatagagctgtcgctgttgctagacgtgctgaactgttccatcgtttgcggtgctcctattgcgactacggggatgtgggaccgcccccgcccccgaaaaccacgcgcctgctccatggcagcccgaccccggccgccgcaaaccccgctgcgccgcaaaccgcccgctcgaccccggccgctgcaaaccccgcccgactccggccgccgcaaaccacgcgcctgctccacggcagcccgaccccgaccgccgcaaaccccgctgcgccgcaaaccgcccgctcgaccccggccgctgcaaaccccgcccgactccggccgccgcaaaccctgccgcaccgcaaaccgccgcgcccgcaaacccaccgcacaaagtctgcgcccgatgccctgcaaaccccgcaaaccaagccgcgagttcccgtgcccaaggagggtcttgcgatggtgaacagcacggccgtgggctccggtctcgcctccactgtgctcttcgaggctaacatccttgccatcctcgctgaggtcctgtccgctgtgttctgcgaggtcatgaacggcaagccggagtacatcgaccacctgacccacaagctcaagcaccacccgggacatatcgaggctgctgccatcatggagcacatcttggagggcaactccttcatgaagcttgccaagaagctcggcgagctcgaccccttgatgaagcccaagcaggaccaaagcaagaccaacttacagcaaataggtctcaagggaaaagcaaaatcaccgaaacaaccatataactcttttaagcatgcaccagctcctgaaggtgtgctaatcagggctcagtggtgggaacaaaaaatggtctacaagcatttggccacactatactttgtttttgtctttgatagctctgagaatgagcttgccatgctcgacctcgtacaagagatggaggagtctggattcgccatcaccagcatcaatggaaggatcaacatggctgtttgggggccactaaacaggaccatcgtcactgctagggtggatgctaccattcgcatatgggactcagaggttaggataacatggtattatgtccctacaaatagtattgatggccgctataatttggttatctag

SEQ ID NO: 36225 - DNA, 420 bp, Zea mays
  Peptide Sequence Number=SeqID_78004
atggaggagtctggattcgccatcaccagcatcaatggaaggatcaacatggctgtttgggggccactaaacaggaccatcgtcactgctagggtggatgctaccattcgcatatgggactcagaggaggcccaggaggatgaggagcgagaacgggtgtgccagaagcaaggccaccagcgcgaaggcaaccatggtggcgtagttgacgcagaattggattttgggaaaaagcttccatcattcttcttcattcaaaagaggatggctttttcagatgatggaaagatgaagccaaacctttttcggacaaggggtaacaggcgtattgccatgaccaacaatggtgcagagaagaaaaacaagaggagcagcaacgggcgatgcgctaaggtgggggcaattgaacaatctgaatga

SEQ ID NO: 36226 - DNA, 420 bp, Zea mays
  Peptide Sequence Number=SeqID_78005
atggaggagtctggattcgccatcaccagcatcaatggaaggatcaacatggctgtttgggggccactaaacaggaccatcgtcactgctagggtggatgctaccattcacatatgggactcagaggaggcccaggaggatgaggagcgagaacgggtgtgccagaagcaaggccaccagcgcgaaggcaaccatggtggcgtagttgacgcagaattggattttgggaaaaagcttccatcattcttcttcattcaaaagaggatggctttttcagatgatggaaagatgaagccaaacctttttcggacaaggggtaacaggcgtattgccatgaccaacaatggtgcagagaagaaaaacaagaggagcagcaacgggcgatgcgctaaggtgggggcaattgaacaatctgaatga

SEQ ID NO: 36227 - DNA, 381 bp, Zea mays
  Peptide Sequence Number=SeqID_78006
atgggagagaaagaatgtgtgggacgtggagttatcaaactctcgtccattatcgcactgaatagcctaaatgctgcaatccatagagagaaaaatactgtagaagccgcagccgcagccggattgcagccgcagcaagccgcagcgaacaagctgattgtttttaaggtgctctcagtcgcggggacaaggaatggtcgaagtggcagagagttgagagaggacatcgtggacagggtggccaagacgatggtgccaagtggaggtaggaacaatggaggcaagggcttagggtgggacaacatgagcggaggaaggtggagtggggaagcaaatgggttagaggggctgaagccatcgcatccagcaaccacaacatga

SEQ ID NO: 36228 - DNA, 825 bp, Zea mays
  Peptide Sequence Number=SeqID_78007
atggcacttttgaccggaggttttggaatctgcatcctgcgacgcaacgccaacgcggggacggcgggacgggagacgttgagcgcttggagccagccgtccaggactccaggtcccgccgtgggctgctacagttcgcgttcgtgcgtgcgcacagggaaaggaccttgcgcttgcggggggtggcaggcgcgcagtgaatgtgcctgccacaagtaccaggacctgcaccagcaagcgctttcgggcgtgttcggctggctgcaagccgacactgttgcagctgtttggattgctgcagctgcaatccatagagagaaaaatactgtagaagccgcagccgcagccagattgcagccgcagcaagccgcagcgaacaagctgttctttcattcattcaaccagtggtcgtcacactgcccgtctgtctgtccctcaccctgccctgcaggctgcagtctttctgaccgccccttccggctcagccgctgcatgtgctgctgggcagggtcgccatgccgcagacagcgctacaaagcgagaggcaggcaggcagggggcagtgcgatggggaacgagaacgactcgagaaagaccgccgacgccgtggcccgtgaccgtgctaccccaccttacgtcgccctggcgagcccggcggaaggcgacgaagaccgcggatcctctgcggtagggggtgtcagctgtggcctgtggtgggcatacaccggcacgcacagacgatgggacaatgggtgcctcgtggtcctcgggcataggtcctggacatcaaacccgccggagcggccaatggctgaatgccgctga

SEQ ID NO: 36229 - DNA, 423 bp, Zea mays
  Peptide Sequence Number=SeqID_78008
atgggcgtgttcggttggctgcaagccgacactgttgcagctgtttggactgctgcagctgcaatccatagagagaaaaatactgtagaagccgcagccgcagccggattgcagccgcagcaagccgcagcgaacaagctgaatgatagtttgagccaactaaagtatcaccgagggatggtgctctttgcgttgattccaactaatttaggtgaccccggatacccggcgtcccggcttatggttggtgctgaaaatgtaggtttccgccgccactcaccaaccaattatgctgtcagcggctcaaccctttctctgaatataatagtactagtactaaagaaaaatgctcttcggtcgatacagagtgttggcgttctcttctgttgcccttgttattctggtccgtttcggtcaatgtaa

SEQ ID NO: 36230 - DNA, 693 bp, Zea mays
  Peptide Sequence Number=SeqID_78009
atggcgatcgagtggcgacggggagctaaaagaagggacgaagcgtgctggaaccagttgatgtcatcagagttgactgtcgccgtcgacgacgacgggagaggaggatgtcaggctcgctcgtctcgtctcggtctcggtctcggtctcgtccaagtccaaccaacctctgcgcgagcaagagacaaagggcgaaccgatttacagacaaaccaatataatggagagagatggatctgctctgtctgtgtctgtctcaaaaggccaagatctgtcttcgctgcggctgcaatccggctgcggctgcggcttctacaatatttgtctctctatggattgcagttgcagcaatccaaacagctgcaacagtgtcggcttgtagccagccgaacacgcccaaagtcgtctgttagaggcaagcggatgccacgccgacggtttccgcttgtcttgtcttgcctctcaacaagtctcaacgctgaccgcgcgccccctctgtcagtcgcgcggctcggcagcagctgttcagaaaccaggacggccgggcactggacgacgcttcgcttgctgcttggcatccaggtcctgccatccacaccacaccgccactcacgcgaaacctgcctgcctgcgcggcgcctctggatcgtctggactgtggagaaggtggatccagagccggaggtcgcctag

SEQ ID NO: 36231 - DNA, 390 bp, Zea mays
  Peptide Sequence Number=SeqID_78010
atggagaggctcaccggcggcagtagcattccgacgaagggtctggtgaggttggggaggtcacggcgaactcttcgatggtcggctcgtcgtcggtggtactcagaggcgttcgggccacctgcagcaatccaaacagctgcaacagtgtcggcttgtagccagccgaacacgcccagagttgtgggctccgaccagtggctgagttcgggcgaaggccttcgtctgatgccgtatcaagcgaagggtatccctgcccgttttgtctccgtcggaccagcgactgcagcggaggcctcgagcgaagggtggcgtctttgccttcgccccaacatttgccctccgagggaccagttcgacaaagtcacctggtgtcgaagacgtcgctag

SEQ ID NO: 36232 - DNA, 2214 bp, Zea mays
  Peptide Sequence Number=SeqID_78011
atggactggtctgaggaggggatcgacgaggaggagtccacgctgcgcaggcggacggcgaggccgcgttctcctccaggcggtcgacccttgcctcccccgcgatcaccgggatcgaggtcgccttctcctcaccgcggcggtctggcggcctcctcagggttgaggtcgccctcgccgcgccgcgtcacaataatggcgacgaggatgggcagctctgtgcggacgatccggcgatctccaacgccaagaaggtccggcgccgatgctcccgcgagcgacggtgtggatggcaccggcgtcaaggagatcatcgccaagatgagggaggggtttcccactctcgaatcgtgggatggcgccgacacgggcgactctggtcccggaggaggagagggaggtggggcggacgaggaggagccgcaggtggaccagagctccgtcgctttctcgttccaggagctcgtggctccgctggtcgtcgatggggcggaggttattgacgccttcgtcggctccgatgaggcgaggacgggcaaggccgcggccgagcttctggacgcaaccatgggcgccaacaccgggcccaggaccgaagcgatcaagactgagctcctcgtcaaccggcggctgctcgacctcgcggggctggagcggtggatgcggacggtggaggcggtctccgagctcgagtggttcacgggcctctgctgcgacgagaacagcccgccaccgcatatcgacctcttcgagtgcgcgttccgggccctggagaacgcgtcggacgtcgagctccaccacggcgccgacgccaggaagcgctggatcggcccagtgggcgtgccggagttcttcatctgccccatctccaacaaggtcatggagaaccccgtcgtcatcgcctccggaaagacagttgatcgctcagctctggagaaatggcagaagaagaacgggcgcatctgtcccgtcactggcgagcttgtcccgtacaccatgttcatccccaacgtcttcatcaagctctgcatcgagcattggcgtgcagaaaataagattgcatgcgtgacgacggcagccaccaatccacctcacatttccaacgagttgcaagtcctgatcgggcaagccaccctaatgcctcactcccccggaagctccaaagaggtccggaagtcgctttttctgctccacaaggtcctcgccgacaaggagagcgcagtcgtacacctgatcggctgccgccccgggacgatcgcgaagctcgtcaccgtcctgccggagacctgcctggaccctgaccccgaactggaggacgtcatcctgaggatcttggagaaagcggcttcctacgggcccaacaaggcggtgttcggggacgaccagtacgccttgcccgtgctgatcgcaaggacattgctgggtccagcgcccatgcgagcgaggtgtgctcgcatcctcgggctgctggccgacgaccactacaacaagatcaagatcggcgagctcggaggcttcgccccgctggtcgagctgctctacgtcggagacaaaggcgccaagaagaccgcggcgaaggttattggcagcctctgcgaggcccaggagaaccagagcaagttcctgaaggagggagtggtggacgccgccatatccgcgctgcggagcgacgggctggtggaggaggcccaggacatcctgctgcggatttccggctcttctgtcgccttcggggaggcctacttgaagctcgaatcgattaaggacgacgacttgtgccagaagacgagtgtgctcctttggaaaactttcgttttaatgaatggagaagacaagcacgacgccggttgttccatgacggcctcgaagagtgcttggggtgagagctcttctacatcgtcagacgctgcgatgtcttccacgtcctccgacagttctgcagacgagcgtgcgttgagaaagcagaactgggaagatgccaagatcatcgcctcatggctgcagaagaggtgctccttccccaatacgtacagatcagctgagggcgtgttcggctggctacaagccgacactgttgcagctgtttggattgctgcagctgcaatccatagagagaaaaatactgtagaagccgcagccgcagccggattgcagccgcagcaagccgcagcgaacaagctgttagattcgaatgcggttgctgagatgatgtga

SEQ ID NO: 36233 - DNA, 216 bp, Zea mays
  Peptide Sequence Number=SeqID_78012
atgggtgcggcgggagcaggtagatcaagcgaggtcgaagtcgaggtcgagggcggcgccgaggcagggaggacgggcgaggaagagccgagcgggagcgagggcgggcgcccatgcgtgagcagtgggggatccagagaagctggcatggatggcgtcggatggttgaggagtattgcggtgcgtgcagcggaggatgcggggaatagattatag

SEQ ID NO: 36234 - DNA, 381 bp, Zea mays
  Peptide Sequence Number=SeqID_78013
atgggcgcggcgggagcaggcagatcaagcgaggtcgagggcagcgccgaggcagggaggacaggcggggaagagccgagcgggagcgagggcgggcgcccatgcgcgagcagtgggggatccagagaagctggcatggatggcgtcggatggttgaggagtattgcggtgcgtgcggcggaggatgcggggtacaccgagacgggcgtcacaggcgggcgggtgggatgtgacaaggcgtgcgaagaggagaggtgtgcattacacggacagtggtcgatgacgaaagtgaatatcatgcgggttcgtgccgatgggccaggagcggcgaaggacgggcactgtgccttgatcgaggagctgaagaagttaggtgactag

SEQ ID NO: 36235 - DNA, 210 bp, Zea mays
  Peptide Sequence Number=SeqID_78014
atgtggtccaactgcatgaggtcaattctggaaggagaggatgaagctaggatatattttcgtcaacttataaatgcagttgattattgccataaccgaggagtgtaccatagagacctgaagtcagagaatttgcttctggattcaaatggagctcttaaagtttcagacttcggcctatgtgcatttgcaccacaaacaaatgtatga

SEQ ID NO: 36236 - DNA, 429 bp, Zea mays
  Peptide Sequence Number=SeqID_78015
atggacagggatctcacggacaacgatgaactggtgtgcaagaagacagccaagtggtcgtcgtccggagtggcgcccaaagattatgcacctatggtggattctcttttgcgtcatctccttccttcatcttatgcattttttgcatcaatgtccatcaagtccaagtcttgcccttcaatatgtaatatcaagcgggagatttcgactatgaagctgatcaaacatcccaatgtggtccaattgcatgaggttatggcgagcagaacaaagatatacatggttcttgaatttgttgatggaggcgagctattcgataggatcccagagaatttgcttctggattcaaatggagctcttaaagtttcagacttcggcctaagtgcatttgcatcacaaacaaatgtacgatctctagtcagtagctag

SEQ ID NO: 36237 - DNA, 438 bp, Zea mays
  Peptide Sequence Number=SeqID_78016
atggcatttcctgctaaggcgtcgcagcagggacgacgccacagctctcgcatcttcatccggggtgcttcaaatcgcaaaggacaaatcatctgtggccaacttgacaaagcacaaggtccatcgctctgtgaccagcaagttcattcatttatttgtttgtttgttcgttcttgtgtggacaggagcaaaccggagatcaagcgggagatttcgactatgaagctgatcaaacatcccaatgtggtccaattgcatgaggttatggcgagcagaacgaagatatacatggttcttgaatttgttgatggaggcgagctattcgataagatccaagagaatttgcttctggattcaaatggagctcttaaagttttagactttggcctaagtgcatttgcaccacaaacaaatgtacgatctctagtcagtagctag

SEQ ID NO: 36238 - DNA, 1566 bp, Zea mays
  Peptide Sequence Number=SeqID_78017
atggggggctcggagcccggttccttcgtggagaaggatccctttcggggtatccccctttcccggtccctgttgcaagagatagagaaagaggaaaacggaaaaaggatacgaaatcggacgacgtggcgtaccttttctgacgcgtttattacggcgaagcaactggcgcgccggttgctcgacgcgtgggcctgggttcccaagctggcgtgtcagaagtcggagaagcgcgtccatctggcgcggttgcatgccgcctgcatggctgcccgccccttctgcccgttggtctgggcgaaaatggggggtcgcctgaacgcaactccatgggagttggtacctctcagccatcgttcggcttcaaggattttcatcacgcagcccggtcgcaccccttcaccggcggtcacccgagatggcgacctccagcttgatggtgggggaaagcgagccgggctgcggcctctgccccttcctcagcctcaaggattttcatcaccaaggctggggaggggagagtgccgagttggggtcggcccctgcgtgggcggtggcccgctccttcactcagtgatggggggagaagcgggcattgcccgtggcgtccggcagctgcagcgtgcctggtcttcagccgcgagtggcttcggggccacttgcggcgtcggcgtctgccacggcagctggaagaggttcttccgccggcgcggcggccgggaccggccacgggctgacctccaacttctacggccttctgcccgtccttgcctcacgagttttggcatgggcgggggcctcctggcagcggcatccatcctgaggtcagcgttgccgctgttcggccccccggagcagaagtcgtcgtcgtcgccgctgctggagcaggtgacggcgtgccgttcgtcggccttccgttgctccgcaggccttccccctcggagtggggttgttcgtacctgcggagggggaaccggagttccgtttgtaatggcacttcgaatgccagaatccctcggcccgttcggccttgttgtctggggctcctctagcttagttgaagagacccctcggccgcccttcggtggaccgaggccagggccgacgccaaagtcgatcagtcgatgcctcgggttggactggcgcccttggaagccggttgaccgaggccccaggggtaaccggttgagccgcctgctcgggccggattcccggaggagtccctggagcgcggcgccgcccgaggctgggtcgggctttgctgaagacgtcgtcgatgccgagggtgctacggctcccttcagcgtgaagacccgagcctgcaggatcagatcatcttgtagcgtgtgctttctgcggccgccgaggccagaagaacacaccctcgccgcgcttgcgaagctacgtcttttttcctcttgtttcgagcatctgcactctgtcggtaacagggacaaggtgatgagtgaggtatccgtatcccggaggcgtaggagtccctcggctcggtcagccttggctgcttacgtgtacctcgtcgtttccaggatccgctttccgaagtag

SEQ ID NO: 36239 - DNA, 321 bp, Zea mays
  Peptide Sequence Number=SeqID_78018
atggggggctcggagcccggttccttcgcggagaaggatccctttcggggtatccccctttcccggtccctgttgcaagagatagagaaagaggaaaaacggaaaaggatacgaaatcggacgacgtggcgtaccttttctgacgcggttattacggcgaagcaactggcgcgccggttgctcgacgcgtgggcctgggttcccaagctggcgtgtcagaagtcggagaagcgcgtccatctggcgcggttgcatgccgcctgcatggctgcccgccccttctgcccgttggtctgggcgaaaatggggggtcgcctgtaa

SEQ ID NO: 36240 - DNA, 462 bp, Zea mays
  Peptide Sequence Number=SeqID_78019
atggcaggaatgtactgcaacgcccgcgactgcctcaacaagagaatgcagccgccggcccgcaccgctgcatggatcctcctctcccccgtcgacaaggcgaaaggctcggcgagaaagaagaggagcgcgcgacgcttcaccttcgccgtaataaccgcgtcagaaaaggtacgccacgtcgtccgatttcgtatccttttccgttttcctctttctctatctcttgcaacagggaccgggaaagggggataccccgaaagggatccttctccgcgaaggaaccgggctccgagccccccgctactgatcaggggttcgaaggctggccctccgaagggttcaacagtcgcctcagatcgcgtgggcccgacacccactactggtcaggggttcgaaggccagccccccgaagggctccatggccgcctcaggctactcgggctccgcgcccattactga

SEQ ID NO: 36241 - DNA, 555 bp, Zea mays
  Peptide Sequence Number=SeqID_78020
atgcaagaatgtctctcggaatcccatgcatggatagtaaatgagaaagaggctgctaagttagcgattgaacaggcaccaccaaagatagtagaagtgccggttattgacaatgcaaaacttgaggagttgacaacccaaaataaagaacttgagatccaccaaatttgtctcaaggaggaactaagtacgtttaaacagaaggctgaggatcttgaaaataagcttattgagttccaaaaacagtctgatgaactgtcacaggagacacaagaacaagcattccaagttattcaacttcaagagctggtcgaaagattggaaagcaagatcgccaccttggagtcagagatcgagttgctccacaacaattctgcactagctattcaggccgtggttactcctgaaatgaatcagacaacaataattgaggaatttgacaagggacaccagcttgaagaagttaaaacggtcaataaaatggccatcggtgtccctaaaaagcggaatgacaaatggatggctaatcagcttttgaagctacatctggagtaa

SEQ ID NO: 36242 - DNA, 879 bp, Zea mays
  Peptide Sequence Number=SeqID_78021
atgacgacgcataccgcggaggagctcgccacccagatcgagcagcagaaactcgaggagcagaagaccgagagttgtttggtgatgggtttttttcctctagccttgttcttgcagatctacagaaggttttctgccatcagatttctacaattggaatacaattgttataaggaagcaagagagaccggcgcacttaaagaagcaaaagacaagctagaaaagagagtagaagaactgacatggcggttagacgtcgagaagcgtttgagggctgaccttgaagaagcaaagagccatgaaattgaaaagttgcaatctgcactgcaaaaaatgcaagaaaatctcaaggaagcccatgcagcaatagtaaatgagaaagaggctgcaaagttagcgattgaacaggcaccaccaaagatagtagaagtgccggttattgacaatgcaaaacttgaggagttgacaacccaaaataaagaacttgagatccaccaaatttgtctcaaggaggaactaagtacgtttaaacagaaggctgaggatcttgaaaataagcttattgagttccaaaaacagtctgatgaactgtcacaggagacacaagaacaagcatccaaagttattcaacttcaagagctggtcgaaagattggaaagcaagatcgccaccttggagtcagagatcgagttgctccacaacaattctgcactagctattcaggccgtggttactcctgaaatgaatcagacaacaataattgaggaatttgacaagggacaccagcttgaagaagttaaaacggtcaatgagcaagtggttgttcctcctgtaaagaatctaagcaaacaaaaatcccaacaaatccaagaagactaa

SEQ ID NO: 36243 - DNA, 846 bp, Zea mays
  Peptide Sequence Number=SeqID_78022
atggagaagataaaaaaagatggtaagaaaaagaagagtgtgacattcaaagccaccacctcatcaaaagcaagagagagaaaagaagaatcaaatgaagatgaaaggggaacaaaggtgtctgaactcagagctatggcatgcatgcgcagggccccttgtgtccctgcctgtggttgggagccggtcgtctactttcctcagggccatagtgagcaggagcaattgcagaaggtacttgatgctggaattagtattaaagtatggtccatctccgcatatggcattggttttctactgttatctgggcactgtattgctattgctttagtggacaaattgaagctaaagttgaggtactggcagaacataataataaccataatctcgaaggaagtttaccatgcaggagtgatcatgatgtacaacagcataatgaggagtcagactacatggccgtccgatcctgcccatacccgacgcagcctctcccaccctgtcttccgccgccagctcgcaactgtccggcgcgagcaaagagcccccgttccgctcccacgatcgccgtcgccgtccctctgccctcatatcccctcccacgacaccgagacaatgacgacgcataccgcggaggagctcgccacccagatcgagcagcagaaactcgaggagcagaagaccgagctcagggacaagattgaggaggctgagaggaggaaagaaggctgggaccaccttgggcctttgcatcagctgcgaggttgtgtcagtggaagggttctagcagggattctcttcccttccgccgaaaatcaccaagcatctattcagggtgggactaactga

SEQ ID NO: 36244 - DNA, 501 bp, Zea mays
  Peptide Sequence Number=SeqID_78023
atgacaactgtccccatcgattccccgttcgcgtccaggcctcaccgccttggcatacaatgctccactgaccccggctgccgctgtgcagtgaccgcacttggaggtccacgggatgccagagaaggtatgagcgcaaggaattgggcggagactcactggatagctcagtccaagcgcggcggcggaagaccgaagtccggtgaggtcgatctcgggcctccggtgaagtccggccgggtccgagggcttggcgagcttcacgggctactggcggagctagccgaagcactggctgggcttgagggtggctggagttggctggccacggtggtcgaaactctggcggcaatggcgggcggaattaagctcgccggagctaaggaaaggtggctggccggtgagggtgagtgcggggcgaagagagagatatggagccaggaaatctggtctgtctccctgctcaaacccgaggcaaatccagggttttgtcgtgtctag

SEQ ID NO: 36245 - DNA, 186 bp, Zea mays
  Peptide Sequence Number=SeqID_78024
atgacggcagtcggggtcagtggagcattgtatgccaaggcggtgcggcctggacgcgaacggggaatcgatggggacggtacgcttcaggatatggttgatggtgtgacttggcctaccaccctaccaccgggttggacggtcgagtgggatgctgctccggcaggagaggagcacgaggagtag

SEQ ID NO: 36246 - DNA, 186 bp, Zea mays
  Peptide Sequence Number=SeqID_78025
atggcggcaaccggggtcagtggagcattgtatgccaaggcggtgaggcctggacgcgaacggggaatcgatggggacggtacgattcaggacatggttgatggtgtgacttggcctaccaccctaccaccgggttggacggtcgagtgggatgttgctccggcaggagaggagcacgaggagtag

SEQ ID NO: 36247 - DNA, 408 bp, Zea mays
  Peptide Sequence Number=SeqID_78026
atgaggctagaaacagttgatgaagacccaaatgaacatggtcgacttcccaacataaacatccaactgcctcttatgcaagacctgatggcaactaagatccagatgcttcctgtacatcaacactccaagttccaagctaagttgattgattatgacttggaggttggcaaaatagttgccactatgaagcaatgtttgaataatattggtacaaagcagtccaacctagctgctacatttggagagttgattgatgaggttcttcgggctgatgaatctgttacacctaatattcaaggtcagacagtgccaggtggcatagttgaccatgactctggcctagtatttgacaagactcctattgggagtgtttgtgcatcaggcatcttgctatctgaattataa

SEQ ID NO: 36248 - DNA, 222 bp, Zea mays
  Peptide Sequence Number=SeqID_78027
atgcacagtaagggtctaatatccactgttgacattcaacgctcgactgacattggagaccctacaaatacgcagtgtgatggtgatcctccgcatcatagaaagaggagtgttgctgccgatgctaaaaagattcctatgcctaatgtggatgatgatgatgactttgagccaccaaaaaagaagtgcaatatcacaatggatgccccaaataaggcgcag

SEQ ID NO: 36249 - DNA, 1407 bp, Zea mays
  Peptide Sequence Number=SeqID_78028
atggcgattcgtcttcatcctctcccgccagcgcgattcgccgtcctccgccgtcgcacgccctcaacttcaatcgccgccgccgctgacagtatcgtcgagccactgccgctatcaatcctccgcgccccgcgtcacattggtatacgtccgcggacgatctgtcatccggattccaaggctgctgcttcaataatgcggaaggttgatcgacccccaaccaatccgaagcgtttaatcattgagtcaagtcaagaacgtttcagtgttgatattccacgctcgactgacattggagaccctacaaatacgcagtgtgatggtgatcctccgcagcatagaaagaggggtgttgctgccgatgctaaaaagattcctatgcctaatgtggatgatgatgatgactttgagccaccaaaaaagaagtgcaatatcacaatggatgccccaaataagacgcagagactcaacatcagatgcaacccaggagatgttcttgcgtccattcagatattgaatgaaaggcaacgtcaagctatagtcagaaaagacttcttcagtattcttgacatgacaattgatgcaattagatgtcgaacacttctttgttggctcatgcagaagctagaccccagagacatgactcttcgtattggtccagacaaagaactcaaaatcacccagcagactgtccatcagatattgggtcttccaaatttgggtggtggaaagccacttaatattgatgaagcgaacgatgcggcaacacttcggtcctccttgaatattagcaaggatgaatttgttatttcaaagctacaggacagattgaggctaggccaggatgatgatctttctatcagatgtttttttattctcttcaaccggctgctattcccaacagctagctggtcgatttcttataatgaggttctacttacagaagaattagagtggttccctcaaattgattggtgccatctaatttttagtgacctatgtgaagctgcacataaatggcacaataggagcattaataatgtgtcgacgatgatatacggctgttccatcgttctgcttttgtattatttggaccacttgcaccatgtcgcagctccaaacaacaaaagtggcactccgcgcataaagtattttaataagaatatcataagagcgttgtcaatggctgataagcggaagcctcgccaaggtggcgaaccatttggtgtttgcccttttcagagcagcagtgagacttgttatgtctcaaaatcaccatctactggtcagcttgagtctccaatgaggccagaaacagttgatgaagacccaaatgaacatggtcgacttcccaatataaacatccaactgcctcttatgcaagacctgatggcaaataagatctag

SEQ ID NO: 36250 - DNA, 777 bp, Zea mays
  Peptide Sequence Number=SeqID_78029
atgactcttcgtattggtccagacaaagaactcaaaatcaccaagcagactgtccatcagatattgggtcttccaaatttgggtggtggaaagccccttaatattgatgaagcgaatgctgcggcaacacttcgggcctcattgaatattagcaaggatgagtttgttattttaaagctccaagacagattgaggctaggccaggatgatgatctttctatcagatgtttttttctcattctcttcaaccggctgctattcccaacagctagctgtgacttatgtgaggctgcccagagatggcacaacaggagcattaacaatgtgtcggcgacgatatatggctgttccatcattgtttttctgtattatttggatcatttgcatcatgctgctgctccaaacaacaaaaatggcactccacgcataaagtattttaataagaatattataagggcgttgtcaatggccgataagtggaagcctcgccagggtggtgaaccatttggtgtttgcccttttcggagcagcagtgagacatgttacgtctcaaaatcgccaactacttgccagattgagcaaggtcagacagtggtaggtggcacagttgacaatgattctggaccagtatttgacaagactcctattgggagtgtttctgcaccaggcctcttcttatctgaattagaatgtgctcgcgctcttcgggcatacttgtgttctaggttcattgaattggacaggtacataattttcaatttgtttgacttggcataa

SEQ ID NO: 36251 - DNA, 528 bp, Zea mays
  Peptide Sequence Number=SeqID_78030
atgatgatcagcccaaaggatgctgcttcaataatgcggaaggttgatcgacccccaaccaatccgaagcgtttaatcattgagtcaagtcaagaatgtttcagtgttgacattccgcgctcgactgacatggcagaccctacaaatacgcggtctgatggtgatcctccgcagcatagaaagaggggtgttgcagctgatgttaaaaacattcctatgcctaatgtggatgatgacgatgactttgagccaccaaaaaagaagtgcaatatctcaatggatgccccaaataagacgcagagactcaacatcagatgcaacccaggagatgttcttgcatccattccgatattgaatgaaaggacaagccaagctatagttagaaaaggattctctagtattcttgacatgacaattgatgcaatttgttgtcccccgtttctttgttatatcgtgcagaagagcggttccgttcccctgctattcgtggtggccctgacaaagtcatcagcgtacgaatcaagctga

SEQ ID NO: 36252 - DNA, 870 bp, Zea mays
  Peptide Sequence Number=SeqID_78031
atggcagccctctgtggtttgccgtgggacgacactataatggaaaaggttggccagcacatcgggtgcgaaggtgcccaactccatcaacctctgtcggattttctggccgtcaataacaaagaaatcacagggccatataacacaattgatgtgaattatacatacctttatgaagcagtggttgatattttgatgtgcaaacaagatgctgcttcaataatgcggaaggttgatcgacccccaaccaatccgaagcgtttaatcattgagtcaagtcaagaatgtttcagtgttgacattccgcgctcgactgacatggcagaccctacaaatacgcggtctgatggtgatcctccgcagcatagaaagaggggtgttgcagctgatgttaaaaacattcctatgcctaatgtggatgatgacgatgactttgagccaccaaaaaagaagtgcaatatctcaatggatgccccaaataagacgcagagactcaacatcagatgcaacccaggagatgttcttgcatccattcagatattgaatgaaaggcaacgtcaagctatagttagaaaaggattctctagtattcttgacatgacaattgatgcaattggatgtcgaacacttctttgttggctcatgcagaagctagaccccagagacatgactcttcgtattggtccagacaaagaactcaaaatcaccaagcagactgtccatcagatattgggtcttccaaatttgggtggtggaaagccccttaatattgatgaagcgaacgctgcggcaacacttcgggcctccttgaatattagcaaggatgagtttgttatttcaaagctccaagacagattgaggctaggctag

SEQ ID NO: 36253 - DNA, 342 bp, Zea mays
  Peptide Sequence Number=SeqID_78032
ctccactacgcaattcgctacctcggcttcgacatccgcgacgtgcagagcccggaggacatcgtcttcgcggaacggctcgtttttcccggtgtcggcgccttcggctccgccatggacgtcctcaacaggacgggcatggccgacgcactccgtgagtacatccaaagggaccgccccttcctaggcatctgcctcggtctccattctctccactcgctccccacacctctctctcgcctccattctctccactcgctccccagtccccactcctctctctcgccctcttcctcctcgagatcttgccccaccctccgcatgagtcttgtgtcactgtag

SEQ ID NO: 36254 - DNA, 672 bp, Zea mays
  Peptide Sequence Number=SeqID_78033
atgcacatgctgacgcagatcctgctgtccggcctcgctgtcgtatgtgttgacggtagcatggaggacctcttcaacattcctggggaaatcatcgaggggatctggcggcgccgtcgacgcaacacggtggagcacggaccgagccatccctgcgcatgcattgagacgcgaaggggggcgttaccactggctggacggggaagaagagaggagccagggggcgccaaaaccgccggctggacaaggaagaagaacgtggatccagggctggtgcaggcgtcagtttcttctcccaaggactgctgcgacgacgacaacttctccgataccggcgatgacgcgtgctacagtgacacaagactcatgcggagggtggggcaagatctcgaggaggaagagggcgagagagaggagtggggactggggagcgagtggagagaatggaggcgagagagaggtgtggggagcgagtggagagaatggagaccgaggcagatgcctaggaaggggcggtccctttggatgtactcacggagtgcgtcggccatgcccgtcctgttgaggacatccatggcggagccgaaggcgccgacaccgggaaaaacgagccgttccgcggcgacgatgtcctccgggctctgcacgtcgcggatgtcgaagccgaggtag

SEQ ID NO: 36255 - DNA, 345 bp, Zea mays
  Peptide Sequence Number=SeqID_78034
atggcctcccagacgactttgactggatggaccacaccgtcgtcgggcccatcaagaactaggtcgttttctgccgaatctgggttcgtgtggatcctgctggtcgttcagcgcgttgggagtgctggagggtgcgcactacctcacaactggcaagttggaggtgctttcggagcaggagttcgtcgactgcgaccacaaggctgcgtccaagccactagctctatgaactgctctgcagctggatgctcgccgacccgtggttcctcttcaaagttggcaccgaggttggtgcggttgatatctggtgtctctaattgggagctgttggatatcatccaataa

SEQ ID NO: 36256 - DNA, 291 bp, Zea mays
  Peptide Sequence Number=SeqID_78035
atggctcggtccgtgctccaccgtgttgcgtcggtggcgccgccagatcccctcgctgtggccaacacgatgtggtccgtgctcgtgtttgtctcggtagcgggaggtggagttcaatcctgcattggggcccagccccgtccccctccctcggcgcccagatcccacaccctaccttggcattccgcgttgggagtgctggagggtgcgcactacctcacaactggcaagttggaggtgctttcggagcaggagttcgtgagagcacctagagggggggtgaataggtga

SEQ ID NO: 36257 - DNA, 1431 bp, Zea mays
  Peptide Sequence Number=SeqID_78036
atggctcggtccgtgctccaccgtgttgcgtcggcggcgccgccagatcccctcgctgtggccaacacgatgtggtccgtgctcgtgtttgtcccggtagcgggaggtggagttcaatcctgcattgggccccagccccgtccccctccctcggcgcccagatcccacaccctaccttggcattccgcgttgggagtgctggagggtgcgcactacctcacaactggcaagttggaggtgctttcggagcaggagttcgtcaactgcgaccacgagatcttagtgccaacgtcttctgtgaaaggaggcagcatatcaattggaggttctcttcagcttcttggtttctgcacctttgaggcttgtgttggcatattggccgtcaatcatgaagatgagatctcagtgaatgcattccctatcactgtcatgtttgggatgtgttctatcttcctcttcatggcagccatcttgctgcacatgcaagggaggaacctgcttatagatatgtttctttactatcacaattatttggctcgtgcagttgcccagccttggtgctcaacgtcagaaagaactcacttctcggtagcgcacttgccgatttttgacggccataatggcaaagatgctgctcaatatgtctgtgataacttgccatgggtcatcatggaagatgatgatttatctcttgagcttaaaaagttcaaaaatgaactagcggacgacaaatatttgagagcggaggtagtaggtactccatgtgtggaagagttcaccccaaaaaattgtgaaatgttatgcaacaatacgaagttggagctaaggatgacctctgtattaactgcagtcttttctgaacttgagcagcttgatcttgctactgtcgagaccgatgttgatgagaaagtcgaagataaggtatgttcttatgtggatcaacttcttgcagctatgcgagccaaagattctaccatgcacgaagcatctttgttgaatacaacaaatcaagcttgtgggctttataatgaagctgagagactccaaaaaatgattaagaaatctaaggacctagatgccattggagaaatgaagagtcgtgtcacatggattgataagcagttgaagtctcatcctccaaagaacgttgaatcggaaatcttgcgtgagcatatcaagaaagagagggaggcagcaaaggctggaaaacgaccatactatctgaagaaacctgaacttcgcgaaaggaagctgatgaacaagtacaatgagctcaaggaggcaggaaagcttgatgcattcatggaaaagcggcggaggaagaatgcctccaaagatcatcggttcatgctgtaccgacgctcggcaacaacgagctgcgcggccgcctccccgccggcctctccggcctccgcgacctgcagtacctga

SEQ ID NO: 36258 - DNA, 363 bp, Zea mays
  Peptide Sequence Number=SeqID_78037
agactccaaaaaatgattaagaaatctaaggacctagatgccattggagaaatgaagagtcgtgtcacatggattaacgttgaatcggaaatcttgcgtgagcatatcaagaaagagagggaggcagcaaaggctggaaaacgaccatactatctgaagaagcctgaatttcgcgaaaggaagctgatgaacaagtacaatgagctcaaggaggcaggaaagcttgatgcattcatggaaaagcggcggaggaagaatgcctccaaagatcatcggttcatgccgtaccgacgctcggcaacaacgagctgcgcggccgcctccccgccggcctctccggcctccgcgacctgcagtacctga

SEQ ID NO: 36259 - DNA, 270 bp, Zea mays
  Peptide Sequence Number=SeqID_78038
atggctggggagcaccgggaggataaggaggggggatgttttgtccggtttggacatggcggtggcctgactccttccggtataaccgctaagcctcctgggactaataatcgtttcacatttgagtcccaaaggatcgggatgcttcaagaacaggctcaagaaaatgaagatcaagaggatgagccacctcaagaggaggacaatgatcaagggggagatgataatgataaatacaaggaagatgatcaagaaattgagagcacctag

SEQ ID NO: 36260 - DNA, 237 bp, Zea mays
  Peptide Sequence Number=SeqID_78039
atgaacctcacgatacgccacatggctcaaatcaatatctttattcgttttttctacctacacccccaatccaggtcgcacagcttcgatcgacaaatgccgtttgcagccagctggtggtttcttctcctttcagggcacctagaagcgacaatgctgcaggtaaacaggcagggcaacatatctagaatggctgacatgtacctgaccggaccggtgacgcttgtgccactaaaa

SEQ ID NO: 36261 - DNA, 798 bp, Zea mays
  Peptide Sequence Number=SeqID_78040
atgaacctcacgatacgccacatggctcaaatcaatatctttattcgttttttctacctacacccccaatccaggtcgcacagcttcgatcgacaaatgccgtttgcagccagctggtggtttcttctcctttcagggcacctagaagcgacaatgctgcaggtggtttcaagctataaagaacgaatgaggacagcaagaatatcgccgttgccgacacgggcagaacaatgcgcgcggaatctgttccagaaattacgcagagtgccgaacagacagacagattctacagaaacagggggtcagcttttcgtagttgatagacttaaagaactgattaagtacaaaggttttcagattgcacccgccgagcttgaagggctacttctgtctcatccagaaattatggatgttgttgttatcccgttacccaatgctgaagctggtgaagttcctattgcctacatcgtaaggtcccccgatagttctttgactgaagttgatgttcagaaatttattgaaaagcaggttatgaccacgagtcctacagggacacacaaattagccaatccaaaaggtttttcactgcatttcagtggctctgacattggtggtggctatgagctttatgttgatgaagccaagccaagaggcgacgaccagcgtggtggtggtagatctagtggccgttctggtgggagatttggtgaccgttcttgtcggcgtttcgagaccggggggtccctaaaccgacgagtgaatgtcgccacgtgccccagcccagatgggtcgacgtga

SEQ ID NO: 36262 - DNA, 513 bp, Zea mays
  Peptide Sequence Number=SeqID_78041
atggaggataatctaccagttaatgtccaggaatatcaagaacttgctaagaaattaattctaaaaaaaaagattgcacccgccgagcttgaagggctacttctgtctcatccagaaattatggatgctgttgttatcccgttacccaatgctgaagctggtgaagttcctattgcctacatcgtaaggtcccccgatagttctttgactgaagttgatgttcagaaatttattgaaaagcaggttacgaccacgaatcctacagggacacacaaattagccaatccaaaaggtttttcactgcatttcagtggctctgacattggtggtggctatgagctttatgttgatgaagccaagccaagaggcgacgaccagcgtggtggtggtagatctggtggccgttctggtgggagatttggtgaccgttcttgtcggcgtttcgagactggggggtccctaaaccgacgagtgaatgtcgccgcgtgccccagcccagatgggtcgacgtga

SEQ ID NO: 36263 - DNA, 456 bp, Zea mays
  Peptide Sequence Number=SeqID_78042
atgggtgcaagatttgatatggcttaccggagagctcggtccacgcgcgggggcgggcgaccgagtcccggcgaggttgatcttcgccttccggtgaagttctgccgggtccgagggcttggaaagcttcacgggccactggcggagctaaccgaagcgctggcgctacttgggggtgactggagtgggctggccacggtggtcgaggctctggtagcaatggcgggcggaaaagagctttggcaccaccttagagcaaaagcagcaaaagtttgctatttcctcacctacaacaacatgggttcgaaaaccctgagtacgaagtgtactttcacaagtcttacccgtcaaaataaaagactctcaaggatatgctggcttgagggagtcaaggtaaggcttaatcaagaatcaagactctgtttgcaaaaatgcttactaatagtggatccttaa

SEQ ID NO: 36264 - DNA, 177 bp, Zea mays
  Peptide Sequence Number=SeqID_78043
atggccgtgatgggttcaacatcggacaagatgtacctctgtcaggtaccaaattttgggattgaaaatgataaagacgagaccgagcgggatccactgatagtaagcatttttgcaaacagagtctttgatttgaataagccttaccttgactccctcaagccagcatatccttga

SEQ ID NO: 36265 - DNA, 324 bp, Zea mays
  Peptide Sequence Number=SeqID_78044
atggtatacgcagagagcgggaaggggtcagcaagcatcagtttcctcggaactgctctggccaagatcctggtctcctctgaacctcgggcagtgctgcttgagctggccatacagtgcctccagaatcttgtcccccttgggcagtttctccgtcaggttgaaggcaaggatggtcgtgaaatgcgtcggcgctatgtggaacccctctcgcacggtacactgcaagacatggttgatggtgtgacttggccaaccaccctgccaccaggttggacggtcgagtgggaagctgcctcggcagtagaggaccaggaggagtag

SEQ ID NO: 36266 - DNA, 621 bp, Zea mays
  Peptide Sequence Number=SeqID_78045
atggacattgcttttaatacccatgggctgatgctccacccgctaatcatgatactgatacttaaatctaatgaaccaaatggactggagagctgttttgacacaatgcaccttcagcaaacccatcgtcaccatggtatacgcagagagcgggaaggggtcagcaagcatcagttcctcggaactgctctggccaagatcctggtctcctctgaacctcgggcagtgctgcttgagctggccatacagtgcctccagaatcttgtcccccttgggcagtttctccgccaggttgaaggcaaggatggtcttgaaatgcgtcggcgttatgtggaacccctctttcacggtctaatgcaccaggcccccgagttgaagctctccggtgacctccacccgcctgcccccatgaacccacctgttcagttcgccgccgcccattcactgacgcccccaacttcgccgaaccgacccaaagcgtcgcgacctagtccccgacgtgctaccgcaccaggtacactgcaagacatggttgatggtgtgacttggccaaccaccctgccaccaggttggacggtcgagtgggaagctgcctcggcagtagaggaccaggaggagtag

SEQ ID NO: 36267 - DNA, 3561 bp, Zea mays
  Peptide Sequence Number=SeqID_78046
atggcgaacatcgacatggcgaagatcctggcggacctggaccgcggcgccagcggcggcgacgcgcgggtgcccaagaccaagctcgtatgcacgctcggcccggcctcccgcaccgtgcccatgctcgagaagctgctccgcgccggcatgaacgtcgcgcgcttcaacttctcccacggcacccacgagtaccaccaggagacgctcgacaacctccgccaggccatgcacaacaccggcatcctctgcgccgtcatgctcgacaccaagggtcctgagatccgtacagggtttttgaaggatggtaaaccgattaagctaaccaagggtcaagaaatcactgtcaccactgattatgatatcaagggtgacgaaaatacgattgctatgagttacaagaaactgcctgttgacgtgaagcctggaaatgtcatactctgcgcagatggtactatctctctggccgttctatcttgtgatcctgatgctggaactgtgaggtgtagatgcgagaacactgcaatgcttggtgagagaaagaactgcaatctgccaggaattgttgtggatcttcctacattgactgagaaagataaagaagacattttgggctggggtgttccaaatgatattgacatgattgctctatcctttgtccgtaaaggatcagatttggtgactgtgagacaggttcttgggcagcatgccaagcgcattaagttgatgtcaaaggttgaaaaccaagagggtgttgtaaactttgatgagatcttgagggagactgatgcttttatggttgctagaggtgatcttggaatggagattcctgttgagaagattttccttgcgcagaagatgatgatctacaagtgcaacattgctggcaaacctgttgttaccgctacccagatgctcgagtcgatgatcaaatcccctaggcccacccgcgcagaggccactgacgttgcaaatgctgttcttgatggaactgactgtgtcatgctcagtggtgagagtgctgctggagcctaccccgaggtggctgtgaagatcatggctcgtatctgcatcgaggcagagtcttccctggaccacgaggcagttttcaaggccatgatcaggtccgcgcctcttccaatgagccctctggagtctcttgcatcatctgctgtgcgaactgccaacaaggccaaggccgcactgatcgtcgtcttgactcgcggtggcaccacggccaaactggtcgccaagtaccgccccagggttcccatcctctctgttgtggtacccgtgctaacgacggattctttcgactggaccatcagctccgagggcccagctaggcacagcctgatctatagaggcctcattcccctcctcgctgagggctccgcgaaggctacggattcagagtcaaccgaggtgatcctggaggctgcgctcaagtcggccgtgcagaagcaactttgcaagcctggtgatgccattgtggctctccatcgtatcggcgtcgcctccgtcatcaagatctgcatcgtgaacagggggacggaggaccaggagcgcggcggcgccgaggcggccgccatggggtcagacgtgccgccgccgtcggccatccctcccctctcagccgccgcggcctccgtcgttcgccagatcgcgggcgtgccggtggaccagctcctccggcgggtggacgcggaggagcaggcccgcgggccgctggagtacgccaggagcgtcgtggagtactgctcccacgtcgccctgcgcgtggaggccaggcgcccggaccacctcggcgacagggagttccacacgctcacctacgacatgatgctcgcctgggaggcgcccgacgaggagaccgacgccgtgttccagaaaacggcattcagtgttctccgtggagacgacgcggacgacgacgacagtgggtccatcttctattcaagcccgacgcagatggccattcaggtttctggtttgtttctcctgcggacagttggacccgaggcatttgccaagattgctcctgcatgccctgccatggcacaccccatcaccgtccgtaacctgttcgacgcgatcaccaactccaccggaggacggctgcatttccttatctaccacaaggcgttctgctctgcgaagcgtgtgctaggggggcacagagccccagccctccagctctccgacgacgaagtgatccttgacatccacggcgctgcgacgaccaagccagttctccagcacatcggcacgtccacatggcctgggaggctcacgctgacgaaccacgcgctctacttcgaggctatcggcgtcgatttctcgtatggagaggccgtcgtgtatgatctggcaagggacttgaaacagtcggtgaaacgagagtccactgggccatggggtgctcacctcttcgacaaagctgtcatgtacaagtccagcctgacaagtgaacccgtgttctttgaattcccacaattcaaaggccacacccgccgagactactggtttgcggccatcaaagaggtgctgcacgcacacaagttcatcaggaagtacaagctcgccggtttccagaaggcggaggcgctctccgtcgcaacgctagggattctgcggtaccgcaccgtgaaagaggggttccacatactgccggcgcatttcaagaccatcctcgccttcaacctggcggagaaactgcccaagggggacaagattctggaggcactgtatggccagctcaagcagcactgcccgaggttcagaggaggccaggatcttggccagagcagttccgaggaactgatgcttgctgaccccttcccgctctctgcgtataccatggtgacgatgggtttgctgaagctgaaagaggaggacaacgccgaggagagggatttcgctgtgcgtgacgtgcagattggagggactagctcagttcagatggctctagagcgttcggttgggtattcgggtagagtggaagcggcaagggctacgcttgatcaggtcagagtggaagacatagacactaatgtagctgtcctaaaggaactactatttcctctgattgaaataggcaaaaggttgctcgctttgtctgggtgggaagagcccttcaagtcttatgtcttcttgttatgtttcctctacatggcttacaggtattgttttctggccatctcgcagctggaagcgcacgtgcaagcaggaaacatttttctcctgaagctccggtccctcatgcttgcagcgtttcctcagagcaccaacagagttgcagctgcactggttgctgtggctgcgatattcacgttcgtgcccttgaggaccatcgttctactaatccttctagaagaatacacaagacagatgccggtgaggaagaagagcagtgagaagctggtgaggagattgcgggagtggtggctccggatcccggctgcgcctgtacagcttttttacaccatgttccgtgcacattctttgagcggtagggatcttggtatcacgccttcaagtgaaagcaagaccttggtgtaa

SEQ ID NO: 36268 - DNA, 585 bp, Zea mays
  Peptide Sequence Number=SeqID_78047
atgcccgaatccggcgtaccgagacgaaccacccgatgtcctccaaaagtcgagcgcgagagcagtgggtcgtggcatggtgctgctatgtccagttgtccacacagcggcggcgagacgaaaatactcgcagcggcagggagtggggtactagggttttatgcacacgctttatggtcgccaggaaggttggcggggcggctgcgaggccagggatggcgaaaagcccgcggagctgttacaaggaggtctcgacggggtccgtgcttgagggaagatctacagtgcaccaccgggtcaaagactgaccagtgggaccctcaacgccagatgcggaggtgcgcaatggggtgttggcatggaggagctgacaatatttcagatttctttaatggaagtggagaatttgtaccatttatgccaattatccgtctaatacgaagcctgaagaaaggcgagactttgttgatggtgttctccaacgccgaaatattgatctaccgggcgtttgccaactcaccattgtctggatcccttcgggctagtttgggagctagaaaacttgagggggattggagggactag

SEQ ID NO: 36269 - DNA, 879 bp, Zea mays
  Peptide Sequence Number=SeqID_78048
atggtgtcacacccggctttaaggaacaaagccagttttaaactgcaccggattgggcctcgattactggaaagtccaggggccaaaccacacttattccccagactcagtagttccaaggtggacggcgggttgattatagggtttaagagggtctctttagcaattgtgctggccgaaggggtatggcatgatctcagtcgtccgatcaaaaacctacgctccagattagattcagcatataatgaaccgggatctaatcctggccgacccgcgcccatccaacggccagcagctttctctccccaacaccgcccagttcgcggcggcgcaaggcctccagcggcggtgtcatccccggcgaaccccgcaccgaggcaatacatcgctaaatctctaaccgtacgcatatacatgaagaggaaaactaggcgagcattctacggggtttcttaccaacgcaagtcacggcgagcaaggcagtccacagtcgaggcggagatgaggcggtcttccgtctccggcgagagattccgcgaccaccgtcggtgctccaggcgcgagaacaccatgcccgactccggcgtaccgagacgaaccacccgatgtcctccaaaagtcgagcgcgagagcagtgggtcgtggcatggtgctgctgtgtccagttgtccacatagcggcggcgagacgaaaatactcgcagcggcagggagtggggtactagggtttttatgcacacgctttatggtcgccaggaaggttggcggggcggctgcgaggccagggatggcgaaaagcccgcggagctgttacaaggaggtctcgatggggtccgtgcttgagggaagatctacagtgcaccaccgggtcaaagactga

SEQ ID NO: 36270 - DNA, 969 bp, Zea mays
  Peptide Sequence Number=SeqID_78049
atgtcaactgagaaacgccacctagatcagatcgaactcctcgccttgtggctcctcctgaaccacctgctcttctcctgtggggggtttatgggaagatccagtacagggttcctggctgaccgccatcgcagcaaaatcaaccagggacctccctacactgaccactcccctactgcccttgcccctttcggttttaaactgcactggattgggcctcgattactggaaagtccaggggccaaaccacacttattccccagactcagtagttccaaggtggacggcgggttgattatagggtttcagagggtctctttagcaattgtgctggccgaagggggatctaatcctggccgacccgcgcccatccaacggccagcagctttctctccccaacaccgcccagttcgcggcggcgcaaggcctccagcggcggtgtcatccccggcgaaccccgcaccgaggcaatacatcgctaaatctctaaccgtacgcatatacatgaagaggaaaactaggcgagcagtctacggggtttcttaccaacgcaagtcgcggcgagcaaggcagtccacagtcgaggcggagatgaggcggtcttccgtctccggcgagagattccgcgaccaccgtcggtgctccaggcgcgagaacaccatgcccgactccggcgtaccgagacgaaccacccgatgtcctccaaaagtcgagcgcgagagcagtgggtcgtggcatggtgctgctatgtccagttgtccacacagcggcggcgagacgaaaatactcgcagcggcagggagtggggtactagggtttttatgcacacgctttatggtcgccaggaaggttggcggggcggctgcgaggccagggatggcgaaaagcccgcggagctgttacaaggaggtctcgacggggtccgtgcttgagggaagatctacagtgcaccaccgggtcaaagactga

SEQ ID NO: 36271 - DNA, 288 bp, Zea mays
  Peptide Sequence Number=SeqID_78050
atggcccaagggcacatttccctttcacttaggcacatctcaggctcccacttgccatctcatgcttttgcaaacacaagcaaggcccttgtgacctcaacaatatatgatttacagtcattggcaaagttcatgtccaaggcgactggaaatgctgccaactgggtgcaaatagttgggatgaaggaggagcgcgccgtcgccgccttccacgaccatctcacctcgcaccgcctcctccccgacaagcacgacgactaccacatgatgctgagtatagaactatag

SEQ ID NO: 36272 - DNA, 264 bp, Zea mays
  Peptide Sequence Number=SeqID_78051
atgggcaccagagcagatcaggagcaagtagccacccacattttctggtgctctcagcagacgagcgcactatctcagcaaggcccttgtgacctcaacagtataggatttacagtcattggcaaagttcatgttcaaggcgactggaaatgctgtcaacttggtgcaaatagttgggatgaaggttccgcatgtgcagcaggccttcacctgggactacggcctcgcttgcgtgctcatggtgctcaggacgctagggattga

SEQ ID NO: 36273 - DNA, 591 bp, Zea mays
  Peptide Sequence Number=SeqID_78052
atggaaaaggcgggctggcaggttccgcatgtgcagcaggccttcacctgggactacggcctcgcttgcgtgctcatggtgctcaggacgctagggattgattgctgcgatggcattgccgatctcgagaggctctgccgcaccacgagcatttggacggttgacttagcatatctgttaaacaagatttcagtcagctttcctttctgtaccgtgacccttggagcaaatccacaatattctgctgaatccttttgtagggagcaattgcaagaagacatcgatcgagtggacgagctatttgggaaggcgctcgatgctggaattagtattcaagccactcaaccgctagaaggctgccaatatgtgggcattcactcaatacggattgtctgcgctttttttgggttgggctccaaagttgcaatgttccagtattcctcggtcgaaatgtacaatgcctgcaaaccacagcctactcttgagattcacaatcccgatatgcacaaagatgccccaagaggattactcaacaaggtcgttgatctcattgaccttacatctgaaaggtgggataaagacttaatctaa

SEQ ID NO: 36274 - DNA, 288 bp, Zea mays
  Peptide Sequence Number=SeqID_78053
atgccggacaagggagataatgattatcttgatatggtgtttactcaagtgtccttggaagaagtagaaaacttgtgccggtatgagcttcctaatgagagctgggaagtaaatttacctgctgaaaaggtgtctcctgaactcctagaaccaacattaggcataaactttgcaagagatggaatccagggaaaagagtggttgtccatggttgatgcacacagtgatgcatggttactttatgttgcattttaccttgctgctcgatttggtttcaataaaaattaa

SEQ ID NO: 36275 - DNA, 996 bp, Zea mays
  Peptide Sequence Number=SeqID_78054
atgacagaccatgctctcgacactcaacaacggcgatgccaacagcgggaaaccgttcttttacatgccaccattgaatggcagatgttcaatgtactatccactagagcattgggggcacgttcatggacattagagttaactgatgtctggtctggtatcaaggaagagatgtttttaattgtgtttacgctaatcaagttaatgaatttggtacatgtaataacatctaagcctttgagtgctttgtctaatgccttgtctattgtctgttctaatgcctgttctctgcgaactgtctttgtctgtttcggtggaggctgccggcgtgaagcactggccaccgggtgctgcacgccaacagccaacagggggcaccgtgcaggtgggcagaagcagccagcgacaacagtagggcacagctttctatcctatatttgcatgttcttcaaagggatgtatatggaccttccaaatacactagacttttgcaagcaaccaaagatactatcagagaagaagtatggtgctgaaaaggagcttggagcaaatggccacaaccttgaccggtgtgatagtgttcaagaggatgaggtgagcatggcctacatgttcgtccacatgttcgggattacgctgttcggcatggcctacatgttcgtccacgacggcctggtccaccgctgctttccggtcggccccatcgccaacgtgccctacttccgccgagtggctgccgctcacaagggagataatgattatcttgatatggtgtttactcaagtgtccttggaaggtgaggaagcaggacgcggaggcggagggaaggacgcgctgttcgtcgagctgtggaaggcctgcgcggggctgctgtcctgcgtgccgccgctcgggcagaaggtctactacctcccgcagggccacatcgagcaggagtatagaattagaagagttgtttccctcacgttttcacattgttctccttttatggtatga

SEQ ID NO: 36276 - DNA, 333 bp, Zea mays
  Peptide Sequence Number=SeqID_78055
atgtgcagcggcggcggtgcccccctccctctccagcgcgctcgtaaacctacccaaccctacctctctctgatcgcccctgtaaaccctccaaggggtttaggtgcggaagcaggacgcggaggcggagggaaggatgcgctgttcgtcgagctatggaaggcctgcgcggggccgctgtcctgcgtgccgccgctcgggcagaaggtctactacctcccgcagggccacatcgagcagaacattggaatagatacaacattggcagcaatggtgagggacaagcatgttaaatttacactgaaatttgagtatggatttggctatgagtaa

SEQ ID NO: 36277 - DNA, 438 bp, Zea mays
  Peptide Sequence Number=SeqID_78056
atgaccgtcgtagaccaacaatgtgggcatgagttccctccttacgggtccgcttggctgtatgtccctccttgtattgatcgacgaggacttagtcgctcgccccgtctcgtgggcttgttcagcggggacttggttgctcgcccacctcgcgggctttctcggtggagacttaatcgctcatcccgtctcacagatttgctcgatggatgggctagaaagagttttatgggcctcgctatgggtaccctgtttctgggtacccaacaggtcacgatccatatggtgcccgacccctcatatgacgatctgtcaactttcttcgcgtcctacgtggaactttctgcgttatacgacgcggaaacgttgtcctaccatgatggctctaacagcggccgcgacgccttcccgcctcgactgcgccatactcggcggtga

SEQ ID NO: 36278 - DNA, 208 bp, Zea mays
  Peptide Sequence Number=SeqID_78057
atgtcggacgaccttgttgttcctgtccactttgaagtcggccaagaattttgcttttgcctcctggatcatacgctccttgtgctcctcgaattggagctcttcgtcagccggcaagcggagtcgccaaaaagtatgttgacgccttttcggagcgccaaatactcaagaagaaccgacagcggtgctctctgggcaggcgcggacg

SEQ ID NO: 36279 - DNA, 627 bp, Zea mays
  Peptide Sequence Number=SeqID_78058
atgtcggacgaccttgttgttcctgtccactttgaagttggccaagaactttgctttcgcctcctggatcatccgctccttgtgctcctcgaactggagctgctcgtcagccggcaaggtttcccaagtcggctctatgatgttgcttggagaaatatcagagctatccctttgaaccggccattgagggccgatttgataagcttagatatgtacttccccaacggagtcgccaaaaagtatgttgacgctttttcggagcgccaaatactcaagaagaaccggcggcggtgctctctggtcaggcgcggacgcggggacttggttgctcgcccacctcgcgggctttctcggtggagacttaatcgctcatcccgtctcacagatttgctcgatggatgggctagaaagagttttatgggcctcgctatgggtaccctgtttctgggtacccaacaggtcacgatccatatggtgcccgacccctcatatgacgatctgtcaactttcttcgcgtcctacgtggaactttctgcgttatacgacgcggaaacgttgtcctaccatgatggctctaacagcggccgcgacgccttcccgcctcgactgcgccatactcggcggtga

SEQ ID NO: 36280 - DNA, 486 bp, Zea mays
  Peptide Sequence Number=SeqID_78059
atgccgccacgcaccaggctaacggcacgcaagtctacgggaccaattggggtgcctcggcatcaactggctccccgacatgaaagcagcagcagtggaagtaacgaccccatcggagatcttgaagcccgagatcagctcgctgatcgagacttagcacttgactgggccgtacagtctcgtttgctaatgtgtgctaaggaagcaagggctcaggcccgaattaaagaacttagctcgactgtcgataacctgcaggtttactgcaatacgttgcatgaggaagtccatatactatactcacaattacaccctagtgagcctgcacaccctgctgaggcggaagccggaccatctcacgttgcgggacgcgcgctgggtggggagttagacctttttgagccccctccttctttgaggttggttgatgtctggactcccacacctgacgatgaggccgccaagagtaatggaaagcaggaataa

SEQ ID NO: 36281 - DNA, 381 bp, Zea mays
  Peptide Sequence Number=SeqID_78060
atgaccccatcggagatcttgaagcccgatcagctcgctgatcgagacttagcacttgactgggccgtacagtctcgtttgctaatgtgtgctaaggaagcaagggctcaggcccgaattaaagaacttagctcgactgtcgataacctgcaggtttactgcaatacgttgcatgaggaagaccatatactatactcacaattacaccctagtgagcctgcacaccctgctgaggcggaagccggaccatctcacattgcgggacgcgcgctgggtggggagttagacctttttgagccccctccttctttgaggttggttgatgtctggactcccacacctgacgatgaggccgccaagagtaatggaaagcaggaataa

SEQ ID NO: 36282 - DNA, 318 bp, Zea mays
  Peptide Sequence Number=SeqID_78061
atggccgtgatggattcaacatcggaaaagatgtacctctgccagttctggtctgtaataaaaaaactcaagcttgcttttgaaataaatgtttactgcaatacgttgcatgaggaagtccatatattatactcacagttacaccctagtgagcctgcacaccctgctgaggcggaagccggaccatctcacgttgcgggacgcgcgctgggtggggagttagacctttttgagccccctccttctttgaggctggttgatgtctggactcccacacctgacgatgaggccgccaagactaatggaaagcaggaataa

SEQ ID NO: 36283 - DNA, 705 bp, Zea mays
  Peptide Sequence Number=SeqID_78062
atggtcgccgccgctccaggcatcctcccgtggcctcacctccctctcccttcctcctcccacccgtctgacgcctctgacgccgccgcagcagcaacagacgccaacacctccgcgtatgacatccagatcttcgagcccacctccatcgaggagcgtcgtcgcctcctgatccagcggcgtcgcctccgactcgccgcctcccatgcctcgcggctcaccgttgcctcgcgcgtctcctccaaactcatcagcgccaccgcctcctgctccagcggcgtcgcatccgatctgccgcctcccctcctcatggctcgtcgttgcctcccgcctcttccccaacctcgcccttgccgcccttggaggatcccaaatccgacgacgagctcagtaggcccacgcagacgcggatgtgctatgaacttcaggcgaaagaagcccgccaccatccagggatcaatcctcaccacgaggaccaggggtgatgccaacaaggtgtacgtgaacctttcctggggtgttgataatttagctctcgcaaacctgttcactgagcaaggaccatctatgacagacttggatgatagatccgtgttacgataccagcatcaaagccgcctagaagcaatactgaactttcacttgagatatataaaactaggaaacgcttcatcctgctacccaattccaattatcgacacttag

SEQ ID NO: 36284 - DNA, 423 bp, Zea mays
  Peptide Sequence Number=SeqID_78063
atgaggaggggaggcggcagatcggatgcgacgccgctggagcaggaggcagtggtgctgatgagtttggaggagacgcgcgaggcaacggtgagccgcgaggcatgggaggcggcgagtcggaggcgacgccgctggatcaggaggcgacgacgctcctcgatggaggtgggctcgaagatctggatgtcatacgcggaggtgttggcgtctgttgctgctgcggcggcgtcagaggcgtcagacgggtgggaggaggaagggagagggagaggcaacttgacgagcacgatcgagggggagggatacactggcaacaggcgtagaaggctgccggccgttttggaccctttgctcggcgccataggccgtggcgccgagctaacacagctcggcgccacagcctatggcgccgagctctga

SEQ ID NO: 36285 - DNA, 291 bp, Zea mays
  Peptide Sequence Number=SeqID_78064
atggacatcgcgcgcccgctggcaaaccttgaaaagagcacagtgcagcaaaagctaatggcgcggaggccaggactcaggagggagagaagagatcggaagaagcggagtgggtaccaggaatcggacatggcaggagggcaactgcacctgggtgcccgaattttttgtattttagcccttaaacagaattttggccccttagctcggcgccataggccgtggcgccgagctaacacagctcggcgccacagcctgtggcgccgagctgtgagtggccgcaacggctag

SEQ ID NO: 36286 - DNA, 219 bp, Zea mays
  Peptide Sequence Number=SeqID_78065
atgatcgtcgctcactcagctccagtgccacccaggtccaaatggaacagccgctgcatgagcggccttgccaatcgccatgccggggcgacggaggatggatggggatcgatggacacggacacggatgccagcgttttggaccctttgctcggcgccataggccgtggcgccgagctaacacagctcggcgccacagcctatggcgccgagctctga

SEQ ID NO: 36287 - DNA, 183 bp, Zea mays
  Peptide Sequence Number=SeqID_78066
atgcaccccgaatacgctatgcgaagctgggattcctggtccaaatgccaggccgtcctcggcacgtcgtacgttttggaccctttgctcggcgccataggccgtggcgccgagctaacacagctcggcgccacagcctatggcgccgagctccctgacgtggcagtcctgcgtggcacctag

SEQ ID NO: 36288 - DNA, 198 bp, Zea mays
  Peptide Sequence Number=SeqID_78067
atggtgcggctggtgcctggtgcctggtgcctggtggtggtgccttgtttagaacaggagggagagtgggagacgatgaagaagaagtgggaagaccctttgctcggcgccatagtccgtggcgccgagctaacacagctcggcgccacagcctatggcgccgagcttcgtgacgtggcagccgcgtggcacacctag

SEQ ID NO: 36289 - DNA, 2021 bp, Zea mays
  Peptide Sequence Number=SeqID_78068
atggaccaactcataggttttcgatccgacgaccacgtccttcacacggagttgcttcgccttgacgcaccctccgcgatcacgctgcgtgccgcagccagttccctccggaaccgccaccgccgagttttgaggcccaaactctgcgacggacatgagcgtggagagcccaggggagctagggttctgaagcgcaccgtggggcacagcgtggcgaacgacggcccccgacatcctgctaggttttccatgggagatgggggagtcgcgtgcgccgtccgctcagtcgagagcttccgtgccggcgccctcgtgaggagaggaggagcgggagaagcgatgccggacaagggggagagggcccatggccaccgccaccagcaccagcactggaagaaccagcagtcggcgacagctgctgacctggaggagggggagctgcttaatggggaggccgggaccaatgggttgcccgagaggagcatgccacctaagaagtggaggaaggtgctggcagcctccgcagctgctgtggaggtggagcctggggagattgtgagtacaaagcaagcagtgccattgaagaaggaaagaagaaacggggacgttgagaaggtagagctgctgccagagaggcagaggaaggaaaagtcttctgggaagagcaccaggaagtctatcaaggatgatgtggagccaggggagattgcactgccaggaaaaaggcgggatgccaagtcccaactggcccatgataacagcaggaggccaagttcgtctgcccagaaaggctccttgcgggattctgatgaagaacctggtgaaattaagccagagagcggcatcagtggcagtgtaaggaagaaccggccaacagagcctcatagcagtaaccacaagcaccacactgacacctctgaccagtcaggatcaaaacatcgcaggaagggagaaggaaagagttcatctgctgccagacatttgtctgggagaattcgtgaggtctcgccaccaacacgggatcggcgtgataagcacgagaggagcccaggcatcttgggccgttttcctcatgaccgttttcgtcatgacaggtatgacaggagcccgagccgcttggagcgttccccacatcgcactcgccactatgatagcagagaccgcagtccatatatttcacctcgacatagagctcgtccgccccaattcagggataacacaccaagtcgtgttgataattcccctcgtgggagggtccagcatgaagatatcagagaccgtagcccatttcgtcatgacaggtcgccttctgaacgttgtcgtcctactgacacgcatgaagcaagcaagaagagcagaagtagcaacaactcagagaagtcacatcacaaaagcaaatcagcgaagcaatcttcaaaaatcaagagtggtagcaatgggaagaatgaggagaaaatctccaaagaaaagcacactgaaagcagtcagtacactgaactgccaccaccacctcctcttcctctaccaccgccaccaccaccgccgccgccaccgccacccctgccgcctgctgtaccacctccattgcctccatcaccagaacctgagccacctggagttctagccgaggatatgatagaagacatggatatctgtgacaccccacctcacactagtgcagtacctgaacccacagaaccaatttgtgatatagggaggtggttttaccttgatcacttcggtatcgagcaaggaccttccaaacttgctgagctgaagaagctggtgcaagatggatatcttctttctgaccatctgataaaacatgctgatagcaaccgatgggtgactgtagagaatgcagcttcaccactggtgccatctgatttcccctctttatattcggacacttcaacacagttggtcaacccaccagaagccccaggaaatttgctcgatgaagctctagaggaggcttctaacttggcatcaggagctgaggataaacaaatggaggaaac

SEQ ID NO: 36290 - DNA, 288 bp, Zea mays
  Peptide Sequence Number=SeqID_78069
atgcgctttgatcgaagtactggacgaataaagacaaacgagtgccacaaaacaagggcaagagttggaaggcatggacttgatttggaacaggattttgggccctgtccgccaagtccatctaaagcctcgcagtactaccgatgccggaacaggaggatctgggccggatttgtagcagcgcctctgtcaacatgttttttgtttgggaaatttggatccataccattaagatcaccactttggatccataccattactatctcacttacatgtgggtccacatga

SEQ ID NO: 36291 - DNA, 5556 bp, Zea mays
  Peptide Sequence Number=SeqID_78070
atgccggacaagggggagagggcccatggccaccgccaccagcaccagcactggaagaaccagcagtcggcgacagctgctgacctggaggagggggagctgcttaatggggaggccgggaccaatgggttgcccgagaggagcatgccacctaagaagtggaggaaggtgctggcagcctccgcagctgctgtggaggtggagcctggggagattgtgagtacaaagcaagcagtgccattgaagaaggaaagaagaaacggggacgttgagaaggtagagctgctgccagagaggcagaggaaggaaaagtcttctgggaagagcaccaggaagtctatcaaggatgatgtggagccaggggagattgcactgccaggaaaaaggcgggatgccaagtcccaactggcccatgataacagcaggaggccaagttcgtctgcccagaaaggctccttgcgggattctgatgaagaacctggtgaaattaagccagagagcggcatcagtggcagtgtaaggaagaaccggccaacagagcctcatagcagtaaccacaagcaccacactgacacctctgaccagtcaggatcaaaacatcgcaggaagggagaaggaaagagttcatctgctgccagacatttgtctgggagaattcgtgaggtctcgccaccaacacgggatcggcgtgataagcacgagaggagcccaggcatcttgggccgttttcctcatgaccgttttcgtcatgacaggtatgacaggagcccgagccgcttggagcgttccccacatcgcactcgccactatgatagcagagaccgcagtccatatatttcacctcgacatagagctcgtccgccccaattcagggataacacaccaagtcgtgttgataattcccctcgtgggagggtccagcatgaagatatcagagaccgtagcccatttcgtcatgacaggtcgccttctgaacgttgtcgtcctactgacacgcatgaagcaagcaagaagagcagaagtagcaacaactcagagaagtcacatcacaaaagcaaatcagcgaagcaatcttcaaaaatcaagagtggtagcaatgggaagaatgaggagaaaatctccaaagaaaagcacactgaaagcagtcagtacactgaactgccaccaccacctcctcttcctctaccaccgccaccaccaccgccgccgccaccgccacccctgccgcctgctgtaccacctccattgcctccatcaccagaacctgagccacctggagttctagccgaggatatgatagaagacatggatatctgtgacaccccacctcacactagtgcagtacctgaacccacagaaccaatttgtgatatagggaggtggttttaccttgatcacttcggtatcgagcaaggaccttccaaacttgctgagctgaagaagctggtgcaagatggatatcttctttctgaccatctgataaaacatgctgatagcaaccgatgggtgactgtagagaatgcagcttcaccactggtgccatctgatttcccctctttatattcggacacttcaacacagttggtcaacccaccagaagccccaggaaatttgctcgatgaagctctagaggaggcttctaacttggcatcaggagctgaggataaacaaatggaggaaacgtctgcagaagatagtgaagaattctgcattgatgatagggttgaagcactgatggatggatcaattttggtgcatggccaggagctcgagatcattggagagcttttaggtgcagattttcagcctgctgattggcaaagatggagtcgtcgtgaagttttttcatggtggcaccatataattcttgggaaatttggatccataccattaaaagatcaccactttggatccataccattactatctcacttacatgtgggtccacatgagtcaatgacatgtggggtccatgattttactaggctcaatgtgcacactgaagtaaacaatgaaatcaatggaggcacagaaaatagagcaacagatgcttatggtcttgtttctgtggagaagaactttcatcataacgctgagtctagcgaatggttttctggtagatggtcttgcaaaggtggtgactggaggagaaatgacgaactaagccaagatactccattcaggaaaaaacttgttctcaatgaagggtatcctctgtgtcaaatgccaaaaggtagctgtgaggatccacgccggccctgcaaggatgagttgtactaccctgtacgtgctaaaaagtatgaactgccattgtgggcattctcattgacagaagaagatattgatagtgttaatgacaccactaaaagcggtgttgtgcctgggaggccaggtcagaccagacagccttctaggggagtgaagggcatgatgctttcagtggttaggataaattctcgtgttgttaaagatcaatcatctgttgaaccccatacaaaacccagaggaactgatcgaccactgtcgaggtcttcacgctcccattcaattggagctgagagaagttctgtccatgaaggttcgtctcatttcaggaagcaccatgaccatgattcacaaagttcgcacaagtccaagcctgttccaaacattccaaaggaccgtgtatgcactgttgatgagctgtcagtttatcggggtgactggtattaccttgatggcactgggcatgagcatggtccattttcttattctgaattgcaagaattagttaaaaatggcactatcattgaacaaagtagtgtgttccgtaagattgataacacatggtttccagttcttaaggatttaaaacctggaagctctgttcccagtgcagcacgaagctcaagttttactgctgctcttatgctcccagaccaatataattttggtgtgaaccaaggatcaggtagcttcaatcagttgcacccccagtttgtgggttatacacgtggtaaattacatgaactagtcatgaaatatttcaagagcagggaacttactttagctataaatgaggtcttggatccctggatctcagcaaagcagccaaaaaaagagtttgaagcatacttctcccacaattcagcatctagaaatttgctgccagaagatggtgggtctgcaaaaaaggcaaagttgctacctgatcagagtgatgaagatattcatttgtcacaagacattcttgccagtcggaaggaggacatctgttttgacgagctatgtgatgcagaaccttctgttgataatgattctctgaatcccggagcaggaaatgaaacctggggtctactaaacggccatgtgttagcaagaatcttccattttatgagggcagatgtgaaagcacttatttcttctgcagctacctgtaggagctggaatgctgctgtgaagtattacagaaacatgtgtagattcattgatctgtcttctgttggccctctttgcactgattctgtgttttgtgatattatggctggttatgagaagcaaaatattaggacccttattttagctggttgttcgaatcttagttcgcatgcccttggcagagtacttgagcagcttccacaaatatcttatgttgacatccatggttgcggtcatctaggggatctgaaaaataaatttcagcatgtaaaatggatcaggagctcattgaatccagaggagtcatatcggaaaattaaaaccttgaagcagataggtgatgggaacaactacgcatccaaagttgcaaggaacttcaccaatcatctggatggttctgatgagcttgatgggtattttgctgatatttcaaatagagagaatgctaacctttcatttggacaaggtttctataaacgatcaaaattgcttgatgctagaaagtcctctgcggttttgtcgagggatgcagaaatgaggcggttgatgcagagacaggcagagaccagttacagaaagatggaagagttcatcataaacagactgagagaaattatgaggagcaacagatttgattttttcattccaaaggtttccaagattgaaggtaggctaaaaaacgggtattatgctcgccatggctttcgtaccatcaagcatgacatccgtaccatgtgccaagatgcattgagatataaagatggcaatgattcgggagatataaagcaaattgttgtctccttcatacagctagcaaagagactagggaacccaaggtacatttctgatagatatggagcaggagcccaggacagcctggacattaatcaatattcatttgatactaaactcaaaaagaagcaaaataaaataagaggagcaaattcattggctgctggagcagataattcatctcgtgcatttgaccttgaaatcaaaagaagcctatctaaattaaagaaaaaggatgtctactctggtagcgaaacatctgatgatgatgatggctactctgaagttgatgaaactgagagcgaaactactgtttctgatactgagagtgaccttgatgtaaattctggagcctgggatttaaaaggaaacagtctaaagttaattgaacctggggaatctgtgaccgatgatcgtatattgggtgcccgcatgacaaaggccagccttgttcctccagttactaggaagtatgaagttatcgaggagtaccttattgtagcagatttggaggaagtacagcgaaaaatgagagttgctttacctgatgactattctgagaagttgctgtcacagaagaatggcaccgaaaacttggaacttccagaggttaaggattatcaaccccgaaaagtagcaggagatgaaattcttgagcaagaagtatatggcatagatccatacacacacaatctactgagtgacattatgcctgctgatcttgagttgtcacctactgacaagcatatctttattgaggagttgcttctgaatacattgaataagcaagttaggcatttcactggttcgggaaatacccctatgacttacaaccttaggcctgtcattgaagagatccaaaggtctgcagaggataatggtgatagacgaacttcaaagatgtgcttggggatgctaaagaccatgagaaatcgctctgaacagaacttcgttgcttatagaaagggtctcggtgttgtttgcaacaaaaaaggtggatttggtgtagatgactttgttgtagagttctttggggaggtttacccttcttggagatggtatgaaaagcaagatggtattaaacatatacaaaacaacagtgaagatcaagctcctgagttttacaacattatgttagaaaggccaaagggagacggagatggatatgacttggtttttgttgatgcgatgcacaaggccaactacgctagtagaatctgccactcctgcaacccaaactgcgaagcaaaaatttgtatgcttgatatgtatggggtgtttttggagggagtacccctccctcccctctcctgcattgttcaagaaaaaaagaatttatatgcatga

SEQ ID NO: 36292 - DNA, 291 bp, Zea mays
  Peptide Sequence Number=SeqID_78071
atggctctttgcttcaagcagaaaaactatgctactgcagcacacttttgctttggatgcttcttgagaacagccctcaagaggctcaagcaaggaaggctcgacaggtttgttgacaacaggcccttcaatgaccagaggtacttcttggatgatcagaagcttaagagactgggatgggcagagcgcacaccatgggaagatcagaagcttaaggggcctactgttgctcgttcgatcaaaatgttaatgaatctagatctcagattgcatcccaactgcgcaacttaa

SEQ ID NO: 36293 - DNA, 1350 bp, Zea mays
  Peptide Sequence Number=SeqID_78072
atgcatgcatcttggcagtataagagagtggagatcttggaaatgctgagcagcttgcctctgagaaaatcacactcgttactgatcccccctgcacctctcacagcctgtggtgattggccattgctgagggtagtgcgtggtatttttgaaggtggactggattctactggaagggcagagcttgaggaagatgatgaagcttctggtgctgactggggtgatgaggacttggatattgttgatgcaagtgaggtggtggcaaatggtggcgattattttgatgcagagggtgaaccaaacgaggaggagggtgaggaaggtggctgggacctggaagatctggaacttccacctgatacagagactccaaaatctgctggcaatgctcgctctcctgtatttgtcactccaacagcaggcatccctgtcagccaaatttggactcaaaaatcttctctggctggggagcatgcggctgcagggaactttgatacagcaatgaggttgcttagccgacaattgggcatcaagaactttgctccgctgaagcccttgtttcttgatctgcatatgggcagtcattcatatctgcgtgcccttgctgctgctccagttatatcagttgctgtagagaaaggttggaatgagtccgcaagtcctaatgtaagaggccctcctgcacttattttcagcttctcacaaatggaagacagactcaaggctgcctacaaagccacaactgagggcaggttcccagaagcactgaggcagttccttagcatcttacatacgattcctgtaatcgttgtagactcacggagagaagttgatgaagtgaaggaattaattgagatagtgagggagtatattcttggtctgaagatggaactcaagagaaaggaattgagggatgatgtgacccgccaacaggagttggccgcttacttcacaaattgcaagcttcagagaattcatatgaggcttgtgctttctagcgccatggctctttgcttcaagcagaaaaactatgctactgcagcacactttgcaaggatgcttcttgagaacagccctcaagaggctcaagcaaggaaggctcgacaggtgctgcaagcttgtcaggataaggatgattctcaccaactgaactatgactttagaaatccatttattgtttgcggtgctacatatgttccaatctaccgtggccaaaaggatatttcttgcccatactgtggatcccggtttgctccttccatcgaagggcagctttgtaccatatgtgagcttgccatagttggggcagacgcctcaggcctggtctgctcccctacgcagatgaagtag

SEQ ID NO: 36294 - DNA, 273 bp, Zea mays
  Peptide Sequence Number=SeqID_78073
atggcgccaaaaccacttgggttctataccaaaaatgtgcaataccacttagggcacccactggaaaaagttgagctcgagacgcggacgtttgacatgccatggcatggcttttgtcgtgttatgctcaactgtaatcttgctgacggagagtacatcctcgtgccggagcaaggagctgctcaggaggtagccccagatccagcaccagagccagcaccagaggacctgcctgccactgctttggaaggcaagcccccggtttatgcataa

SEQ ID NO: 36295 - DNA, 273 bp, Zea mays
  Peptide Sequence Number=SeqID_78074
atggcgccaaaaccacttgggttctataccaaaaatgtgcaataccacttagggcacccactggaaaaagttgagctcgagactcggacgtttgacatgccatggcatggcttttgtcgtgttatgctcaactgtaatcttgctgacggagagtacatcctcgtgccggagcaaggagctgctcaggaggtagccccagatccagcaccagagccagcaccagaggacctgcctgccactgctttggaaggcaagccccggttttatgcataa

SEQ ID NO: 36296 - DNA, 273 bp, Zea mays
  Peptide Sequence Number=SeqID_78075
atggcgccaaaaccacttgggttctataccaaaaatgtgcaataccacttagggcacccactggaaaaagttgagctcgagacttggacgtttgacatgccatggcatggcttttgtcgtgttatgctcaactgtaatcttgctgacggagagtacatcctcgtgccggagcaaggagttgctcaggaggtagccctagatccagcaccagagccagcaccagaggacctgcctgccgctgctttggaaggcaagccccggttttatgcataa

SEQ ID NO: 36297 - DNA, 366 bp, Zea mays
  Peptide Sequence Number=SeqID_78076
atggcgccaaaaccacttgggttctataccaaaaatgtgcaataccacttagggcacccactggaaaaagttgagctcgagactcggacgtttgacatgccatggcatggcttttgtcgtgttatgctcaactgtaatcttgctgacggagagtacatcctcgtgccggagcaaggagctgctcaggaggtagccccagacccagcaccagagccagcaccagaggacctgcctgccactgctttggaaggcaagccccggttctctggaggagatggttgctgggataacttggccgaccaccctgccaccgggttggacggacgaggggaccctgcctcggctgaggaggagcatgaggagtga

SEQ ID NO: 36298 - DNA, 273 bp, Zea mays
  Peptide Sequence Number=SeqID_78077
atggcgccaaaaccacttgggttctataccaaaaatgtgcaataccacttagggcacccactggaaaaagttgagctcgagactcggacgtttgacatgccatggcatggcttttgtcgtgttatgctcaactgtaatcttgctgacggagagtacatcctcgtgccggagcaaggagctgctcaggaggtagccccagatccagcaccagagccagcaccagaggacctgcctaccactgctttggaaggcaagccccggttttatgcataa

SEQ ID NO: 36299 - DNA, 471 bp, Zea mays
  Peptide Sequence Number=SeqID_78078
atggcgccaaaaccacttgggttctataccaaaaatgtgcaataccacttagggcacccactggaaaaagttgagctcgagactcggacgtttgacatgccatggcatggcttttgtcgtgttatgctcaactgtaatcttgctgacggagagtacatcctcgtgccggagcaaggagctgctcaggaggtagccccagatccagcaccagagccagcaccagaggacctgcctgccactgctttggaaggcaagccccgcagattgccctcctcacgcgacctgagacgaggtctcccattccggttatggtgggtacaagtgcggtcactgcacgacggccagtcggggtcagtgaggcattgttctctggaggagatggttgctgggataacttggccgaccaccctgccaccgggttggactgtcgagtgggaccctgcctcggctgaggaggagcatgaggagtga

SEQ ID NO: 36300 - DNA, 648 bp, Zea mays
  Peptide Sequence Number=SeqID_78079
atggcgagcaatttcctggagcctgaccgcccttgcgccgacgcaatcaacggcccaacatcaactcctcattttctcccattgttgaatctctctgtgatgcagctcggtggtggcatcagtcagggcgccaaggcggatttgacgacggtgagcaatcaccatttccccagttctccaccaggccctctaatgcccatcggagcttcgccgtgtcctcacagacccaaaacgacacgccccgagcgtaatttcacgccaacgacggcgacggctgcgagattactccagcgccctctcctctctctggtgggtcacagaaccacgccgccacagggtatcgcacacccaatggtttggtaccatcccaggaaacaaggatgggagggcttttgtagtggcagggggaagcagttcgtgccgagaagatcggtagatcggcggcgcggaaacagggatttctgttacgagaatagcggcattcgcggtttggtgaggatggagaagcacgagctggcgctaaggctgacaaattggacccacggagcagtgatcaaggcgcccattcgcggcttggtgacctgctccctcgcgccgttgttccgctgctggtggggccaccttggcagctccatcccctccgcgtga

SEQ ID NO: 36301 - DNA, 642 bp, Zea mays
  Peptide Sequence Number=SeqID_78080
atggcgagcaatttcctggagcctgaccgcccttgcgccgacgcaatcaacggcccaacatcaactcctcattttctcccattgttgaatctctctgtgatgcagctcggtggtggcatcagtcagggcgccaaggcggatttgacgacggtgagcaatcaccatttccccagttctccaccaggccctctaatgcccatcggagcttcgccgtgtcctcacagacccaaaacgacacgccccgagcgtaatttcacgccaacgacggcgacggctgcgagattactccagcgccctctcctctctctggtgggtcacagaaccacgccgccacagggtatcgcacacccaatggtttggtaccatcccaggaaacaaggatgggagggcttttgtagtggcagggggaagcagttcgtgccgagaagatcggtagatcggcggcgcggaaacagggatttctgttacgagaatagcggcattcgcggtttggtgaggatggagaagcacgagctggcgctaaggctgacaaattggacccacggagcagtgatcaaggtgagtcagtacgcgggcgagagatggaaaggagggggggctgacgcgagggcccgccctgtcagtgcccggacgcgctgttga

SEQ ID NO: 36302 - DNA, 660 bp, Zea mays
  Peptide Sequence Number=SeqID_78081
atggcgagcaatttcctggagcctgaccgcccttgcgccgacgcaatcaacggcccaacatcaactcctcattttctcccattgttgaatctctctgtgatgcagctcggtggtggcatcagtcagggcgccaaggcggatttgacgacggtgagcaatcaccatttccccagttctccaccaggccctctaatgcccatcggagcttcgccgtgtcctcacagacccaaaacgacacgccccgagcgtaatttcacgccaacgacgacgacagctgcgagattactccagcgccctctcctctctctggtgggtcacagaaccacgccgccacagggtatcgcacacccgatggtttggtaccatcccaggaaacaaggatgggagggcttttgtagtggcagggggaagcagttcgtgccgagaagatcggtagatcggcggcgcggaaacagggatttctgttacgagaatagcggcattcgcggtttggtgaggatggagaagcacgagctggcgctaaggctgacaaattggacccacggagcagtgatcaaggaatgcgtgaacagtaaaggaatactgttcactatttataggcacaggacacagcctgtgaggaattacaatcatgcccctcataaaagtttacaacattga

SEQ ID NO: 36303 - DNA, 543 bp, Zea mays
  Peptide Sequence Number=SeqID_78082
atgacggttaacaaagcacagggtcagagtatttccaatgttggcgtgtacttgcccgaaccagtgttctctcatggccaactatatgttgctctatctagagcgacagcccgatcgaacataaagatccttgccatcccagccgtcgatgggaagaagaggtcgaggaagggtgtaagaaagaaccccatagtagattgtgggacatataccaagaacatcgtctacaaggagaactttgttggtgcaaaatctaaactcaccggatatcattccaactccactatgatgcccagaacatttgcaattcatgttttgctaagtcttttccacctaagtcctcaaaaatttgagaatatgagcctgaagctggataagcttttgagtagctccactgacaacttttgggcatctggcttggtatttgtgatggttctgcgccacttagcgtttatgatcaatggcccctggcaccctgttctcatcattactgcaagattttatctgtcagacctgttgctgcaccttattcaacaacaataa

SEQ ID NO: 36304 - DNA, 702 bp, Zea mays
  Peptide Sequence Number=SeqID_78083
atgtcagattccacctacattacttcaagggcgatactgtcaacgcggaatgacggggtggatatgataaatgctaagatgatcaatcgttttcaaggggagcatatggtgtaccatagtttcgatagtgccatggatgatccccataactactacccacctgagttcctaaacacactgacgcctaatgggctgcccccgcatgttttgaagctcaagattggatgccctgttatattgcttcggaatatagaccctgcgaatggactttgcaatggcaccaggctggtggttcgtggtttccaaagaaatagcattgacgcagaaattgtactaggtcagtacgctggaaaacggattttcctgccccgtatacctctgtgtccctccgatgacgagatgttccctttccagttcaaaagaaagcagtttcctatacggcttagttttgcaatgacggttaacaaagcacagggtcagactattcccaatgttggcgtgtacttgcccgaaccagtgttctctcatggccaactatatgttgctctatctagagcgacagcccgatcgaacataaagattcttgccatcccagccgtcgatgggaagaagaggtcgaggaagggtgtaagaaagaaccccacagtagattgtgggacatataccaagaacatcgtctacaaggaggttctaacaaactag

SEQ ID NO: 36305 - DNA, 2766 bp, Zea mays
  Peptide Sequence Number=SeqID_78084
atgcagaggaagtacaagctcacgtgccctgagcagtatgaccttttgatcttagccgagatcccagacaaaaagtaccctgaactacaaaagatggttatcaagcatatgatgcatggcccgtgcgggtcgctaaatcctaactgcccatgcactaagggtcgtgcatcgtgcaagaatcattatccccggcctttctgtgacacaactttgcaagggaaggattcatatcttgtttatagacgtcgtgacgatgggcgtaaggaaaaggttcgagggttcgaattggacaatagatgggttgtcgcttacaactcttacctccttcggctcttcaactgtcacatcaatgttgaggcgtgcgggagcatcaaggctgttaaatacctgttcaagtacatatacaaaggccatgatcgtgcgtctgttgttatgagagatgcgagcaaggcagatgatgatgtagatgagatcaagcagtacagagatgcaaggtgggtgacccctccagaggccttatggaggatatacggctttgagcttagtcagaactctccacctgtgatgcagttgcagctccatcttctaaacatgcacatggtggcgtttcacgagcgccaaatggtcgagcgagtcatcaaccgtccaggtgctgataggtcaatgctcacagtatattttgaggcaaataggctacacgaggaggctcggggcatcctgtatcgtgacttccctgagtggtacacttggcagagtggtaagggcaaggtatggcaacgaaggaaacgagatatgggtggacaagtcggtagaatagtctctgctcatccggccgagggagagcgctactatcttcgtgttctcctaaaccacgtgactggcgccacctcatatgtggatctaaggacaatagatggtgtcacgctaccgacttttcgtgaggcagcagagagaaggggtctgcttgagtcggacaacacactagatgactgtctcactgaacgtgctcttttccagatgccatcgacgctacgacgactttttgccacaatattggtgtactgtgagccaagcgatgtggctgtactatggcagaaacacctagatgctatgtcagaggactatcaacgcatgagtcagagcaaaactcatgttgaacagatggtattgattgacattaggaacatgttgcagtcaatgggaaaggacataaagacattccctcttccacctatcatcgacgcgtatgacaatgctataggtactgctagggaggtttatgaggaggaaagtatcgaactggcatcagcggatgcggttctcaaggactctcttaacgaggaacaaatggtcgcctatgataagattatgtctgccgttaacaccgatcagggcggattgttctttgtggatggacctggtggcaccgggaagacttatctatacagagtgctgctcgcgacgctgcgcaatcagggcaagattgcagtggcaacagctacatctggtgttgcggcttccataatgcctggaggaagaaccgcacattcacgcttcaagatacctctcactattgatgatggcgttgtatgttgcttcacaaagcagagtggaaccgcagagttgctacgaaaatcatctctcattatctgggacgaggcttctatgactaagagacaagctgtggaggcacttgacaatagcatgcgcgatataatgggtcggctcggactgccattcggtggtaaaaccattgtcttcggtggggatttcagacaggtcttgcctgttgttcgtaaagggtcaagggctcaagtggttgcttcttcgctacggatgtcttacctatgggagtctatgtcccacttaaagcttgttagcaatatgagggcaaaaaacgacccttggtttgcggagtatttgctgcgcgtaggtggtggaactgaggtcacaaatagtgatggcgacatccgtcttcctgacgaggtatgcgtgccttatagtgggagtgacaatgatcttgacaatctaatagacttcgttttcccaaatctcaacgaaaaaatgtcagattccacctacattacttcaagggcgatactgtcaacgcggaatgacggggtggatatgataaatgctaagatgatcaatcgttttcaaggggagcatatggtgtaccatagtttcgatagtgccatggatgatccccataactactacccacctgagttcctaaacacactgacgcctaatgggctgcccccgcatgttttgaagctcaagattggatgccctgttatattgcttcggaatatagaccctgcgaatggactttgcaatggcaccaggctggtggttcgtggtttccaaagaaatagcattgacgcagaaattgtactaggtcagtacgctggaaaacggattttcctgccccgtatacctctgtgtccctccgatgacgagatgttccctttccagttcaaaagaaagcagtttcctatacggcttagttttgcaatgacggttaacaaagcacagggtcagactattcccaatgttggcgtgtacttgcccgaaccagtgttctctcatggccaactatatgttgctctatctagagcgacagcccgatcgaacataaagattcttgccatcccagccgtcgatgggaagaagaggtcgaggaagggtgtaagaaagaaccccacagtagattgtgggacatataccaagaacatcgtctacaaggaggttctaacaaactag

SEQ ID NO: 36306 - DNA, 219 bp, Zea mays
  Peptide Sequence Number=SeqID_78085
atgtcaccactatctatttctgatctacaagatgattcttccaggttcaagggccatggcatgctggcgccttttacagctggctggcagagcaatgatttgcaccctctgatcattgagagatctgagggttcctatgtctatgacatttatgggaacaagtatctggactctcttgcaggattatggtgcacagctttagtaacagtgacaagatag

SEQ ID NO: 36307 - DNA, 912 bp, Zea mays
  Peptide Sequence Number=SeqID_78086
atgacgcgcgggcctgacttctgcgcgctctggcgcgcatttaatgcgcctgcagccgttgcaaattcccgaggctgccaagttccagagccgcgtcctcttggagcaccggacactgtccgggtggtggcgtgcttcctctgtcgtccgatctgccgttatcagagcggagcacggggactcggggagagagataataccgtggacaaaattgggcacgtcttcttctccgcgaacctcgcgtcctcctcgcctgcctgcctacaagtctcccccctcccctccccgtgcctccctcgggcctcgcttctcgcgctcttcctctcttgcctccgcctgcctccaggctccaacaacccgggagggcgccgtccgcccccgcctccgggagcgatgatgatcgcgcgacgcctgctccgatccaataatgcccccgcccaggcaaccagcttattgaagcatgtaactggcaccgcaagtttgcaaggcaatgcggatagcttgttggatggtacagtcagacattttggctcagcaccgtctgcccagcctgaagaaaatgggttcaagggccacggcatgctggcgccttttacagctggctggcagagcaatgatttgcaccctctgatcattgagagatctgagggttcctatgtctatgacattaatgggaacaagtatctggactctcttgcaggattatggtgcacagctttaggtggtagcgagcctcgcttagtcaaagcagcaactgagcaattaaacaaactacccttctaccattccttctggaaccgtacaacaaaaccttcgttggatcttgcacaggagatccttagcatgttcactgcaagggaaatggggaaagttttcttcacaaacagtggttcagaagcaaatgactctcag

SEQ ID NO: 36308 - DNA, 147 bp, Zea mays
  Peptide Sequence Number=SeqID_78087
gatcttgcgcaggagatccttagcatgttcactgcaagggaaatggggaaagttttcttcacaaacagtggttcagaagcaaatgactctcaggtgtccctattttatagcccctcagtaccatcaatgataactgaaagtgtttaa

SEQ ID NO: 36309 - DNA, 1250 bp, Zea mays
  Peptide Sequence Number=SeqID_78088
gggaagcttcttgtagaagggaggatgagtcaagcgcaccactcggcacaggcgcactgtttgccagcagacctagcaggcgcaccgcctgccagtggatgggacgggacgcattaaatgctgagagggcgcgtcgcccgtcagagcagtggcaggcggcgcgtcgtttccccaataaatacaggggatgcatgacttcacgtcaggttcggcccgatagcttatgtcatgggccacaagcgacgagtctccgcttgaacgggaagtggagggcaaggcccggacacgtgtcagcaccggacccctgctcataccagggtcctccttgttccgggaccctgctgaggttcggacctatccggaggctccagactaatatgtataggggtccggacctactggaatgtgtcgtattttcttgccacgtggcgccctttggcctgcccatacggtggggtcaggcgccgtcccccgtgtggctaggagacgtcgcatgggtgcaacgtcttcattctgtagaagaggcacccgcaccacctgactgtctgttcgcagcacccggacctgtgtcaatggccgctgcagccgccgctccagcatctgtggcgccgtcctcgcccaaggccgccggcgacaacaggaagacggtggtgtccgtggacgcgtcggagctggagaagcacgtcctagcggtggacgacagctctgtggaccgtgccgtgatcgccaggatcctgcgtggctccaggtacaaggtgaccgccgtggagtcagcgacgcgcgcgctggagctgctcgcgctaggcctgctccccgacgtcagcatgatcatcaccgactactggatgcccgggatgactgggtacgagctgctcaaacgcgtcaaggagtcggcggcgctcagaggcatccccgtcgtcatcatgtcatcggagaacgtgtccacccgtatcacccgctgcctggaggagggcgccgagggcttcctcctcaagcccgtccgccccgccgacgtctcccgcctctgcagccggatccgcggagacctgcgtgaccacgcggacgccgcgttcacggttcacacctgtggcgaccgcgtgaccccgtcgcaacaaacaacgacgtttggtccttgtccggacggattccgctttctcggcatggcgaataccggcctggagcgtggtgcttcttgtctcatccggaactcggccagggagaggggaggcgccggccccgggatccgatga

SEQ ID NO: 36310 - DNA, 1039 bp, Zea mays
  Peptide Sequence Number=SeqID_78089
gggaagcttcttgtagaagggaggatgagtcaagcgcaccactcggcacaggcgcactgtttgccagcagacctagcaggcgcaccgcctgccagtggatgggacgggacgcattaaatgctgagagggcgcgtcgcccgtcagagcagtggcaggcggcgcgtcgtttccccaataaatacaggggatgcatgacttcacgtcaggttcggcccgatagcttatgtcatgggccacaagcgacgagtctccgcttgaacgggaagtggagggcaaggcccggacacgtgtcagcaccggacccctgctcataccagggtcctccttgttccgggaccctgctgaggttcggacctatccggaggctccagactaatatgtataggggtccggacctactggaatgtgtcgtattttcttgccacgtggcgccctttggcctgcccatacggtggggtcaggcgccgtcccccgtgtggctaggagacgtcgcatgggtgcaacgtcttcattctgtagaagaggcacccgcaccacctgactgtctgttcgcagcacccggacctgtgtcaatggccgctgcagccgccgctccagcatctgtggcgccgtcctcgcccaaggccgccggcgacaacaggaagacggtggtgtccgtggacgcgtcggagctggagaagcacgtcctagcggtggacgacagctctgtggaccgtgccgtgatcgccaggatcctgcgtggctccaggtacaaggtgaccgccgtggagtcagcgacgcgcgcgctggagctgctcgcgctaggcctgctccccgacgtcagcatgatcatcaccgactactggatgcccgggatgactgggtacgagctgctcaaacgcgtcaaggagtcggcggcgctcagaggcatccccgtcgtcatcatgtcatcggagaacgtgtccacccgtatcacccgctgcctggaggagggcgccgagggcttcctcctcaagcccgtccgccccgccgacgtctcccgcctctgcagccggatccg

SEQ ID NO: 36311 - DNA, 687 bp, Zea mays
  Peptide Sequence Number=SeqID_78090
atgctgccagcggatgcggatctccgccaattcactgccaagccccactgtgtcgtggacaccggcgggtggagatctcgctacggagcgaggtcgatcggtggcagtggcagtgccggctggcctggctatcgccgaccgcctgcagcacggaagggatacgacagggtgtcgggagagattccagcgcgcgacctgccacccggacctgtgtcaatggccgctgcagccgccgctccagcatctgtggcgccgtcctcgcccaaggccgccggcgacaacaggaagacggtggtgtccgtggacgcgtcggagctggagaagcacgtcctagcggtggacgacagctctgtggaccgtgccgtgatcgccaggatcctgcgtggctccaggtacaaggtgaccgccgtggagtcagcgacgcgcgcgctggagctgctcgcgctaggcctgctccccgacgtcagcatgatcatcaccgactactggatgcccgggatgactgggtacgagctgctcaaacgcgtcaaggagtcggcggcgctcagaggcatccccgtcgtcatcatgtcatcggagaacgtgtccacccgtatcacccgctgcctggaggagggcgccgagggcttcctcctcaagcccgtccgccccgccgacgtctcccgcctctgcagccggatccggtga

SEQ ID NO: 36312 - DNA, 372 bp, Zea mays
  Peptide Sequence Number=SeqID_78091
atgtccgtttgtgccaacgcagcacgatcaaaatgcaaaaaattcgggccgcctgccgcggggccgcgacacgatccggcaaccggccgaggggcgaagcaacagacgagcgtggacgctgacagccgagcgtggacgccgatcgtgccaagcgcccagtcccgattccgccctgcgctgccgcccgccctgacatggcaaacagaacaatggtcatctactctgtcattctccatgaacaagctgcttcttgcatccctctatttggtttgcacgactgcaagagctgaggttgcaatcagggatacagagcaaaaatgggatattgaacataatcaggagcaagggcatgacatcatgaaagtcgcctag

SEQ ID NO: 36313 - DNA, 1215 bp, Zea mays
  Peptide Sequence Number=SeqID_78092
atgtccggtgcgacagccacgtcaccaaagccgttgcaatttgaccgttggagttctgacttctgggcccgcctggatgtccggtgcacaccggacatgaactgtagattgtccggtgcgcctgctcccgcgtgcctgacgactgcgcgcttctggcgcgcattaaatgcgtcgcagtctgcaggacctccagcggcgctagcaccttccatccgttcaccagggcaacacgcatcttgcaagctgctcgacgtcaagctcaccccgggaccccctacgccgcgccgccgccgccaccaacagcgacagtcgatagggcgagccgcctgccgcggggccgacaaccgggaccccctaagccgcaccgccgtcgccaccaacagcgatagcagagaaggcgagccgcctgccgcggggccgcgacacgatccggcaaccggccgaggggtgaagcaacagacgagcgtggacgctgacagccgagcgtggacgccgatcgtgccaagcgcccagtcccgattccgccctgcgccgccgcccgccctgacatggcaaacagaacaatggtcatctactctgtcattctccatgaacaagctgcttcttgcatccctctatttggtttgcacgactgcaagagctgaggttgcaatcagggatacagagcaaaaatgggatattgaacataatcaggagcttgcccaagagcatcacgcctctgtcgatccctcatctcacactcctctggcgctccctccagtctgcaggacctccagcggcgctagcaccttccatccgttcaccagggcagcacgcatcttgcaagctgctcgacgtcaagctcaccccgggaccccctacgccgcgccgccgccaccaccaacagcgacaggcgatagggcgagccgccagccgtggaaattctactactgcttccaaaacaagctgccagtgaaagtgagcataaaacagattgctgctgcatctcagacaaatagcagagctgttgcctctgctttcaaaaagcagtgtatggtgccaaaaaaaattgttaacaagaaaattcaaaaccaaacaaaagttgacaacaaaccagatgccataacattctatttgctagcaccatccaaaaatttagaaaatcagtttgatgccatgaaacagtttgccaccaccattcagaattcagccatgttcaagattacaactgcatga

SEQ ID NO: 36314 - DNA, 1038 bp, Zea mays
  Peptide Sequence Number=SeqID_78093
tctgcaggacctccagcggcgctagcaccttccatccgttcaccagggcaacacgcatcttgcaagctgctcgacgtcaagctcaccccgggaccccctacgccgcgccgccgccgccaccaacagcgacagtcgatagggcgagccgcctgccgcggggccgacaaccgggaccccctaagccgcaccgccgtcgccaccaacagcgatagcagagaaggcgagccgcctgccgcggggccgcgacacgatccggcaaccggccgaggggtgaagcaacagacgagcgtggacgctgacagccgagcgtggacgccgatcgtgccaagcgcccagtcccgattccgccctgcgccgccgcccgccctgacatggcaaacagaacaatggtcatctactctgtcattctccatgaacaagctgcttcttgcatccctctatttggtttgcacgactgcaagagctgaggttgcaatcagggatacagagcaaaaatgggatattgaacataatcaggagcttgcccaagagcatcacgcctctgtcgatccctcatctcacactcctctggcgctccctccagtctgcaggacctccagcggcgctagcaccttccatccgttcaccagggcagcacgcatcttgcaagctgctcgacgtcaagctcaccccgggaccccctacgccgcgccgccgccaccaccaacagcgacaggcgatagggcgagccgccagccgtggaaattctactactgcttccaaaacaagctgccagtgaaagtgagcataaaacagattgctgctgcatctcagacaaatagcagagctgttgcctctgctttcaaaaagcagtgtatggtgccaaaaaaaattgttaacaagaaaattcaaaaccaaacaaaagttgacaacaaaccagatgccataacattctatttgctagcaccatccaaaaatttagaaaatcagtttgatgccatgaaacagtttgccaccaccattcagaattcagccatgttcaagattacaactgcatga

SEQ ID NO: 36315 - DNA, 753 bp, Zea mays
  Peptide Sequence Number=SeqID_78094
atggagcacctgcggctctgcggctctgggggatcatctggtcaatatgtctgtgctactctaccttatattcgtgcgaacattcccattatcattgtatttcgagcattaggatttgttgctgacaagggtatactggagcatatatgttatgacttttctgatacacaaatgatggaactgctacgcccatccctggaggaagcttttgtcattcaaaatcaacaggttgctctagactacattcgaaaacatggcgcaacagttggtgtcactcgagaaaagagaattaaatatgcaaaagaaatacttcaaaaggaaatgttacgtgttggggaattatgtgaaactaagaaggcatactattttgggtatattattcaccgcctactgatgtgtgctcttagtcgaagagctgaggatgaccgagatcattatggaaacaaaagactagatcttgctggtccactgcttggagggctgtttagaatgatttttgtaccctttagaattcctgtggatcagtctgatctgtctttaagaaagctggaggagctaacgaaagagctgcaatcccttcagaaggagaagagtgatcggctgaagcaagtcatggaacatcttaacactttgcattcgttatgcgaggtgcttggtgtagacttcaaacaaacagtaaatgaggtgctaatgtggtggagctacgaacaacaatctgatgtcctgatcgagagcgacggagctaatgtttga

SEQ ID NO: 36316 - DNA, 450 bp, Zea mays
  Peptide Sequence Number=SeqID_78095
atggccacatctaggctccccagggaccgctggaccctctggtgttgccgctcaaggcttctatggcccagcagtagccgcaaccggagagggagacaactgagcccctcaacctctccgtggctcctcaagtcaaatcagaagttacaaggtttaagggaagaaatgaatgcgattgtcccatacttggaggagatgagaaagaagaaagttgaaagatgggaccaatttgttgatgtcatagagcaaattaagaaggttgcatctgaaatcaggcctgcagattttgtaccctttagaattcctatggatcagtctgatctatctttaagaaagctggaggagctaacgaaagagctgcaatcccttcagaaggagaagagtgatcggctgaagcaagtcatggaacatcttaacactttgcattcgttatgcgagtgcttggtgtag

SEQ ID NO: 36317 - DNA, 903 bp, Zea mays
  Peptide Sequence Number=SeqID_78096
atggagcacctgcggctctgcggctctgggggatcatctggtcaatatgtctgtgctactctaccttatattcgtgcgaacattcccattatcattgtatttcgagcattaggatttgttgctgacaagggtatactggagcatatatgttatgacttttctgatacacaaatgatggaactgctacgcccatccctggaggaagcttttgtcattcaaaatcaacaggttgctctagactacattcgaaaacatggcgcaacagttggtgtcactcgagaaaagagaattaaatatgcaaaagaaatacttcaaaaggaaatgttacgtgttggggaattatgtgaaactaagaaggcatactattttgggtatattattcaccgcctactgatgtgtgctcttagtcgaagagctgaggatgaccgagatcattatggaaacaaaagactagatcttgctggtccactgcttggagggctgtttagaatgtcaaatcagaagttacaaggtttaagggaagaattgaatgcgattgtcccatacttggaggagatgagaaagaagaaagttgaaagatgggaccaatttgttgatgtcatagagcaaattaagaaggttgcatctgaaatcaggcctgcagattttgtaccctttagaattcctgtggatcagtctgatctgtctttaagaaagctggaggagctaacgaaagagctgcaatcccttcagaaggagaagagtgatcggctgaagcaagtcatggaacatcttaacactttgcattcgttatgcgaggtgcttggtgtagacttcaaacaaacagtaaatgaggtgctaatgtggtggagctacgaacaacaatctgatgtcctgatcgagagcgacggagctaatgtttga

SEQ ID NO: 36318 - DNA, 333 bp, Zea mays
  Peptide Sequence Number=SeqID_78097
atgatgaaaatcacaatttgcctgaaacatgtttcctctttttgtgcaataccaagtggcagagccagggctcaggctgtcctagctgcagccctggctccaagccataaagatcagaggaatgtccactgtccatgcaatattcattacaatgatgtcagtatacctaggcactccatgggtggtgcgaaccgaagactgtctcttggtggagccactatgcaagcccccaaaacagatatactgcactccaagacagctcgtgccgccaagaaggctgaagatttgggcgctttatctcctagattaaaaaatgttcaaatttcaaactaa

SEQ ID NO: 36319 - DNA, 516 bp, Zea mays
  Peptide Sequence Number=SeqID_78098
atggcaactgcggtggcgcagagcaaaacctcgaaggcaaaggggcgtagcgagaggaagagaaacaaggcatggctgttacctgaggggggcccaaccccacaagtcatacggctggcgcaacaacctcctggtctaggagtcatactccttggacgtcggccaacgtgtgaggaaaaggcgaaccaccgtgtgaggagcatgccaccagttgtgaagtcgaaccgccactcgcaccagtaccgtgccttctcagggccaccgcggaagacagaagatgaattttcaaaaccatatgcagcggtatcgaggcgccccgcgcatggcctagtaaaagccatcgagcgcgaagatcatgggtcagtcagccgcgggaatagggctgtgtctgtgactaaagcgtgcctcagcccaaccaagggcggttgctcagggccaatagcggcgtccggcctcaccacctgggactcccaggggaggtccgaggcctccacgtatgcatactgggccccctaa

SEQ ID NO: 36320 - DNA, 291 bp, Zea mays
  Peptide Sequence Number=SeqID_78099
atgggtcacccccttgggcagcggttcctgggtgcagagaagttgaaccgccactcgcaccagtaccgtgccttcttagggctgccacagaagacagagaagggcccacagcggcgcccggcctcaccacctgggaggttccggggctgccacgtgtccatcgtgatggagtcctcctgggcatctgcagggtccgacgctggcacgtgtctggaccccatcatgtacggctcagctccccgcccaggcggagacccgatgctgccacgtggccctctgcccgtgacgtaa

SEQ ID NO: 36321 - DNA, 2325 bp, Zea mays
  Peptide Sequence Number=SeqID_78100
atgggtccagcttttgatgagcctatgcaggggcgatcacagcgcaaggacgaggactccaccggtgaactcagatgtcaagcggcagcccaaaatgcactttgtaaccaggcgcccatgcagggcggccaacgctgggaggaacccttcaaggtgacagaaatatgccagcccgggggcctcgcatacgcgtacgccagcccggtccagatcccggttgaggctgcctcttgggggatgttgccaactctttcaggaacgctgaaggcgaatcgtcgtgcggggaatgattcgctgcgcctcttcatctccgccaagggcagcggtccagcttctggcacgggggcctgggtccaggagtcatactcctcggacgtcggccaacgtgtgaggagaaggcgaaccgccgcggccaccacagaagacagagaagatgaattttcaaaaccatatgcagcggtatcgaggcgccccgcgcatggcccagtaaaagccatcgagcgcgaagatcatggaggaggcaccccagtcgctggtcataccaagttgacgcaagatacaagctttggccccacctgcaggctcgtatcctcccttgaggcgggcccggggggccactgtcggtaccctgaatcaaggcggcgcctggcctcaccacccgggtgggtccgggaccgccacgtgtccatcatggtggaatactcctgggcatctgcagtaagtccggacccccatgggagtgcacctaaggttgcggacaggactccaagggaggggtccggcgctggcacgtgtctggaccccatcatgtacggctcagctccccacccaggcggagacccgatgctgccatgtggccctctgcccatgacctcaattcctgctgtttctcggattcgattcggttgcaccgggcgcgtcgtctccctcgccggagatccagcaggaagcggcgcaagccctaatggtttgatcctagctgggtgcggcgtgctatccccaattcattggtttctctactccgggtctgatattggggtttgctgcggtggtaactgcatggacacagtaagggaggaggcatggccagtggctgcaccgcggcagcagccatcagctccccaaccgcagcagcaacagcagaatggccgtattgatctcagggagctcaaagctcagatggagaagcagcttggtccggatcgctcgcggcgatattttggctacttgaatggctacttatcagagaggctcggcaggcaagactttgaaaagctgtgcctgcataccctggggcgggagaaccttcaactgcacaaccggctaatccgtgcaattctctacaatgcctaccagggaaagtgcccgccacctccactggatgcagggagacctgtaggagcatcagtaaagaaggcttatcaggctgctgaagtgttgaatgcttgcaatggtgatgccaggttgttacagattcagagattgaggcctgtggccagagcacaggatcatactttaaaagacagtacaaataacacgggtccaaattgtagggtggctgctgccaatcacaaccaagttactcacgatgcttctggatctctggagaatggtacactaaatcaacttgagttgaagagattgcgttttcaacaatgcgaacctgtagagccagtggcaaagcatccgcgtgtggaacagttgccacccaataatttgcctgtacagagaagaagcatgagcagcactgcagaacagtctgcagaaatattgagaagtcctgtacgagctccactgggaattccattttgttcagcaagtgtgggtggtgcaaggaaatttccacctccactaattgttgcaggtgaggatcacttcaacagctgttctgagcatgatgggctgttcagcactgaactgctgcatagacggatggagaaaacagcagaaacgctgggtttagctggtatcacaatggatagtgctgagcttctgaatattgctctggacaagtacatgaaaaacctgattaggtcatctgttgagttagtaggaggtagtgttcagagggatgcaaggaaagggacaccaacctacaagcagcaagcctatggaaagcagattaatggtgtccggctgccaaaccatgttcatatgcaatcagccagtggatcaccaggagccaagaatgagattggaattaaccatttgatctccatcaatgactttaaggtagccatgcagctaaaccctcaacatctcggggagaactggccagtccttctggagaagatatgtctatgttcttcagaggaaaatgactga

SEQ ID NO: 36322 - DNA, 267 bp, Zea mays
  Peptide Sequence Number=SeqID_78101
atgcagcaaatcctcatggcagcaacgcccagcgaccccaagtccggcgagattcacaccccgcgacacctgttgtccctggccaccgacatcgatgtccacccttctagcgccctccacggtggcacggggaacaaaggagacctagggttttgggaggcatggcggctggtgcggcacttatatcctggcgcggtcatgaaccccgaggtccacggttggcgtggaccgcagttcgggcgccatctgcacggagtccgcccatga

SEQ ID NO: 36323 - DNA, 210 bp, Zea mays
  Peptide Sequence Number=SeqID_78102
atggaagcgccatggctggaccacccaaagtttgaaccccggccgtattattcggatccaaacggactacacgcagagggctctcaggagaaccaaatcctcatggcagcaacgcccagcgaccccaagtccggcgagattcacaccccgcgacacctgttgtccctggccaccgacatcgatgtccacccttctagcgccctccagtga

SEQ ID NO: 36324 - DNA, 222 bp, Zea mays
  Peptide Sequence Number=SeqID_78103
atggcggaccacccaaagttcgaaccccggccgtattactcggatccaaacggactacacgcagagggctctcaggagaaccaaatccccatggcagcaacgcccagcgaccccaagtccggcgagattcacaccccgcgacacctgttgtccctggccaccgacaccgatgtccacccttctagcgccccccgtgagatccctcctgagcgaccagtcgag

SEQ ID NO: 36325 - DNA, 234 bp, Zea mays
  Peptide Sequence Number=SeqID_78104
atgacaggatggtgtgctgctcctgctagagaccagatcaaagtggtttcagtcaacaatgaagtggattcagatccaccgcctgtagatgttattatttcctctgatgtgacagttgaggtagatatattgtttcgccgtcttggcccaatacaagtccatgaagacagttgcagtgctggtcttgtccatgctgcctgtgctacactgcgagctctcctcattaaaacctga

SEQ ID NO: 36326 - DNA, 240 bp, Zea mays
  Peptide Sequence Number=SeqID_78105
atgacaggatggtgtgctgctcctgctagagaccagatcaaagtggtttcagtcaacaatgaagtggattcagatccaccgcctgtagatgttattatttcctctgatgtgacagttgaggtagatatattgtttcgccgtcttggcccaatacaagtccatgaagacagttgcagtgctggtcttgtccatgctgcctgtgctacactgcgagctctcctcattacaacctggccataa

SEQ ID NO: 36327 - DNA, 1842 bp, Zea mays
  Peptide Sequence Number=SeqID_78106
atggcaaccgccgcgggggccgcggcactgctttactacacactgaaccgccgcctgcagacagagaggctgaataaggaaggggagtgcagcgatagcagggatgtgacacccagggccgcacagggttctcccagcaggagccgtgtatcgcggagggacgtccgcgcccctgccacctggcttgagactatctcgacgctgtcagagacgctgcggttcacgtattcagagacccttgggaagtggccgatcggcgaccttgccttcgggatcagtttcctcctcaagagacagggaaacttatctgtagcaagcatatacgctggaaatgatagtgtggagctcaaaggagctgaagtaattgctgatttaaagtatcttctcaatttgctgacactttgctggcatttctccaaaaagccattcccgttgtttttggaggcgactggctacactacggaggatgttcttatgcaagaacctaaagcaggaattttgaagccagctttcaccattttgcttgatagagacaaaaagtctatacttctattaattaggggaactcatagcatcagagatacattaacagctgccactggtgctgtggttccatttcaccataccattgtacaggaaggtggtgttagcgacttagtactaggatatgctcattttgggatggttgccgctgctaggtggattgcaaagctctcaggggccttgtctggcacaagcattgcagatgtacccagacttcaaaataaaggggcagctgcatgtatgacatggaaactggcagagtcaggagtgcattttatcactacagtcatcaatggagctgatctggttccaacattttctgctgcgtcagtagatgatcttcgttcagaggttacagcgtcagcttggctaaatgatctccgccaccaaattgaacaaaccagaatcctaagcactttttatcgttctgcgtcagccttgggatcccggcttccatctatggcaaatgctaaagcaagagtagctggtgctggcgccatcttaagacctgtatctactgggacgcaggttgtaatgaggagagctcgcagtgtagcacaggcagcatggacaagaccagcactgcaactgtcctcatggacttgtattgggccaagacggcgaaataatatatctacctcaactgtcacatcagaggaaataatagcatctacaggcggtggatctgaatccacttcattgttgactgaaaccactgcggaaaccacagagacagttacatcagaagctgtatcagaagtggttcagagttctgtttctgtggcggtcgatgctgttgacttggtagatgacaagggagatagcgatgatgacatcgtcgatcaccatggggacgaggacaggatgactgatgtggagctgtggcagcaacttgaaagtgagttgtaccggaagagggagggagaagaggatgacatagccgaagagatggctgaaagtacaattgctgaggaggtgggtggcgtggctgaagatgtgctcagcgagacaaaggaagtgcataggttctaccctcctggaaaaatcatgcacatattattctccagcagggaagaagcagatcgtggagaggagcctgaggatgatgttacggatggggaggcacaaagcagcatagggatcttcttgacgccaagatctctgtacggcaagctgaggctttcgaaaatgatgatcaatgaccattacatgcctatatacagaagaaacattgagcagctgatcgcggagcttgagaaggattcctcggatcaaatagggtgcgtcaggtgtagttga

SEQ ID NO: 36328 - DNA, 357 bp, Zea mays
  Peptide Sequence Number=SeqID_78107
atggattcccaagtgttgacgtattccccacagcactctgccagcattgatggcgagtcccctctcaatagccagcagactcgtgcaccacgacttactgttcgcaagaggaaggcttcctcaaaccccactggcaatgatcaacggcctgtggatcatataatttactcaaggaggagcgatagggccattcaagttgccaacacacagaaggcagaggctgagaagaagaaggctgagattgagatgaagaatgttgagtttgagaagaagaatgctgaagctgaggaggctgagaagagaaaggctgaagccgaacaagctgagaataagagaaagactgaggccgaaccctaa

SEQ ID NO: 36329 - DNA, 1545 bp, Zea mays
  Peptide Sequence Number=SeqID_78108
atgacactagagcaggagcaggatcaggaactacttcaattgcaccggaggaccaatctggaggaggtgatagtgaagaaattatacggagtcccgttgcaattgacactagagcaggagcaggatcaggaactacttcaaatgtaccggaagaccaatctggaggagtcccctcccaatagccagcagactcgtgcaccacgacttactgttcgcaagaggaaggcttcctcaaacccccctggcaatgatcaacggcctgtgggagcacttgagacagaagaggagcctctgagcagggacattgggatgcagcatcctactgccaaggatcatataatttactcaaggaggagcgatagggccattcaagttgccaacacacagaaggcagaggctaagaagaagaaggctgagatcgagatgaagaatgctgagatggagaagaagaatactgaagctgaggaggctgagaagagaaaggctgaagccgaacaagctgataagaggaaggcagaagaagctgagattaagagaaaggctgcagctgaagaagctgagaagaaggctgatgccgagaagaagaaggcagaagaagttgagaataagagaaaggttgaggccgaagaagctaagattaagagaaaggttgcagctgaagaagctatgaagaaggaggctgatgccgagaagaagaaggcagaagaagctgagaataagagaaaggctgaggccgaagaagctgagattaagagaaaggctgcagctgaagaagctgtgaagaagaaggctgatgccgagaagaaggttgaagcggaggagaaaaggatacaggaggccaaagctgagattgacagtttggagaagagcattgatggccaggcaggatccagctcatcatttgatgatatccagttccctgtggagtctgatgatgatatcaacaatttgacccaaccaatccgactttctcaagacgaagtctcagtaggccaggctgatttcagcgagtttcaaaggatgatattcaagcgcctaggtgatagagtgctgaagaagcctagggagtacatatccccgttcaaaatccctcgtaatcgacctgagatacccctggccaaggctgttgcacttaggcggaagatcgcctctgatcctgagctaaaaaggagaattttgttagagtttggccttcttgttggactcactggcgaggaaattttaacctctttttctaatgacacccttggtgagtcaggaatcatagactttttcgtgcactgcatgcaacatgatgctattgtgcacaaggaagaacggcacaaggctgtctttgccaaaatcccaatcattgatgcaaccttccagaaagtttccaacctcaagttacccagattcaagggcccgatatacatatgtgagttgttgcattaccagatcttccaccctttgaaccaagctgaaattcctggatcgctggataagtttagaattggtggtcgtccggtgccaattgaatgggatagtagtcagtcgaacaattag

SEQ ID NO: 36330 - DNA, 1461 bp, Zea mays
  Peptide Sequence Number=SeqID_78109
atgacactagagcaggagcaggatcaggaactacttcaattgcaccggaggaccaatctggaggaggtgatagtgaagaaattatacggagtcccgttgcaattgacactagagcaggagcaggatcaggaactacttcaaatgtaccggaagaccaatctggaggagtcccctcccaatagccagcagactcgtgcaccacgacttactgttcgcaagaggaaggcttcctcaaacccccctggcaatgatcaacggcctgtgggagcacttgagacagaagaggagcctctgagcagggacattgggatgcagcatcctactgccaaggatcatataatttactcaaggaggagcgatagggccattcaagttgccaacacacagaaggcagaggctaagaagaagaaggctgagatcgagatgaagaatgctgagatggagaagaagaatactgaagctgaggaggctgagaagagaaaggctgaagccgaacaagctgataagaggaaggcagaagaagctgagattaagagaaaggctgcagctgaagaagctgagaagaaggctgatgccgagaagaagaaggcagaagaagttgagaataagagaaaggttgaggccgaagaagctaagattaagagaaaggttgcagctgaagaagctatgaagaaggaggctgatgccgagaagaagaaggcagaagaagctgagaataagagaaaggctgaggccgaagaagctgagattaagagaaaggctgcagctgaagaagctgtgaagaagaaggctgatgccgagaagaaggttgaagcggaggagaaaaggatacaggaggccaaagctgagattgacagtttggagaagagcattgatggccaggcaggatccagctcatcatttgatgatatccagttccctgtggagtctgatgatgatatcaacaatttgacccaaccaatccgactttctcaagacgaagtctcagtaggccaggctgatttcagcgagtttcaaaggatgatattcaagcgcctaggtgatagagtgctgaagaagcctagggagtacatatccccgttcaaaatccctcgtaatcgacctgagatacccctggccaaggctgttgcacttaggcggaagatcgcctctgatcctgagctaaaaaggagaattttgttagagtttggccttcttgttggactcactggcgaggaaattttaacctctttttctaatgacacccttggtgagtcaggaatcatagactttttcgtgcactgcatgcaacatgatgctattgtgcacaagttcaagggcccgatatacatatgtgagttgttgcattaccagatcttccaccctttgaaccaagctgaaattcctggatcgctggataagtttagaattggtggtcgtccggtgccaattgaatgggatagtagtcagtcgaacaattag

SEQ ID NO: 36331 - DNA, 1288 bp, Zea mays
  Peptide Sequence Number=SeqID_78110
atgcggaagcttaacccagagacgatgaaattagagattggtggtggaaaagagattccaatcactgagcatagtgtttggtgtgttttgcaattaccaaacattggccgtgacccgccccccatgtctgatgcagatgctcgtgccttgcgggacgagctgggagagcaaatttgtggcaactcttatagacgcatatctggtatcaatctatctgttatcactgatcgactgcagaagaggattctcactggggagctgggcctgagagcctttttcatggctgcatttcagtgtctgctattctccaacactgacactcgcatcaggattgatgatgtaaagtatactcaggacatccagaacatggccaacaagaactggtgcaaagcggtagttgacaggctcaacatagctgctcgtctttataaaaaagattttgcggagaaaggcatcaacgcacccatcagtggatgcgggatcttcgtagctatgctttacgtcgacaacctgcaacatggatttgacacaagtcccttttcgatccctcgatgtaatttcttggactcgaagacgattgatgcgatagcaaataaggatctcaggggagatgttcctcctggcaccaccgagtttggacacctcaggctgagaagtatcgctgacatgtgctacggcgtccccattggtgctctagcaatattacatgctctagtaccaacacctgccctagtagcagaccctaacccaacagtagcacctaacccaggagcagcagcatctgccctagtagcagcaacacccactgctactggcacatctgctgatgtgcttggcacatcccatgatcccggcggtcatgcttccttcaatatccaacccccagtcttctaccagtaccctagcttcagttcttcttttggtcagagcattatcgatttagttggaaggagtaggaagtcagatgcgctgaacatcttgaaggcttttgatgaaagcactagggaagctcagtcgtacgcacagaaggctgccaagtattcaacaatatcccgcgaccttatggcaaaagctcaccacgagtgctacattggcattcagaagcttatcgctgacgctatcgctgagaagcgagctgccaaagagcgcaggaggaaggtgaacaatgacactagagcaggagcaggatcaggaactacttcaattgcatcggaggaccaatctggaggaggtgatagtgaagaaattatacggagtcccgttgcaattgacactagagcaggagcag

SEQ ID NO: 36332 - DNA, 441 bp, Zea mays
  Peptide Sequence Number=SeqID_78111
atgagtggcggtgttcgccaacgacgcttggatctcgcccctagagggaccccgttagggagggccataccgtcaaaccgtgtctggtgccacaaatggtgctcaacacgaagaaactcgtggcaattgaagcattccaaattacacacacgatttttcaactctgctcgagaatgcacccaggccgaacttacgcgccaggagcacctagtccgagccaacctacgctctcctcgtgtacaaaacaagagaaaggaattagataaaaatgaattaaaggaaaggaggaagaggttaaggttgaaagtccccttgtctcctattcaagatgaagaaagtgatgatgaacaagacccagagtttgctcctgccggcgatggttctggcgacgacaatgttgttattgttggtggcgatgagaataagggtacacccagctga

SEQ ID NO: 36333 - DNA, 684 bp, Zea mays
  Peptide Sequence Number=SeqID_78112
atggatcaagaacagaatgtcacaggtcagcaaggcgctgacactgtccgtcgctctcctcgtgtacaaaacaagagaaaggaattagataaaaatgaattgaaggaaaggaggaagaggttaaggttgaaagtccccttgtctcctattcaagatgaagaaagtgatgatgaacaagacccagagtttgctcctgccggcgatggttctggcgacgacaatgttgttattgttggtggcgatgagaataagggtaaaactaagacgcgagctatacgatgctcacctgggaagttcataaagcttgtgaatgctctcttcgatgaattgaaaggtgaagtagttgccaaggggtttggcggcctgctgagattcaagccgcacttattgtccagaaaattgctcagctggctgatgcggaagcttaacccggagacgatgaaattagagattggtggtggaaaagagattccaatcactgagcacagtgtttggtgtgttttgcagttaccaaacgttggccgtgacccgcccccatgtctgatgcagatgctcgtgccttgcgggacgagctgggagagcaaatttgtggcaactcttatagacgcagatctggacatccataacatggccaacaagaactggtgcaaagcggtagttgacaggcatccagaacatggctaa

SEQ ID NO: 36334 - DNA, 288 bp, Zea mays
  Peptide Sequence Number=SeqID_78113
atgagcagcaagccgcgcgctgcagcagccccggatcccctccgcatccgcgtgcttcaccggatctgcgtagccccaacatcgacgccgttcaccccgaagaaggcaagccgctcaacgctcgtcgatgttcgtagcgatgcacaaatcggaatcgccatcgtcctcacaaacaccgattgggtttgtttatgggaatacatcgatagatgtttatgtgagaagtgtattggttttatgcatgtgatcggtgatggtgatagtcgatgcaaatcagggtatgattag

SEQ ID NO: 36335 - DNA, 468 bp, Zea mays
  Peptide Sequence Number=SeqID_78114
atggcgcagggcacttctctggttcgagctcgagctggagctcctcccatgggtggacctctaccccctatgctcggcacccctccccaaaacagcagccgcaacagctcttctccataccgacgcccctgcttttccctgtccggccaggaaaacacccttccctgttttcctcttccccagcatgccgaagcaccctattgttccctgcgcgcgagctcactgcggggtgccctagccgctgcatcactggcgaactcgccttcagctagcgcgtcgtggcctccccatggtcatggtctgcgacaggaagtcgtgcgctacatgtttgatgtgttgcgcagcgagcccccttcctcgctgttcatcgtggtgcccgccggctgttcgtcaaaatgcgcagcaatccgcgcgctgcagcagccccggatcccctccgcatccgcgtgcttcaccggatctgcgtag

SEQ ID NO: 36336 - DNA, 453 bp, Zea mays
  Peptide Sequence Number=SeqID_78115
atggagagcgcgctcaagaggccgacggcgctctacgcgatgggcgccggcgtgctcccaaggagctcggccagggctgctcgccggccatggagaagcctgctggcggccatggagcaaagagcagggaaggtcgcggccaagggagagcaggggcgtcggtatggagaggagatgttgcggctgctgttttggggaggggtgccgagcacaggggctagaggtcgcagtggcgctggccatagggggcggctccacgcgcgccatgggaggaagtgggcgctggccttggtgctccctgcgcgcagggggacagcaggggagaaaagaagctcggccatggctgctggaggtgctcggctagggagggagcatggagagggagccggcttccatggggaagaagtggaggaggccatggctgctggccgagctccctgctggccaccgtga

SEQ ID NO: 36337 - DNA, 342 bp, Zea mays
  Peptide Sequence Number=SeqID_78116
atggcggcatttgcgggggcaggggcctgcggattgcggagatcccgcccttccatcgacgatggaggctggcgggcggtgtgggagagggggcggggtcatggtgtagcccctggtggacgtctagggaggcgcgatttctccgtaaaccatggatcttccaggagagcgtggagaaggatggaggttggtgcttcgccaacgatggaaaccttgcccggagccttgattgaaggcctgcgtatttgcgcgagcgaggccgatacggtggggagcgggaattgtgcatggattgaaggtcgcaggatgcggggcggggtgctccagcggcagaacgtctga

SEQ ID NO: 36338 - DNA, 1080 bp, Zea mays
  Peptide Sequence Number=SeqID_78117
atggcggcatttgcgggggcaggggcctgcggattgcggagatcgcgcccttccatcgacgatggaggctggcgggcggtgtgggagagggggcggggtcatggtgtagcccctggtggacgtctagggaggcgcgatttctccgtaaaccatggatcttccaggagagcgtggagaaggatggaggttggtgcttcgccaacgatggaaaccttgcccggagccttgattgaaggcctgcgtatttgcgcgagcgaggccgatacggtggggagcgggaattgtgcatggattgaaggtcgcaggatgcggggcggggtgctccagcggcagaactctcttgagagttctttgagaatttcaagcttctgttattgccatgaccatgtttccagaatgttcgaggtgatcaggatgctggaaggagacagactcatagagagatgggaggtgtcacagaacgtggacacgctagagttcgtctcatcggagctcctacttcaaaagtacatggattttgcagcagacgaatgctcacttggtgtagaagccatggagctctctggaccaagccgacgggaattaattctttatgtgccggcggtcatcccgcgcggctcattttctcgcttcctctctctcggtttcacgccgccgccgctcaccaccgcccccgacgccggacgccgctcaccaccgacgccggccgccgctcaccaccgacaccggccagccgcccgcggcctaggagcgcgctcgccgccgcccccaaccgtcaccgccccggagcgccgtccgccacgccgcctccgcccccggagcgccgccggccccatagcgccgcccgtcgcccgcccacgcccccggagcgccgcccacccacgcccccggagcgccgcccgctccaggagcaacgaccgccgcccgccccgcctccggagcgccgtccgccgtgccgccggccccgaagcgccgtctgcagcccgtccccgttgcgccgcccgcctccgaagcgtcgcccgctgctcgccgccaccaacgccgccgccgcggagcgccgcagccgccccggaccgttaa

SEQ ID NO: 36339 - DNA, 1080 bp, Zea mays
  Peptide Sequence Number=SeqID_78118
atggcggcatttgcgggggcaggggcctgcggattgcggagatcgcgcccttccatcgacgatggaggctggcgggcggtgtgggagagggggcggggtcatggtgtagcccctggtggacgtctagggaggcgcgatttctccgtaaaccatggatcttccaggagagcgtggagaaggatggaggttggtgcttcgccaacgatggaaaccttgcccggagccttgattgaaggcctgcgtatttgcgcgagcgaggccgatacggtggggagcgggaattgtgcatggattgaaggtcgcaggatgcggggcggggtgctccagcggcagaactctcttgagagttctttgagaatttcaagcttctgttattgccatgaccatgtttccagaatgttcgaggtgatcaggatgctggaaggagacagactcatagagagatgggaggtgtcacagaacgtggacacgctagagttcgtctcatcggagctcctacttcaaaagtacatggattttgcagcagacgaatgctcacttggtgtagaagccatggagctctctggaccaagccgacgggaattaattctttatgtgccggcggtcatcccgcgcggctcattttctcgcttcctctctctcggtttcacgccgccgccgctcaccaccgcccccgacgccggacgccgctcaccaccgacgccggccgccgctcaccaccgacaccggccagccgcccgcggcctaggagcgcgctcgccgccgcccccaaccgtcaccgccccggagcgccgtccgccacgccgcctccgcccccggagcgccgccggccccatagcgccgcccgtcgcccgcccacgcccccggagcgccgcccacccacgcccccggagcgccgcccgctccaggagcaacgaccgccgcccgccccgcctccggagcgccgtccgccgcgccgccggccccgaagcgccgtctgcagcccgtccccgttgcgccgcccgcctccgaagcgtcgcccgctgctcgccgccaccaacgccgccgccgcggagcgccgcagccgccccggaccgttaa

SEQ ID NO: 36340 - DNA, 345 bp, Zea mays
  Peptide Sequence Number=SeqID_78119
atggagtccgggttacgccgtcgatctggcctcgactggtggattgagagcttcgtgaaattgagcgaatcaggcgttgggtcatcaaatctgggagccatggcgtgcataactaggactgcgcaccgaagaaagaacaccgccgcggatccgcgtgacgccgtgggggaccctgttgctgcctccattaccgatcattatgttaattggaacatggagcgaccacccgggaaaacagtgctaccacaagggtttatggacgcccttggccgattaattaggaaagctaatggaggactaccttacccgaaaggggcaagggcagtaggggagtggtcagtgtag

SEQ ID NO: 36341 - DNA, 210 bp, Zea mays
  Peptide Sequence Number=SeqID_78120
atggccgccgccgtggtctgtgggcagaatgccgccgctacctgggatccgcccgctcgatgtgtggcgccgccggatcattatgttaattggaacatggagaaccacccgggaaaacagtgctaccacaagggtttatggacgcccttggctgaccaattaggaaagctagtggaggactaccttacccgaaaggggcaagggcagtag

SEQ ID NO: 36342 - DNA, 261 bp, Zea mays
  Peptide Sequence Number=SeqID_78121
atgaaggccaagtcacaccagcaacaaatcatcctaaggagtacctgcaaaaattgtgccacaagcaaggctgagtatactaatactcagctagacttacccgtgaccgcacttgtacccaccataaccggaatgggagaccacgtctcaggtcgcgtgaggggtaaagtccactgccaggttcaatcaggtcgtccaccaactgcatcttgtgggtggcaccacatcactgctcgatcatcatctctcggtcctatatga

SEQ ID NO: 36343 - DNA, 234 bp, Zea mays
  Peptide Sequence Number=SeqID_78122
atggaggccaagtcacaccagcaacaaatcatcctaaggagtacctgcaaaaattgtgccacaagcaaggctgagtatactaatactcagctagacttacccgtgatcgcacttgtacccaccataaccggaatgggagaccacgtctcaggtcgcatgaggagggcaatctgcgggcaggttcactcaggtactaggcttaccgatttaccatatttctcggcatgtgtttag

SEQ ID NO: 36344 - DNA, 333 bp, Zea mays
  Peptide Sequence Number=SeqID_78123
atggaggccaagtcacaccagcaacaaatcatcctaaggagtacctgcaaaaattgtgccacaagcaaggctgagtatactaatactcagctagacttacccggttacaatggatcaagcagtctcattagctgcgagaagcagacgattcgaatcgagtttttatccttgcaagtgaccgcacttgtacccaccataaccggaatgggagaccacgtctcaggtcgcgtgaggggatatgtctgcgggcaggttcactcaggtcgtccaccacggcatcttgtgggtggcaccacatcacttgcacgatcagcatctctcggtcctaaatga

SEQ ID NO: 36345 - DNA, 264 bp, Zea mays
  Peptide Sequence Number=SeqID_78124
atgcccgaggggttcggccccgagacctccaggtgggagagttggtacttcggctgcggcaagacacccgaggaatcaggcatcgcccggggaaggtgcggcaccctcggcttcgtctccaccctcagcgccgtctccaccctcggcgagatccgccccagcctcggacggcgacgcgagcaaaaggatctccatctcgaaggaggacgccagcaccgtgcttgggcccgcgacggccgcgtcaagcctctgaacctcggctaa

SEQ ID NO: 36346 - DNA, 738 bp, Zea mays
  Peptide Sequence Number=SeqID_78125
atgggcgtaccgtctgccagcggaatagacaggcatgccgcccgccaccggaatggacaggtcttattaaatgctgaggcggcaccctgcctgccaatggaatggacaggtcgccgcctgatagcagagctccgcccgctggcttacgtcatgcgcagtaggtcacgtggcagcatcgggtctccgcataggcggggagcagtagcgtacgtggacagagtcccaggacccgtctacgggcggtgcggaccccacacagaggggtccgagacccgtcccgggggtccaggtcgcgcctgtgggtgttctggtcctttcccggtggtcccggtctacacggtaccaacagtggcccccgggcccacctcaggggaggatacgagcctgcaggtggggccaaagcttgattggcgattggcgcgccgcttccgtgctcctgctgacgaaccgacgcccaaggaggatgactcgtgggcctgggccctcatgccagtgactgggcagttggtttcggcggagatgaagaggcgcaccgccgcgggcggcggcatgctcctcacgcggtggttcgccttcttcgcacccagagaccgactcccatggagcatgactcgtgggcccgagccccccgtgctagaggctgggctgctgctttcggtgaagatgaagaggcgtggcgattcgctcctcgcgtggcggttcgccttcttcgcactcggagacctgcaacccagctga

SEQ ID NO: 36347 - DNA, 354 bp, Zea mays
  Peptide Sequence Number=SeqID_78126
atgggcgtaccgtctgccagcggaatagacaggcatgccgcccgccaccagaatggacaggaaccggcgcccaaggaggatgactcgtgggcctgggccctcatgccagtgactgggcagttggtttcggcggagatgaagaggcgcaccgccgcgggcggcggcatgctcctcacgcggtggttcgccttcttcgcacccagagaccgactcccatggagcatgactcgtgggcccgagccccccgtgctagaggctgggccgctgctttcggtgaagatgaagaggcgtggcgattcgctcctcgcgtggcggttcgccttcttcgcactcggagacctgcaacccagctga

SEQ ID NO: 36348 - DNA, 438 bp, Zea mays
  Peptide Sequence Number=SeqID_78127
atggcctgggtattctctgtcacagagtcccaggacccgtctacgggcggtgcggaccccacacagaggggtccgagacccgtcccgggggtccaggtcgcgcctgtgggtgttctggtcctttcccggtggtccggtctacacgaaccgacgcccaaggaggatgactcgtgggcctgggccctcatgccagtgactgggcagttggtttcggcggagatgaagaggcgcaccgccgcgggcggcggcatgctcctcacgcggtggttcgccttcttcgcacccagagaccgactcccatggagcatgactcgtgggcccgagccccccgtgctagaggctgggctgctgctttcggtgaagatgaagaggcgtggcgattcgctcctcgcgtggcggttcgccttcttcgcactcggagacctgcaacccagctga

SEQ ID NO: 36349 - DNA, 789 bp, Zea mays
  Peptide Sequence Number=SeqID_78128
atggctgaaaggtaccaacttccacgaagttgcgttcctccgatgacaaggcggaaggattgcgggcgtcccccatccgggggctcggaaggtggaaagacacgatgcataagggagcgcgaagacatggtcgtccttcaagggggtcaccctccttttaaaggcgactctccctacttacgtccccagccgtcgcgggctgagtcttctccaacacgctccaaggtcctccccctacggcgcaggggctgggtcccacgcgtcatgcaagctggtccagggcagaagaagccaaaccgccgcgcgcagggcatgcaactgcccagcggttacaagcattcctccactttcgcccagaccagcgggcccacacgtcatgcaaccggcgcgccggttgctacgtgcgtgcaactgcaccgccactcgcaccactaccgcgcctcctcgactgcggaaccagtaccgcgactcgaggcaaccctgcgtatgacccagcagtgccagccaggcgcgacggtcaatacggccaaaaatgggccggcagtaatggcggtggcaggcgggcaggaggagcggtcgcgtcgtcagccaagcttacgtcccatccaggggcagcgagggaatcctctctcacagcgtgaagacggcgcgcccgtgttccgttcctcgaacggctcacacacgcgccacgatcgcctcacgaaccacttgccccgtcgcattaactccgcggcgggacaggcggcgcctcaggcaggagaagcaagcgacgcttcgccttcgccataa

SEQ ID NO: 36350 - DNA, 969 bp, Zea mays
  Peptide Sequence Number=SeqID_78129
atgtcttcgcgctcccttcatgcatcgtgcctttccaccttccgagccccccggatgggggacgcccgcaatccttccaccttgtcgtcggaggaacgcaacttcgtggaagttgggagaagcgagccgggctgcggcctctgcccctccctgagcttcaaggatgttcatcatcagtgctggggaggggagtgtgccgagttggggtcggtcccgctgccgcgtgcccggctctctgagccgagcggcttcggagccgctcctggtgctgccttccgccacggcagctggaagaggttccgccgccgacgagctagccggcgccacccacggactgacctccaactctacggccttctgtccgtccttgcctctcgagttgggggcatgggcgagggcctcatggcagcagcatctgccctgaggtcatcgctgctgctgttcggccctccagagcagaagtcgtcgtcgttgccgctgccggggcgggcgacgacgagccgttcgtcggtcttctgttgctccgcaggcccccccccaatcgcgtggggttattcgtacctgcggagcactgagactcgccttgtcgattatctgaaccgcttcaccgagcgtgagttgcctcgtgcaaaggtgacgagtgagagcctggccgggtcgtccactggtggaaccgacgccgaagttgagctgccgaggccacaagctgagctgatgtctttgggggacagctggccgaggcctcgaggtggccggccgagccacctgctcgggccggattctcgaagaagaccctggcggcgatggcccgggtgtggtgctgatgtcgtccttcagagtgggggccctccgaccacgtcgccgtccgaggctaggtcagaccccgtcgaaggtgtagttgatgtcgagggtgctgctgcccccttcggctgtcgacgtccgagcctgcaggatcacgttgtcttgtag

SEQ ID NO: 36351 - DNA, 1143 bp, Zea mays
  Peptide Sequence Number=SeqID_78130
atgtcttcgcgctcccttcatgcatcgtgcctttccaccttccgagccccccggatgggggacgcccgcaatccttccaccttgtcgtcggaggaacgcaacttcgtggaagttgggagaagcgagccgggctgcggcctctgcccctccctgagcttcaaggatgttcatcatcagtgctggggaggggagtgtgccgagttggggtcggtcccgctgccgcgtgcccggctctctgagccgagcggcttcggagccgctcctggtgctgccttccgccacggcagctggaagaggttccgccgccgacgagctagccggcgccacccacggactgacctccaactctacggccttctgtccgtccttgcctctcgagttgggggcatgggcgagggcctcatggcagcagcatctgccctgaggtcatcgctgctgctgttcggccctccagagcagaagtcgtcgtcgttgccgctgccggggcgggcgacgacgagccgttcgtcggtcttctgttgctccgcaggcccccccccaatcgcgtggggttattcgtacctgcggagcactgagactcgccttgtcgattatctgaaccgcttcaccgagcgtgagttgcctcgtgcaaaggtgacgagtgagagcctggccgggtcgtccactggtggaaccgacgccgaagttgagctgccgaggccacaagctgagctgatgtctttgggggacagctggccgaggcctcgaggtggccggccgagccacctgctcgggccggattctcgaagaagaccctggcggcgatggcccgggtgtggtgctgatgtcgtccttcagagtgggggccctccgaccacgtcgccgtccgaggctaggtcagaccccgtcgaaggtgtagttgatgtcgagggtgctgctgcccccttcggctgtcgacgcgagagttgcttttcacagaaggcgatgagtgagggttctgttaccgacgcagtcaagaaggcccgaaaaatcatttcggcagaggagctctcgagcatgaagacttgttcggtccgtggagtcacttatccgagcgcgagttacttatcgcagaaggtgatgagtgaggaaaattttgacgcagagggggttgcccccttctag

SEQ ID NO: 36352 - DNA, 930 bp, Zea mays
  Peptide Sequence Number=SeqID_78131
atggaatgtcgcagcatttcggagacctttctgcgcgcgaatgccgcgctctgcgtgctcgccccagccatctgcgggctgtgcggtgcccaccgccgcagtattcacttcaaaccaggcccggcctcgcccgaagaggacgatgtgcgagaccgcgccccgcttccgcggcgatggtaccgggcagcatacgcccggctgctccgtcattcggggtcactggcaggggttgcaggtggctttccgtggcacggggcgaggggatccctcgtcgcatgcccgcacgccgccacccgggccgcgcactttgacgcgctcgcgggtgagttcgtcgccgccgtggccaccgtgagccgcggccacccgccgctgaagatggaggtgacgtcgctgagatcgctgacgcaggtctgcgacgtgctcggcgtatcagcccagcggaggaagagcgtgcggctcaacgtctgcccgcaggtgacgcagcaccacgtctggcggggcgcgctcgaggcggtgctcggggatctccaggccgacatggcgtctctggatagcccgagcccagggatcaagatggccgagcagatcgcctccgcttgcaacggcttcctgtcggacacggcgacgtcctcatcgccgtcctggatgcgcccaacgccgttcaagaaaccagcagaaccgacggctcccgccaagaagtggcaagaagtgctggacatgtttactgacctcgccaggagcctggagatggaggatcgactcaccgggcatgtgcagaagccttcaaggaggcgcgccgggcaggactgcctggtgcagaggaagctgtccaagagcctggggcactcctccaggtgcctgtacacgctgctcctcttctacctctatggctccgtccgggacatggagccatatagacaaaacatataa

SEQ ID NO: 36353 - DNA, 1743 bp, Zea mays
  Peptide Sequence Number=SeqID_78132
atgacagtcaaggcgaagcaactccgtgtgaaagggcgtggtcgtcagatgaaaactctaggagttggtccattttgcctccgcatttcggagacctttctgcgcgcgaatgccgcgctctgcgtgctcgccccagccatctgcgggctgtgcggtgcccaccgccgcagtattcacttcaaaccaggcccggcctcgcccgaagaggacgatgtgcgagaccgcgccccgcttccgcggcgatggtaccgggcagcatacgcccggctgctccgtcattcggggtcactggcaggggttgcaggtggctttccgtggcacggggcgaggggatccctcgtcgcatgcccgcacgccgccacccgggccgcgcactttgacgcgctcgcgggtgagttcgtcgccgccgtggccaccgtgagccgcggccacccgccgctgaagatggaggtgacgtcgctgagatcgctgacgcaggtctgcgacgtgctcggcgtatcagcccagcggaggaagagcgtgcggctcaacgtctgcccgcaggtgacgcagcaccacgtctggcggggcgcgctcgaggcggtgctcggggatctccaggccgacatggcgtctctggatagcccgagcccagggatcaagatggccgagcagatcgcctccgcttgcaacggcttcctgtcggacacggcgacgtcctcatcgccgtcctggatgcgcccaacgccgttcaagaaaccagcagaaccgacggctcccgccaagaagtggcaagaagtgctggacatgtttactgacctcgccaggagcctggagatggaggatcgactcaccgggcatgtgcagaaggtggaggccatgaaggaggggttgtaccagatacgtgacgtcgtcattgaacgggacatagccttcaaggaggcgcgccggcaggactgcctggtgcagaggaagctgtccaagagcctggggcactcctccaggtgcctgtacacgctgctcctcttctacctctatggctccgtccgggacatggaggtgcacgtcggcaaatgcatttctggcgagggaggcaggaatgttaccgttcacgccgcagaattcctgatcgatggcgatgaatcgacgatcaggagcggcatcaagcaactgagccgtgccctccaaatcttccggtttgtttgggaggccgcgaatactgactgtcatgccgccaatcacaatggtaaagatgttgtgggcaagaagaagaatgaagatgcaaaggggctcaatcaagttgcacatggagcttcacaggatgctcaggatgctataggtgcaaggaatcgacgaaaggcttaccgtggacctcggtctacgtgcgacggcggccggttgaagtccggcgacgtcgatccggtgtctccggtgaggcgcgggcgtgggcacggggttggcacggcgtggggctacgcgcgtgggcggagcgctgagagcgtgctctggcgtcgccagggcgcgtcgaacacgtggtcgtgttcatctgcccgagttcttgcgccagcagagctccaaaacgagcctcgttctgtgtcgaagaagttcgtcggcgacctcggggctgtttcaagacattattgttcaagaagaggtcccagtctactaggaatttcctcgtcggggtcacggtccgccggggtgccgctgcgggtaggagaaaagcgcctggccgtgcgattggatgcgggcggctgggattga

SEQ ID NO: 36354 - DNA, 240 bp, Zea mays
  Peptide Sequence Number=SeqID_78133
atggcttaccgtggagctcggtctacgtgcgacggcggccggttgaagtccagcgacgtcgatccggtgtctccggcaaggcttttagtgcctttactttccaatctagcatatagggtagcacttacgtgggtagacagacacactttcttagctgagacacgtggaacacatcatgaattgctgacatatgaggtggcaacttcaactggtatactacaggtccacaagcatctttga

SEQ ID NO: 36355 - DNA, 2922 bp, Zea mays
  Peptide Sequence Number=SeqID_78134
atggatatagtggtggaggaaggaaatgccgatgttggcaatactgctgaaccatcgtatgaggttgtggctaaaagtggttgttcagcacaattgtcaactaatgacactgatgaacatgaactggctatagagagcgaggatagtaaggtcagtgttggtaatgctgcaaaacaatcacacgatgttgtgggagtaggcattgactgtattttcaatcatgctaaagtgtcaactgaagccgatcttggaccacaaccggatgtgatacacttgacatctttggatgttccaaatgaatcaagtcaaataagttctgatgcagatatggtagagcagaacaaaaaagatgctttggacacacttattagaatatcacaacataaaaaaccaaagaaatcgaatgtagctcgagttgtctctgaagattataagtgcaccccagaagatgttcagcttattgaatacattaaaacattaccggggaaacaagttgtggtgaacatcgacagcgcatggttaaatagaaatgatatggaatgtctttttcatggtgacatcgaattgtctgtcgaagctctcagtgcatatatacactgtattagggatgaagagcatttacttcatagagaaggtggaaaggtcttcttggagaacacattcatttccagtctgcttaagcgtgatggcgaccctaaggtgttcattccaatgaatatagaaaattttcactggtacatggcagttctgaatgcaaaaaaaagtgagttaaaaggtctagaaagacaaattaaacttgcagcagaacataaagagctttaccaaggcaagtggtcgaaccttgatgttgcatcatggccagttatagagaagatcacaacacaaatgcaaaccgatggggtatcttgcgggctatggatgataaactatatggaatactggacaggatcctccctatctgataacgtaactcaggatgatataacaatgtttaggtttaagctacctgcaatattatgggactcgagattaaacacaaagaaaggacatcaaaatcttgaccacaatgtggatgaagatggagagagttcaagtgatgttcaaataatcgatactccattaacatcaacaaacacgcaagaactgatgtttgtattatggacatatatcatggggatagacaacgccaaatatttaaagaaacattggattcagagtactaaaccttatccaatttctttaagtcttcaaaaacttaaagatatattggatgtaaataagccgatggatacagattgttttaacatggctgtttggatgatcgcatgcaatgatgccttgttcttgttggaagacaaataccactacatggatctacagttctgttccataactaaatttggtcgagaccctcgccttcgtgcaaagccagatatcaacatgttggcaaaattattagaatgttggcctgacatggagtacgatgtttcagattgcaaacaaattctattgcccttttctttcatgggtcacttcaccttatatgtacttaacatggacactagaagcatctatataatggactccatgcctataccatcatggtttaagggtgatcatcctagcatgcattatatacataatatacattatattgccaataatatgaatgctgccatggaattggccaatcctacatggaaagacgatatttatatgtggcgtcgtatagtaccaacatgggttccaagaacattaaactgggatttatctggctttcttgttatcaactttatgcacgattggaatggtataaggttaccctgcatttgcactgtatggagggatagggctcatcgcaccttctacctcggggtcggcgtcgcgttcccgaagccaacactactccccagcccctccaggaggtgtgactccacctcctgcccgactgggaggaagccaagcggattatgtggtgcagcattatacattgctgcactctctcatgggtgtaattacaccaaggcagatattgtctctgttgtgcatgtgtgtgaggccactctaacgaagcgattgatagagttcgaaaatacagattctggcagcttaacacctgtttcaaaacattcgcccaagtctggagaaattatctgcaaacacaaggataaaggttttgagcattttgctcatggactttgtgaaaaatgctacaataagttcactaaactgtcgggtggactagaaggtggttctgtccctccagcattccaacgagctgaaaagaaaagacttgaagctgctaaaagggctgaagaagctgcagcagctaaggaggcagcgctggaaaaatctctttgcgacacacagaattctgaggttgagagtgccatgactcctagaaagggtttaagtggagataaatcttcgaaaatgggatctgagggactcataaatgactctatgccacccaaggatcctgaagagggaggtgaaaattgtgaaggcaatgcagatccagaaagcctttctgacattgacgatgcagaggttgatgggtaccttcacaatgaggaagaaacacaatataaaaagattatctgggaggaaatgaacaaagagtaccttgaggaacaagcagacaaggaagctttggcagctgaattggcagctagagggattgatccagaagcgggaaagaaaaaacgaaaacgtaatgaagacacgaagagctcgacacctgctgaaacaccagcagaagccacgtgcaacatgctgaaacggaagggacttggttcaaagatcaatgtgggagctgttgacgaattgtacaagagcatttacattcttgaattagaggcaaagcatgctgtacgaacagatcatgaaattgcaaggggagcattggcattgttcggttga

SEQ ID NO: 36356 - DNA, 1110 bp, Zea mays
  Peptide Sequence Number=SeqID_78135
atgtgtgcttggaaaaccgcaggtgcattgtctggtagaacatctgtgtccaaaataaggctgatggatgggcaaggcaggacggtggacttcaggaacacagtgatcatcatgccatcgaaccttggcgcttggcacctcctcgccgggatggtcagcaagaactccatggaggttgctcgtgatctggtcatgcaggaggttgatgggtactttcacaatgaggaagaaacacaatataaaaagattatctgggaggaaatgaacaaagagtaccttgaggaacaagcagccaaggaagctttggcagctgaattggcagctagagggattgatccagaagcgggaaagaaaaaacgaaaacgtaatgaagacatgaagagctcgacacctgctgaaacaccagcagaagccacgtgcaacatgctgaaacggaagggacttggttcaaagatcaatgtgggagctgttgacgaattgtacaagttcaaaaatgaactaaccgacgacgaatattcgaaaacggaggtagtattttgctcggtctgtgattttgcattttctgtcgagccacaggcgggctcgggccaatggattttcatgtcgggttttgcatggcccggcccggcccgtggtgtaagaccatttggagtatcgctgttgattgctgggtatgatgacaatggcccacagttgtatcaggttgatccctcaggatcatacttctcctggaaggcatcagccatgggaaaaaatgtgtcaaatgcaaagacatttcttgaaaagagatacacagaggatatggagcttgatgatgccatccacactgcaattttgactttgaaagaaggatatgaggggcaaatttcctccaacaacattgaaatcggaattattcgagctgaccgtgagttcaaagttctaagcccatcagagatcaaggatttcatggaagaggtggagtgtttgttgtgttcacattgcagatttgctgtagtgcatggatttcgtggctgtaggtgcccgtgcgatgccacggaacataaattgagaacctccaatggacttcatttgagacaagtgatgcccaagaaaatgggggtaaactga

SEQ ID NO: 36357 - DNA, 153 bp, Zea mays
  Peptide Sequence Number=SeqID_78136
atggccgagtggcaagctcaacactgggcaagtaatgcaagtgatagctgtgtcagtttacccccattttcttgggcatcacttgtctcaaatgaagtccattggaggttcgcaatttatgttccgtggcatcgcacgggcacctacctataa

SEQ ID NO: 36358 - DNA, 252 bp, Zea mays
  Peptide Sequence Number=SeqID_78137
atggctctcaaggtcgaaaagaatgcggcaaacaagtgggatgtgcgggttccggttccacaagttaaccgaaaatcttcatgggtgatagctgtgtcagattcttccgtgcatagggcaagtaatgcaagtgatagctatgtcaatttacccctattttcttgggcatcacttgtctcaaatgaagtccattggaggttcgcaatttatgttccgtggcatcgcacgggcacctacctagtcaataaataa

SEQ ID NO: 36359 - DNA, 555 bp, Zea mays
  Peptide Sequence Number=SeqID_78138
atggctaagaggggtgactacatggacagctcttgcgactgctctaatggacgaacccctaaaaggctggtgcaggattgcagcagttatgcgcaggcgcatgctaagaagaaagttcgcattagcacaagaactgagtacacatacgctccgtatcacgatggctaccagtggagaaaatacggacagaagatgatccggggaagtacctacccaagtctggttccacaagttaaccggaaatcttcatgggtgatagttgtgtcagattcttccgcgcatagggcaagtaatacaagtgatagctgtgtcagtttacccccattttcttgggcatcacttgtctcaaatgaagtccattggagcatgtgtcttcatgtaaagcctggaggaattgttgaactgttcgatggaggcaaccaaaaactaaccgtggagcatgacgctatccgggtctgcaaaaccaaacctgttgcagtggtattactcaactctcgacaacagtccccttcagaaagactcacgccaagcgacaaagattcctcgcaaaattga

SEQ ID NO: 36360 - DNA, 1455 bp, Zea mays
  Peptide Sequence Number=SeqID_78139
atggcggtcgacccgcggcaggtggtggcgggcttcctcaccctctccatgttcgtcatgctcggcaacatgatcaagcacgaccacttctctcccgtcaccgaggagctgggcttcgaggcaacaggtgtggtgtcgaacacaaggaagcttgacaacgatgctgaaatgagcagcgtcgatacggctggagtggaggacctgatggacgctgtcgaggaagttaaaccttgctggaccaaaccaagtccaaaaaatcagccgtctaatggttttgttacattctccttgactatgggccctgagtatcacatctctcagatcacagatgctgtggttattgcaaggtatctaggtgcaacacttgtactcccagacatcagaggaaatgaattaggaaataagcgaaaattccaagacatttacaatgtggataagttcgtgaggagcctggatggtgttgtcgaagtaatagaggatatacctgatgaagtgagtgctaagaagccagcagtcatcagagtaccgaaccgtgtgactgaaagcttcatcacaggcaccatccagcccatcttccaaaaaaacaagtacttaagactagcggtcattttctcttccgtaagtttaaggccaaaggagacgaacaacaaggacatggacgcaactgcttgccttgcgatgttcggtggcctcgagctgaagcacgaatattctgaggtggccagaaaaatgctggataggcttcaagaattaagcaagaagtcagatgggaaggtcttggcgatcgatttgcggaccgacttgctggaaaagaagagttgcaagacaacccgcggcgctcgaagaaaaggctgttatagccctgatgaggtcctggctttcctgaggagtgttggcttctctgctaacacaaccatctacttgacagagacgtcgtggtacaaaggcctggatgttctgaaggaagaattcccaaacacttggtataagggtgacattatgccagccgagaacaaagctgaattcctgaaatccagcaatgcagacctagcaagggctctggaccttgagatctgttcgcagagcgacgtgttcgtccctgccgtcgctggcctgttctacgggcatgtcacgggtaagaggatcgcgtccggacgcacccagatcgttgtgccttcccagtccagcacctcgacacatgcgtcagacttcatctccacctacatctccaacaagaaccaccttgcctacgctccggttccacaagttaaccgaaaatctttatgggtgatagctgtgtcagattcttccacgcatagggcaagtaatgcaagtgatagctgtgtcagtttacccccattttcttgggcatcacttgtctcaaatgaagtccattggaggttcgcaatttatgttccgtggcatcgcacgggcactctcctagttaggctataa

SEQ ID NO: 36361 - DNA, 585 bp, Zea mays
  Peptide Sequence Number=SeqID_78140
atgacagagtccctggtgcagaacaagccggggatggccagcatcaaggagatgccggtggtgcaggatgggccaccgccgggcggtttcgcgcccgtgcgcttcgcccatcggatccccacctcggccaggggaacaagaaatttccctcaaggaacaataagcgacatggtcagtgatgcttctgaggcgatatcattcatttgtaacaatgttgttagctttggaggggatcctaataaaacctacttgatgggtcaatcagcaggagcacatatcgtggcctgcactctcttagagcaagcaattaaggaatctaagggagagaatacctattggaatgtggctcaaataaaagcatattttggtttatctggaggatacaatatccaaaatttggtcgatcactttcatgagcgtggtgtctttatagttcaatatttctcagtgtttaaagaaccagaaatggatttgcttgtttctaattcattttgcttgttggatatcgatatgcacatgcattttcagccattgtctcagatagataaccttctgcattcagcttatgatcaatgggacaaataa

SEQ ID NO: 36362 - DNA, 120 bp, Zea mays
  Peptide Sequence Number=SeqID_78141
atggatttgcttgtttctaattcattttgcttgttggatgtcgatatgcacatgcattttcagccattgtctcatatagataaccttctgcagttagcttatgatcaaggggacaaataa

SEQ ID NO: 36363 - DNA, 498 bp, Zea mays
  Peptide Sequence Number=SeqID_78142
atggatttgcttgtttctaattcattttgcttgttggatgtcgatatgcacatgcattttcagataaccttctgcagtcagcttatgatcaagggtacaaataagatcatgccaactctactccatgtactgctggtgtcacaggtccttaatgctttgttcaacctttgcaaaattaataaaagaagacatgaacaagcaaccgaaaatagaatcatccctcacttgatgaaatttgtcatgtcagactcacctctgcggcaaaaagtggaaaaaacactgttgaaaaaagaggccattcagaatttagtgaagttcttccaagattgcccagaacagttttttggccatatattggacgctttcttgaagataataacgaaatcttctaggctaaatacaacaatggctaccaatggtttaacaacattgctcattgcaagacttgaccattcaaatttggtggtcgcaaaagtgtggagacttgaattcatataa

SEQ ID NO: 36364 - DNA, 114 bp, Zea mays
  Peptide Sequence Number=SeqID_78143
atggcggaggccgtaacgacttcagctggcgccggagtcgcgcgatcgcgaagatccagccagcgtgatccggttcacgcggggaagaagaagtccgcgcctgcaagaggttaa

SEQ ID NO: 36365 - DNA, 219 bp, Zea mays
  Peptide Sequence Number=SeqID_78144
atggcggaggccgtaacgacttcagctggcgccggagtcgcgcgatcgcgaagatccagccagcgtgatccggttcacgcggggaagaagaagtccgcgcctgcaaggtcaccgaactctcaagaccagaaaaacatgtccttaaacttgtccggctatccagaactgaatttgctcataccggatcttaatgtggcgtgccatgttggagtgacttag

SEQ ID NO: 36366 - DNA, 1017 bp, Zea mays
  Peptide Sequence Number=SeqID_78145
atggcgggttgttttcaaataaacagagggtctcttatgaaaaagtgcctggccgaaggggtatcggccaacgtgagccgcccgatcatttatggacggcttggattaggtttcttctacaagcaaaccggtacgcacttcaggcccttggatccgagatccacggaccacaacaccccatgcccagatccaacccaagcccttgatctacagatcggtggtcacgatttaacgcggcaagggttatgcgcagcatctaatcgtggttgtccattgagatctaacggtgcacaactctttccccaatctgacattgggcacggcggcgctctagtgccgcacggcggagggctcgccggcgatagccatgccggtgcgcagatgccccaatccccgctcctaagggtgctacgtgaagcgcagaacatagggaataggaaggggtggttctcaccgacaatagaggtccggtcgatgctgtccacggcagattgcgagcctgcggcggcgttgaggctccgtcgatggcggcggacgtctaggctgtactggccatggcgcgcggcggaaacggtgaaggctggtccgagtgccaacgacggcttccgcaatccgcggtggtgggcatggcgtctggcgtcgtggggaatcagggcatatgcgagcgagggcgagaagagaggaggtcacgcggtcccggctagccagcagggcgaagtcagcgcagaaatggcggaggccgtaacgacttcagctggcgccggagtcgcgcgatcgcgaagatccagccagcgtgatccggttcacgcggggaagaagaagtccgcgcctgcaaggtgggtcccactgatagtcccacggagcagcgcgagttgttttggtgaggggatgacacgcggggtccacacagaggtgggacgcaacagaccgcgtggggaggtcggccactggttctgtgaccccaccggtcggtgtatggggcgagagggcagcacgtgggctgagggagcatggtga

SEQ ID NO: 36367 - DNA, 300 bp, Zea mays
  Peptide Sequence Number=SeqID_78146
atggttggctgcaggaggcatatcagccctggtcctgtacttcgtccacacttaactccctttctaccgatctggattctttcacatgacatcatcgttgattcagctcacgtctgccaatcagaacttttaatacaaataatcatttatgcttgttgtgttcttatgtcactaacttgtccaatgaaaaagagtcaggctggctacatagttataagaattcaagaaaacagattactaaatgaaatattctctggacatcaaggacaagcgccattacgagatggctcgactcgctga

SEQ ID NO: 36368 - DNA, 540 bp, Zea mays
  Peptide Sequence Number=SeqID_78147
atgcagaaaaaaattctggttgcgtctgtgttccaagggaaggactctctgccctttgctagactgatatcctcccttgctgctgccggaacttggctgcagagtgcagcctgcaggaccaacttctttgcaactcttatttatgcagcaatttttgttgttcaaaatagtaattgccattaccatgtcctcatgatcgtagctggtggacatgtaacacatgtttgggaattaggggatttcatcacctcgtcggaggcacatcctggaggttttcttttcacgaagtttgccagtagtaaccagactctttttgaccttttcccggatagctttggtagcaggatgaagccctacttacagattggaagcagcagttggattcctggcacaacctcgcttcgccagccaattctaccgatctggattatttcacatgacatcgtcgttgattcagctcacgtatttgacttatttgatacaaaacacaatggaattcttagatttgaagactttgctcagttcatgcgtgagacttga

SEQ ID NO: 36369 - DNA, 2691 bp, Zea mays
  Peptide Sequence Number=SeqID_78148
atggtggagactcgccggagctccgccgccgccgccgggaagcgcacgtctccatcgccatcctcttcgtccgtacctcccccgaagcgctccaaggcggagtcctcggggtcaccgacggcgtccgcgcccggcagggccgaggaggattctgtggcgggagcggcacccgcgaggagcgccggctcggtcgatgacgcggcagcggtcgcacagaaagatcaaggagtcgataagccgtcttccgccgctgcagagagttcaaagcggaggaaggagcaggagcaacagcaacccgcagtgccatgggcgaagctgctctcggagtgctcacagggcttggttctgactacagctaggcagcattctaaaggtgctttcgggaggagccgagaagggaaaggggcttgtagggggaagggcaagcctggtgctgtggtgactggtgagagctgtctcaccgagtcaccagattgcagaaatcagtatctacttgaggaatgtatctttttgaattcatttgcaattgccactggatctatgactcctcactatcccatcagtgtggatcagatttctgttggtcaaagcaaaaactgtaatttgtggctgaaagaccaacctgttagcaaagtgctttgcaagctgcggcgccttgagcaaggaggtccatgtgagttagaagttatagggaagaagggtatggtccaattaaatggaaggtccatttttctttatcctttgaatgacaaagttcctaaaacggtgctatcatctgctgttagccttctagaagctcctgttgctagtgtaaagcgtatccgtacagataagagaacaggagacacttcagctgttgctggtacagagatgatgacatctacatctaatcagaaggatgtagcagcagtacctcccgcgtcagctggagagaacagccaaagagtagtgcggccattggcatcatctgcttctgataaattgaaagggcgtgctgtgagccctgaaaaggaatttgcgaatggggaaaatgctaatgaggttaattctaacatcgaagactctccaatggttgttgctgcagcccccatatctcctgatgctgctgcgaacgatacctgtcaacaaaatggctttgtctctgattctcatctcggtgcggaaatcggtaagactgcaacctataagataaggccagttctgaggatgattacaggatcaactatatccgagttcgatttgactggtgatgatctttttaaagctcttgaagatcagagggatcacatcatcagggagcttaacgcttcaaccaacgtgcctccaagtagatgccaagcctttaaggatgggatgaaacaaggaattatcaatccaagtgatattgatgtcacctttgagaattttccttattatctcagtgagaatacaaagaatgtgctcttgtcatctgcgttcatacacttaaaaaagaaggagttcatcaagcaatttgttgagatctcatcaataaaccagcgaattttgttatctggtccagcaggttccgagatttatcaggaaacattggtaaaggcacttgccaaacattttagtgctagactccttgtggtggattcacttttgctgcctggggcaccttcaaaggatccagaattccagaaagatgttgggaaggctgataaatcaggggataaggcagctgccgagaagtttgcaatatatcagaagcatcgttcttcgttggcagacactgttcacttcaggaggccagctgcaccaacttctagtgtgaatgctgatattgtaggaacatccactctgcattctgcatctctaccaaaacaggaatcgtcaacagctacatccaagagttatacttttagagaaggttttgttaactattcttcattattacttaatgtattgagttattttttctctcaagctcaaccatgctcgttgtcacaaaggggaccaagttatggttatcgaggtagagtgatgcttgcttttgaagataatggatcctcaaaaattggagtccggtttgacaagcagatccctgatgctgaattactgcgcccagacttttctgctggtgaagaagttgagaggctagctatgaccgagttaatagaggtcatttcagaagagaacaaatctggacctctgatagtgttacttaaggatgtcgagaaatcattcacgggggttacagagtcactatcatctttgaggagcaaacttgaatcgcttccacctggtgttcttattataggatcccacacccagatggacagccgcaaagagaaggcacatcctggaggttttcttttcacgaagtttgccagtagtagccagactctttttgaccttttcccggatagctttggtagcaggttgcatgaaagaagcaaagaaagtccgaaaacaatgaaacatctaaataaacttttcccaaacaaaattttgatccagcttccacaggatgaagctctacttacagattggaagcagcagttggatcgtgatgttgaaacccttaaagccaaatcaaatattggtagcattcgcatgtttctgagccgcaatggaattgaatgcaatgatcttgaagaattgttcatcaaagaccaatcattgagtaatgaaagaagcttttgttttgcttcgtttacattcatctaa

SEQ ID NO: 36370 - DNA, 825 bp, Zea mays
  Peptide Sequence Number=SeqID_78149
atggaaggcgcgtcctccgccccagatcgtcaccccggctctctccgcgcccgtgacagcccgctctccatggaaggcgagtccgcgatgctcacatggattgggtaccccgcccccgctctctccatggaagcccagtatgctgcttgtgtgaaaaatgctataatgaagaggatatctatatttcctgtgaaaaatgtgaagaacagggagtcagagtcatcggtagagctgtcaccgccacagccagcaactgtgaacctgctggagattgaggatgaagagaccgacggctcttctgctgcgtgctgccgcatttgccttgagaatgagtctgagataggtgatggtgatgagctaatatcaccttgcatgtgcaagggaactcagcagtttgttcaccgttcttgtcttgaccactggcgatctgttaaggaaggatttgcattttcacactgcacaacttgcaaagctcagtttcatcttcgagtggaaacctgggaggataactcatggcgtaaaatgaagttcaggatctttgttgcaagggatgttctactcgtgtttcttgctgtacagcttactattgctatcatcggtgcgattgcatactttttagacagggatggaagtttccggaacagttttagcgatggttgggaccgcttcttgtcaaagcacccaatacccttctactattgcatagctgaacctttcactaatgatatgcaggaatacgtggtggaagaccttcacggcaactacacagcgccgaagcttgatccggagcatgaggaacggctgaagatgctgaagcttctttag

SEQ ID NO: 36371 - DNA, 923 bp, Zea mays
  Peptide Sequence Number=SeqID_78150
atggaaggcgcgtcctccgccccgaatcgtcaccctggctctctccgtgcccgtgacagcccgctctccatggaaggcgagtccgcgatgctcacgtggattgggtaccccgcccccgctctctccatggaagctaggggacatcttgaacatcatccaaaagcaagcaagctactaccttcagatcttaaggtctttatttatgtttgtaataagtgcttagatgagaaggtcctgaaggtggagtctcctcaaaaaaagactgcaccaaagaagctatctcccaaaaagaagcagaagaaacaaaagaaacaatcacacaagattgagaccaggaggaatcagatagttctgaaatgcaaaaagaaaactggcaaaaagggtaagcgtggccggcccaggaagaacccaacggatctgtcaaagaatgaaccatcaaagatccatgtaagtgaaccatcaaatgtttccaaaaatgaaccagtgaaacgtatatcaaaacgattacatgataaatacatgaaaagtaactcaaatgtatccaagaatgcggctagctctaccaagaggaagaggactgtttcacagtattcatactggttgaatggccttcgatggtcacaacatccacatgatgaacgagcaagaagtttcaggaaagaaagagtagtttttccatcagaagatgctaaaatttctgaagtcagcccagtatgctgcttgtgtgaaaaatgctataatgaagaggatatctatattgcctatgaaaaatgtgaagaaactactggaattgtggattatataaattatggcgttatgaaatatgcggtgggtttagtgtacggtttactcatttcttttaatgtgaactcaaaaccattttttgctgttgaagagcagaggcaactattggactacagcag

SEQ ID NO: 36372 - DNA, 349 bp, Zea mays
  Peptide Sequence Number=SeqID_78151
atgtccggtgccccagccacgtcaccagtgccgttggaatctgaccgttggagttctgacttctgggcccgccacgatgtccggtggcgcaccggacatgaactgttcagtgtccggtgcgccggtatgggcgtgcctgccttctgcgcgcgctgcgcgcgcattaatgcgtgcagatccctccatggaagccgcgtccacgatagcccgatctccatggaaggcgcgtcctccgccccgaatcgtcaccctggctctctccgtgcccgtgacagcccgctctccatggaaggcgagtccgcgatgctcacgtggattgggtaccccgcccccgctctctccatggaag

SEQ ID NO: 36373 - DNA, 786 bp, Zea mays
  Peptide Sequence Number=SeqID_78152
atgacgctaccattaccaagtaaggacgacgattctcacgctgatacttacgccgtcacgcagccgttacccgctatcggtacaagttctccaccgaaccctagccgccaagagacagctgccaaggaccctagccgttctctccagtttccctggtacgccactccctttcctttagctcccttcctcaaccgaaccctagccgccgcacccatggatcgaaatgctcctgtcgtcgttgtggcagatgctgttgatgctgctcgtgctgcggctgttgcagctgcggaggctagatgtgctgcgttggtggctgagaaggaggcacgagcggcggtgcaatctgccagtaatgccgccgacaaggttaaacttgtcgtcgaagctgtgaagtatcgaagctttgttgaagataactccaaggaacatgttgatttgaagtatcacgttagcgtcaagaactcactgcgatatgtcattcaagagatgaggaggcaatcttcactattacataacatgaataggatgtgttgtagtatccctgaagttgaagggggtaaggttggaaagcttgctgcccatttgaatgatatttgcaagaacctcgagaagacttgtattgtctgtgaagaagatctggagaataaatctcctggttgggaccttcatcatcccccttcggatgttgaagacggccctgacatttctgatgttgaggaccaagtggatggatatgtgtcagttgatccggagctgtgggaaatggtgtttgaagacatgaaataa

SEQ ID NO: 36374 - DNA, 1833 bp, Zea mays
  Peptide Sequence Number=SeqID_78153
atggacatgacgctaccattaccaagtaaggacgacgattctcacgctgatacttacgccgtcacgcagccgttacccgctatcggtacaagttctccaccgaaccctagccgccaagagacagctgccaaggaccctagccgttctctccagtttccctggtacgccactccctttcctttagctcccttcctcaaccgaaccctagccgccgcacccatggatcgaaatgctcctgtcgtcgttgtggcagatgctgttgatgctgctcgtgctgcggctgttgcagctgcggaggctagatgtgctgcgttggtggctgagaaggaggcacgagcggcggtgcaatctgccagtaatgccgccgacaaggttaaacttgtcgtcgaagctgtgaagtatcgaagctttgttgaagataactccaaggaacatgttgatttgaagtatcacgttagcgtcaagaactcactgcgatatgtcattcaagagatgaggaggcaatcttcactattacataacatgaataggatgtgttgtagtatccctgaagttgaagggggtaaggttggaaagcttgctgcccatttgaatgatatttgcaagaacctcgagaagacttgtattgtctgtgaagaagatctggagaataaatctcctggttgggaccttcatcatcccccttcggatgttgaagacggccctgacatttctgatgttgaggaccaagtggatggatatgtgtcagaagatccggagctgtgggaaatggtgtttgaagacatgaagtgggaggagaataaagtggttgtttcattggccgagcactgtcatattatgggctacgactacgacgagatatttgatcctgtgaagtatcgaagctttgttgaagataactccaaggaacatgttgatttgaagtatcacgttagcgtcaagaactcactgcgatatgtcattcaagagatgaggaggcaatcttcactgttacataacatgaataggatgtgttgtagtatccctaaagttgaagggggtaaggttggaaagcttgctgcccatttgaatgatatttgcaagaacctcgagaagacttgtattgtctgtgaagaagatctggagaataaatctcctggttgggaccttcatcatcccccttcggatgttgaagacgaccctgacatttctgatgttgaggaccaactggatggatatgtgtcagaagatccggacctgtgggaaatggtgtttgaagacatgaagtgggaggagaataaagtggttgtttcattggccgagcactgtcatattatgggctacgactacgacgagatatttgatcggctgctgttcattttagggctgctgttcattcgaattagggaacatgttgatttgaagtatcacgttagcgtcaagaactcactgcgatatgtcattcaagagatgaggaggcaatcttcactgttacataagaataggatgtgttgtagtatccctgaagttgaaggggataaggttggaaagcttgctgcccatttgaatgatatttgcaagaacctcgagaagacttgtattgtctgtgaagaagatctggagaataaatctcctggttgggaccttcatcatcccccttcggatgttgaagacggccctgacatttctgatgttgaggaccaagtggatggatatgtgtcagaagatccggagctgtgggaaatggtgtttgaagacatgaaatgggaggagaataaagtggttgtttcattggccgagcactgtcatattatgggctacgactacgacgagatatttgatcgtactatttaa

SEQ ID NO: 36375 - DNA, 384 bp, Zea mays
  Peptide Sequence Number=SeqID_78154
atgaggaggcaatcttcactgttacataagaataggatgtgttgtagtatccctgaagttgaaggggataaggttggaaagcttgctgcccatttgaatgatatttgcaagaacctcgagaagacttgtattgtctgtgaagaagatctggagaataaatctcctggttgggaccttcatcatcccccttcggatgttgaagacggccctgacatttctgatgttgaggaccaagtggatggatatgtgtcagaagatccggagctgtgggaaatggtgtttgaagacatgaaatgggaggagaataaagtggttgtttcattggccgagcactgtcatattatgggctacgactacgacgagatatttgatcgtactatttaa

SEQ ID NO: 36376 - DNA, 279 bp, Zea mays
  Peptide Sequence Number=SeqID_78155
atggctgatagggggtcgcaggcagctagactatatagcctacagaggaatccgcgcgaaagatgcggcacaaaggtggcgattgaatcggctcgagatacccggcggcggcgcggcaattctgttgaggtccgatgccgtcggcggaggcgagtctgccacgcgggacccacaggtgtatatgcagaggcaattatgaacattactccacaacccatcacactcaatcaaagatccaaatcaaacaagtatcataagaacaaacattcaactgcatag

SEQ ID NO: 36377 - DNA, 363 bp, Zea mays
  Peptide Sequence Number=SeqID_78156
atggcgacggcgaacgagcagaaccacagcggtggcatagattttctctccctcactctctctctcctcacgacgcagatgcacacggcggcggtggatctcagcacggcaggcttcttgacgatcgaaggaataggccgtatatatacacctgagaggattctgcgacgaccgaggaaatcggcaccccacgcggagtttgttgccggaattcgattccatagctggatgcagacttgcagagacctcatggatttggatgtatatgcagatgcaattgtggacattactccacaactcatcccactcaatcaaagatccaaatcagacaagtatcataagaacaaacattcaagcacatag

SEQ ID NO: 36378 - DNA, 318 bp, Zea mays
  Peptide Sequence Number=SeqID_78157
atggcgggcacaaatatccggaacgcccgacgcggagagttcgccatggttgttacggtgcaggggatgaatctgactccgaggtcccacacggtggtgtcacacgatgcaattgtggacgttactccacaactcatcacactcaatcaaagaatcaaatcagacaagtatcataagaacaaacattcaagcataccaatatctacaaaaatagttttgcttttgttcctaagattaggtctcccattcctaagggtcaccataggtacaggatttcaaagtgtgaaatccacaattgtctttagaatgaaaaggtaa

SEQ ID NO: 36379 - DNA, 279 bp, Zea mays
  Peptide Sequence Number=SeqID_78158
atggctggggagcaccgggaggataaggagggggaatgttttgtccggtttggacatggcggtggcctgactccttccggtataaccgttaagatggaaggctcctttgtcattaggacatcctattgctcagaggtggaaggattccctcatcttttacggagttgcgcgcttcgcatggggatctgcaagaagctagagcacatcttgaaggaataccgcgagaatggaattgagaaatgctctatggcagtctacctgggagaaagccgaaactaa

SEQ ID NO: 36380 - DNA, 576 bp, Zea mays
  Peptide Sequence Number=SeqID_78159
atggaatggagaagtgctctatggcagtctacctgggagaaagctgaagctacccaaaccaccctcctttccaacaacaaaaatacccctgcctggaggaaaagacttcaggctctgtcaggaagagatcctaccgaggatgaccccaccatcgtctacatggtcggatacctccatactctcgataaccaatatgatgacctttcctcccgctgcactcacctaaactcccgggtggaaagcctggagcaacaagtcaaggaacttaaaagggaaaaggcgtccctccaagagagtctcgaaatagcagaaggcgaggaaaccaacactcgtgaagcctaccgaaccctgaagatggattacgacaagaagctaaagaagctcgcccccgcgaagaaaatccgaaagaagactgagcagaaggaggaagcccctctagccctacctcctaccaggatagagaactcgtccgacaccgaggatatgtccctagctagccttgatgacctcctcaaggaatttggggacactttagaaaaggagtttgggagtaccttagatagcacctgcgtgtaa

SEQ ID NO: 36381 - DNA, 705 bp, Zea mays
  Peptide Sequence Number=SeqID_78160
atggaggctctacccttcctactggagagccattcgatgctacctcgtagacctacgatctatccaggcacggaaatggcattggtgcaggggtgggcagcgggcggtacagacgaccttccattgcgcggatccacggcgcggtacaagaattccatggatggcgggcagaggagtagatggcgcacttccatggatggcggacctcccagtaatggggagaggagatccgcggcagatggacccgcaacactcacgccgccgcgcccaagccggactacgcaccgcggcgactatctccctgctcggcgatttcatagcaaccgcgggcgctgctcgtcccttccaccttggtgtcgctaccctactcgtcctcctcgggcttggcacgagcggggctcgtggggtgcaagggcgacacagaggtggattggagccgcgaagaccatcgtcacgcgggcctcgtcgacgtcctcgtcgttgggcttagcacgagtgggaagcggggggggcgaaggcggatcggagtcgcggagggttggggactgcgggggagaaagaggaggcgtcagcgtgctaacagttgggagcattgggaggttagggattgggtacagccgtgagggcgggtcgcaggatcggacgactggtgggatcggacggttgaaaagcataataataaaacagatggttgagattacataa

SEQ ID NO: 36382 - DNA, 498 bp, Zea mays
  Peptide Sequence Number=SeqID_78161
atgccatggaatacacaatctgtttatgacatgtattctgtactggctgcagtgagaaataatggaggcctcgtcaaggaggccaaggccatcatccgtttgttcccgatatgggtggcatgcctgctctacgcggtggcgtactcgcagtcctcgacgttcttcacgaaacaggcggcgaccctggaccggcggatcaggcggcacttccaggtgccacctgctgcgctgcatagcttcatcagcatcacaatcgtggtcatcatccctatctacgagcgcgtcctcgtgtcggtgtcgcgccggtactccggcaaaccatcagggatcaccatgctgcagcgcattggcacagggatgttcttctcgctcttgtccacgggcatcgcgacgctcgtcgagaatcggagttgcgatctggaggccgccacatggaggctctacccttcctacgggagagccattcgatgctacctcgtagacctacgatctatctag

SEQ ID NO: 36383 - DNA, 729 bp, Zea mays
  Peptide Sequence Number=SeqID_78162
atgaagaagaagagcaagagagatttagagatgaagcacaaaactacagctctcaagctcactcaaagatttctctccaaagatttgaaatgggagaggcaagagatgtgtgtgagagagagggaggtgtttcttgggttagaaatggagttcaaatcgtgctccctgctttggggagagaggggggcggttgaaccgcccctgacagctcctggcgacctgtttgccagtctgactggcagactgcagatcagaggtcacttcgtaattctccaggctgcagtgagaaataatggaggcctcgtcaaggaggccaaggccatcatccgtttgttcccgatatgggtggcatgcctgctctacgcggtggcgtactcgcagtcctcgacgttcttcacgaaacaggcggcgaccctggaccggcggatcaggcggcacttccaggtgccacctgctgcgctgcatagcttcatcagcatcacaatcgtggtcatcatccctatctacgagcgcgtcctcgtgtcggtgtcgcgccggtactccggcaaaccatcagggatcaccatgctgcagcgcattggcacagggatgttcttctcgctcttgtccacgggcatcgcgacgctcgtcgagaatcggagttgcgatctggaggccgccacatggaggctctacccttcctacgggagagccattcgatgctacctcgtagacctacgatctatctag

SEQ ID NO: 36384 - DNA, 219 bp, Zea mays
  Peptide Sequence Number=SeqID_78163
atgggggaagaggatccgcggtggttacagctgagcgcggaattcgcgcggcggcacatacggagctatgcgtgttctgtttctggggtaggagacgattctatggcgcggggcccacgcaccagaggcagcggacgacacgcccaggagttagtgtatattattgggctgggaaatatggttaagataggtatggatgggatagactacatgatgtag

SEQ ID NO: 36385 - DNA, 219 bp, Zea mays
  Peptide Sequence Number=SeqID_78164
atgggggaagaggatccgcggtggttacagctgagcgcggaattcgcgcggcggcacatacggagctatgcgtgttctgtttctggggtaggagacgattctatggcgcggggcccacgcaccagaggcagcggacgacatgcccaggagttagtgtatattattgggctgggaaatatggttaagataggtatggatgggatagactacatgatgtag

SEQ ID NO: 36386 - DNA, 765 bp, Zea mays
  Peptide Sequence Number=SeqID_78165
atgcgggtaacacaaacgagcatcctcggccatccatcagggacccgacgaccacccatgcttgaatcaaccacggcggcgcacttcactcacctccccaacacctccctgctggcgcatccagatggtcgaggggatggggacaccgcagggctgggctttatagcggaggttggttggggacgcgacgggagaagaggatccgtggtggttacagctgagcgcggaattcgcgcggcggcacatacggagctatgcgtgttctgtttctggggtaggagacgattctatggcgcggggcccacgcaccagaggcagcggatgacacacccaggtgattgcgcggaacaggaagggagggaggctggagctggggcggtgggcaatcttgtccggattccacgcgtgccgttcggcggaaggaagacgccggccaccggaaatcaaagagtggcgcagtccaagttgggaggccgcggtgccatggatttgaggagcaaagaaggcaccgacatagaggagaagggggaagatgaagccaaggggctgcgtagcggcctggcaaatgccacaaggaggaagaggagggagagagaagcaagggtgcgcgcggccatggagatggcggtcaggagagtgagcagagggacgccgcgattgagcttgagcagaggaaagctgcgtgcgtggaagataaggcttcagagaacggcggcgcgtaggggaaaaatcaaggtgcggctggaaaaatctgagcacggctga

SEQ ID NO: 36387 - DNA, 297 bp, Zea mays
  Peptide Sequence Number=SeqID_78166
atggcgaatgcacaaggggtagtcttaccggcagtggtggggagtgctgggtcgcccacggtgacctgcgatccgaggcggaaggattactccggcgagcaaatccccacaccagagaaggtcccaaagtcaggcaatcaacgcgcgagctcccgtggttccgatgaggtctcaccggcacgccgaagccaagctattgcccacgtagagatggccactggtggtctgacacatcgagatccgttcgtccatggttgctacggcggaggcgagaagggccagtgcgtcgagtaccaa

SEQ ID NO: 36388 - DNA, 363 bp, Zea mays
  Peptide Sequence Number=SeqID_78167
atggcgaatgcacaaggggtagtcttaccggcagtggtggggagtgctgggtcgcccacggtgacctgcgatccgaggcggaaggattactccggcgagcaaatccccacaccagagaaggtcccaaagtcaggcaatcaacgcgcgagctcccgtggttccgatgaggtctcaccggcacgccgaagccaagctattgcccacgtagagatggccactggtggtctgacacatcgagatccgttcgtccatggttgctacggcggaggcgagaagggccagtgcgtcgagtaccaagtatcgcacccgattccagagcgaggcacaggctgcggtcaagcttggttcggctggcggcggtga

SEQ ID NO: 36389 - DNA, 315 bp, Zea mays
  Peptide Sequence Number=SeqID_78168
atggccactggtggtctgacacatcgagatccgttcgtccatggttgctacggcggaggcgagaagggccagtgcgtcgagtaccaagtatcgcacccgattccagagcgaggcacaggctgcggtcaagcttggttcggctggcggcggtgttacaccgggacacaccccaatttcccctctccctccccaatttcctctgccagcgctcacccgccgttctctgcgcagtcgccgaggtccgccaccgtcgactcgggctaccgccgcgccttcgccgccaccgaggagtccccggagttcgccttgaggtaa

SEQ ID NO: 36390 - DNA, 249 bp, Zea mays
  Peptide Sequence Number=SeqID_78169
atggctatttttatatgtgattttagcttttcaatgcagcaactacaacttctttgcaactctattttccatctcatgttttcagtactgagggaggtgccgggggagaaaaattttctcagtttggcgctgatttatcaagtcatatttcatatagctgtcaatgtgttccatgttctctgcagagggcatgagattctgaaagggaaatgtgcccttgggccatttctaagtattttggtgatttag

SEQ ID NO: 36391 - DNA, 1494 bp, Zea mays
  Peptide Sequence Number=SeqID_78170
atggactgggcagcggctttcgggtctccgtcgtggagcgcggtggcgacggaccctggcccgaccatgctgtccttcgcaggcccgtcctcctccgccaccgacgccgaggtgcgactccaggatttcaccgtgggtcgcatggaagcggaggcgacggtcgcgagcatcacgcacggatgggggcaggcgatagcacggcatgcagacgcccaagtccagcaatgctggggcatcacgagcgggcgggggtaccgcggcgttctgcctctccctgtcactacgccgcctgcccccgccgcacccctccccgttactaggtgcggcgccgcgccgcgccgcctcctcggcctcgcctccgcgctcgccgacgactcgtcctgctccgacctcctcccgctgttcccagtccccgccggctacgccgcctctgacgccgcggatccccgatgccgagagctgcccgtcgcccgctgccgtcagcagcgtcttcaggatcttggcttcgacgatgacgacagtttcgacgccgattctattctgtgcggcgtccaccagagcgcggccgagggcatcgatggcatcatgggtaagctctctatggaaaacaacggggcgtccggatcaggctcaagcgttgactccaacatgcccgaatccaagatgcacccctacctcaggaaccttatgtggcaatggcgaaggaagactaagaagaagtcactggggacaatatacgaggaggggactcctgagcctgccaatggcgacgacgatggagctttggcactgccagagacaggattggggcttagcttgaatactgatggggtgctcaaggcgtggtgtggcagaggctctgcgtttgctgatggcaatgggcctgacttgccattgtcccctgctcatgtggtagaacaagagaccagtttttatgtcatagacatgaactactttcctgggaagggtgctcccagcccccgtcatgccccttggcccctcccaaccctcgtcgtcataacggagggtgctgcgacaagccagcggatgagcgtggcgatcccgctggagcagtccatcacgccgcttttcaatgcagcaactacaacttctttgcaactctattttccatctcatgttttcagtactgagggaggtgccgggggagaaaatttttctcagtttggtgctgatttatcaagacgaatgacttattgccacagagctaaggatgacagtactggactgcagagagaaagttggggcagatttccggcttcaatttatgtccttatcagcactacaacagcaacgacgagcacagtagcaaagcagtccgagccttgtggaggagagcctccacaagaagtgcctcgacgggttccctacctccgccgccggtatcgtgtcattgatgggccacttcatcgctatctagcacaaggtgcaacacccccttccctcgctccttcgctcttcctggctccaatctga

SEQ ID NO: 36392 - DNA, 549 bp, Zea mays
  Peptide Sequence Number=SeqID_78171
atgaactactttcctgggaagggtgctcccagcccccgtcatgccccttggcccctcccaaccctcgtcgtcataacggagggtgctgcgacaagccagcggatgagcgtggcgatcccgctggagcagtccatcacgccgcttttcaatgcagcaactacaacttctttgcaactctattttccatctcatgttttcagtactgagggaggtgccgggggagaaaatttttctcagtttggtgctgatttatcaagacgaatgacttattgccacagagctaaggatgacagtactggactgcagagagaaagttggggcagatttccggcttcaatttatgtccttatcagcactacaacagcaacgacgagcacagtagcaaagcagtccgagccttgtggaggagagcctccacaagaagtgcctcgacgggttccctacctccgccgccggtatcgtgtcattgatgggccacttcatcgctatctagcacaaggtgcaacacccccttccctcgctccttcgctcttcctggctccaatctga

SEQ ID NO: 36393 - DNA, 136 bp, Zea mays
  Peptide Sequence Number=SeqID_78172
cacaatgatattgcgcgcattgctaggaacttcatcatcaagatgaacctcttcgtgaggcaaattaccatctgggcgtccccgcagaatagatcaaatgccaataagtcaaatgtggatatgatattaatcccgg

SEQ ID NO: 36394 - DNA, 109 bp, Zea mays
  Peptide Sequence Number=SeqID_78173
gaattgcatcatcaagatgaacctcttcgtgaggcaaatcaccatcagggcgtccccgagaatagatcaaatgccaataagtcaaatgtggatatgatattaatcccgg

SEQ ID NO: 36395 - DNA, 309 bp, Zea mays
  Peptide Sequence Number=SeqID_78174
atgaagaagggtcacgagttcggctggggcacgggaacgaaggccacgacgattcggtggagagcaggtggggccgtgcgggccaacgatgcagcatggaggaagtcgtggaggctggcgtgtcacgagcaggactgtcatgggctggatgatggtggtagccacaacggtgctggtatgagcatgcacaatgatattgcgcgcattgctaggaacttcatcatcaagatgaacctcttcgtgaggcaaatcaccagcagggcgtccccgagaatagatcaaatgccaataagtcaaatgtggatatga

SEQ ID NO: 36396 - DNA, 123 bp, Zea mays
  Peptide Sequence Number=SeqID_78175
cacaatgatattgcgcgtattgctaggaatttcatcatcaagatgaacctcttcgtgaggcaaatcaccatcagggcgtccccgagaatagatcaaatgccaataagtcaaatgtggatatga

SEQ ID NO: 36397 - DNA, 132 bp, Zea mays
  Peptide Sequence Number=SeqID_78176
atgaacctctttgtgaggcaaatcaccatcatggcgtcctcgcataatagatcaaatgccaataagtcaaatgttgatatgatattaatcccgggtatatccacatctacatcaagtagtgagagcacctag

SEQ ID NO: 36398 - DNA, 843 bp, Zea mays
  Peptide Sequence Number=SeqID_78177
atggaggctcaccctctgcggccgggttggcgttcccttaactctgtgactattgggttcagggtggacgacaccaccgaggccgcagctatgaagaccctggcgactttctgcggataccatcccttggagatggtaatgcactcactgggactcttccccgctgagaagagggatgaccccatgtggtacaaccgagtgagccacgtgaaggacgtgtgggccatgcatcccgaccaagttaggaggatcaccgttcagtgtatgagcacactgtatcgtctacaggccttgaagagcgatgccatggcacacctcactaaccttgctcagaccactaagctcacccctcgacagttgagaggactttgtggtcgacttgtcttcagaattggtctccacgatgtgcaggaggaacttggggaagccaacgaccacctagagatgcatcaccaggacatggagcacaatgatattgtgcgcattgctaggaatttcatcatcaagatgaacctcttcgtgaggcaaatcaccatcagggcgtccccgcagaatagatcaaatgccaataagtcaaatgtggatatgatattaatcccggcgtcgtgggcagaacgagcaggttcccccgccacctcctccagctcccacggtgcaggagctgatggctcagcagaacgagattttgcgccacccctgttcaccaaggcaaaggacctgttagacgccgacgtgtggctaagggttgtggagtcaaagttcccactcctcatgggagcttgccctgatgacacgaagactcgcttcgccgcacagcaccttcgtggacctgctaggacatga

SEQ ID NO: 36399 - DNA, 249 bp, Zea mays
  Peptide Sequence Number=SeqID_78178
atgggtgggatgttttcgaaaataaaacttgatgatggatctatcaaaggccttgataggttcaacatcggaaaagatgtacctctgccaggcttgatgatcgaggaccctttaactggtcacatgcctcgtcatgggatccactttagtaagcatttctgcaaaacagagtctttgattattgaaaagccttaccttgactcccatataaccagcatacccttgagagtcttttctttagtcgggtaa

SEQ ID NO: 36400 - DNA, 279 bp, Zea mays
  Peptide Sequence Number=SeqID_78179
atggggcgtggagcggtggcgagagtagcgtgtaccctccgtggcaagaggctggacggtggtgtagttgtgctctcggtttgcgtgaacctgatccggatccactttagtaagcatttctgcaaaacagagtctttgattattgaaaagccttaccttgactcccatataaccagcatacccttgagagtcttttctttagtcgggtggttccaaaagaagaaaaacaagactgaagtgcgggaggactcggtcctccacttaggaccttttgcttaa

SEQ ID NO: 36401 - DNA, 1146 bp, Zea mays
  Peptide Sequence Number=SeqID_78180
atgggtgggatgttttcgaaaataaaacttgatgatggatctatcaaaggccttgataggttcaacatcggaaaagatgtacctctgccaggcttgatgatcgaggaccctttaactggtcacatgcctcgtcatgggatccactttagtaagcatttctgcaaaacagagtctttgaatattgaaaagccttaccttgactcccatataaccagcatacccttgagagtcttttctttagtcgggtggttccaaaagaagaaaaacaagactgaagtgcgggaggagtcggtcctccacttaggatcttttgcttatagcttatcgggaggagtttgtgcctcccctgattgtaatctcgccgacggagagtacgtgctcatccccgagcaaggatctgtccaagaagaggaccaggagcaagcttccaaggctactgttgaggatctccccgcagccccagcaattgaaggcaagccccgatctgagggactgacgggttattcccatatgaattcacccacccccgccagtggaggagacactcgtttcagttccgacttcctttctcgcgatggctttccttccatcttgtgggaagtgcttaactctgccggttaccctacgccccctttgtacacggtgcagttgtatgaggagcatcgggtacctcgttgtcgggtctggctgactttggaggctcatccccttcagccgggttggcgttctcttgattctgagacaattggactcaggacggacgacaccgttgaagcggcagccatgaagactctgacgactttctgtggctaccatcccctggagatggtgatgcaccccttgggactcttccctgctgagaagaagatgatcccatggtggtgtatccgcgtgagccatgtaaaggttgtctggccaatgtatcctgacttggttggaagggtcaccgttcagtgcatgagtgcgctgtaccgccttcaggcccttcagagcgatgatatggcactccttgctaacaccgctcaaactgccaagctcactctcgaaagtcgagaagattttgtggtcgatctatccaccgagttggtagagaaggatctacaggtggagaggctgagccagcgcatcaccaccttggagcagtag

SEQ ID NO: 36402 - DNA, 2118 bp, Zea mays
  Peptide Sequence Number=SeqID_78181
atggagggactcttcctcatcgacgtctccaccgaggacgatcttctcttcaacctcgtctcaccggccccgcggcgtcccgatccgctccacgcagagtctctagtgggagccgaggcaacctcctccggcgtttctccatcggcggtggttcgggctacggatccggactgtgtgatggaggagcgggaagatcccgagcggacggagtccccggagcagcgcaagggccaagaagggggggttctcgacactgaggaattagccattgtaaacagcacctatcgtaaggcccaaggttccaggctgcctggaatcattgaggaaacgaggagatcaggggagtcaacaacctcaactctggaaagtgaaacctgggcgatggaaagccttgagactgaactatttgataatgtccgtgcttcgatccagagatctcttggcaaacctgataaactttcaggtcggcccgttgctgcctcaaaccccccaaaggccacagcaaatgcacctcgtgttgcagctagaaaaggtgttgatcggatgccacagtcaaagatgagggcccctgtttcaacaagccaaggagctgttagcagacaaaggccccaagtcaccatcaacgagcctgtggctgcaagagataagaatttaacaggagctgcagaagcaaagatatcctcaaagcctcctagggctttgccaagagttgctatgatgagatcatcaactaatacaactgtcacctctagggcttcagacaaaagaaacagcactgggggtgctgtcaacaggcaggcagttggtaaaactgccagtacttcagctgtcctgcgatctggcaggggtacaaattccagttcaatcttgaaatcaggtttcttcacatcagcagcaacttcttcccattgtatgttgatggacactaagccagaagccaaaactaaatcagcaacactaagcatcaagaatagacctgctcagagggtccctgttcgtccgtcatcaaaatctgatatcagcaaaactataccctcaagatcatcagggaacaggatcccagctaagggccatgctgaccgtgcatcaccaagcatttcacctagcagctccatggacagcatgagctctgtgatatctggggcttcaactgcttccaccgtagggaagatgagtcatacatccgataatttgaatgcactgtccccctccctcaggaagagcaatgactgccatccgaatccaaagtttaggcctcctattgtcacagagggacattcttctggaacagcagcatctagagataatttaaaagctactgcagaaataaccaaccagggaaaaggccttaagccatcggggcttcggagacccacacccaagattggttattttgatgctgagaattatattgaccaaaacatcggtgcacaagtgcaaccacaactttcaaatatccagtgtctacctactcagaacatgaatctgaatgccgcaccatctacctacggccaacaggaatcaaaattgacagcagcacctcatgaggaaagctgtgtttccaaaagtaagctgatgacgccactgtctcttatggtggaagtagagccttttaaggtggccgaactagcttgcacaaacctgactgatccagttgtggtcagacctgaatctgtgcaaccgcaatccatggagatccagtgcttgctacctgccacaccaaaccctcagccaacctttcatcaacaagtattaaaacctatagcagcacctcttgaagctgtgcaaatggaagtagaagcttttaaggtggacaaacctgaagcgtgcatacacctgtccagtccagttgtcgtgaagcccgaaaacaaatccattgaccaaaacgctggagcactgctgcaactgcaacttgtcgccgaacctgaatcatgcacgcgcaagtctaagacagtggtggctgcagactattccaaggagaatattccggctttgaatcagaacatacaagctaatggcgatgcgaattcgttagttgagttacttacccagaagctatcctccatttcccttggggaggctgcccctaacgtggcccctaggtcctgctgggaataa

SEQ ID NO: 36403 - DNA, 435 bp, Zea mays
  Peptide Sequence Number=SeqID_78182
atgaggaatgattatttctcagtgaaagtaaaatctgtggatggtttccaaggcgcggaggaagatataattatcatatcaacagtcaggagtaatggagctggtacagttgggtttctatcaaacttacagaggactaacgtggctctaacaagggccaaattggggaagactttacattcgacaactttactatatacccttctttgtcaaggatttgatgataagccaatggttaaaagggttgtcattgtaacccccacaagcttagttagcaactgggaatctgagataattaagtggttgaaaggcagagtgcaggtgctggccctctgtgaaagcacacatgctgatgttctttccagaattgaaagtttcttaaaacccttgagccgtctccagctgcaagttaatgacaatttctgtggtgcatga

SEQ ID NO: 36404 - DNA, 735 bp, Zea mays
  Peptide Sequence Number=SeqID_78183
atgtacagtgttgtagttatcaagtcagtttatgtttgggcaggttataatgtttttgcctttttatctattgtagagacactttctacacgaagcaagctttctattggtgttgtgtgtccatacaatgctcaagttagagcaatacaggaaaaggttgggaaggcctgcaggaggaatgattatttctcagtgaaagtaaaatctgtggatggtttccaaggcgcggaggaagatataattatcatatcaacagtcaggagtaatggagctggtacagttgggtttctatcaaacttacagaggactaacgtggctctaacaagggccaaattggggaagactttacattcgacaactttactatatacccttctttgtcaaggatttgatgataagccaatggttaaaagggctgtcattgtaacccccacaagcttagttagcaactgggaatctgagataattaagtggttgaaaggcagagtgcaggtgctggccctctgtgaaagcacacatgctgatgttctttccagaattgaaagggttctcgacactgaggaattagccattgtaaacagcacctttcgtaaggcccaaggttccaggctacctagaatcattgaggaaacgaggagatcaggggagtcaacaacctcaactctggaaagtgaaacctgggcgatggaaagccttgagactgaactatttgataatgtccgtgcttcgatctag

SEQ ID NO: 36405 - DNA, 318 bp, Zea mays
  Peptide Sequence Number=SeqID_78184
atggagacaataaaaactccatctccagaaattttggtggagttgatggagcagattataaggtactggtcgcacgtggtgcagtgcaggagctgcaacgcggcgctcaaggccatgaaggcgctcgaggctgccgtgcaggtgacctcggtcgctgtcgtcgggttccttgccgtcgccaagggaatggtcctcacgtcgactattcagagggccgcggtcgtgtcggcggccgtgctgtgctttgctgcctcccgctggcttgccaacttcatccagaacttctacttccaagactacatccacgcctacaagtga

SEQ ID NO: 36406 - DNA, 1023 bp, Zea mays
  Peptide Sequence Number=SeqID_78185
atggagagcgccatcagggaccacccgctctgggccaatgccaccgaccaggagatcgaccacgcgctcgagatgctcaagaatgctggtttcagtcatgtcattgctgaagaccgaactgaccaggtctacctatctaaacagattttcgtggttctctacaaccgcgacaacgtggagtccatcgggctggacgaagcggccaaatgcctcggttgtaaacctgctgccccactaaagaaaacatctgtggctgttgcacaaaagaaaaagggagattcttctgagagtgactctgatgatgactcggatgagcctgcatcagtccgatgtcttgaggactacacatcactttgccaaaaccgtgattggaatgggcatgatgcagcatcaggggcttctaggcataaaaggcaggccataaactgttactcagggtgcaggagtgctatgagctctcgtcggagtacaagaatgaccaatatcaggctcgacttgcagggcgggaggtgcttcaaccccgacaccgtccacgaccacgcgtcctacgccttcaacagctacccgcctcaaccagctgcgacttccgtgcttacttcatttcagaggaagcgcccttcgactgcaaatgattcagctttattgtggcgagtttcttcttggcaatctcgttctgcctcgcttggatgcttaaaccaggaatcaaggacaagggcacaaaagctgccgtttcagacagcactgatgaggaagcagcgcaagcaccattgttggcaaaatggaccagaccatgactccaggaaactgagctataaagctcagctggagtgggggcagcaggctgctgcgctcttgggagagcagctcgtctaccatgccgtacagcgtaccattggctacggggccgccatgcccccagtggcgctgcccagcaaggagggcgtggatgtagtcttggaagtagaagttctggatgaagttggcaagccagcgggaggcagcgaagcacagcacggccactga

SEQ ID NO: 36407 - DNA, 1059 bp, Zea mays
  Peptide Sequence Number=SeqID_78186
atggaccttggcgccgacagcttcctcatctccttctccttccacgcacccaacgccgaggaggacggcaagatcaggcctttgaagccgaggcccaagaagacggcggacgacgagcccaagattcatccgttgaagccgccgccggggctgctcgacggcgggagcgtcacgccgtcgccgcggtcgccggtcgtggccggagacgcaggcgccatgtggtcgccgcggcggaggagcagggtcagctccgacgtcgacttcgaccggttcaccgccgctctcctagaggcaaccaaggcgccatcgccgctcggtggcaaggacgacgtgggtggtgttgctgctgttgccccccatggctcgtcgcccacgagaccgaccacgcgtaccgcgttgaggagcgtcgggtggagacggtggcggctcagcgatctcctcctgttccggagctcgtccgacggcggccacgtcaacagcttgacgtgcccgtcaagagggcgagcgcagcagccgccggtggtgatgatcaaagccagcgccgcaaagcgcgaggacatgggcaagggctggaagcacggcgatggggacgcggccgcggccacggccacggcggcggacagcgtcgccgggtgcgcccggttgagcccgctgcagcggctggccaaagggctccgcgcgtactcgtggcataatcaccgcggcatggccgcgccggcgaccaaaggatgctcaagaatgctggtttcagtcatgtcattgctgaagaccgaactgaccagcttcgtggttctctacaaccgcgacaacgtggagtccatcgggctggacgaagcggccaaatgcctcggttgtaaacctgctgccccactaaagaaaacatctgtggctgttgcacaaaagaaaaagggagattcttctgagagtgactctgatgatgactcagatgagcctgcatcagtccgatgtcttgaggacaacacatcactttgccaaaaccgtgattggaatgggcatgatgcagcatcaggggcttctggcataaaaggcaggccataa

SEQ ID NO: 36408 - DNA, 699 bp, Zea mays
  Peptide Sequence Number=SeqID_78187
atggacagggcaggccagaacaaaagagatgggcaggaaaagcgagcaaaggagctggaaagcaggcagagatggcgactgttgcagatgcacctctgtcttccctctttcccacgtacacacaagcacgctcagcagtcactacagtccacgccaagcttggctccctggttactacagcagtacagcacatccgatgagacggcgcggcgggaaaagcgagtggaccccgcccatgtccaagcaaccactggttactacagcacatccgatgagtcacggggaactgaggagccgcagcgtgaggatgaaccgaggagccgcagcgtgagggaattaaatgagcgagcggcggcgcggaggctgactaggccggaggccggagccctgccacggcatggtgcttggtgcgccatttatgagcagcagccgagaggacgagcaggagcagcaggggccgacgtagggctcggcgtccgtacgagcagcgtcatcaccgcaccgcacttgctaaagctcggcgaaccgtccggcgacgcccgcgtcggtgaccagagcactcgagccacgcgccgtggggctggcctagcacccggcgcctgctgcttccgtgttctggccttctggcttctgggacagcagaaaccgcacggcttcacccgctcggtgccagcctcggtcaccacacccctagactag

SEQ ID NO: 36409 - DNA, 633 bp, Zea mays
  Peptide Sequence Number=SeqID_78188
atgcactgcgatctggtgattgttgatgctcgttcatcgttggtgctcctcgctggtcggctggtgctcctcgcctcctcggatcgagttgtagcttcacagctggacggctggtgctccgtgcggtgctggtgcgtgtgcgtgattcccttcctgattcttctctgtctccggtccggtggtccgtggctctgcgccttgtatggtcactggctcactcctcactgcctcactggtgcggtagtgcccctgctggctgcttggacatctataattttgttctgttttcattttcctcccattctcgtcctccttctaacctgtctggttgcccgactttctttggtgctcggctggtccttgcttgctgttgctggtcgatctgcgcctctgctcggctgctcctcggaccttggctccgttccgtcgtctctggtgctccggcttggaaagccgttaaacctccttgtcgtcgggcttgtgtccattgtagccgtcaggctcatggaccttgacatggctgcagaggaggaggagcgcaggctcgaggactttaatgagactgaggatgctaggttcttcattggtttcggtgagaatgaaacccatggcgcctctgctagggatgattga

SEQ ID NO: 36410 - DNA, 1198 bp, Zea mays
  Peptide Sequence Number=SeqID_78189
atgaccgacaggccgtttgagctactccacatggacctaattgattatgtcagccgcggggttcgtccaagggcgagtgcttccatgaaaagcctcgagctcttcatcatcatcaatactcctactgcagcaggtgcagcctgccgcctgcacgaagcagctgagcctcagcacatggcggcaagcgtcctcttggcgattttcgtgctcccggcggctctgcccgtgcctcgccgtcgccttgctgcctcctccggtcctcccaccgtcgacggccgacgactcgccacctccgacgtctctgcttcacagctggacggctggtgctccgtgcggtgctggtgcgtgtgcgtgattcccttcctgattcttctctgtctccggtccggtggtccgtggctctgcgccttgtatggtcactggctcactcctcactgcctcactggtgcggtagtgcccctgctggctgcttggacatctataattttgttctgttttcattttcctcccattctcgtcctccttctaacctgtctggttgcccgactttctttggtgctcggctggtccttgcttgctgttgctggtcgatctgcgcctctgctcggctgctcctcggaccttggctccgttccgtcgtctctggtgctccggcttggaaagccgttaaacctccttgtcgtcgggcttgtgtccattgtagccgtcaggctcatggaccttgacatggctgcagaggaggaggagcgcaggctcgaggactttaatgagactgaggatgctaggggtgtggtgaccgaggctggcaccgagcgggtgaagccgtgcggtttctgctgtcccagaagccagaaggccagaacacggaagcagcaggcgccgggtgctaggccagccccacggcgcgtggctcgagtgctctggtcaccgacgcgggcgtcgcccggacggttcgccgagcttctgcaccgtacccgcatttaccacgtcccctcaccgctggccattctactggtgctggcgctggcgcactgcactgcactgcatgtgcatctgcggcaaatttatgggcggcgactcaccggcggagctgtagaggagcctatccctagatggcctctgggtgctccgcccggctcggctcatgcggtcgtcactggcgtgtactcctccgcctttgctgctgcagcagcgggcg

SEQ ID NO: 36411 - DNA, 480 bp, Zea mays
  Peptide Sequence Number=SeqID_78190
atggacttgtgcttgcatttccgtgtaatgccatcatggcatggttccactggagcggtgtcgcctcgaggcaggcgaccgacggtggcgctccaccaggaacgagcgacggtggcgctccatagggagctcgcccgcctcgccgccaggtccatcgcgcgcctgcttgctggggctgggctcggcgggagcggaaccgccgaggaggccgagatggccgccgcgctcatggacgtcgcggccgccagcgccgccgcctccgccgccgtgttctcggccgtcacgtccgtgtctgccgccgcgtcgtcgtgctcgaacaagaaggccccgacggccttcgtggctgctgccttcgccaagaagccggagacgccgacgacggccgatgtcgcgcaggagaagcacgaggagcttgagcgatgcatcgacgaatgcgagagcggcagcgaggtggtgttcaggagcattgttcggaaatag

SEQ ID NO: 36412 - DNA, 267 bp, Zea mays
  Peptide Sequence Number=SeqID_78191
atggccgccgcgctcatggacgtcgcggccgccagcgccgccgcctccgccgccgtgttctcggccgtcacgtccgtgtctgccgccgcgtcgtcgtgctcgaacaagaaggccccgacggccttcgtggctgctgccttcgccaagaagccggagacgccgacgacggccgatgtcgcgcaggagaagcacgaggagcttgagcgatgcatcgacgaatgcgagagcggcagcgaggtggtgttcaggagcattgttcggaaatag

SEQ ID NO: 36413 - DNA, 303 bp, Zea mays
  Peptide Sequence Number=SeqID_78192
atggccgccgcgctcaatgacgtcgcggccgccagcgccgccgcctccgccgccgtgttctcggccgccacgtccgtgtctgccgccgcgtcgtcgtgctcgaacaagaaggccccgacggccttcgtggctgctgccttcgccaagaagccggagacgccgacgacggccgatgtcgcgcaggagaagcacgaggagcttgagcgatgcatcgacgagtgcgagagcggcagcgaggtggtgttcagtagcattgttcggaatagggtttcgttgctcaacatccatagtccgacgatctag

SEQ ID NO: 36414 - DNA, 645 bp, Zea mays
  Peptide Sequence Number=SeqID_78193
atgcctgagttttctccgttctttcccctggcgcccactatgcttcagctcgtcaatggtccaggggagaggggttcggccgggttttatggagatgggcagggctgcagactcctcccgagatccgaagctcccggcggcggttggaacggccagtggaatccacccgatcctggcagcgaacgtcgcggcgtacagagtccgatcgagatcaaacaccagagtgccttcttccttcactcggtgcccaattcgaagcacagccagtttagaagggggtccacggacgatcgcgtggccgaggacttcggcatccgtttcgctggaagggataaggagggaggcggcgcggtgggtttgttacgtgagagagaggagtccgactgggtccacaagatatgggtgaggctgagaactaagaacacgctgcaccatgatgcttcgaaggttcaccgtagcatcagcaccaagcatggcatcatcattagcagcaacatcactggagtcatcatcgtcaccctcaccgtcagaagcactaatgtagccatcatccgtagcaatgtacctgcaaaggaaggttaccaacgtgtgcagcgggtgtcgagggagtatgactcgaggcagatgtgtgcgtccgtgatgtag

SEQ ID NO: 36415 - DNA, 732 bp, Zea mays
  Peptide Sequence Number=SeqID_78194
atggctcgtagaagatcccaaaagaagaagaagacaactccgaaggagaacaaggatagggggtaccctttacccacaagtcatgttacccatctgccaagggatcgcgacttcccatacacctctaccgaggaggcgaggcaggggttcttgcctgaccgccatcgcagcaaaatcaaccaaggacctccctacactgaccactcccctactgcccttgcccctttcgggtaccaggatgatcttcaggtagctcgtaacctcgcgctagtcgtagcaatacaaacaaacatgacggcggtcggaccaggtgaccaagcaggccacggcggcggcattgatggaaagcgcccatcgaagtccgagctcccatcggtcaccactgtcaaattgaacggagctacacgcgaagcctgggtgacggcgaagaatcgtggtcaccgggatctcccttcctccctgccaccgccccccgacgcgatccggatgcatgacatgagcctcctgaccgcgcaccaacccccgatggagaacacccgtgactccgtccgagatccgaagctcccggcggcggttggaacggccagcgggatccgcccgatcctggcggcggacgtcgcggcgtacaaagtccgagcgcggttctgttccgagggaaggcagaaatgggctgtgcgggtaacttcaactctaaaagaaattctttttgtggcaaatttatccttgggttag

SEQ ID NO: 36416 - DNA, 408 bp, Zea mays
  Peptide Sequence Number=SeqID_78195
atggtcgtcatcccagcacacaagaattcatggccgaacaacccgaaagtcgtcggcattggcgacgaccatgaggtccccatgattgatgatggacagcgcgatgcagccgctctggaccgcgtccaagcggcggctgcaccggagcttgccatacacagcggtgcattggccacggtttccaaaagtcatgttacccatctgccaagggatcgcgacttcccatacacctctaccgaggaggcgaggcaggggttcttgcctgaccgccatcgcagcaaaatcaaccaaggacctccctacactgaccactcccctactgcccttgcccctttcgggtaccaggatgatcttcagaagcctcgtaacctcgcgctagtcgtagcaatacaaacaaacaggatatag

SEQ ID NO: 36417 - DNA, 639 bp, Zea mays
  Peptide Sequence Number=SeqID_78196
atggtgtggatcattgagcaccacgctgaaacttcggaggatttcgtgatggagcaagaggttgcatcctccgcgccacgagtgcccgaccgcccggactctgggatgctgaccgcctacggcgttgtctgcggccagagagttgctacgccaccccctagctccacgacatcaccgggggccatgaagcagtggcgcgatgacgtcgaccggctgctcggcatggcgtattctacttcgaccaggtcgaggcctcggtcatcccgacgccaacacgaggcgatggcgtctgtgcgctcgccctccgtaaggggtgcacagaccgacgacctccgggcggagctcaactgtaggcgtacgggagaagacgcccgggtctccttggaaagggcgcgcgagtgccgccaaaacatcaatggtcgcgacctcgatcagtactttgcagcggtagcaccgcagacaccaatgggcacccggtccccaacgggtgtccccttggtcggcgtaggctgcgccgcactagcggatcatctccgcgcggcgtccttgaaagggaaatgtgcccttgggccatttctaagtattttggtgattgagtgccaactcaagtgcttaaatgtgaatttatgcaatggatga

SEQ ID NO: 36418 - DNA, 1326 bp, Zea mays
  Peptide Sequence Number=SeqID_78197
atggcccccggtgatgccgtggagctagggggtggcgtagcaactttctggccgcagacagcaccggacataaagaatatagtgcttggatcctctaatacccagcaggcgcgccgcctgctggatgaccttgacgccgcccgccagcggatgggacgggacgcattaaatgctgagagggcacgtcgccccgggtctccgcctgagcgggaagtggagggcaaggcccgcacacgtgtcagcactggacccctgcacacaccagggtccttctcgttctgggaccctgctggagttcggacctacccggaggctccagacttatatgtgtatagtggtccggtgttcttctgtgggggtccggacttactgaggtgtggtgtctttccttgccacgtggcgccctttggcctacccatccggtggggtcaggcaccgtcctccgcgtggctaggagacctcgcatgggtgcggtgtcttcatgctgtaggagagggtacccctgatttagggtaccgacagtggctaataaccacaaggaaaaataccggctggtcaagtggaatattacctgtcagcctaaggaccaaggggggcttggggtcagtaccgctgaatgtttcttttaagcgaggtttgacgggggcgaaccatgaggcttggtttagattggtgtcgctggtggtggttgttcaggtctacaggcgcgctcccgcacgccccgcgaagacctttctcgacaagcttcagcagcggcgcagcgaccaccagcccaccgccaaacgtaggatggtggcagagactaaaccggctgcgggcagcggggttgccggcgagatggaggtggaggcgtaccgccgccttttcccggtggccttccttgagcgccacctcagcgagtccgtccgcatcgattcccgccgcctcagagaggcccgccccaccaccgtcgccctcggcgccgtctcctccgtgcatggttccgctctcgcccgccttggcgacaccgccatgctcgcgtcggtcaagctcgaggtgatgtcgcccccggcggagcacccagacgaaggatccatcgctgttgagttccacatgccgcctatctgctccccactggccatgctcgcgtcggtcaagctcgaggtgatgtcgcccccggcggagcacccagacgaaggatccgtcgctgttgagttccacatgccgcctatctgctccccgctggttaggccaggccgacccgctgacgttgcacccgtcatctccaaggcccttgaagacgttttgacgaggttttttgtttctccgttaacttcagctctttaa

SEQ ID NO: 36419 - DNA, 1383 bp, Zea mays
  Peptide Sequence Number=SeqID_78198
atgccgagcgagaaaataagcaaaaacttgaagcttagccccctacctggcgcgccaaatgtcggggaggaaatctccccggccgggtggcggattgcacccgccctaaatcctaaagagaggaggggcctaagcgttttgcttgctacgagactgacccagcaggcgcgccgcctgctggatgaccttgacgccgcccgccagcggatgggacgggacgcattaaatgctgagagggcacgtcgccccgggtctccgcctgagcgggaagtggagggcaaggcccgcacacgtgtcagcactggacccctgcacacaccagggtccttctcgttctgggaccctgctggagttcggacctacccggaggctccagacttatatgtgtatagtggtccggtgttcttctgtgggggtccggacttactgaggtgtggtgtctttccttgccacgtggcgccctttggcctacccatccggtggggtcaggcaccgtcctccgcgtggctaggagacctcgcatgggtgcggtgtcttcatgctgtaggagagggtacccctgatttagggtaccgacagtggctaataaccacaaggaaaaataccggctggtcaagtggaatattacctgtcagcctaaggaccaaggggggcttggggtcagtaccgctgaatgtttcttttaagcgaggtttgacgggggcgaaccatgaggcttggtttagattggtgtcgctggtggtggttgttcaggtctacaggcgcgctcccgcacgccccgcgaagacctttctcgacaagcttcagcagcggcgcagcgaccaccagcccaccgccaaacgtaggatggtggcagagactaaaccggctgcgggcagcggggttgccggcgagatggaggtggaggcgtaccgccgccttttcccggtggccttccttgagcgccacctcagcgagtccgtccgcatcgattcccgccgcctcagagaggcccgccccaccaccgtcgccctcggcgccgtctcctccgtgcatggttccgctctcgcccgccttggcgacaccgccatgctcgcgtcggtcaagctcgaggtgatgtcgcccccggcggagcacccagacgaaggatccatcgctgttgagttccacatgccgcctatctgctccccactggccatgctcgcgtcggtcaagctcgaggtgatgtcgcccccggcggagcacccagacgaaggatccgtcgctgttgagttccacatgccgcctatctgctccccgctggttaggccaggccgacccgctgacgttgcacccgtcatctccaaggcccttgaagacgttttgacgaggttttttgtttctccgttaacttcagctctttaa

SEQ ID NO: 36420 - DNA, 324 bp, Zea mays
  Peptide Sequence Number=SeqID_78199
atggttgattatgggaaaaagggggagtttttgaaatctttgatcaatttctcttggaacaactctctttatgtctcaacaatgctagaaacaggaaaagaccaatttggaaaagacttgtctgagcagccaagactctgcgcagtctgggtgcaccggactgtccggtggtgcaccaggcagtgtccggaagacgaagtgcctgctgattctgcctctgaaactgacctcctcctgactgattgttctgacgattctgatactggtgctgaggatactgcctttggaactgctgatgctgaggtggacgctagttctgcctga

SEQ ID NO: 36421 - DNA, 186 bp, Zea mays
  Peptide Sequence Number=SeqID_78200
atggggatgctcttgtgtggtcaaggcaagcttcttgactacctcaacgttcaccaagttgttgtagctaccaccgtcaatgatgtgctagaaacaggaaaagatcaatttggaaaagacttggctgagcagccaagactctgcgcagtctgggtgcaccggacagtgtccggtgcgccaggctag

SEQ ID NO: 36422 - DNA, 930 bp, Zea mays
  Peptide Sequence Number=SeqID_78201
atgtccggtgtgccactggactgtccggtgcagctagaagacaaaggacttcaacggtcaactgctccaaaccccaacggtctgctgacgtggcaggcatcagacagcaaacagtaccctgtccggtgcaccactagactgtccgtgctagaaacaggaaaagatcaatttggaaaagacttggctgagaagccaagactctgcgcagtctgggtgcaccggactgtccggtggtgcaccggactgtctggtggtgcaccggacagtgttcggtgtgccaggcttgcgtctgtcaactggctgctctcgggacttcgtcggcggtgtacggctataaatcaccggactgtccggtggtgcaccggactgtccggtgagccaacagtcggcccggccaatggtcggccgtgtaatccgcgcgcgacgcttggcagagccaacggtcagaaggggcaccagactgtccggtgtgcaccggacagtgtccggtgcgccaacgactctgaatttccaatggtcggcttcgccaaagaaggaaagaaatccgcaccggactgtccggtgcgccaggcgacagaaggcaggaattgccttcctggaatgctctcaacggctcctagctgccttggggctataaaagggacccctaggcgcatggaggagtacaccaagcatcccttgagcattgttgatcactcacacttcattcttgcgcacttgttcgacattcttagtgatttgagctccgttctagtgagaaccttgagatattgtgttgagctcaagtcttggtcttgtgtgtgcgtatttgctgtggttttgagtgtgtcgcttccctcccttactctagtgcttcattttgattcttattgtaagggcgagagactccaagttgtggagattcctcgcaaacgggaaagagtaaagtaa

SEQ ID NO: 36423 - DNA, 1213 bp, Zea mays
  Peptide Sequence Number=SeqID_78202
atgcgcgtgcggctctccttcttgctgctttccgcggcattcctgacgatcctgtcggcagcggcgccgtcggccgtaccggacccagagccggaggtgaagccgagcgacacggacgcgctgaccatcttccggcacggcgcggacgcgcacggcatcctggcggcgaactggagcacgggcgacgcgtgcgcggggcggtgggcgggcgtgggctgctcggcggacggccgccgcgtcacctcgctgaccctgccgtcgctggacctgcgcggcccgctcgacccgctgtcccacctggcggagctgcgcgcgctggacctccgcgggaaccgcctcaacggcacgctggacgcgctgctccgcggcgcgccgggcctcgtcctcctctacctctcccgcaacgacgtgtccggcgccgtccccacggccgcgctcgcgcgcctcacccgcctcgtccgcctcgacctcgccgacaacagcctcaccgggcccgtcccgcccgcgcccgcgctcgccggactcacggcgctcgtcacgctcaggctccaggacaacctcctcacgggcctcgtccccgacgtggccgccgcgctgccccgcctcgcggacttcaacacctccaacaaccagctctccggccggctgcccgacgccatgcgcgccaggttcggcctcgcctcattcgccggcaacgccggcctctgcgggcccgcgccgccgctgccgcactgcgagttcctgccgcgggagcccgcgccgacgccgccttcgtcttcgacttcgtcttcgtccgtgctgccgtccaacccggcggcatcgtcctccgtcgcctcgtcgtcgccggcgctggccacgcaggagtcgctcagccgcaggccggggttgagccccggcgccgtagccgggatcgccgtcggcaacgcgctcttctttgctctcgcgtcactgctcgtcgcgtgctgctgctgcggccgaggtggcggcggcgagccagcggcggccaagaagaggaagaggcgcggcggccgcgtcggcctggaagacggaggcggaggtggcgcgctgttcggccacctcaagggggagcagcagccggctcgtccgggcagcgccggccagtgcagcgacggcggcgacagcgacggggcgcgcagcaagctggtgttcttctgcgcggacggcggggaagatgaccacggctacggcgacg

SEQ ID NO: 36424 - DNA, 842 bp, Zea mays
  Peptide Sequence Number=SeqID_78203
gagaaggttcctcattttaagacttacttcccccaatggcaaccttcacaatcgcctccacggtacgccacctccgccgcaagctggtcacaagatgtcgggagagtcggcgctggactggacgacgagggtgcggctgctgctgggcgcggcgcgcgggcttgcgtgcatccaccgggagtaccgcacgtccggcgtgccccacggcaacgtcaagtccaccaacgtcctgctcgacaaggacggcgcggcgcgcgtggcggacttcggcctcgcgctcctgctcagcccggcgcacgccatcgcgcggctggggggctacacggcgcccgagcagcaggacgacaagcggctgtcgcaggaggccgacgtgtacagcttcggcgtgctggtcctggaggcgctgaccggcaaggcgcctgcgcagcacccgcagcccgacgcgcgcaagaagggcgcggcggcgacgagcctgagcctcccggagtgggtgcggtccgtggtgcgggaggagtggaccgcggaggtgttcgacgtggagctgctccggtacagggacatcgaggaggagatggtggcgctgctgcacgtggcgctggcgtgcgtggcgccgctgcccgagcagcggccctccatgggcgacgtggtgaggatgatcgagagcgtgccggtggagcagtcccccgcgcccgaggaggacgtggacgtctcggtgacgtcgccgtcccatcggcatcaccacggacgacggagatggtcgcctcagctactagctgctgcccgctgtactgcccagcttctgttcctttttcttgtgtgtgatcttgacatggatcttccat

SEQ ID NO: 36425 - DNA, 2838 bp, Zea mays
  Peptide Sequence Number=SeqID_78204
atgccgatctcgctccacctccactcgccccgtcgccgtcggcgtccacacctgcggctgccggcggcggcaatgcgcgtgcggctctccttcttgctgctttccgcggcattcctgacgatcctgtcggcagcggcgccgtcggccgtaccggacccagagccggaggtgaagccgagcgacacggacgcgctgaccatcttccggcacggcgcggacgcgcacggcatcctggcggcgaactggagcacgggcgacgcgtgcgcggggcggtgggcgggcgtgggctgctcggcggacggccgccgcgtcacctcgctgaccctgccgtcgctggacctgcgcggcccgctcgacccgctgtcccacctggcggagctgcgcgcgctggacctccgcgggaaccgctcaacggcacgctggacgcgctgctccgcggcgccgggcctcgtcctcctctacctctcccgcaacgacgtgtccggcgccgtccccacggccgcgctcgcgcgcctcacccgcctcgtccgcctcgacctcgccgacaacagcctcaccgggcccgtcccgcccgcgcccgcgctcgccggactcacggcgctcgtcacgctcaggctccaggacaacctcctcacgggcctcgtccccgacgtggccgccgcgctgccccgcctcgcggacttcaacacctccaacaaccagctctccggccggctgcccgacgccatgcgcgccaggttcggcctcgcctcattcgccggcaacgccggcctctgcgggcccgcgccgccgctgccgcactgcgagttcctgccgcgggagcccgcgccgacgccgccttcgtcttcgacttcgtcttcgtccgtgctgccgtccaacccggcggcatcgtcctccgtcgcctcgtcgtcgccggcgctggccacgcaggagtcgctcagccgcaggccggggttgagccccggcgccgtagccgggatcgccgtcggcaacgcgctcttctttgctctcgcgtcactgctcgtcgcgtgctgctgctgcggccgaggtggcggcggcgagccagcggcggccaagaagaggaagaggcgcggcggccgcgtcggcctggaagacggaggcggaggtggcgcgctgttcggccacctcaagggggagcagcagccggctcgtccgggcagcgccggccagtgcagcgacggcggcgacagcgacggggcgcgcagcaagctggtgttcttcggcgcggacggcggggaagaggaccacggcgacggcgacggtgacggtgcgccgctgacctcgcacctgcaggggcggcgggggacccggttccagctggaggagctgctgcgcgcgtccgcggagatggtcggcaggggcagcctgggcaccgtgtaccgcgcggtgctgagcgacggccgcatggtcgccgtgaagcggctgcgcgacgccaacccctgcgcgcgcgacgagttccaccgctacatggacctcatcggccgcctccgccacccgcacctcgtcccgctcagggccttctactacgccaggcaggagaagctcctcatctacgactacctccccaatggcaacctccacgatcgcctccacggtcacaagatgtcgggagagtcggcgctggactggacgacgagggtgcggctgctgctgggcgcggcgcgcgggcttgcgtgcatccaccgggagtaccgcacgtccggcgtgccccacggcaacgtcaagtccaccaacgtcctgctcgacaaggacggcgcggcgcgcgtggcggacttcggcctcgcgctcctgctcagcccggcgcacgccatcgcgcggctggggggctacacggcgcccgagcagcaggacgacaagcggctgtcgcaggaggccgacgtgtacagcttcggcgtgctggtcctggaggcgctgaccggcaaggcgcctgcgcagcacccgcagcccgacgcgcgcaagaagggcgcggcggcgacgagcctgagcctcccggagtgggtgcggtccgtggtgcgggaggagtggaccgcggaggtgttcgacgtggagctgctccggtacagggacatcgaggaggagatggtggcgctgctgcacgtggcgctggcgtgcgtggcgccgctgcccgagcagcggccctccatgggcgacgtggtgaggatgatcgagagcgtgccggtggagcagtcccccgcgcccgaggaggacgtggacgtctcggtgacgtcgccgtccatcggcatcaccacggacgacggagatgaggtggtaccctttacccacaagtcatgttacccatctgccaagggatcgcgacttcccatacacctctaccgaggaggcgaggcagggaccgccatcgcagcaaaatcctcccgagggcctccctacactgaccactcccctactgcccttgcccctttcgggtaccaggatgatcttcaggtgctacgtgtaaaggagatcaaggcgaactcggaggaggacttcataccaggaatcaggtcggggagtacacccgtccacgacacagtgcggtacgcggcgatgaaggagctccggcgaggaattcagtgcacccgagacgaccccgatcgctggcgatccccgtgtaagctcccaaggtcccttggtgacgacacacgggcacccactgaggctaagtcggcggcgaatcgaagttggcccgcagcggcgctccgtcctatcgacgatggtgagctgcgagagggtgtggcggcggcgcacgcgaaattgaggaggagggaggagagaggctgtggccggcttcttatggaggcgcagaacggcagatag

SEQ ID NO: 36426 - DNA, 513 bp, Zea mays
  Peptide Sequence Number=SeqID_78205
atgcaggaattcccttgcaggaccgccatcgcagcaaaatcctcccgagggtctccctacactgaccactcccctactgcccttgcccctttcggttctctggatcgggcctcaattacaagcaactccagggggtctcgggtgctacgtgtaaaggagatcaaggcgaactcggaggaggacttcataccaggaatcaggtcggggagtacacccgtccacggcacagtgcggtacgcggcgatgaaggagctccggcgaggaattcagtgcacccgagacgaccccgatcgctggcgatccccgtgtaagctcccaaggtcccttggtgacgacacacgggcacccactgaggctaagtcggcggcgaatcgaagttggcccgcggcggcgctccgtcctatcgacgatggtgagctgcgagagggtgtggcggcggcgcacgcgaaattgaggaggagggaggagagaggctgtggccggcttcttatggaggcgcagaacggcagatag

SEQ ID NO: 36427 - DNA, 351 bp, Zea mays
  Peptide Sequence Number=SeqID_78206
atggcgaactcggaggaggacttcataccaggaatcaggtcggggagtacacccgtccacggcacagtgcggtacgcggcgatgaaggagctccggcgaggaattcagtgcacccgagacgaccccgatcgctggcgatccccgtgtaagctcccaaggtcccttggtgacgacacacgggcacccactgaggctaagtcggcggcgaatcgaagttggcccgcggcggcgctccgtcctatcgacgatggtgagctgcgagagggtgtggcggcggcgcacgcgaaattgaggaggagggaggagagaggctgtggccggcttcttatggaggcgcagaacggcagatag

SEQ ID NO: 36428 - DNA, 270 bp, Zea mays
  Peptide Sequence Number=SeqID_78207
atgaaggagctccggcgaggaattcagtgcacccgagacgaccccgatcgctggcgatccccgtgtaagctcccaaggtcccttggtgacgacacacgggcacccactgaggctaagtcggcggcgaatcgaagttggcccgcggcggcgctccgtcctatcgacgatggtgagctgcgagagggtgtggcggcggcgcacgcgaaattgaggaggagggaggagagaggctgtggccggcttcttatggaggcgcagaacggcagatag

SEQ ID NO: 36429 - DNA, 330 bp, Zea mays
  Peptide Sequence Number=SeqID_78208
atgaagctgtggaaggagacttccaggagttccaagactacgacgagttctaggtgtgggttagcggcaaccccccagtcggctgcctgtgaaggccgcgttatctacgtttcttttccgcactttgatttattatggctcgacttagacacactgcacgaaagtccgtcatccccttcttaccctcccgccttgctgagcgtccgcttcgccgtcccgtggccggacagtccagccacttggagagactacaccaccgcctgcgtgaggagcaggaacgtcgacgacaggagcagcagggctcttctttctctctccaccaggagatag

SEQ ID NO: 36430 - DNA, 330 bp, Zea mays
  Peptide Sequence Number=SeqID_78209
atgaagctgtggaaggagacttccaggagttccaagactacgacgagttctaggagtgggttagcggcaacccccagtcggctgcctgtgaaggccgcagttatctacgtttcttttccgcactttgatttattatggctcgacttagacacactgcacgaaagtcagtcatccccttcttaccctcccgccttgctgagcgtccgcttcgccgtcccgtggccggacagtccagccacttggagagactacaccaccgcctgcgtgaggagcaggaacgtcgacgacaggagcagcagagctcttccttctcgctccaccaggagatag

SEQ ID NO: 36431 - DNA, 1014 bp, Zea mays
  Peptide Sequence Number=SeqID_78210
atgaagctgtggaaggagacttccaggagttccaagactacgacgagttctaggtgtgggttagcggcaacccccagttggctgcctgtgaaggccgcagttatctacgtttcttttccgcactttgatttattatggctcgacttagacacactgcacgaaagtcagtcatccccttcttaccctcccgccttgctgagcgtccgcttcgccgtcctgtggccggacagtccagcgccccctgcaccaccacagggcgccccagcccctagagtagctgctggaggagacccagacgacggagatggcgacgacagctcgagccacgacaccgacttctctgctaaccatgagctggaaggatggtttgctcgatccatcactcgcgacgctactcgcgggtgtcacttccacgatgcgctcgacaccctgctacgtcgggcatttgaccggcatacttggtccgtcgagtatcgctgtgtggtctaccagcacagtcgcggggtctacccggaccgctgggaggcaacctgcttggtgcgccgtcaggagaacagtctccagggtgtagaggcctgctcagagcactattctatctctgagcgggactccgctgaggcagccatgcaagatgctgcacggcgtgcgctttcacactactgctcggttttcggtggggtagctgacggtcttgacctgaagtattacccccgccgttcatctggtagcacaagaggcgtgattgtctcacctgtcggtgagggcaatcctaggttgagcagcacagtcaacctagccgccgtgctaaacacggagctggaccatgcattagacgagctgagtagggctcgtgctgagatcgcccagctacgggctgagcgcgtggaacgtcgtcacctggaggatggttcccccgctcccgtcgggactcagcacctgtaccgctcacctcggcgtggacaccagtcttatggcaaccccgactgcaagaccaagataactctagaaccatag

SEQ ID NO: 36432 - DNA, 341 bp, Zea mays
  Peptide Sequence Number=SeqID_78211
atgtccagacagctgctgaagtccacttgcctgcgtgatgtagactctcaagtgttcgccgttgccttcgctgtattagctgctggtgctatagttctgacactcaatgttctactgctgggtgggaacatcatcttcttccaaagcctcagtcttctcggatactgtctgttcccgctggacgtgggggctctgatttgcatgcttaaggacagcgtcatactaaagatggttgtggtgacggtaacattggcatggagctcttgggcagcataccccctcatgagtgctgctgttaacccaaagagaaaggccctggcgctgtatcccgtgttcctcat

SEQ ID NO: 36433 - DNA, 915 bp, Zea mays
  Peptide Sequence Number=SeqID_78212
atgccactctgggggaccgccgcgtccacgcagccggcagccaagggcgacgccgcccgcgcgccctcagggtccggcggcggcggcgtcaaggtgatccggtcgctgctccccacccggcgccgcctccgcctcgacccgcccgctaagctttatttcccatcaattatgagacatgcaactgagatatacatgaggaacacgggatacagcgccagggcctttctctttgggttaacagcagcactcatgagggggtatgctgcccaagagctccatgccaatgttaccgtcaccacaaccatctttagtatgacgctgtccttaagcatgcaaatcagagcccccacgtccagcgggaacagacagtatccgagaagactgaggctttggaagaagatgatgttcccaccctgtaccaaaccattacagccatcaccaaatattgcaatgtcagatgaacccggtaagcaagtccggagcgctgttaggatcaagaacatcagcaagtctcatgtggctttcaagttccaaacgactgcaccaaagagttgcttcatgaggcctcccggcggcgtacttgctccaggggaaagtatcatagcaacagctgtggtgctcgcaagttataacgacctatccgtgcattcccttacatcaagtgcagttttcaagtttgttgagcatccggagaacaatgagaagcccttggacaagtgcaaggttaagtttaagattgtcagcctgaaagtcaaagggccggtggagtatgtccctgaattgaggttgttgtatagatgggacgtggaggggcgagagcgagcacgacgcaggggctccgtggctgatcagagagtgagagattactcgtggctaggtttcgccctgctccctgagggaagcgggcaaaagtaa

SEQ ID NO: 36434 - DNA, 723 bp, Zea mays
  Peptide Sequence Number=SeqID_78213
atgaggaacacgggatacagcgccagggcctttctctttgggttaacagcagcactcatgagggggtatgctgcccaagagctccatgccaatgttaccgtcaccacaaccatctttagtatgacgctgtccttaagcatgcaaatcagagcccccacgtccagcgggaacagacagtatccgagaagactgaggctttggaagaagatgatgttcccaccctgtaccaaaccattacagccatcaccaaatattgcaatgtcagatgaacccggtaagcaagtccggagcgctgttaggatcaagaacatcagcaagtctcatgtggctttcaagttccaaacgactgcaccaaagagttgcttcatgaggcctcccggcggcgtacttgctccaggggaaagtatcatagcaacagctgtggtgctcgcaagttataacgacctatccgtgcattcccttacatcaagtgcagttttcaagtttgttgagcatccggagaacaatgagaagcccttggacaagtgcaaggttaagtttaagattgtcagcctgaaagtcaaagggccggtggagtatgtccctgaattgaggttgttgtatagatgggacgtggaggggcgagagcgagcacgacgcaggggctccgtggctgatcagagagtgagagattactcgtggctaggtttcgccctgctccctgagggaagcgggcaaaagtaa

SEQ ID NO: 36435 - DNA, 1899 bp, Zea mays
  Peptide Sequence Number=SeqID_78214
atggcgggggaggaggagagaaagcgggtgctcctctcgtacgctgtccccacagtatcctcgcggaacactacagcctccagtactacgggttctggttccagaacgggacacaggcgaaggagaagcatgtgggctagatcagtggaggaagaagattgccgccccaaccacgtctatatttggtttgttgttgtttttacttcaagagtctacacaacaatactccaagatctaggtactgattttctaattaataggtcagatggcaaagagggaggcaaccgtggtggaccagacacaatctccatggaggaatcatcttttggacggcgaggggaagaggatggatccgcatatgtaaatctacattgcaagaactacttcaactttacaaagaaccctgaggaaatcccgtgggatgaggctggtgctgagtatgtcgtggagtccatcggtgtattcacttacaaggataatactattgcacatctgaaggatcgccctatgtacctgttgggatatattgcgaaccaaagtcgagtttatcttattgacaaggagttgaatgttgctcattttttggaatcgagaggtatgttggaagaggctcttgagatagccactgatgctgactacaagtttgacctagctgtgcagcttggaaaattagaagtcgcgaaggctatcgccatagaagcacaaagtgaatctaaatggaagcagttgggcgaacttgccatgtccacaggcaagctagagatggcagaggaatgccttcttcaagcaaaggacttaagtggcttgttgctactgtactcatctcttggagatgctgaaggaattgaaaagcttgcttctttggcaaaagaacacggaaaaaacaatgttgctttcctctgcctttttatgctcgataaagttgaagattgcatacagttgcttgtagacagcaaccgtatacgtgaagctgcattactggcgcgttcatatcttcctagcaaagtaccagagatagtggcaatttggagagacgacctgagtaaaattaatccaaaagctacagagtctctagcagatccttctgaatatccaaatctatttgaagactggcaggttgctctaactgtagaaaaaagtgttgcgtctcagaggttgttcagcatgaggaacctgaagatgtggctgaggaaaatggagaacttgatcaacaggcattgcgtgatccatacttcaaaggtcttgccagggttgaaagagaaccatcctgttagccaatcagaaaaagtggaatttgactttgagcacaaaagaatgtcaaaggaagagataagagagttgatattccaggagatactggaatatcacccacaactactaagtagctacattaatggcacagagaggacaacctttctctacccaagtgccattgatcaatttaagaagcagttttctcatcttgaagagagtggtggtaacggcccatcagttccaacagacaggaaacatgcatcccttcccaggaccactatggttcactcgaatccaattcctgccaaggaacaacctcttgctgtgtcatcaagggttagaccagtctctgatgattcgtgtaagaatccttgggagaaagcaagtggtcctggaaatgttaccaggacatctctgactccacaagggctgcaagcacaagcaggatcagtaagagttaatgggccagtgatggattcaaggtattctgctcaccaacagatcccacaagcatacggttaccgccaaatgcctgcaaggttggacagtaccaactcatcgcaggccataggaggttacacgctgcagtcacagaaggaaacattatttgaagagttactcgaatccaatattttgctcttttga

SEQ ID NO: 36436 - DNA, 2217 bp, Zea mays
  Peptide Sequence Number=SeqID_78215
atggcagctgcgccctctctgctggatctctcgccgcccacaaatcgtgctatgtcagccacaaatcgaccaccagccacgcccctaccgccccttccatccatggcagccgcgcccccacagattgcgctccatttcaccgccagagcatccacgcccccgctctactctctcagtcgccatcttggaagggggtgtacaagctggagcgggctgccactggcaactctacgagagaagctgcccaggttcctgcagaagttcgcttcgagtctgaccccctccgcccatggttctgtcgcctccagatctcttgagatggcgggggaggaggagagaaagcgggtgctcctctcgtacgctgtccccacagtatcctcgcggaacactacagcctccagtactacgggttctggttccagaacgggacacaggcgaaggagaagcatgtgggctagatcagtggaggaagaagattgccgccccaaccacgtctatatttggtttgttgttgtttttacttcaagagtctacacaacaatactccaagatctaggtactgattttctaattaataggtcagatggcaaagagggaggcaaccgtggtggaccagacacaatctccatggaggaatcatcttttggacggcgaggggaagaggatggatccgcatatgtaaatctacattgcaagaactacttcaactttacaaagaaccctgaggaaatcccgtgggatgaggctggtgctgagtatgtcgtggagtccatcggtgtattcacttacaaggataatactattgcacatctgaaggatcgccctatgtacctgttgggatatattgcgaaccaaagtcgagtttatcttattgacaaggagttgaatgttgctcattttttggaatcgagaggtatgttggaagaggctcttgagatagccactgatgctgactacaagtttgacctagctgtgcagcttggaaaattagaagtcgcgaaggctatcgccatagaagcacaaagtgaatctaaatggaagcagttgggcgaacttgccatgtccacaggcaagctagagatggcagaggaatgccttcttcaagcaaaggacttaagtggcttgttgctactgtactcatctcttggagatgctgaaggaattgaaaagcttgcttctttggcaaaagaacacggaaaaaacaatgttgctttcctctgcctttttatgctcgataaagttgaagattgcatacagttgcttgtagacagcaaccgtatacgtgaagctgcattactggcgcgttcatatcttcctagcaaagtaccagagatagtggcaatttggagagacgacctgagtaaaattaatccaaaagctacagagtctctagcagatccttctgaatatccaaatctatttgaagactggcaggttgctctaactgtagaaaaaagtgttgcgtctcagaggttgttcagcatgaggaacctgaagatgtggctgaggaaaatggagaacttgatcaacaggcattgcgtgatccatacttcaaaggtcttgccagggttgaaagagaaccatcctgttagccaatcagaaaaagtggaatttgactttgagcacaaaagaatgtcaaaggaagagataagagagttgatattccaggagatactggaatatcacccacaactactaagtagctacattaatggcacagagaggacaacctttctctacccaagtgccattgatcaatttaagaagcagttttctcatcttgaagagagtggtggtaacggcccatcagttccaacagacaggaaacatgcatcccttcccaggaccactatggttcactcgaatccaattcctgccaaggaacaacctcttgctgtgtcatcaagggttagaccagtctctgatgattcgtgtaagaatccttgggagaaagcaagtggtcctggaaatgttaccaggacatctctgactccacaagggctgcaagcacaagcaggatcagtaagagttaatgggccagtgatggattcaaggtattctgctcaccaacagatcccacaagcatacggttaccgccaaatgcctgcaaggttggacagtaccaactcatcgcaggccataggaggttacacgctgcagtcacagaaggaaacattatttgaagagttactcgaatccaatattttgctcttttga

SEQ ID NO: 36437 - DNA, 633 bp, Zea mays
  Peptide Sequence Number=SeqID_78216
atgggcttcgcttcgataccagctatgacggaacctcccaagtcattaggcccacctacagttgttcttgtccaacggacctcagacaaccctgtaggtgcacctgatcacttgacaagttcggtatctgaattccttaccttcccaagagcgttttacccgtcacgcagacattacaaatcatcggagatgcagaagtgcggaagcagttacaataacttacttttattgaaaaactccgggggcggtggctctcaatttgatcacgacgtgctggcagccggagatagggaagaacacggtggttgtaaccgtggcgttcacaggtgcaatggcgcaaggataatactcctaagggtgccacgattactaccgcatggtaacaagatagggcgtggcgcaatcgaggtcaccggcgcttccacggctacaccgctccagtcggacgaagggggcggtgacgaggacgggaacgtcatggggaagctagcagcagaggagatcgtgggggtgtacaagctggagcgggctgccactggcaactctacgagagaagctgcccaggttcctgcagaagttcgcttcgagtctgaccccctccgcccatggttctgtcgcctccagatctcttga

SEQ ID NO: 36438 - DNA, 345 bp, Zea mays
  Peptide Sequence Number=SeqID_78217
atggcgggcggaattgagctagccggagctaaggaaaggtggctggccggcgagggattcgagttagggatcaaggtgaacatccctgatctttggctcaagacaactccatggggttctttgttgcggagcgggcatacatcaggtccgtcgagtgcacgtggctggacggatcggatgactcggaagaggtcttctcagaggaggcgaaggactcctaagactccaaggagggcagcgacggcgagggcgacgacagtggcaagggcagcggcgacggcagtggtaggggcagtggcggtgacggcaacatcggtggcaatgtgccaccggcttgaatattaa

SEQ ID NO: 36439 - DNA, 129 bp, Zea mays
  Peptide Sequence Number=SeqID_78218
atggcgggcggaattgagctcgtcggagctaaggaaagggggctggccggcgaggagatatggagccaggaaatctggtctgtctccctgcccaaacccgaggcaaatccaaggttttgtcgtgtctag

SEQ ID NO: 36440 - DNA, 150 bp, Zea mays
  Peptide Sequence Number=SeqID_78219
atggcgggcggaattgagctcgccgaagctaaggaaaggtggctggccggcgagggattcgagttagggatcaaggtgaacatccctgatctttggctcaagttctacgagagcaaaatcccccaaaagaatgtaaaatgtaacatctga

SEQ ID NO: 36441 - DNA, 1698 bp, Zea mays
  Peptide Sequence Number=SeqID_78220
atgaacaaacaccggcactcgaaggtgccattacaaatggaactccggttccacctccacaggtacgaacaaccccccacgttggaaggcctgcggagcaacagaacaccgacgaatggctcgctgatgctcgctccggcagcagcgacaacaaccctccgctccaggcggccaaacagcagcagcgatgacctcagggcagacgctgctgtgacaaggccttcgcccgtgtccccgcccaaggggcgaggacatgcagaaggccgtagagttggaggtcagtccgtgggtggcgccgactatctcgtcggcggagaaacctattccggctgcctcggtgggaggtggcaccggaagcagcgccgaagccgctcaggccggagagccagacacgcggcagctgccagcgccacgaacggcgaacgcccttccccccgatcactgagggaaggagcgggccgctgcccgcgcggagaccggccccaactcggtgcactcccctccccagcactgatgatgaacatccttgaagctgagggaggggcagaagccgcagcccggcttgcttctccccaccctgggactggtgccggcgcggaccgagtcttctccaacacgctccaaggtcctccccctacgacacggggctgggtcccacgcgtcatgcaagctggcccagcatggaggcccaggcccacacgtcatgtaaccggcgcgccggttactacgtgcgagaaactgcaccgccactcgcgccagtaccgcgccttctcgactgcggaaccggtgccgcgactcgaggcgaccctgcgcatgacccgacagtgccaaccgagcacatcggtcacgggtcagtcagccgcgggagaaggcgcgacggtcgatacagccagaaatgggccggcagtaatggcggtggcaggcgggcggaggcagcagtcaagtcgtcaggaagctcacgtcccctcctgggacagcgagagagccctctcccacggcgtgaagacgacgcgcccgtgttccgttccccgaacggctcgcgcatgcacaacggctgccccgcgaaccacccgtctcgtcgcattaactctgcggcaggacaggcggcacctttggcaggcgaagcaggcgacgcttcacctccgccataatgaccgcgtcaaaaaagggaccgggaaaggggatactccgaaagggatccttctccgcgaaggaagcgggccccgagcccctctactgatcagaggttcgaaggctggcccctcggaagggttcaacagccgcctcagagcactcgggctccgcgcccactattggtcagaggttcgaaggctggccactcggaaggatttaacggccgcctcaggccactcgggctccgcgcccactactgatcagggaggctcgggggctgctcttgcaaacccggctccagccaaaccattgacagcgtcaacataccagcccaagaacttgggactcgactatccacccaggctacggccagacgagtgccctagtggccagggtgtcacgctccacaagatcgtgacagccataggaggtggtgtatcggttgctaaggcgcagcgtctttggaaggctgtagtcgggccttcaattctcttgcacgggcccgagtcactggcccaggtggaaggggtggcgcctgggctggagaaggtgctgctggtgtag

SEQ ID NO: 36442 - DNA, 1576 bp, Zea mays
  Peptide Sequence Number=SeqID_78221
atgaacaaacaccggcactcgaaggtgccattacaaatggaactccggttccacctccacaggtacgaacaaccccccacgttggaaggcctgcggagcaacagaacaccgacgaatggctcgctgatgctcgctccggcagcagcgacaacaaccctccgctccaggcggccaaacagcagcagcgatgacctcagggcagacgctgctgtgacaaggccttcgcccgtgtccccgcccaaggggcgaggacatgcagaaggccgtagagttggaggtcagtccgtgggtggcgccgactatctcgtcggcggagaaacctattccggctgcctcggtgggaggtggcaccggaagcagcgccgaagccgctcaggccggagagccagacacgcggcagctgccagcgccacgaacggcgaacgcccttccccccgatcactgagggaaggagcgggccgctgcccgcgcggagaccggccccaactcggtgcactcccctccccagcactgatgatgaacatccttgaagctgagggaggggcagaagccgcagcccggcttgcttctccccaccctgggactggtgccggcgcggaccgagtcttctccaacacgctccaaggtcctccccctacgacacggggctgggtcccacgcgtcatgcaagctggcccagcatggaggcccaggcccacacgtcatgtaaccggcgcgccggttactacgtgcgagaaactgcaccgccactcgcgccagtaccgcgccttctcgactgcggaaccggtgccgcgactcgaggcgaccctgcgcatgacccgacagtgccaaccgagcacatcggtcacgggtcagtcagccgcgggagaaggcgcgacggtcgatacagccagaaatgggccggcagtaatggcggtggcaggcgggcggaggcagcagtcaagtcgtcaggaagctcacgtcccctcctgggacagcgagagagccctctcccacggcgtgaagacgacgcgcccgtgttccgttccccgaacggctcgcgcatgcacaacggctgccccgcgaaccacccgtctcgtcgcattaactctgcggcaggacaggcggcacctttggcaggcgaagcaggcgacgcttcacctccgccataatgaccgcgtcaaaaaagggaccgggaaaggggatactccgaaagggatccttctccgcgaaggaagcgggccccgagcccctctactgatcagaggttcgaaggctggcccctcggaagggttcaacagccgcctcagagcactcgggctccgcgcccactattggtcagaggttcgaaggctggccactcggaaggatttaacggccgcctcaggccactcgggctccgcgcccactactgatcaggggttcgtaggctggcccccgaagggttctgacagccgcctcagagcacgcagagcgagggatgaccctggaggctcgggggctgctcttgcaaacccggctccagccaaaccattgacagcgtcaacataccagcccaagaacttgggactcgactatgccacccaggctacggcca

SEQ ID NO: 36443 - DNA, 948 bp, Zea mays
  Peptide Sequence Number=SeqID_78222
atgtcttcgtactcccttcatgcatcgcatcgttccaccttccgagcccccggatggcgaacactcacgtcgctttcatcctgctgtcattggaggaacgcaacttcgcgaaagttggtacctttcagccatcgctcggcttcaaggattttcatcaggcagcccggccgcatcccctcgcaggtggtcacccaagacggtgaccaccagtcccagggtggggagaagcaagccgggctgcggcttctgcccctccctcagcttcaaggatgttcatcatcagtgctggggaggggagtgcaccgagttggggccggtctccgcgcgggcagcggcccgctccttccctcagtgatcggggggaagggcgttcgccgttcgtggcgctggcagctgccgcgtgtctggctctccggcctgagcggcttcggcgctgcttccggtgccacctcccaccgaggcagccggaataggtttctccgccgacgagatagtcggcgccacccacggactgacctccaactctacggccttctgcatgtcctcgccccttgggcggggacacggggcgaaggccttgtcacagcagcgtctgccctgaggtcatcgctgctgctgtttggccgcctggagcggagggttgttgtcgctgctgccggagcgagcatcagcgagccattcgtcggtgttctgttgctccgcaggccttccaacgtggggggttgttcgtacctgtggaggtggaaccggagttccatttgtaatggcaccttcgagtgccggaaccctcggccgctcttcgatgagccggagccgaaggcagcggtgtcagtgtggacagaggcagagttggctcgaaagaagacttcgtcggccggagcctggccgggccgtccactggcgggaccggcgccggagtcgagttgccgaggccatgagccaggctaa

SEQ ID NO: 36444 - DNA, 363 bp, Zea mays
  Peptide Sequence Number=SeqID_78223
atggataaaggaaatacagttttgcgctggggtccctggcgaaagtccctaagtgaattacatacaggtcaccggtgtattattcacatgagtctaaggccgcggtccttccctaatggaacagtggccgcggaggaagaaaggggcggaggggcttaccggtggcgagactgctccggtgaggtggccgagggtgtaggggaggtcctgagggtcacggcgatgtgtgggtcacagtcggggatggccggagttggccggtccaagtgcgcaggcggggaagctcgtcgggggcgaggagtccaacctgcccacggcgcgatagttcaatcaaatgggtcagagagcttcactgggtgctag

SEQ ID NO: 36445 - DNA, 855 bp, Zea mays
  Peptide Sequence Number=SeqID_78224
atgaatgaccacacgcaccagaactcgggcagaatgaacacgcacacgtgttcgaccctggtcggcacgccggcgttcgcccaacccgcgcgcgtgctcgcctcagcgtccggtcaagtccgtcgcacgccctcgccctcggccgtgctcgcccgcacctttaaagcctcccccgggcgcgcctcacctcacactgtgctcaccctcactggccagacgcccctcctaagctccatcgagcttttcctccgcccgccaccactgcccaagcctcagccatcgcggccagcccgctccagtcgcgtccaagttgcgccggggcttgccttcaatagatggggctgcggggagatcctcgatggcagtctcgggagcttgatcctggtcttcctcgtggacagctccttactcggggatgagcactcattccctaatggaacagtggccgcggaggaagaaaggggcggaggggcttaccggcggcgagactgctccggtgcgctggcgggggagctcgttggcagcgaggagtccggcctaaccagggcacgattggtcaatcaaatgggtcagggagcttcttcagagatcaaggaagacatgtgcgcgaggaatttaagaatagctcactggattgctcggtctacgcgcgtaggggggcgactgaagtccggcgaagatgatcttgggtctacagtgaggtcctatcgagtccgagcacttggaaagcttcacgggtcactggcgaagctaaccgagaggccgacgcaacttggacgcgactggagcgggctggccacggtggccgaggcttgggcagtggtggcgggcggaggaaaagctcgccggagctaa

SEQ ID NO: 36446 - DNA, 276 bp, Zea mays
  Peptide Sequence Number=SeqID_78225
atggggcgagcgcgcgcgggttgggcgaatgccggcgtgccgaccaaggtcgaacacgtgtgcgcgttcattctgcccgagttctggcgcgtgtggtcattcatccgagcctactctcgccttgttaatttgatgcttcatgctcaatttggcttacatgaaatgatggttcttgggttagcactgagaaaagccctaagtgacactggggtgtcacagccttcccccttaaaggaatctcgtcgtgagattcaggtcggagtcctcccggggtga

SEQ ID NO: 36447 - DNA, 255 bp, Zea mays
  Peptide Sequence Number=SeqID_78226
atgaccgggaaaaagactgtgcattcgtggagaaggacgactgtgacactatccgtggagaaggacgcgctgaagaacgggcattctggatgtgcaaagtgctgcatccgcacggacgggagctattgttctgccttgtccatcgtggcgtacctagggcatcgaattgcgtgggatgcttcgctcaacgttccttatcttggttggatggtctatgaaaagagacatgtcgttgaactggttaaaatcctctag

SEQ ID NO: 36448 - DNA, 324 bp, Zea mays
  Peptide Sequence Number=SeqID_78227
atgaccgggaaaaagaccacggcttcctctgacggcggcactccaaagaaagccaaggtggtggtaaaggatgaggaagaggcggggttggaggatgaggaagaggcgactgtgacactatccatggagaaggacgcgctgaagaacgggcattctggatgtgcaaagtgttgcatccgcacggacgggagctattgttctgccttgtccatcgtggcgtacccagggcatcgaattgcgtgggatgcttcgctcaacgttccttatcttggttggatggtctatgaaaagagacatgtcgttgaactggttaaaatcctctaa

SEQ ID NO: 36449 - DNA, 198 bp, Zea mays
  Peptide Sequence Number=SeqID_78228
atgaccgggaaaaagaccacggcttcctctgacggcggcactccaaagaaagccaaggtggtggtggaggatgaggaagaggcggggttggaggatgaggaagaggtgactgtgacactatccgtggagaaggacacgctgaagaacgggcattctggatgtgcaaagtgttgcatccgcacggacgaaagtcactag

SEQ ID NO: 36450 - DNA, 234 bp, Zea mays
  Peptide Sequence Number=SeqID_78229
atgaccgggaaaaagaccacggcttcctctgacggcggcactccaaagaaagccaaggtggtggtggaggatgaggaagaggcggggttggaggatgaggaagaggcgactgtgacactatccatggagaaggacgcgctgaagaacgagcattctggatgtgcaaagtgctgcatccgcacggacgggagctattgttctaccttgtccatcgtggcatacccagggcattga

SEQ ID NO: 36451 - DNA, 198 bp, Zea mays
  Peptide Sequence Number=SeqID_78230
atgaccgggaaaaagaccatggcttcctctgacggcggcactccaaagaaagccaaggtggtggtggaggatgaggaagaggcggggttgcaggatgaggaagaggcgactgtgacactatccgtggagaaggacgcgctgaagaacgggcattctggatgtgcaaagtgctgcatccgcacggtcgaaagtcactag

SEQ ID NO: 36452 - DNA, 336 bp, Zea mays
  Peptide Sequence Number=SeqID_78231
atgcctataaatagtgccatgaaccccgacgagacacccacaacttcaccactccaatctcacctcccaatttcaccagagctcgtcgcagcgacgttttcccccttctcggtctccggcaagtggaagttctccgcgctccatggccggaccgttctgaattacatgagcattcatgattatagatggttatatctagaaaacgaggaggaaatagaagttgaagaagcaaggacttcaccaccaccacctaaagaacctcaggcaggaaactgcttttactttgatatctgtggagcagagcctgattcacctatcacacaaggcaagccctag

SEQ ID NO: 36453 - DNA, 294 bp, Zea mays
  Peptide Sequence Number=SeqID_78232
atggctccgttaagtagtcaagcccctcatccagcaaaccgtgcctcgaatcatccactagagctccccaatttgggatttcccccaaatcaaccaagaacaccgagcgaaaacgaggaggaaatagaagttgaagaagcgaggacttcaccaccaccacctgaagaacctcaggcaggaaactgcttttactttgatatctgtggagcagagcctgattcacctatcacacaaggcaagccccggtgcatttgccacctccttgctattttgaaatctttctcacttacttga

SEQ ID NO: 36454 - DNA, 363 bp, Zea mays
  Peptide Sequence Number=SeqID_78233
atgaaagagacctcgccgtggctagctcgtctcaggtccgctcataccctctgccctttcgtttcagtgttctggtgtatccctgatgctccccgaccccgccaattggacttggaccccttagatcgccgggaacgcgttcgattgtccgttgtgcccgctgccaccgtggacagagcaaagaacgaggaggaaatagaagttgaagaagcgaggactacaccaccacctgaagaacctcaggcaggaaactgcttttactttgatatctatggagcagagcctgattcacctatcacacaaggcaagccccggtgcatttgccacctccttgttattttgaaatctttctcacttacttga

SEQ ID NO: 36455 - DNA, 975 bp, Zea mays
  Peptide Sequence Number=SeqID_78234
atgagaagagatcgccaaattttaaaggatgtgatagaagactttgctggaggtgtaggggcgagctcggagtttgtcatgcacactttgaatgtcaattgtgccaagtttggaaggcgagcatcaaggatcctcatcactggtggggaggatttgaaggtcaatctttgggctatagggaaacccggtgccctcctgagtctatcaggctttataagtccagttgagtcagtaagctttgactcttctgaagttacgataggtgctggtgcagcaagtggaacgataaaaatatggaatattgaggaggcgaaagtttctattgacaatttgcataaatgtgtagttgttcgaactttcactggacacagatcaagctgtgcatctcttgatttccatccttttggagaattcttagccactgggtcttcaaatacaaacatgaaaatatggaatactcgacagaagagatgcatccacacatacaagggtcatacccaacgaattaatgtgcttaaatttactcatgatggccgatggattgtttctggtggggctgataactcagtgaaggtctgggatttgacggctggaaaactcatgcatgatttttgtcttcatgaaggtccagtcaactgcttagatgttcacccctatgagtttttattggctacaggttcagttgataagactgttaaattttgggaccttggaacttttgagttgatcagttcttctggacccgagttaatgattggtttttcagatattatggagaggttacataaagatggtatactatcaagggcaagcaaagatggttatacagttaaccagatattatggagaggctacataaagatggtatactatcaagggcaagcaaagatggttatacagttaatcaggccttgcactgtatctgcagcaaagagaaggatccgaggttactccattcggaggagcaagtcttga

SEQ ID NO: 36456 - DNA, 384 bp, Zea mays
  Peptide Sequence Number=SeqID_78235
atgcatgatttttgtcttcatgaaggtccagtcaattgcttagttgttcacccctatgagtttttattggctacaggttcagttgataagactgttaaattttgggaccttgaaacttttgagtcgatcggttctgctggacatgagaacaaccgagaatactttgagctgataaaccaattgcttattgttggtaaatgtcctcaattagtagttaatgattggtttttcagatattatggagagatattatggagaggctacataaagatggtatactatcaagggcaagcaaagatggttatacagttaatcaggccttgcactgtatctgcatcaaagagaaggatccgaggttactccgttcggaggagcaagtcttga

SEQ ID NO: 36457 - DNA, 1182 bp, Zea mays
  Peptide Sequence Number=SeqID_78236
atgggggctctgcccagcaccgaattggccctcaagctcgtcgacgaagcttacacgatgatgtctgatccagagaagcgagaggggtatgattacacatgccggttcgttcggtccggccacatcgggccttccactgtatctgcaacaaagagaaggatccgaggttactccgttcagaggagcaaggtcctagcatcaactatattcaccgttcttataggagttgtttcctcctatgtcttgcatggtggtcaagatattttagcccctgtgtgtgcatgctttgatgctgaatcaatgtctgtaagcttgttatccacagttctgtttggagtaggcagtacagcagattcgccaccaaatccttgggagcgttctagagctgaaggagcatctggtcctgcacctttcaagcccccatctgctggaagcaccagtgatgttgttgaagcttccggtaccgctaaacccgatgaaaatgttactgtgacagagagcctgcacagaagttaccatgatggattagaagttcgcatagagtgcctcagccatcacctcaagaaagtagtgctgagaggaccaacttcttttgcaactcttatttatgcagcaatttttgttgttcaaaatagtaattgccattaccatgtcctcatgatcgtagctggtggacatgtaacacatgtttgggaattaggggatttcatcacctcgtcggaggcacatcctggaggttttcttttcacgaagtttgccagtagtagccagactctttttgaccttttcccggatagctttggtggcaggatgaagccctacttacagattggaagcagcagttggaagcagctcgcacggcaggtggatctcagcgctaggcaggttcttgggcagctcagacaccagctcgtcatcgagctccccgaggcttgccgtcgtgctgcagcagcatggcgattgcagtgccaaggacgatggtgtagtgggatgacagcgacgatcaagctcatgcagaatgaatacttcttcaggtacagagatgaccggaatgcagcagaaattttcagagctaatggtgatataaatggacttaaatcacattgtaatagtcagcatcaatgcattccgatccaaatgttgctcaatggtggagatgtcataagctgtgtcatggcatga

SEQ ID NO: 36458 - DNA, 381 bp, Zea mays
  Peptide Sequence Number=SeqID_78237
atgggaatggagcgcgaaggctatgcaggaggagcgcgaataggcctttggccgtgtggatcgggagctgctgtgggaggaaggcctcgagggagccgccgaacccgggggagggcgatgcctggaggtccccgcctcaccgcttcagggtggcgcacggagagtggaggaggacgcagtcaccacgtcaggggcgggcggtcgctggtcgcagcctcgcgggtggcgggctgccggctgggacagaggctagtcctcgacgtcggatatgtgggactcgccaatcccccgaaggaaactactagaaagctttccgtaggtggatacgatgaagaggatggtgctgatgcctgcacagatggtcctgatataccttggtaa

SEQ ID NO: 36459 - DNA, 123 bp, Zea mays
  Peptide Sequence Number=SeqID_78238
atggagcgccccggcggactcgccaatcccccgaagcaaactactagaaagctttccgtaggtggatacgatgaagaggatggtgctgatgcctacacagatggtcctgatataccttggtaa

SEQ ID NO: 36460 - DNA, 351 bp, Zea mays
  Peptide Sequence Number=SeqID_78239
atggagaacaggccagtaattcgaggtcgagcaaagacaaagctcacacacctggtcagtaaactcctaggcttaacaccttatcgtcgtggcattgacatccttaatcgcggacgccagttttgcaatataatgtcttttgatatttttgtatcttccctaaagtttgcacctttttggagaaatgaggctgatgtgcccatggatcgacgaccaagcctctcaaaaaggttgcaggaaagaggactcgccaatcccccgaaagaaactactagaaagctttccgtaggtggatacgatgaagaggatggtgctgatgcctacacggatggtcctgatataccttggtaa

SEQ ID NO: 36461 - DNA, 735 bp, Zea mays
  Peptide Sequence Number=SeqID_78240
atgacctggaacagcagcagcaggacgacggcgctgtgcgagtgctcaacggtgagaagaccggtcgcagattttttggagagggaagaggaggggattccacatggccggaggcggagggagcagatgggtgaggggcgagacataggcgtacccgtggagccaaatccgactgcaggcacgacgagtttggcgaccgccgcagcatcacagatgcgacggctcaacggcgagtgctctgctcaacggccaaaaaccgcttggaacaggagctcggactgggacacgaacacggacaccgcgtggaacaggagctcggactcggacacggacaccgcgtggaacaggagctcggactcggacacggacactctgaacgatgtaatcccgtttgccttgatgttggaataccaaagcgtcgttggaggacggctgcagctgaagggtaaagcgctgaacgtgaaggatggtggagtaaagaaaaagaagaagtaccagcgtgaggagtcgtctcagactgaatttgataagaatggagacgaaaggaacccacattctgactataactatctcacaccagcagagcgcagctacatggaacagaagcagaagatcgacatgaagaagatggctaaagtcgcaaacaagtcgtacaaggaccgcatgcaggacttcaaccagtacctggctaacctcagcgagcactatgacatctccaaagttggtcctggctaa

SEQ ID NO: 36462 - DNA, 663 bp, Zea mays
  Peptide Sequence Number=SeqID_78241
atgacctggaacagcagcagcaggacgacggcgctgtgcgagtgctcaacggtgagaagaccggtcgcagattttttggagagggaagaggaggggattccacatggccggaggcggagggagcagatgggtgaggggcgagacataggcgaacccgtggagccaaatccgactgcaggcacgacgagtttggcgaccgccgcagcatcacagatgcgacggctcaacagcgagtgctctgctcaacggccaaaaaccgcttggaacaggagctcggactcggacacgaacacggacaccgcgtggaacaggagctcggactcagacacggacactctgaacgatgtaatcccgtttgccttgctgaagggtaaagcgttggacgtgaaggatggtggagtaaagaaaaagaagaagaagtaccagcgtgaggagtcgtctcagactgaatctgataagaatggagacgaaaagaacccacattctgactatgaccatctcacacgagcagagcgccgctacatggaacagaagcagaagatcgacatgaagaagatggccaaagtcgcaaacaagtcgtacaaggaccgcatgcaggacttcaaccaatacctggctaacctcagcgagaactatgatatccccaaagttggtcctggctaa

SEQ ID NO: 36463 - DNA, 663 bp, Zea mays
  Peptide Sequence Number=SeqID_78242
atgacctggaacagcagcagcaggacgacggcgctgtgcgagtgctcaacggtgagaagaccggtcgcagattttttggagagggaagaggaggggattccacatggccggaggcggagggagcagatgggtgaggggcgagacataggcgtacccgtggagccaaatccgactgcaggcacgacgagtttggcgaccgccgcagcatcacagatgcgacggctcaacggcgagtgctctgctcaacggccaaaaaccgcttggaacaggagctcggactcggacacgaacacggacaccgcgtggaacaggagctcggactcggacacggacactctgaacgatgtaatcccgtttgccttgctgaagggtaaagcgttggacgtgaaggatggtggagtaaagaaaaagaagaagaagtaccagcgtgaggagtcgtctcagactgaatctgataagaatggagacgaaaagaacccacattctgactatgaccatctcacacgagcagagcgccgctacatggaacagaagcagaagatcgacatgaagaagatggccaaagtcgcaaacaagtcgtacaaggaccgcatgcaggacttcaaccaatacctggctaacctcagcgagaactatgatatccctaaagttggtcctggctaa

SEQ ID NO: 36464 - DNA, 258 bp, Zea mays
  Peptide Sequence Number=SeqID_78243
atggcgagtggtcattgttgtcggtccacctctactcacctccggtgtcgagatgacgccacaatccttgatataatagtcgtcgaacgcgcgcgatatggttgcgatgcccagaacaacccgagagtcgtcgacattggcgacgaccatgaggtccccatgtttgacgatgaacagcgcggtgcagccgctctggaccacgtccaagcggcggctgcgccggagcttgccgtacacagcggcgcatgggccatgtag

SEQ ID NO: 36465 - DNA, 258 bp, Zea mays
  Peptide Sequence Number=SeqID_78244
atggcgagtggtcattgttgtcggtccacctctactcacctccggtgtcgagatgacgccacaatccttgatataatagtcgtcgaacgcgcgcgatatggttgcgatgcccagaacaacccgagagtcgtcgacattggcgacgaccatgaggtccccatgtttgacgatggacagcgtggtgcagccgctctggaccacgtccaagcggcggctgcgccggagcttgccgtacacagtggcgcatgggccatgtag

SEQ ID NO: 36466 - DNA, 258 bp, Zea mays
  Peptide Sequence Number=SeqID_78245
atggcgagtggtcattgttgtcggtccacctctgctcacctccggtgtcgagatgacgccacaatccttgatataatagtcgtcgaacgcgcgcgatatggttgcgatgcccagaacaacccgagagtcgtcgacattggcgacgaccatgaggtccccatgtttgacgatggacagcgcggtgcagccgctctagaccacgtccaagcggcggctgcgccggagcttgccatacacagcggcgcatgggccatgtag

SEQ ID NO: 36467 - DNA, 258 bp, Zea mays
  Peptide Sequence Number=SeqID_78246
atggcgagtggtcattgttgtcggtccacctctgctcacctccggtgtcgagatgacgccacaatccttgatataatagtcgtcgaacgcgcgcgatatggttgcgatgcccagaacaacccgagagtcgtcgacattggcgacgaccatgaggtccccatgtttgacgatggacagcgcggtgcagccgctctagaccacgtccaagcggcggctgcgccggagcttgccgtacatagcggcgcatgggccatgtag

SEQ ID NO: 36468 - DNA, 258 bp, Zea mays
  Peptide Sequence Number=SeqID_78247
atggcgagtggtcattgttgtcggtccacctctgctcacctccggtgtcgagatgacgccacaatccttgatataatagtcgtcgaacgcgcgcgatatggttgcgatgcccagaacaactcgagagtcgtcgacattggcgacgaccatgaggtccccatgtttgacgatggagagcgcggtgcagccgctctggaccacgtccaagcggcggctgcgccggagcttgccgtacacagcggcgcatgggccatgtag

SEQ ID NO: 36469 - DNA, 258 bp, Zea mays
  Peptide Sequence Number=SeqID_78248
atggcgagtggtcattgttgtcggtccacctctgctcacctccggtgtcgagatgacgccacaatccttgatataatagtcgtcgaacgcgcgcgatatggttgcgatgcccagaacaacccgagagtcgtcgacattggcgacgaccatgaggtccccatgtttgacgatggacagcgcggtgcagccgctctggaccacgtccaagcggcagctgcgccggagcttgccgtacacagcggcgcatgggccatgtag

SEQ ID NO: 36470 - DNA, 258 bp, Zea mays
  Peptide Sequence Number=SeqID_78249
atggcgagtggtcattgttgtcggtccacctctgctcacctccggtgtctagatgacgccacaatccttgatataatagtcgtcgaacgcgcgcgatatggttgcggtgcccagaacaacccgagagtcgtcgacattggcgacgaccatgaggtccccatgtttgatgatggacagcgcggtgcagccgctctggaccgcgtccaagcggcggctgcgtcggagcttgccgtacacagcggcgcatgggccatgtag

SEQ ID NO: 36471 - DNA, 258 bp, Zea mays
  Peptide Sequence Number=SeqID_78250
atggcgagtgatcattgttgtcggtccacctctgctcacctccggtgtcgagatgacgccacaatccttgatataatagtcgtcgaacgcgcgcgatatggttgcggtgcccagaacaacccgagagtcgtcgacattggcgacgaccatgaggtccccatgtttgacgatggacagcgcggtgcagccgctctggaccgcgtccaagcggcggctgcgtcggagcttgccgtacacagcggcgcatgggccatgtag

SEQ ID NO: 36472 - DNA, 258 bp, Zea mays
  Peptide Sequence Number=SeqID_78251
atggcgagtggtcattgttgtcggaccacctctgctcacctccggtgtcgagatgacgccacaatccttgatataatagtcgtcgaacgcgcgcgatatggttgcggtgcccagaacaacccgagagtcgtcgacattggcgacgaccatgaggtccccatgtttgacgatggacagcgcggtgcagccactctggaccgcgtccaagcggtggctgcgccggagcttgccgtacacagcggcgcatgggccatgtag

SEQ ID NO: 36473 - DNA, 258 bp, Zea mays
  Peptide Sequence Number=SeqID_78252
atggcgagtggtcattgttgtcggtccacctctgctcacctccggtgtcgagatgacgccacaatccttgatataatagtcgtcgaacgcgcgcgatatggttgcgatgcccagaacaacccgagagtcgtcgacattggcgacgaccatgaggtccccatgtttgacgatggacagcgcggtgcagccgctctggaccacgtccaagcggcggctgcgccggagcttgccgtacacagcggcgcatgggccatgtag

SEQ ID NO: 36474 - DNA, 249 bp, Zea mays
  Peptide Sequence Number=SeqID_78253
atggcgagtggtcattgttgtcggtccacctctgctcacctccggtgtcgagatgacgccacaatccttgatataatagtcgtcgaacgcgcgcgatatggttgcgatgcccagaacaacccgagagtcgtcgacattggcgacgaccatgaggtccccaagtttgacgatggacagcgcggtgcagccgctctggaccacgtccaagcggcggctgcgccggagcttgccgtacacagcggcgcatga

SEQ ID NO: 36475 - DNA, 783 bp, Zea mays
  Peptide Sequence Number=SeqID_78254
atggcgagtggtcattgttgtcggtccacctctgctcacctccggtgtcgagatgacaccacaatccttgatataatagtcgtcgaacgcgcgcgatatggttgcgatgcccagaacaacccgagagtcgtcgacattggcgacgaccatgaggtccccatgtttgacgatggacagcgcggtgcagccgctctggaccacgtccaagcggcggctgcgccggagcttgccgtacagagcggcgcatgggcccatgtaggactgcttccagaggtcgaactggcagtcgccaagtttcttctcgtcgtcggtgagcgacgccaacgcgagcgcctcgtgctagtggtgtttgttcgggggagggggaatgagaaagacaggcagctgggaatgggaatgggctttgcagtgaggacggggaatgagaaagacaggcagctgggaatgggaatgggctttgcagtgaggacggaatgggaatggcagaacacggaatggggcagcctaccccttaccgtcttaataggtagtagagattgcaatgatgaagaagccaaagctcgagcccgtgtggaggagcttaacacggccattgataacttgcagatgccatctcgaactcgtgcacatgacagcgcgggaacatcccgtggtcaagatgatacacccaatccatcgccggtaccgcccacgctagccgaggctatcgctgcctcggtcaccgtgactgctgacaacacccgcttcctgcgtgaaatggcgggacaacaacttcagcagtaa

SEQ ID NO: 36476 - DNA, 473 bp, Zea mays
  Peptide Sequence Number=SeqID_78255
ccagcgcgcagggagctcggctcccttcctcccatggcgcccaggcctgctcctcctctcggccagccagggcgcggtggcccctgcccctgccccttcttcctcacgcacgctgcatctcccagctcggcctcgccatcgcgcagcagttccctggatccatggcgccggtgaagctcgagcagtcaagctcccagccatggcgtccagaaaatcccgcagccgagctcccccaaccggctgtcttttctcccagcgcctccctccactcgctccccctcgacgcagcaaaccagcgaggtgctcgacgccggcctttttcctccctgtgtgtcttgccgcaggagcaggagctcttctctcccccagccgagcccccaagcagcgccctccctgctccatggctcaagcccgagctcaccccccggcgcttggatccctggaacgcagtagctctgccctctctcccatag

SEQ ID NO: 36477 - DNA, 525 bp, Zea mays
  Peptide Sequence Number=SeqID_78256
atggagagactcaccattggagctgaggggagggggcttcctactggttttccatggaagaaatggggacatgctggagaggaagggctgggcgccatggctgctgtactcggccatgggagggagatggcagggaggggcgctgctgctgggcactatgggagagagggcagagctactgcgttccagggatccaagcgccggggggtgagctcgggcttgagccatggagcagggagggcgctgcttgggggctcggctgggggagagaagagctcctgctcctgcggcaaggcacacagggaggaaaaaggccggcgtcgagcacctcgctggtttgctgcgtcgagggggagcgagtggagggaggcgctgggagaaaagacagccggttgggggagctcggctgcgggattttctggacgccatggctgggagcttgactgctcgagcttcaccggcgccatggatccagggaactgctgcgcgatggcgaggccgagctgggagatgcagcgtgcgtga

SEQ ID NO: 36478 - DNA, 681 bp, Zea mays
  Peptide Sequence Number=SeqID_78257
atgcacaacatagaccaaagcttaaacagattaatccacaaaataccaagtgaacaacctggacgaatcgaggctagtcacatgggctgtccacaaggcttggcatttcgccgaacggacaacgcgcaaagcgcggcgtcgaccactagctgcgataacacacaaaaaattgttggcggcagttcatggaacatcacccatgttggaaaaataaatagcaaggacagcggggatttttctcaccacgggtttcgactgcgtcgcggatggggctgcgtagcgagcacgagagcgacgagacgcgacgtgggaagtggagaacgaacgggagggctgctgcagcatgcggcttgctgcgcattttgtcgagcacctacgacgcgtcgatttggtggggctgcagggaaaacttggttgcggggcgctgcgctgcctggagagggagccgagcagaggcgctgcgcagggcgccgaccatggagagactcaccattggagctgaggggagggggcttcctactggttttccatggaagaaatggggacatgctggagaggaagggctgggcgccatggctgctgtactcggccatgggagggagatggcagggaggtgctccacggctgcgtgagctcggaccagagaagtgccatgcacgcaaagagcagaggggcccgtga

SEQ ID NO: 36479 - DNA, 258 bp, Zea mays
  Peptide Sequence Number=SeqID_78258
atggttctcaaccagataaaacctgagaagaaatatgttaaattgcaagaggaatccaatgggaagcggtgcatatcgaccaagcgcggtggcacggaggacaacccgggaatggtggaaagaagcaggggaaggacaacgcaacgaagcccccctagctgcccaaggactacatccatgtctgggcaaggcgtggcgagcaaggcatggcgaggcgatggactgtcacaacctcatggagagggtacatttccctaa

SEQ ID NO: 36480 - DNA, 508 bp, Zea mays
  Peptide Sequence Number=SeqID_78259
cttacttgaggtagcaggcaactggcgactggtgaaaccacagactggtgccaccaaagtggaagaaatacactcaaagaaccatcctgtcagtctccttgtcatagagcattcaccttttcttgcaggattatctgtaattctgaatgaaaatttgtgtggcaccgttgaacagctaaagctaagcagggagtgccttgcctgctccttctctgttacaagcctacaaggaaactcgaatacaatagtggctcttgctgggaacaaggctgatttgttagatacgaggcaggtgtcagcagatgaagcaaaggtgtatgctcaagagaatggtctcttcttcatggaaacttctgccaaaacagctatcaatgtgaacgacgtgttctatgagattggaggaatccaatgggaagtggtgcatatcgaccaagcgcggtggcacagaggacaacccgagaatggtggaaagaagcaggggaaggacaacgcaacgaagcccccctag

SEQ ID NO: 36481 - DNA, 219 bp, Zea mays
  Peptide Sequence Number=SeqID_78260
atgtcctactctagggcctccagtgtgcagctccttggaaagccatgcgttttgcaagctgctcataacatggaatggttttacattctaagatttctattgcttgcaggaggaatccaatgggaagcggtgcagatcgaccaagcgcggtggcacgaaggacaacccgagaatggtggaaagaagcaggggaaggacaacgcaacgaagcccccctag

SEQ ID NO: 36482 - DNA, 333 bp, Zea mays
  Peptide Sequence Number=SeqID_78261
atggtgcacagggttacccggtccacgtgctccggcgggttcacaaactccagcgagcgcgattacactattccggtggggctggtccttggctcatgctcgggcaagcttcacggcctcctggggaagctatccgagggctcggatcaagtagaggtggcgagaaagggtttggccatggtggttgccctcgagtggctctggcaggtcgcgaggaggtcgccggagctgcgggcgagctcggaagggttaggcgtggtgcgggggaggcaacggggaagatggccatgcccgagggtgggctttatagccgttcgcgagcacgggtattaa

SEQ ID NO: 36483 - DNA, 147 bp, Zea mays
  Peptide Sequence Number=SeqID_78262
atggcgagggttacccggtccacgtgctccggcgggttcacaaactccagcgagcgcgattgcactattccggtggggctggtcctcggctcaagctcgggcaagcttcaaggcctcctggggaagctatccgagggctcggattga

SEQ ID NO: 36484 - DNA, 1134 bp, Zea mays
  Peptide Sequence Number=SeqID_78263
atgtgcgccgctgcaggaaggacctcacccccgtctctttacggggggcgacaacaagccattaaagccagagagccagaggtctggcagcaggtggcactgacggtctcaccggcagaggcaaccacctctgcagtggggagcctcactagcggcggcggccacgtcagcaccaacgacagcggccacctacgcaccagtatcgtactagcaaacggcggccgcaccagcgcacacgaagaggtcttcgctcctgtcctcactacgggagtgaggacaagaccatccaagaacgtagcccccacccgcacggcgtacgacgtcttgtacgacctcccagtacggctggtgccgcaggagaagccgtgggtgtggctagcccgcgcatggcgtgaccgtcgcccgtgcggtggacgggcagccacactccgccccaacggtaggagacggcaccggaggcggcaccagagccgctcaggccagggagccagacacgcggcagctgacagcgccacagtcgacgaacgcccttctccctcgaacactgagggaagaagcggctgctgcccacgcggaggtgggtcccaacttggcgcaccctcctccccagcacggatgatgaacatccttgaagctgagggcaggagggaggccgcagctcggttcgcttctccccaccacaaggcggcggtcaaagaggcgaaccgccacgcaagaggcgtgcaaccgtcccacggctgtacgccccctcagctccacacaactggtggcccaactcaggggcccaggcccacacgtcatataaccggcgcgccggttaccgtgtgcaaagaaaccgcaccaccacctgcgccaacgccacgtcttctcgagactatcacggattctaaaaaggcggcggaggtcatcggcggctcctgttctggccaaaccacggcggtagggtttaatcaaggtgcacggggagctccacggggtgatgtagaggctatgcgcgcaaggaatcgagaaatggttcagtggtttacccggtccacgtgctccggcgggttcacgaactccagcgagcgtgattgcactgttccggtggggctggtcctcggctcaagctcgggcaagcttcacggcctctag

SEQ ID NO: 36485 - DNA, 137 bp, Zea mays
  Peptide Sequence Number=SeqID_78264
acaacgagcagtccgaggttcctaagtgtgttgttggagacctccctgagcaacaacctagtgaaggaaaggggctcaggctgtttcctgagtacctctccgtaaggacctatttgagaagtgacaacccgggataa

SEQ ID NO: 36486 - DNA, 834 bp, Zea mays
  Peptide Sequence Number=SeqID_78265
atgaacaccgagttcatcaaatacgtgaagtgggcgggagcatttgtcaatccgaaagacattaccaggtattcaaataatccataccgcatagtgaatgcggtctttgttgcttaccgccgccgccgagccactccgccgcgaaccgcccccctccggtgcccctgccccgacctagcccccaccaaaaggttccccgcgccctccccaaccttcccggccactcaggtcgccccggggacccgcagggcccccgcgcccctcgtctctggcgagctctccgccgcgggatgggcgccgccgcctcagctggctgggaaggagacgggagccagccaccccatccccgccgtctatattagatcggacggcacagattcaaatagcccgaacccaacctcaaccgtccacccaagatccaacggcccagagccgtttcccccacgccccgcctccctgccaactgggccccgcctgccagtcgcccgcgccctcgctgcccgcccggccccgcccgtcagccgctcgcgccgccgcgcgcccgagcgcccgccgcgggatctaatcctggccgtcgatctgagatccaacggctacaacgagcagtctgtgtttcctgaggcagttgcagaggaagtccctgatcagcagtttggtgaaggcaaggggctcaggctgtttcctgagtacctctccgtaaggactgccgtcgtgccgtcaatggggtccaggcacagtgcttgctctgccgaggctgagtgccgagagggtagtgaaactggtatatcagccgtgctcacggttaagagcagccttggaatcctctttgattag

SEQ ID NO: 36487 - DNA, 498 bp, Zea mays
  Peptide Sequence Number=SeqID_78266
atggggtccaggcacagtgcttgctctgccgaggctgagtgccgagagggtagtgaaactggtataaagccgtgctcacggttaagagcagccttgggatcctctttgattagagatacagatggtccgagatacaatgattatgatatggttttgatggctcgtcttagacacactgcacgtaagtcggtgattcctttcctgccgtctcgacttgcggagcatcctctgcaccgcaccgtgtccggtcagtcgagtcacctggagaggctgcaccaccgtctgcgtgaggagcaggaacgccggcgccagcacggagagcagcagggctcttcctcctcaccccagcaggaggtggagaccgtgaggccccgttcctctgtcgcccagctggaggcgccccttgttccaccgcgggacgtcccggctgttggaggagctactggtggagatcctggaggagaccccgacgacgacgactcagaccacagcacgtag

SEQ ID NO: 36488 - DNA, 228 bp, Zea mays
  Peptide Sequence Number=SeqID_78267
atggcgggaaggtatcaccaggatcagggcggggacgggggcgcgtccatggaggtagtcagcacgccgaaccaggagctggcccttaccaactgcgcatacgtctctcccgctgacctccgccgcttccccaacgggctcgccctcgtcgctgacgcctgggtcttcaccctacgatatccttttgtagacggtctcgtagtccctcgtctgcacagtttattctga

SEQ ID NO: 36489 - DNA, 237 bp, Zea mays
  Peptide Sequence Number=SeqID_78268
atggaggtagtcagcacgccgaaccaggagctggccctcaccaactgcgcatacgtctgccccgcggacctccgccgcttccccaacgcgctcgccgacgtgccaacgcggaaaaaggggaggttcaggttccacaccacaaatgtcgaagtaaaagttgttcttcgctggaagattttcagtctgggagactacctcttcttctactatggtttcttcctcgtgttctatacatga

SEQ ID NO: 36490 - DNA, 2157 bp, Zea mays
  Peptide Sequence Number=SeqID_78269
atggcgggaaggtatcaccaggatcagggcggggacgggggcgcgtccatggaggtagtcagcacgccgaaccaggagctggcccttaccaactgcgcatacgtctctcccgctgacctccgccgcttccccaacgggctcgccctcgtcgctgacgcctgggtcttcaccctacgatatccttttgtagacggtctccgtcggcaggcaaaggtttcagctggggattctgttactgttagcagttttgtcccccctgatgatttcaagttggctttgctcactttagatctagattatgccaaggcaagagccaaccgaaatgacgagctggatgctgttgtgcttgcccaacaactccgtaagaggtttctgaatcaggtcatgacctcagggcaaagggtgccatttgaattttatggaacaaactatgtattcaccgtcaatcaagctttgctagagggtcaagagagttctacaccattggatagaggattcttgtccagtgatacatacatcatatttgaggctgctcctaattcaggaattaaggtgatcaaccaaaaggaagctgctagcagcaagcttttcaaacataaagagtttaacctggaaaaattgggtataggtggattaagcgctgaattcactgacatatttcgtagggcattcgcttcaagagtctttccgcctcatgttgtcagtaagttgggcatcaaacatgttaagggtatattgctatatggacctcctggtactggcaagactctaatggccagacaaattggaaagttactgaatggaaaagatcccaagattgtgaatggacctgaagttctgagcaagtttgttggagaaactgagaagaatgtgagagatttgtttgctgatgctgaaaatgagcagagaacacgaggtgatcagagtgacctccatgttatcatattcgatgaaattgatgccatctgcaagtctagaggatctacccgtgatggtacaggtgtacatgatagcattgtaaaccagctgcttacaaagatagatggtgttgaggcgttgaataatgtattgcttattggaatgacgaatcgtaaagatttgcttgatgaagctttattgagacctggacgattggaagtacacattgagataaacctgcctgatgaaaatggtcgtttgcaaatccttcaaattcatacaaataagatgaaggagaattctttcctgtctccagatattaatcttcaggagctagctgcgcggacaaagaactacagtggagcagagttggaaggtgttgtcaaaagtgctgtctcatttgctttgaaccggcagataaccatggatgacctcactaaacctttggatgaggaaagcatcaaggttaccatggatgattttgtgaatgcacttcatgaaattacccctgcatttggtgcttccaccgatgatctcgaaagatgcagattgcgtggtattgttgattgtggcaaggcacataagcacatttatcaaagagctatgctcctcgtagagcaagttaaagtttactgctttagtgggaaaacggctatggcagcaagtgttggcattgacagtgattttgcatatgtgaaaattatatcagcagaaacaatgattggtttcagtgaaagcagcaaatgcgcacagatttgcaaggtttttgaggacgcatacaagtctcagttcagcatgataattcttgatgatatcgaaaggttactggagtatgtagccatcggaccacgtttttcaaacttgatctcacaaactcttctggtcctcctcaagagagttcctcctaagggaaaaaacttgcttgtcgttggaacaacaagcgaggttggcttcctagaatctgttggaatgtgtgacgtgttctctgtgacctaccatgttcccaaactgaaaaaggaggatgccaaaaaggtattgcatcatcttgatgtgttcgatgacggagatcttgacgcagcagcagaagcactggacgatatgccaatcaagaagttgtacacacttgttgagatggctgctcaggggccaaccggaggaagtgctgaagcgatttatgccggagagaagatagatatcaaccatttctttagcatcttgagtgatattatccgttactaa

SEQ ID NO: 36491 - DNA, 810 bp, Zea mays
  Peptide Sequence Number=SeqID_78270
atgccgacgccgaccttcaatcactcggcgttacctctaaaacgccgaccacgtgttcaatcgctcggcattacttctaaaatgccgacgccgaccttcaatcactcagcgctgcctctaaaacgccgaccacgtgttcaatcgctcggcattacctctaaaatgccgacgccgaccttcaatcactcggcgttacctctaaaacgtcgaccacgtgttcaatcgctcggcattacttctaaaatgccgacgccgaccttcaatcactcggcgctgcctctaaaacgccgaccacgtgttcaatcgctcggcattacctctaaaatgccgacgccgaccttcaatcactcggcgttacctctaaaacgccgaccacgtgttcaatcgctcggcattacttctaaaatgccgacgccgaccttcaatcactcggcgttacctctaaaacgccgaccacgtgttcaatcgctcggcattacttctaaaatgccgacgccgaccttcaatcactcggcgctgcctctaaaacgccgaccacgtgttcaatcgctcggcattacctctaaaatgccgacgccgaccttcaatcactcggcgctgcctctaaaacgccgaccacgtgttcaatcgctcggcattacttctaaaatgccgacgccgaccttcaatcacttggcgttgcctctaaaacgccgaccacgcgttcaatcgctcggcattacttctaaaaatgccgacgccgaccttcaatcactcggcgtcgtttctaaaacgctgacccggtattctgttgctcggcattacttctaa

SEQ ID NO: 36492 - DNA, 144 bp, Zea mays
  Peptide Sequence Number=SeqID_78271
atggcgggcggaattaagctcgccggagctaagggaagtggctggccggagagggtgagtgcggggcgaaagatatggagccaggaaatctggtctgtctccctgcccaaacccgaggcaaatcccaggttttgtcgtgtctag

SEQ ID NO: 36493 - DNA, 150 bp, Zea mays
  Peptide Sequence Number=SeqID_78272
atggcgggcggaattgagcttgccggagctaaggggaggtggctggccggagagggcgagtgcggggcgaagagagagatatggagccaggaaatctggtctgtctccctgcccaaacccgaggcaaatcccaggttttgtcgtgtctag

SEQ ID NO: 36494 - DNA, 573 bp, Zea mays
  Peptide Sequence Number=SeqID_78273
atgcagtacaaggaatcaagcagtctcattagctgcgagaagcagacgattcgaatcgagtttttaaaccttgcaagtagccgcggcgaagaaaagggcggaggggcttaccggcggcgagactgctccggtgaagtggtcgaggacgaaggggaggtcgcggggatcacaacgggaggtccacgggatgccagagaagctattagcgaaaggaattgggcagagactcactggatagctcggtccacgcgcggcggcggaagaccgaagtccggtgaggttgatctcgggcctccggtgaagtccggtcgggtccgagggcttggcaagcttcacgggctactggcggagctagccgaagcactggctgggcttgagggtggctggagtgggctggccacggcggccgaagctctggcggcaatggcgggcggaattaagctcgccggagctaagggaaagtggctggccggagagggtgagtgcggggcgaagagagagatatggagccaggaaatctggtctgtctccctgcccaaacccgaggcaaatcccaggttttgtcgtgtctag

SEQ ID NO: 36495 - DNA, 501 bp, Zea mays
  Peptide Sequence Number=SeqID_78274
atgggctggagtggggctggccacgatggccgaagctctggcggccaatggcggggcggaatgagctcgcccggagctaagggaaagtggctggccggagagggtgagtgcggggcgaagtggggcgcgcctgggaaaggcctttataggcacggcgcggtgaacgggcggtcgtggaccggcgagtgcgtgcgggcgtgcactgggaaggcgcggtgcgcgaacgggcgtgaacccggggtgtcagccacggtcgaacacgtgttcccgttgcctctgcccctgttcaagcgccgattgggagcaaatcttcgcgaatttgggctagggacagggagttgtagcgtcaccatggtgccagtgtcagagtgcctggtcccaaggtcaaactgcgccaaaaccatgccaaatgaatttggtttgagttcaaactttcccagaatgtgttcaagggaatttggcacgactttgatatttggatctcctggctttgagttttga

SEQ ID NO: 36496 - DNA, 873 bp, Zea mays
  Peptide Sequence Number=SeqID_78275
atgggcaaaggcaagagaggtcgaggctcgccccgtcgtgctggcgacaagcggaagcgcgacccaagtcctccctcggaggacttcggcgattcggagtattcggaggaggaggtttcctccgggtccaagggatcactggctctcgcttctccctcgatgttgtccgatgactcaaacgactcccaggggttagccactgaggtctggatgtacatccgttccatcgagcgcaccgggctcgaggggtcggatgagtcggaggtctcctcggatgaggagaactcctccggctcgtccgaggagcggagcggcaacgacagcgacgatgagggcagcggcagcggcgacgacaacggtgacggtgatggcggcgaaggcgacggtggcagcggtggtggtggtgacgacgacgacgacagtggcggcaagggcggcagtggcgacgtcggcagtggcaaagcaccactgttcgtccatatgcctgatactgccggcgttttagagacctcttcccaaagatcatctacgttctatgcttttcgaaactcaaagccaggagatccaaatatcaaagtcgtgccaaattcccttgaacatgtcctggaaaagtttgaactcaaaccaaattcatttggcatggttttggcgcagcttgacctcgggaccagacattctgacattggcaccttggtgacgctacaactccctgtccctagcctaaaaccgcgcgatgtccatacacaaaagacaaagcttggtcaggtgaacaaatccttcacagcgatcttgcccaaattcgcgaagatttgctcccaatcggcgcttgaacaggggcagaggcaacgggaacacgtgttcgaccgtggctga

SEQ ID NO: 36497 - DNA, 477 bp, Zea mays
  Peptide Sequence Number=SeqID_78276
atgggcaaaggcaagagaggtcgaggctcgccccgtcgtgctggcgacaagcggaagcgcgacccaagtcctccctcggaggacttcggcgattcggagtattcggaggaggaggtttcctccgggtccaagggatcactggctctcgcttctccctcgatgttgtccgatgactcaaacgactcccaggggttagccactgaggtctggatgtacatccgttccatcgagcgcaccgggctcgaggggtcggatgagtcggaggtctcctcggatgaggagaactcctccggctcgtccgaggagcggagcggcaacgacagcgacgatgagggcagcggcagcggcgacgacaacggtgacggtgatggcggcgaaggcgacggtggcagcggtggtggtggtgacgacgacgacgacagtggcggcaagggcggcagtggcgacgtcggcagtggcaaagcaccactggtctaa

SEQ ID NO: 36498 - DNA, 1224 bp, Zea mays
  Peptide Sequence Number=SeqID_78277
atgaggcgcttgagaatccgctggaccccactgaagctctggggagaaaatgctgaacttggactgccagaaacaagccttgctattatacctggagctggaggtacacaacgccttcctaggatcatagggaggtccagagcaaaggaactgatattcaatggccacagatgtggtgcagctgaagctgtaacaatgggcttagcaaactactgtgttccagcaggagaggcttaccagaaggctcttgacattgcctttgagataactcagaagagtaaatggcttccacttcacacccttgctgcatccggtgatttgtatctattgaatagccttttaaaacataacgtggacataaatgcgcttgataaggatggcttaccagcgatccacaaagcaattctttcaaagaaggctgctattatcaattatcttttaaggaactcagcaaatccattcatccaagataaggacttgctggctcggaatgcaatgttagcagaagagttactgagaactggtggtggtacgaccacagatacttcacagaaaccgagcagtggccgagaaagggtccagagtgaagctctcagacaagaactggagggggcaaaacgacagataggggcactcaaaagtgagaagtcccagattgaagctgaagctaacaaccaaagaaacttttcagtaaaactggagtctgatctcaagagcttgtcagaagcttacaacagcatagagcaggccaactaccgcttggatgccgaggtaaaagccttgcggcagggaggcagcgtgccatatcctgacgtggaagcaataaaagcgcaagctaaggaagaggctgagaaggaaagtgaggcagaactgaatgatctactcgtctgccttgggcaggagcaaacgaaggtcgagaagctgagcacaaggctgacagagctcggcgaagatgtggatacccttctgcagggtattggcgatgacactgccattccggatgatgacgatgaagatgaagatgatgaagagtttatcagtgcactatacaacttacttgatggttcttctgaggagaagcccgcggcggagaagacgaccgccgggaagaagcccaaggcggagaagcgggtccccgcgggcaagtctgccggcaaggaggacggcgagagcaagcgtggcaggaagaagggaaagaagaacataaacataaaattgttatag

SEQ ID NO: 36499 - DNA, 606 bp, Zea mays
  Peptide Sequence Number=SeqID_78278
atggctctaaaagtgctcgtgctgagtctgtggctgaatttatgggacttgctggctcggaatgcaatgttagcagaagagttactgagaactggtggtggtacgaccacagatacttcacagaaaccgagcagtggccgagaaagggtccagagtgaagctctcagacaagaactggagggggcaaaacgacagataggggcactcaaaagtgagaagtcccagattgaagctgaagctaacaaccaaagaaacttttcagtaaaactggagtctgatctcaagagcttgtcagaagcttacaacagcatagagcaggccaactaccgcttggatgccgaggtaaaagccttgcggcagggaggcagcgtgccatatcctgacgtggaagcaataaaagcgcaagctaaggaagaggctgagaaggaaagtgaggcagaactgaatgatctactcgtctgccttgggcaggagcaaacgaaggtcgagaagctgagcacaaggctgacagagctcggcgaagatgtggatacccttctgcagggtattggcgatgacactgccattccagatgatgacgatgaagatgaagatgatgaagagtga

SEQ ID NO: 36500 - DNA, 723 bp, Zea mays
  Peptide Sequence Number=SeqID_78279
atggaggacaacaagagtcctaagggccgtcagaagttgttctcaaatgaggagaagattcttctgaacaagcgagtgcctgatctggaaacagctacttcttttcctcaggatggcttaccagcgatccacaaagcaattctttcaaagaaggctgctattatcaattatcttttaaggaactcagcaaatccattcatccaagataaggtgctgccatatttttatataccttgttcggaggagctgatttgtaatatagaaaaagattggctcccttccgcgcctgctattaaaaggatggacacaggtgatccctccaacccatccccactctcctctgatccaccgattcacagccattcttttcatctcagaggtggtaatggctctaaaagtgctcgtgctgagtctgtggctgaatttatgggtaggaatgaaacaattccgtctatgaagtggttttcagacactgacactggtatttattataatggcatctgtcaggacttgctggctcggaatgcaatgttagcagaagagttactgagaactggtggtggtatgaccacagatacttcacagaaaccgagcagtggccgagaaagggtccagattgaagctctcagacaagaactggagggggcaaaacgacagataggggcactcaaaagtgagaagtcccagattgaagctgaagctaacaaccaaagaaacctttca

SEQ ID NO: 36501 - DNA, 552 bp, Zea mays
  Peptide Sequence Number=SeqID_78280
atggcgccccgcgtgccctgtgacgacggcggctctcagctcccttacggaagcagggggacaagtagggaatatgttcaggatgagattgaggacagcaagagtcttaagggccgtcagaagttgttctcaaatgaggagaagattcttctgaacaagcgagtgcctgatctggaaacagctacttctagtaaatggcttccacttcacacccttgctgcatccggtgatttgtatctattgaatagccttttaaaacataacgtggacatagatgcgcttgataaggatggcttaccagcgatccacaaagcaattctttcaaagaaggctgctattatcaattatcttttaaggaactcagcaaatccattcatccaagataagagaagggataagctacgcgattatataactccattcagtctccaaaaactgttactggatgaagccacactttatgactcaccccactattggaagtttgttagtgggcctgaaccagggcagacccagtgccggagacaagagtggggtctagagaagggataa

SEQ ID NO: 36502 - DNA, 357 bp, Zea mays
  Peptide Sequence Number=SeqID_78281
atgggcttagcaaactactgtgttccagcaggagaggcttaccagaaggctcttgacattgcctttgagataactcagaagagtaaatggcttccacttcacacccttgctgcatccggtgatttgtatctattgaatagccttttaaaacataacgtggacataaatgcgcttgataaggatggcttaccagcgatccacaaagcaattctttcaaagaaggctgctattatcaattatcttttaaggaactcagcaaatccattcatccaagataagagcctcattattgtgatgaggtgtcatgctctggaattcccatcaaaacccaggaggagcactcatccttatccctga

SEQ ID NO: 36503 - DNA, 379 bp, Zea mays
  Peptide Sequence Number=SeqID_78282
agctggaggtacacaacgccttcctaggatcatagggaggtcgagagcaaaggaactgatattcaatggccacagatgtggtgcagctgaagctgtaacaatgggcttagcaaactactgtgttccagcaggagaggcttaccagaaggctcttgacattgcctttgagataactcagaagagtaaatggcttccacttcacacccttgctgcatccggtgatttgtatctattgaatagccttttaaaacataacgtggacataaatgcgcttgataaggatggcttaccagcgatccacaaagcaattctttcaaagaaggctgctattatcaattatcttttaaggaactcagcaaatccattcatccaagataag

SEQ ID NO: 36504 - DNA, 447 bp, Zea mays
  Peptide Sequence Number=SeqID_78283
atggcgtgcgccggaatcagcagggtcgacgatgtcgaagcagcgagatcagcagggtcgacgaggtcagaagatcacgagcagtcgcgtgaagacgcttcccaaaaacctcccggtgcaggatctagaagacgaatggttccggagacctgctctcctgatcgcagatgcacgtctgcggtcgggacgaagggaactaaaaggcagctcagctatgaagagaggcgaaagcgaaactgggatgatctggaggctggctccaagcaaccaaaaattcaaacggcaaaaggaagtcgtgcctgtgaggacatcactatgagtacgactacaccagcagcacctccacatcaagcgccacttccttcattagctgggccaatcactcaggcccgtgccagagatcttaacttcgtcatgctactgaagaatgagggcccagaagaatag

SEQ ID NO: 36505 - DNA, 630 bp, Zea mays
  Peptide Sequence Number=SeqID_78284
atggcgcgcgccggaatcagcagggtcgatgacgtcgaagcagcgaaatcagcagggtcggcgagatgcacgtctgcggtcgggatgaagggaactagaaggcggctcacttatgaagagaggcgaaagcgaaactgggatgaattggatgttggctgccaggcgccttttatagggccgaaaaagtggaggtgtcgcgccgctacgaaaagggtgactcaatcgggggaccccaaccccgtccctgccgtccacccgccactccatagcttctccccagcaggtgctgccgtcaccctcggcgggtggccgacgacgtcggtggcgaccagtggcggcgctcatgcgcatcttcgtcggtcttcgttctcctccactcttcctcatcctcaagcctccagtatccgctggattttcttcggtttctgtcgcctcgctccagatctactctcaattcatctggatctggcgtcccctttgcgcaagggcaacgtggtggccagcttcaagccctgtgtggagcacgagctaggccccacctcgacgctagacgacactgacaccctcggcaccattgacctccttggaggcatcgtcagggaacctcatcacccttcctccaacccctag

SEQ ID NO: 36506 - DNA, 753 bp, Zea mays
  Peptide Sequence Number=SeqID_78285
atggcgcgcgccggaatcagcagggtcgatgacgtcgaagcagcgaaatcagcagggtcggcgagatgcacgtctgcggtcgggatgaagggaactagaaggcggctcacttatgaagagaggcgaaagcgaaactgggatgaattggatgttggctgccaggcgccttttatagggccgaaaaagtggaggtgtcgcgccgctacgaaaagggtgactcaatcgggggaccccaaccccgtccctgccgtccacccgccactccatagcttctccccagcaggtgctgccgtcaccctcggcgggtggccgacgacgtcggtggcgaccagtggcggcgctcatgcgcatcttcgtcggtcttcgttctcctccactcttcctcatcctcaagcctccagtatccgctggattttcttcggtttctgtcgcctcgctccagatctactctcaattcatctggatctggcgtcccctttgcgcaagggcaacgtggtggccagcttcaagccctgtgtggagcacgagctaggccccacctcgacgctaggtctccggggcctgccccggctaccgttgggtgctgttattctcgttggggctttgccgctagcatgtgtaggagattttggagatctaggcgaaatccatgcaatatgtataatctatgcagacgacactgacaccctcggcaccattgacctccttggaggcatcgtcagggaacctcatcacccttcctccaacccctag

SEQ ID NO: 36507 - DNA, 1521 bp, Zea mays
  Peptide Sequence Number=SeqID_78286
atgggttctctcgccgatccgtacgcgctacgctgcgtctccgacctgcctccgccattccgctctatgttcaggttcagatacttcaattccttgcagagtgagtgcttccatgtatgtttcttctcggatgtgaacatggttatctcggcacctacggggagtgggaagaccgtactatttgaactctgcattctgaggctcctctcaaggttcctttcaccagattggaggttcaatttaaataaaggaactctgaaaacaatctacattgcaccgtcgaaggcgctggtacaggaaaagctgcgggactggaacatgaagctgggcccattagggatcaattgcttggagatgactggtgacggtgaattttgcaacactaaagccatccatgatgctgatttaatactcaccactcctgagaagttcgattctatgagtcgacatggtataaaaagtggtagattgggtttcttctgtgacattgctcttgtccttattgatgaagttcaccttctaaatgatccacgtggagctgcgttagaagcagttcataccatttgcattgccatatcacactccaataaagaaagtgatatttccctactaaatttcagcacagtggctcttagcaccccgagaaggaatcaaaagatttggagaagaaatgaggccagtgaagttgacaaccaaaggtctttggttatgctccagctaaaaatgactttctttttgagaggaggttgcagagttttatttatgaaatataaatggaatatggattacagatatactgatgcaacattcaagggggaagtctgcacttattttctgttctacgagaaaagatgcaatcctgttccattttcagttggttttcataatggtggtctttgcttaaaagaccgaggtcttgttgaggggcttttcctcaagggtgatcttcaagttctatgcacaacaaatactttggcacatggcgtcaacttgcctgcacatacagttgtgataaagtcaacacagttcttcaacaaagagaagggcctatatgttgaatatgagagatccatggtgcttcagatgtgtgggagggctggacgtccaccattcgatgatactggaacaattataatcatgacaagaaaagaaacggttcatctatatgagaaccttctaaatggatgtgaaatggtggagtctcagttgctgtcatgtgcggtggagcatctaaatgcagaaatcgttcagttgacagtatctgacatcattctggcggttgagtggatcaagtgctcgtatttgtacatcagaataaggaagaatcctgagaactatggagttaagagggggactcctcaagatctccttgaaaagcaaattcaagatatatgtgtcgataagattcatgagttggtggagtatggactgatttggacagatgaaggagctttcgttttacaaccgctagtgactgccatgtttcttgaggccctaataccttggcatacttactgttga

SEQ ID NO: 36508 - DNA, 549 bp, Zea mays
  Peptide Sequence Number=SeqID_78287
atgcaaattgctatgctgattgttggtacaagaggggatgtgcagccattcatagctataggaaaatgtttgcaggactacggtcatcgtgttagattagcaacccatgccaacttcaaggacttcgtgatgactactgggttggagttttatccccttggtggagacccaaaaattcttgctggatgtatctacttcaattccttgcagagcgagtgcttccatgtgtgcttcttctcggatgtgaacatggttatctcggcacctacggtgagtgggaagaccgtactatttgaactccgcattctgaggctcctctcaaggttcctttcaccagattggagcatgccatttctagaaaataataaggggctccccgttgcgttgtggtttgtcggccccacgttcgccgtgctcatggcctcgtcttcaaggaagggtgccatcagagacaaatatgttttcatgttcaacacgctccttgaagaggaaaataaggcttggatccagaaactcgagaggcaaaaagggcaagagttgtttgagtag

SEQ ID NO: 36509 - DNA, 690 bp, Zea mays
  Peptide Sequence Number=SeqID_78288
atgtcggcggccccggcgctgaggacgtctgttcctcgtccgaaggttgattctggccttctaggggccgatttcgagggaggcgttatggtttgtgcagacagaaggcttcttgctggttttctgctaaaaatgtttagtcgaatggctacattgaaagatgatggaactgtagttgtcgatatccctactactattgaagctgcatcacttgatcttcattcagaggatcaccaggatgtggcctttggtggcgaacccttggactcttcagatcttcaggatagaccaccaatgcaaattgctatgctgattgttggtacaagaggggatgtgcagccattcatagctataggaaaacgtttgcaggactacggtcatcgtgttagattagcaacccatgccaacttcaaggacttcgtgatgactactgggttggagttttatccccttggtggagacccaaaaattcttgctggatacatggttaagaacaaaggattcttgcctgcaactccatcagaaattcctatccagcgcaagcagattagggacattatattctccttgcttcctgcttgcaaggacccagacattgatactggtgtttcttttagtgcagacgccataatagctaatccagcagcatatggcctacctgtgaatttccgcatcctttctctcatgtga

SEQ ID NO: 36510 - DNA, 1998 bp, Zea mays
  Peptide Sequence Number=SeqID_78289
atgtcgcatcccatcaccccgcgccgcgccacccgctcgtccgcggccgatcccgcctccccgtccggacccaggcccaaaccgacgcccaggcgccaacccgtctccaccgccgccgcgaacgcgaagcaggaggaaggagaggagcacgagcggagccccgtcgacgcgctcctcgaggcgctgcccggccgccgcgagcaggcgacggacctgctccggctcctggcgcccgcgccggcgctcccgctcctcctccacgggggcgccgccacgggcaagacgcgcgcgctcctcctcgctctccgccacgtgcgcccccgcccgctgcgcgtcgcctacgccgccctgcgctcgctaccgtcccctcgcgccctgttctcctccgtcctcgcccaactcagcccgccttcgtcgtcctcctcctcctcccgcctgcgcgtccccgacaagccctcggacttcgtcgccgcgctccgcgacgcgcttgctggcctctccgcgcggggcgaggccgtgtatctggtgttcgataatttggaggttgttaggagctgggacaagggtggccagcttctggcgctcctcctccgcctctacgatctcctccgattgccgcaggtcgtgctcgtctacgtgagcagtgctacacctgacgcgtactactccatgactggctctgtcgagccgaatcacatttacttccctgattatacagtggacgaggtacgagacatcctgatgcgaggccatccaaatccgaagctgtactcatcgttccttagtgtggcgctgaagccattgttccgggtaacaaggagggtagatgaactggtggctgcactggagccacttttcaggaggtactgcgagccattgggggatttgaaggccgttccggatgagagcatcaaaagaaggttgtttgaacatatacagccacatttggctgttgccatgaacgagactttcattgttcccacgagggtttctgtggatgaatgcaaagaccacagttctcgtgggaaggccagtagtaaaagacagtttggcagtagggatggcttgccgactgaattggagttccacatgtctgtgtctgcgaaatacttactattgtcagctttcctggcttcaaggaacccggctactcttgatgcagctttgttcgattcaactggagggtcagataacaataggcgtaagagaaagagctctcaagcatcgatgaatatgaaggacaccatggccgaagagatgcttatgaaaggccccggcacatttcctcttgagaggctcttggctatatttcagtgtatcacatcagtgtcagaagatgatctcggtgatgttgaatgttctgatagtatgatgaatggaagtggaatgactggtttgatgtcagatgttcttttgcaactgtcaacactttgcaattctaatttcctctccaaaagccggagctgcccgatggaaggctcagctagatatcgatctaacattgatgaagatttagcactcaagactataatgggatccaatttgtctatttcacaagatggtagagcatcaagggataaagcaaatgctatatgctctatcttctttagtgtgttgacttctgatagtcctgtttctcagtcagacaacgaggttcttccacaaaggcaagcggtgagcttactgtcaagctctgctttaagagtgtcctatgagagagatacaaagattgtgaatgctgcatcattcactgtcgaacgcgaggatcacactgtaggcaatatcctccgcatgcagttgcacagagacccaaatgttctctttgccgggtataagctccctcacccactccagtacaagatcattgttaggatccacacaacgagccagtcctccccgacgcaggcctacacccaggctatcaatggtctagacaaagagcttgagtaccttaagcaagcttttgagcaaatgcacctttatgccatggaccagtga

SEQ ID NO: 36511 - DNA, 348 bp, Zea mays
  Peptide Sequence Number=SeqID_78290
atgaatgcccctgaccgttatgagcgtttcgtcgtgccagagggcaccaagaaagtgtcctatgagagggatacaaagattgtgaatgctgcatcattcactgtcgaacgcgaggatcacactgtaggcaatatcctctgcatgcagttgcacagagacccaaatgttctctttgccgggtataagctccctcacccactccagtacaagatcattgttaggatccacacaacgagccagtcctccccgacgcaggcctacacccaggctatcaatgatctagacaaagagcttgagtaccttaagcaagcttttgagcaaatgcacctttatgccatggaccagtga

SEQ ID NO: 36512 - DNA, 225 bp, Zea mays
  Peptide Sequence Number=SeqID_78291
atgaatgcccctgaccgttatgagcgtttcgttgtgccagagggcaccaagaagcagttgcacagagacccaaatgttctctttgccgggtataagctccctcacccactccagtacaagatcattgttagggcctacacccaggctatcaatgatctagacaaagagcttgagtaccttaagcaagcttttgagcaaatgcacctttatgccatggaccagtga

SEQ ID NO: 36513 - DNA, 348 bp, Zea mays
  Peptide Sequence Number=SeqID_78292
atgaatgcccctgaccgttatgagcgtttcgtcgtgccagagggcaccaagaaagtgtcctatgagagggatacaaagattgtgaatgctgcatcattcactgtcgaacgcgaggatcacactgtaggcaatatcctccgcatgcagttgcacagagacccaaatgttctctttgccgggtataagctccctcacccactccagtacaagatcattgttaggatccacacaacgagccagtcctccccgacgcaggcctacacccaggctatcaatgatctagacaaagagcttgagtaccttaagcaagcttttgagcaaatgcacctttatgccatggaccagtga

SEQ ID NO: 36514 - DNA, 220 bp, Zea mays
  Peptide Sequence Number=SeqID_78293
gcagttgcacagagacccaaatgttctctttgccgggtataagctccctcacccactccagtacaagatcattgttaggatccacacaacgagccagtcctccccgacgcaggcctacacccaggctatcaatgatctagacaaagagcttgagtaccttaagcaagcttttgaggttagaggttgcatggcatttctttgtgcaattttgtatcgctaa

SEQ ID NO: 36515 - DNA, 414 bp, Zea mays
  Peptide Sequence Number=SeqID_78294
cgtcgactgggctaccggctaccgtcgtcgccgccctacaccagttctcaggtcttcgtgggacccttctccggcaacgagcacccatcagagggcaccaagaaagtgtcctatgagagggatacaaagattgtgaatgctgcatcattcactgtcgaacgcgaggatcacactgtaggcaatatcctctgcatgcagttgcacagagacccaaatgttctctttgccgggtataagctccctcacccactccagtacaagatcattgttaggatccacacaacgagccagtcctccccgacgcaggcctacacccaggctatcaatgatctagacaaagagcttgagtaccttaagcaagcttttgaggatgagaagaacaggtacgaggacatgatgaagcaggggttctag

SEQ ID NO: 36516 - DNA, 633 bp, Zea mays
  Peptide Sequence Number=SeqID_78295
atggcgtcgttctcggaggctccccccgggaacccgaaagccggcgagaagatctttaagaccaagtgcgcgcagtgccacacggtcgacaagggcgccggccacaagcaaggttcatccgttgttttgggcttgcagcagttgaccaattgggaatttttactcatgcaacttgctatgcaattagaaatggcatataaaaaatgtccaaacttgaacggtctttttgggagacagtcgggtaccactgcaggctactcctactctgcgggaaacaaaaacaaggctgtagtctgggaagaagacactttgtatgagtacctgcttaaccctaaaaaggagaggatccgcatgcacatccacgagctgctggatgcgttcacttttcccattgcacaaacagacgttgatgcggttactccctcttccactaagcactttgagctaacagaggcatcgaaaaggatgaaagggggtaaggtgatgggctctaatggtattccaattgaggcatggggatacatcggggatatagctgtgtacattcctggaaccaagatggtcttccctgggctgaagaagccgcaggagcgtgctgatctcatcgcgtacctgaaggaagcaactgcatag

SEQ ID NO: 36517 - DNA, 693 bp, Zea mays
  Peptide Sequence Number=SeqID_78296
atgacttttcctttccccgcatctgcactgtactacgattcccatgatccactctggtccctgtcccgtactcccgttgccgttgcgccactggcctgcggccaatcgatgcgtgtgcctggctgcctgcccacgctgacgcgcattggcccggccgtctatggcgccgaggtaacacagttcggcgccatagtttatggcgccgagtacattcctggaaccaagatggttttccctgggctgaagaagccgcaggagcgtgctgatctcatcgccaaaacagttgataacacaaccaagctcggcgccaagatctgtggcgccgagctcggtgccacgtcaacgccacggcgtccggtttgtgccaacgcagcacgatttcttggtccacaaccgtttgacacgaagtacaatgagcttaacccggttcggcccaattcccacctgcgactgagcggatccaagcccgctccgggggcattcaacgcgggtggcatggagatggagtggagccaccaccaaccgtcccctggccccccactgtgcaatgtggcccctctgctggaccagcggattagtggcaatataataatggcgcctagtggcgtctggcgttgtgttttcccaaggctgaagatacgttttagagatttcacgcagcgcagctgtgagctgtctgtctgtccacgataa

SEQ ID NO: 36518 - DNA, 486 bp, Zea mays
  Peptide Sequence Number=SeqID_78297
tacattcctggaaccaagatggttttccctgggctgaagaagccgcaggagcgtgctgatctcatcgccaaaacagttgataacacaaccaagctcggcgccaagatctgtggcgccgagctcggtgccacgtcaacgccacggcgtccggtttgtgccaacgcagcacgatttcttggtccacaaccgtttgacacgaagtacaatgagcttaacccggttcggcccaattcccacctgcgactgagcggatccaagcccgctccgggggcattcaacgcgggtggcatggagatggagtggagccaccaccaaccgtcccctggccccccactgtgcaatgtggcccctctgctggaccagcggattagtggcaatataataatggcgcctagtggcgtctggcgttgtgttttcccaaggctgaagatacgttttagagatttcacgcagcgcagctgtgagctgtctgtctgtccacgataa

SEQ ID NO: 36519 - DNA, 990 bp, Zea mays
  Peptide Sequence Number=SeqID_78298
atgacgactcaaggaggtttgcagccgacaagcaatgaagctaatatgtgcaccaacgacaatggtagccaacttggtacacggattgtggacgagattatggccgggaagaacgtcttctttgatcttcctgacaagttgactggtgagatatggaccttgaaattccattgcattggagcacaacctggaaaagaaattgtcacagtaaatattgataaagcttatgttgccttttacaacgtggtgtacataaaatcgaaacttggatattctgggagggacttcttgttttacaagaaacgatgtggcattgatcgatccaggctattggcacttgattacatccaccaagaagaggccatgctgtctgataacatggatgagagaaaaataagttttgtgctcacaaaagatccacccagtgatctagaggtaagcataactcccatcaagcgtccaagacagcgaacaaatgttgatgaagaaactatagaagtgtcgattgatgcatataaggagtggcttgcaatactacaacatgataatccagaaacggatttaatggatgacttcagggaggatacgatcaaaacatataaagaatggttaaggcatcaaggcgatcttccagatatcttattgtatgaaaggatgaaaaacaagcctgaagatgtagacatcgtcgagtggcattacatggtgttgtattttggatctgagaaattccagaaggacgaaaccaaaggcgagttctacgtggccttcaacaccagtcacctgccggtggtcgtcgggcttctagagcgctctgggttccgatgggagccagtggtggacaccggcaaggaggcaccatatgacttcctcaccgatggcctgccagatcgtgctgtcaccgtctaccagttctctcatttcctcaactccaatctctatcctatgctgagctactcctccatcatccttgtattgcgccctgatgtctga

SEQ ID NO: 36520 - DNA, 1101 bp, Zea mays
  Peptide Sequence Number=SeqID_78299
atgacgactcaaggaggtttgcagccgacaagcaatgaagctaatatgtgcaccaacgacaatggtagccaacttggtacacgaattgtggacgagattatggccgggaagaacgtcttctttgatcttcctgacaagttgactggtgagatatggaccttgaaattccattgcattggagcacaacctggaaaagaaattgtcacagtaaatattgataaagcttatgttgccttttacaacgtggtgtacataaaatcgaaacttggatattctgggagggacttcttgttttacaagaaacgatgtggcattgatcgatccaggctattggcacttgattacatccaccaagaagaggccatgctgtctgataacatggatgagagaaaaataagttttgtgctcacaaaagatccacccagtgatctagaggtaagcataactcccatcaagcgtccaaggcagcgaacaaatgttgatgaagaaactatagaagtgtcgattgatgcatataaggagtggcttgcaatactacaacatgataatccagaaacggatttaatggatgacttcagggaggatacgatcaaaacatataaagaatggttaaggcatcaaggcgatcttccagatatcttattgtatgaacgacaaagcaatgatgacctaatattatcagatgaagaaattcatggcagcagcaaacctactgctaattggccatctcatgctagacgtcataggaaaagagatcctgataacgatggagtctttaaaaaggaggggcgtggtacccttaagggtatagcagcagccaccaagcgaatcaagaacggtgatcacaaacttaagattgaattttcatctaagcttggaggtcctgtaggaccaaacgctcgcacttttgtggatgaaatcgtattgtttacaaagaaaaaggcaccactcattggagtgaaaaagtggaaagatatagagctcaatgttagatcttctatagcctctgacgtactgaacgagaaagaatactacaggaaaaaatgcaagcactgcaagaagaagaagaaagaaaaagacaagtgcttagagaagaaatga

SEQ ID NO: 36521 - DNA, 324 bp, Zea mays
  Peptide Sequence Number=SeqID_78300
atgggggcgccagagaacgcagaccacagtggtaaaggttccgcggcggtgcagctaactccggcgagaaattgcgcgggctctggggcgatacttggagaattaagggtatgggaaggttcctcacctcgagtgcgaactctgggacgcttggagaacagcgggggtgcggtcgagcctcgggtcgacgacggcggggctccgattgcgcaagaactgctccgatctgtcagtgtgacagatagagccttccactatgttgctgtctgttacaacgatgccgtggctgcttacaatcttctcgacagcaccccgacagagtaa

SEQ ID NO: 36522 - DNA, 179 bp, Zea mays
  Peptide Sequence Number=SeqID_78301
atgagcttcgccttgccgtcagctactcgggacacccttcggtgtgccctctccctccctactgtgcccggtccacgctcaccagagcagttcttgcgcagtcggagccccaccgtcgtcgacccgaggctccaccgcacccctgccgttctccaagcgtcccagagttcgcactcgag

SEQ ID NO: 36523 - DNA, 681 bp, Zea mays
  Peptide Sequence Number=SeqID_78302
atggcgccgtggcgagccggatcggctgctgccggtcttcacaaggaggaagaatcgcttggcttcgccgtatccaccatgcaccagacccccgcgtgcgtcggcgtgcaggccggagcttcgccctgccaaatcgcgctgatgaccatcccctccggcgagcttgtaaaggtcagtgagcctatacttgaatacaacgtactgctccgtctggttcccgcgaagaagatcgtggtcaaccgggggagatgggatgaatcctcaatggggtcgacatcaccgtgcaatccgccccgtgtcatggacggaccgcgccgcatccccaaattcctcggaatgtgttctcggccatggcttctccgtaccggagctggccgccgccgtagtggcttttggttgggcgtgttggggaagaaggccgtggggccctccctcactggagcggctcagctcatgatgtgcagctccggcatggtggccgagagcctctctcccatggcacaatggaggtccaccgcgggagggcctgcgcgcagctgcgttccggctgataggaggaagatgatctttggcgcgatggatgggttatacacggtggggattagatgtgggttgtccaccgctggatctttggcgaacgggtcggattggaggttgtcgtgggcagattctggcccttga

SEQ ID NO: 36524 - DNA, 681 bp, Zea mays
  Peptide Sequence Number=SeqID_78303
atggcgccgtggcgagccggatcggctgctgccggtcttcacaaggaggaagaatcgcttggcttcgccgtatccaccatgcaccagacccccgcgtgcgtcggcgtgcaggccagagcttcgccctgccaaatcgcgctgatgaccatcccctccggcgagcttgtaaaggtcagtgagcctatacttgaatacaacgtactgctccgtctggttcccgcgaagaagatcgtggtcaaccgggggagatgggatgaatcctcaatggggtcgacatcaccgtgcaatccgccccgtgtcatggacggaccgcgccgcatccccaaattcctcggaatgtgttctcgaccatggcttctccgtaccggagctggccgccgccgtagtggcttttggttgggcgtgttggggaagaaggccgtggggccctccctcgctggagcggctcagctcatgatgtgcagctccggcatggtggccgagagcctctctcccatggcacaatggaggtccaccgcgggagggcctgcgcgcagctgcgttccggctgataggaggaagatgatctttggcgcgttggatgggttatacacggtggggattagatgtgggttgtccaccgctggatctttggcgaacgggtcggattggaggttgtcgtgggcagattctggcccttga

SEQ ID NO: 36525 - DNA, 339 bp, Zea mays
  Peptide Sequence Number=SeqID_78304
atgcccgagttggtccggcgaccaacttggggccgcttccgcctcagaacggaggacggtggcaacggcacgcgcagcttgcggctgggatcttccgtcgtgccctgccactctgcttatcctctccgcttctgccaaccgaacatcgttatggtattcccagacgaggttatttactgggggcgtaccaattgctcgtcggtgattgagagcacggcggaaacacaacccgccgcggttgaccgccgaatgcgccaccgtttagatccgggaatgggtctgggagctccgtctggttcccgcgaagaagatcgtggtcaaccggggcagatgggatga

SEQ ID NO: 36526 - DNA, 303 bp, Zea mays
  Peptide Sequence Number=SeqID_78305
atgaagaagattccagcaccctcccttgagatcaaagaagaagctgcaagcaccccaccagcaccaccgccctctcaggagctacaagagccagtcccgcttgaagaagagttcgaccccgtcctgccatctcagtctctgctagaagaacttaacccatctcaagagaaaagcaccttacccaagaagataccgggaagcttacccttgaagcctggaataagctacagaaggaacctgtccagctgctcagccaaaaggaccgaccatgagaatcaaagcactgcctctgagtcaaagtaa

SEQ ID NO: 36527 - DNA, 240 bp, Zea mays
  Peptide Sequence Number=SeqID_78306
atggggattgagggagctagtggggggttttataggcgagcagtatgcgaggtggtgctcgggtgtgaagtggcggtgatggagcagcacaaggcagcaggtgcgatggagggggggatggtgttgttggcagtaatggcggtgggtgcgctgcaaaggggaagtggggcggtggtgcttattccaggcttcaagggtaagcttcccggtatctccttgggcaaggggcttttctcttga

SEQ ID NO: 36528 - DNA, 135 bp, Zea mays
  Peptide Sequence Number=SeqID_78307
atggaggaggatggtgtttctggcggtaatggcggtggcttattccaggcttcaagggtaagcttcccggtatcttcttgggtaaggtgcttttctcttgagatggttaaaggggagaatggaagcataagatga

SEQ ID NO: 36529 - DNA, 195 bp, Zea mays
  Peptide Sequence Number=SeqID_78308
atgcagtttaatcaacaattgagaaccaaatatgtaccttatggatacttcagcaaagacacaattaaggtaataaggcctactggagtttctgcatactcaagggttcatgggtatcccaggatcccagcagtggaatctacaagacaattttactgtgggactgaccagaaagcaaaagctctaagatcttaa

SEQ ID NO: 36530 - DNA, 228 bp, Zea mays
  Peptide Sequence Number=SeqID_78309
atgggacctaagccagatgcatcagtccttggggcactcctttgggcttgcatgaactacagggaacttgagatggacacaattaaggtaataaggcctactggagtttctgcatactcaagggttcatgggtatcccaggatcccagcagtggaatctacaaggcagactcaacactcgcttgaacatgaattgtcttctctgtccaatgtaccagatatgccctga

SEQ ID NO: 36531 - DNA, 468 bp, Zea mays
  Peptide Sequence Number=SeqID_78310
atgcagcttaatcaacaattgagaaccaaatatgtaccttatggatacttcagcaaagacacaattaaggtaataaggcctactggagtttctgcatactcaagggttcatgggtatcccaggatcccagcagtggaatctacaaggtatggctcattcgaaccatatgtggagaagtttaatttccttattagtgagagcgaagacagaaaacagttgtatagtgtttcaaaggcgttgtctacgcatgtccagtcatccaggtatctccagctcgccatgggaaacagtgattccttgtttcctaggcgtccaggcagactcaacactcgcttgaacatgaattgtcttctctgtccaatgtaccagatatgccctgaacaacaaatccacgaaccagttagaagatatatcaaatggacccaaggggatgaatggatgtcaatatacattcagagttcctattag

SEQ ID NO: 36532 - DNA, 1464 bp, Zea mays
  Peptide Sequence Number=SeqID_78311
atgaagatgatgggtgacactgcaagctcgcataagctgggcgatctggtggcggaggcatggccggcggcgactgctgtcacgcggttgggaaaggaaaggaggtggcgcaagacgggcgcggtgctcgtcgccgccggcctggtaacgctgcccttcctcgtgttctttaccagcgggcaggagagcttgtcacgagcttgggagagcgctgccgccaagctgaccatgatggctggagcaggttccctggaagcctctgatgccaggacaacgaccggcggtggcgcaaccaaggtcggcgccgacgagctcctcggcgggctgctggtgcgcggcggcttcgaccgcggctcgtgcctgagccggttcgaatccgcgcagtactacaagcactcaccttacgcgccgtccccgtacctcctgcgcaagctgcgcgcctacgaggcgcggcacaagaggtgcggccccggcacgccgctctacgccaagtccgtggagcagatccggtccggcggcggaggcggcggcggtgcggagtgcaactacctcgtctggctcccctacaacggcctcggcaaccgcatgctgtccctggtcagcaccttcctctacgcgctcctctccgaccgcgtcatgctcgtccacttccccgccgacttcaccgacctgttctgcgagccattcccggacgccacgtgggtgctcccgccggacttccccgtcgccaacctgtccgacctcgggatgaaccccgagcagtcgtacaggaacctcctcgccagcaagaagatcgcgaacgacccgacggtgcagtcgtccgtaccaccgtgggtgtttctgaacctgtgccacgagcaggatatagacaagctgttctactgcagcgacgaccagctcgcgctcgccaaggtgagctggctgctgctgttcagcgacatgtacttcgtgccgtcgctgtactcgatgggggagttccacggcgagcttcaccggctcttcccggcgatggagagcgtgtgccatctcctctcccgctacctgttccaccctacgaactccgtgtggggcttggtcgcgaggtactacaactcgtacctagcccgggcggaccagaggatcggcatacagatcaggatcttcgagtacttcgccaggatctcggcggacgacatgtatagccagatccttgcgtgctcccggcaggagcacatactgccggaaaccgaagatgacaacctcacgacgacggaggcggcggcggcggccgggaacaccacgtccacggccatcttgatcgcgtctctgtacccggactactacgagatgctcaggtcgcggtattacgagcaccctgccaagggcggcgtaagggtcagcgtgttccagcctacccacgagaaggtgcaggtgaccggacaacatgggcacaaccagaaggcgctcgcggagatcttcccttag

SEQ ID NO: 36533 - DNA, 2049 bp, Zea mays
  Peptide Sequence Number=SeqID_78312
atgaagatgatgggtgacactgcaagctcgcataagctgggcgatctggtggcggaggcatggccggcggcgactgctgtcacgcggttgggaaaggaaaggaggtggcgcaagacgggcgcggtgctcgtcgccgccggcctggtaacgctgcccttcctcgtgttctttaccagcgggcaggagagcttgtcacgagcttgggagagcgctgccgccaagctgaccatgatggctggagcaggttccctggaagcctctgatgccaggacaacgaccggcggtggcgcaaccaaggtcggcgccgacgagctcctcggcgggctgctggtgcgcggcggcttcgaccgcggctcgtgcctgagccggttcgaatccgcgcagtactacaagcactcaccttacgcgccgtccccgtacctcctgcgcaagctgcgcgcctacgaggcgcggcacaagaggtgcggccccggcacgccgctctacgccaagtccgtggagcagatccggtccggcggcggaggcggcggcggtgcggagtgcaactacctcgtctggctcccctacaacggcctcggcaaccgcatgctgtccctggtcagcaccttcctctacgcgctcctctccgaccgcgtcatgctcgtccacttccccgccgacttcaccgacctgttctgcgagccattcccggacgccacgtgggtgctcccgccggacttccccgtcgccaacctgtccgacctcgggatgaaccccgagcagtcgtacaggaacctcctcgccagcaagaagatcgcgaacgacccgacggtgcagtcgtccgtaccaccgtgggtgtttctgaacctgtgccacgagcaggatatagacaagctgttctactgcagcgacgaccagctcgcgctcgccaaggtgagctggctgctgctgttcagcgacatgtacttcgtgccgtcgctgtactcgatgggggagttccacggcgagcttcaccggctcttcccggcgatggagagcgtgtgccatctcctctcccgctacctgttccaccctacgaactccgtgtggggcttggtcgcgaggtactacaactcgtacctagcccgggcggaccagaggatcggcatacagatcaggatcttcgagtacttcgccaggatctcggcggacgacatgtatagccagatccttgcgtgctcccggcaggagcacatactgccggaaaccgaagatgacaacctcacgacgacggaggcggcggcggcggccgggaacaccacgtccacggccatcttgatcgcgtctctgtacccggactactacgagatgctcaggtcgcggtattacgagcaccctgccaagggcggcgtaagggtcagcgtgttccagcctacccacgagaaggtgcagtggggaatcgcgcagtggggagaagaggagttggatctgaaatgcgacacggcgtggtggggaagaggaagaggaatcgcgtcgcgcagtggggaagaggaagactggaagagcagtcgtgcaggtgggagaagagcagtcgcgcagtggaggagtcgcgcagccgagggaactgcgttccctgtttcattacaatcgttccctaactgcgttcctaaatcgttgggaacacgttcccacgcatcgaatgaacgtggatcagctgtatacccctcaacgttccatgttgctttaacagacgtaccgtgttcctcgttcccgttcctcgttcccaacgttccgggaaccttgtcactaaggatcttcctgctcagcttctccgaggtgctggtcacgtcggggacctccacgttcgggtacatgagcggcagcctcgccggcatccgcccgacgatgctgtactccgcgcgtcagcacacggtccccgacccgccgtgcgtgcggatggtgaccatggagccgtgctcgcacaggccggccagcatggagtgccaggcgaaggccgtggcaaaggaggatctggcccagcacgtcatggcttgcgaagatgaaggggtgggaattaagctgtttgattag

SEQ ID NO: 36534 - DNA, 486 bp, Zea mays
  Peptide Sequence Number=SeqID_78313
atgcgacacggcgtggtggggaagaggaagaggaatcgcgtcgcgcagtggggaagaggaagactggaagagcagtcgtgcaggtgggagaagagcagtcgcgcagtggaggagtcgcgcagccgaggggttaggcatggagcccacgtaccgtgttcctcgttcccgttcctcgttcccaacgttccgggaaccttgtcactaaggatcttcctgctcagcttctccgaggtgctggtcacgtcggggacctccacgttcgggtacatgagcggcagcctcgccggcatccgcccgacgatgctgtactccgcgcgtcagcacacggtccccgacccgccgtgcgtgcggatggtgaccatggagccgtgctcgcacaggccggccagcatggagtgccaggcgaaggccgtggcaaaggaggatctggcccagcacgtcatggcttgcgaagatgaaggggtgggaattaagctgtttgattag

SEQ ID NO: 36535 - DNA, 276 bp, Zea mays
  Peptide Sequence Number=SeqID_78314
atgaagctgtggaaggagacttccaggagttccaagattacgacgagttctaggtgtgggttagcggcaaccccgagtcggctgcctgtgaaggccgcgttatctacgtttcttttccgcactttgatttattttatatctagaagacattcaagaaaggttcacaatattgaagaaatgattctctcaatggatgctcaatatgatgtgactcaagaatggcttgatagggtgaagatagcaaggaaagggcttcgaggaactaagcgaaggtga

SEQ ID NO: 36536 - DNA, 291 bp, Zea mays
  Peptide Sequence Number=SeqID_78315
atggatgctcaatatgatgtgactcaagaatggcttgatagggtgaagatagcaaggaaagggcttcgaggaactaagcgaaggcaactttcaaacacctacatcaacaaggtggacaaaaagcctgctacaccatatttgatcaagaagaaaaagaatggaaaggtgatagcaatcaaggccaacaagcaacccaacaaaggaaaggggaccaaacacatctgggtgccaaaggagattatctcaaccatgaaaagcaccaagaaggtttggatcccaagagggaagtaa

SEQ ID NO: 36537 - DNA, 306 bp, Zea mays
  Peptide Sequence Number=SeqID_78316
atggacatcaatgaaaactatctgacaagtaaagaaatgtcaagcctatcaaaagctaagatgaaaattcatgtttataatgaagaccatatggcatggaacaaagaagacattcaagcaaggttcacaatattgaagaaatgggttctctcaatggatgctcaatttgatgtgactcaagaatggcttgatagggtgaagatagcaaggaaagggcttcgaggaactaagcgaagtgaaggtcaagcgacggcttgtagaccgaggtaccatggcctaagtgaagaagaaaagtacttgcactaa

SEQ ID NO: 36538 - DNA, 255 bp, Zea mays
  Peptide Sequence Number=SeqID_78317
atggatgctcaatatgatgtgactcaagaatggcttgatagggtgaagatagcaaggaaagggcttcgaggaactaagcgaaggtggaggccaagcgacggcttgtggaccgaggtactatggctaaggaatcatcgtactataaagggatcccaaaaagaaggttggtgtttgccaaagctcaagcatctatattcagaagctatttttgaaaaccaaaaatctcttgaacgttttatggttgacagtggttag

SEQ ID NO: 36539 - DNA, 420 bp, Zea mays
  Peptide Sequence Number=SeqID_78318
atggatgctcaatatgatgtgactcaagaatggcttgatagggtgaagatagcaaggaaagggcttcgaggaactaagcgaaaggtgaaggccaatcgacggcttgtagaccgagtctgccagtcagactggcaaacaggtcgccaggagctgtcaggggcggttcaaccgcccccctgggcggttcaaccggtgttggtcaactttgaccagtctgcgggtctcctccagcagccgagatgccctaaggtggtgcagggggcatctctggctgaggtgcaggggaaggaggcctctcagacttcacctcctgctgaggcaagggtgaagagtcctgctgctcttggtcctgctcctgctcctggcatcggtgctcctgctcctcgagcaggcgacgatgcagtctctccagctggctag

SEQ ID NO: 36540 - DNA, 996 bp, Zea mays
  Peptide Sequence Number=SeqID_78319
atggtcacccggtcggccatcaccaagcagaagaggtggcggcggaaaggactgggtgagcggtttcatttctctggctattccctcgggttgcgaaaacctaagaaggaggcaagtagcagagcaaagaaccgtcaccggtccctctcccgaatatataaaggaccaggcgagacccattcaacacttcacccgaacccaccgcgggattcaaaactcaaagacgggcgacacctttggtgggcgaagcaggcgacgcttcgcttccgccataatgaccgcgtcaaaaaagggaccgggaaaggagataccccgaaagggatctttctccgcgaaggaaacgggccccgagcccccctactgatcagaggttcgaagtctggcccctcggaggggttcaacagccgccttagagcgctcgggctccgcgcccactactggtcagaggttcgaaggccggcccctcggaagggttcaacggccgcctcaggccactcgggctccgcgcccactactgatcaggggttcgtaggctggccctcgaagggttcgacagtcgcctcagacgaagagcgagggatgaccctggaggacagcgctgcctgcgccgctccgactgctgtgccactcgacagagtgaggctggcagcagccaagtccggcctcgggcaccataggaagctctgcctcgcccggcctcagggctcggccttggcctcggccccggaagacgacgaactccgcctcgcccgaccccagtgctcggactcggcctcggcctcggaagacgacgaactccgcctcgcccgaccccagggctcggactcggccctggcctcagccgacggtctctgcctcgcccgacccaagggctcggactcgacctcgacctcggaagacagactcgacctcgacctcggaggagcctccgcctcgcccaacccagggctcagaccgaccacgtcacaggaggggccatcattagcctacccctag

SEQ ID NO: 36541 - DNA, 621 bp, Zea mays
  Peptide Sequence Number=SeqID_78320
atgggccaggtgggcctcgcggctgcgcgcaggaatgggccggagctgggccgctcgagagctgcggctaacccccttaacaagagcattgatacacacttgatgaagatgttgccgactctgatcttgactgatttggaggagctggtcgttgccaaatggacaggtgcaagaggaaagaataacgagaaaagacaagacttgcaaggtgtcaaagaagggggagcagtcaatggcgaaataggtaagacattatcctcgaacaaggatggaaaagagaaggctttaaaggggaggttcaaagtaagcatgaaggtaagggtacgaatatttcaagggttaaaggtgataactgacaagagtgtaagagaggaggtagaagacatcaatatcgcaaggttcaaaggcgattacagacaagggtatatggggaaagatgaaggcatttggagagccagtggtatgagtacaacaaagaatggagttgcacccatgcttacacgcggtaaagaagaggatatagccaagagtgaggagttaagacaggacttgttgagggacgaagtgaagaaaacaatcaaggataagataagtgaggttccgacagaagagttgaaataa

SEQ ID NO: 36542 - DNA, 375 bp, Zea mays
  Peptide Sequence Number=SeqID_78321
atggaggggggaggggcgccgccaccggggaaggtgaggggagagtgggagaggctctgcacggacgggaaaacgaagaaacgaagaaaccctaggtgcaataatggaggtttctcaccggggaagaagaccctcgccggagccgaggagaaatctgtcgattgccggagattcggggatccaatcgatgaaccgaacgcgctgcgacaaagccttcgacgagacgaatgcagcgggttagcggctaacccccttaacaagagcattgatacacacttgatgaagatgttgccgactctgatcttgattgatttggaggagctggaggttgccaaaaggacaggtgtaagaggaaagaataacgagaaaaggtaa

SEQ ID NO: 36543 - DNA, 276 bp, Zea mays
  Peptide Sequence Number=SeqID_78322
atggaggggggaggggcgccgccaccggggaaggtgaggggagagtgggagaggctctgcacggacgggaaaacgaagaaacgaagaaaccctaggtgcaataatggaggtttctcaccggggaagaagaccctcgccggagccgaggagaaatctgtcgattgccggagattcggggatccaatcgatgaaccgaacgcgctgcgacaaagccttcgacgagacgaatgcagcggtaccctcggattccgcggacgatgcacggattgggagtaa

SEQ ID NO: 36544 - DNA, 939 bp, Zea mays
  Peptide Sequence Number=SeqID_78323
atgtcatgtaaccggcgcaccggttaccgtgtgcgaagaaactgcaccaccgcttgcgctaatgccacgtctcctctgggctgtcacgggagtctgaaaaggcggtgtcaaggtcatccagcaagcggcgcgcctgctgggtctgctggcgaacagtacgaccgtgccaggcagcacgctgtacccatcatcccttctacaagaagcttcccctgttctagtcataaatattggaagatctttattggtaattccagctatgtgccctgcctttattggagattcttcagggtgatgatagatgccaattcatcattctctggaggtgctcagttgcagccaagtacaagcatgaatacttattccttcatgcctgctccatcgtccccaatatcattttcatcaaataacatctctggctcttcagtcattgatggctccattgtgcagcaaagtccaccccaagaccaggcgcaaaagcagaggtcttcaagtctaacatcacatcctattattgaggctggtggtgcattgcatgctccaaagaaattaagaattgatgttaggcaagatgaactgcagcaacagctgattcagcgtctgctccatggtcagggttctcttcatctccaggggcaacagaacccacagcttcaagctttgatccagcagcataatctggcacatatgcagcagaggcagcagcagctgctgcaatcatttgctcagacacaaccatctcaaattggcattcctcatcagcctcagcttccgccatcactagcacagcctggaatagctgtacctgttaggactcctgtcaacaatggcctttgttcccgcaggctaatgcagtatttatatcacaagcgtcgtcgtccggaggacgtgtggcgatgtgacatatgcaaaacacatggtgcaaaaggatatggttag

SEQ ID NO: 36545 - DNA, 822 bp, Zea mays
  Peptide Sequence Number=SeqID_78324
atgaaaatccttgaagccgaatggtggtggaaggatgccaacccccatggggttgcaccccttcaacagcagcaggaagaagacaagatcggcgacaccaccacgagcgcacgctctccgacggtgaagtcaccgaaagagacgaccttgacgcggatccctccagagaacaccgacgcaccccatctggaggcccggaaggcgaaagggcgcggtggtcgcaagcggagcgaggcatcggtcaaagaggcaaaccgccgcgcaagaagcatacaaccgtcctacggctgtgcgccccctcagctccaccgcaactggcggtccaacgcgggggcccaggcccacatgacatcgactcgaggcagccctgcacatggcccaacagtgccattaagtacgatggtcacgggccagtcagccgtgggaataggcgcggcagctggcatggccataggcgggccggcagtaattgcaacaacagtcgcgcaggagcagcggtccaaccgccaatcagactctggtcccatctgcaggctcgcatcctcccctgaggtgggactgggggccactgttgggtaccctaaatcagggagggacaccggacccctatacataaaagtccggagcccccgggaggtccgaaccctagcagggtcccagaacgagaatcctggcagtgtcaaggtcatccagcaggcggcgcgcctgctgggtctgctggcgaacagtacgaccgtgccaggcagcacactggcgggtgcactctaccacccggccggagacttcctctctgacagaaatgattggaagaagcatttttag

SEQ ID NO: 36546 - DNA, 1886 bp, Zea mays
  Peptide Sequence Number=SeqID_78325
atgggagttggcatccttccaccatcattcggcttcaaggattttcataacgcacctctggctggtggtcatccacaaggaagcagcttctccctccaccgcaaagtcaaccgaagtctcggcgtgggcaaggcccggacacgtgtcagcgccggacccctgctcgtactagggtcctcctcgttccgagaccctgctgaggttcggacctacccggggctccgggcttatatggcggcgtcctccgcgtggcctggagacgtcacatgggtgcgacgtcttcatgctgtagaagaggtacccacccccccaccgacccaccccctccgtgttccgccgcctccgccgaaatcaccaaatccccgcctccgatccgccgccgacctcgatccgccgcagccgttgacccgcccagaatgggcctctgggactccctcgccgtccggcaaaccctactcccgcaaatctcacgccagctccaaggctcccagcgtcccctccttcgacgcccacaacggccggctcctccccaccgtcaccttcccgctgccctccactaccgcctcccgccgggagctgcggcgccgcctctcctccgagctctcccaggtgcgcgccgcggccaagcgcctgagctccctcccggctcccgcaccttcctcggcgctctccgccaccgacccctccacgccgctcccgccgcacccgccggggtccaagcacaagtccaggaagcccgggggagccccgtacccgcagccgcacctctcggcggaggcgcggcgcaagctctacgcgcccgtgttcaagacctgctccgcgctgctccagaggctgatgaagcacaagcacagctgggtgttcaacactccggtagacgcgagcgcgcttggactgcacgactaccatacgatcatcaccaagcccatggacctcggcacggtcaagtcaaagctagcggctggacagtacaggtcgccacgggagtttgcaggcgatgtgcgtctcacgttccggaacgccatgacgtacaaccccaaggggcaggacgtgcacttcatggccgagcagctgctgaacatgttcgaggagaagtggttggagattgaggctgagctagctcagctatcgccacagcctccgacaccatcctcagcagcacccaggaagcccaaggagatagataattctagggcattagagaggtcggattcgacagttcatgctgccgggatggaggctaccccaaagacgcacaatggcagacccccggtttcaaagaagcccaaggcaagggagcccaataagagggatatgacattctgggagaagcagcggcttagcaataacctccaggatttgccaccggagaagctagacaatgttgtccagatcataaagaagaggaactcgtcgctcaaccagcatgacgatgagattgaggttgatatcgatagctttgatgttgagacgttatgggagcttgatagattcgtgacaaactataggaagagtataactaagaataagcggaaggctgagctttctgcggtaaggccagatgaagctgatcctgatcaggagccagagaaggtagaacgtgtgaggcaggacgaggcagatcaggatcgaatccctgcagtacaagagccgattccagaaccagaatcagttgatgtcgagccacctaaggaaattgcagcagatgacaatgggagatatgtgggtgaatcatcacctggtcatttggaagatcaggagggagagaatcctggtagatcaagtagttctggaagctctagcagtgactcagggtcgtcctctagtgatacagacacagatagttcatcagcagatggttctgatgctgcacaatcgcccagaac

SEQ ID NO: 36547 - DNA, 2338 bp, Zea mays
  Peptide Sequence Number=SeqID_78326
atggctacaacacgaggacgaggactccctcataaaacgcagatgggaacccagggttgggacctagtcctacaggaagtaccaaaccaagaagggctccgcaactctcccccagctgggaaggacccttcaaggtggcgggaatacgccgacccgggggacctctctgcgaaagcaggagggcccgacagcctgggagccggctctagagaacgggaccccgttccatggggtggtccggagcctgtgtggccgcttagcctggttccgtacccaaaagcctgcacactccaccactccgtgacgggcctaggtcccagtcgaggctacctcctgggggccaccgccaaactctttcttaggtatgctgagcggcttgccagcggaggcgaccacctcagcaccgacggcagcgaccaccttagcactgatggatcgccagcggcgacgactacctcgactccgagcggctcgccagcagaggcaaccacctctgcaacgggcagcctcaccagcggcgccgaccacctctgcaccaggcagcctccccagcggtggcgaccacctcagcatgcgcgccatggtgaagagccaaagtttgcctccttcacaaggctggtgatcatccttttcctccgaatgctggaggaagaggcgggcaccagcccatgtgggaggcgaaggccgcgactcatctcgctccccaccaccgcgaggctgatgaacatccttgaagccaagcactggtggaagagtgccgctcccacaaggccgcacacctccaacagaggaaaaacaggactggcctcacatgtcatacaagttggcctgaagcgcgaagaaggcgaatcatcgcacaaggagcgtgcaaccgccctgcggttatacgccttttcatcttcgtcgcaaccagcggtcaagaaggcgaaccgccacacaaggagcgtgcaaccgccctgcggttatacgccctttcatcttcgccgcaaccagtggtccaacctctggcatgggggcctaggcccacatgtcatgcacccggcgcgccggtctccgggtgcagaaaagtcgcaccaccgctcgcgccaatactgcgcctcctcgaggccgtcacagaagactgagaagataaattttcaaaaccaatgcaacaactcgaggcaccccgcgcatgacccaacaaaggcattaagtgcgaaggtcatgggccagtcagccgcggggacaggcatggtagtcagcgtgaccaggggcgggccggcagtaattgcatcaacggacgcgcaggagcagcgagccaatcaccagtcaaactttggccccacctgcaggctcgcatcctcccctgaggcgggcctgggggccactatcggtaccctgaatctggggtaccccttactacggtgtgaagacacggatgtatcagtcgaaccggacccccgcgagggagcaccggacccccgtacgcacaacccaggacccccccggttatgggcccgagactaccgagtaagcatgccgggtcccttggaagggacccagatccctctgagtgaggtccgggctgcaacgaggtctagtttgaggggaaactccggcgtgagcaagggccagtactgccacgcgtccgggccttaccttgtgcgcatgagctccccgctcaggcggagacctgatgcggccacgtggcttgtagcccatgacataagcctgcgggcgaagcctgacgtaaggcctctaggccgcacagtctctgcatttattgcggaaaggacgcgccgcctgtcaacccttctgacaggcgatgtgccctcacagcatttaatgcgtcctgtccactccgctggcaggcggcgccagggccatcctacagacgacgcacctgtccagtccgttgtcgaacagtacgcctgtgctgtgcggcgcactatgctcatcatcccttgtacgagaagcttcccctgcacgccggtactacgcagttcttggatgtcagggcataagaagattgctccaacaacaaacattagtaggtccaagtactacctccgttatgtttctgggcccacatgttggggctcaacactcttgtacatgccccccttagcaataaaatgggaggcatgcaacgttacaaggggacggctcaagctcccttggaccaaactcagactctcaactctcaagcttccacagcaattcaacacacagtggagtagggtattacgctccggcggcccgaaccactctaaatcctcgcttgttcatgtgcttgatgttcgcttagcaggacaggcaaaacgcttaagccccttcctcatcttaggatttagggcgg

SEQ ID NO: 36548 - DNA, 186 bp, Zea mays
  Peptide Sequence Number=SeqID_78327
atggcgagactggaggaggtgttctcaccggcaatcgtcgcggcgaaaaggagttgcacatttgagtccaatgtacaccttcaaatctgtcggagagggaattctccggccaggtggcggaatgcacccgccctaaatcctaagatgagcaaggggcttaagcgttttgcctatcttgctaagtga

SEQ ID NO: 36549 - DNA, 609 bp, Zea mays
  Peptide Sequence Number=SeqID_78328
atgaatcccacctctccaaaaggtttgtcttcccatttcgattcccacatatgttgtgtggctaatgaaaatgatagcggaagcacaaatgaggacgaggaggatgaacgaagcatgcaactctatgctcatctaagcctagaagataaggcggtcatgctcaaacttctaaaaagagcgagagagcaaagcgaagctcgtcaaatgctagaagatgttctctccatgaaaatgctacgctttgacgagttgactaaagaacatgaggagctaaagtgctctcatgttgatttggtccaaagaaaatgtcaaggacttgaggattgtcaagaggaagaaacaaaagaagaaaatcaatacctctgccaaaagcctcaaccatgcctccatgtgaggcaacccaaaattgcaacttgtgctagaaaggaaataaagaattatcctgtgcagaaaaatcaagatctacaacatggaggaaagccaaaggatggtaactgtcggagagggaattctccggccgggtggcggagtgcacccgccctaaatcctaagatgaggaaggggcttaagcgttttgcctgtcctgctaagcgaacatcaagcacatga

SEQ ID NO: 36550 - DNA, 210 bp, Zea mays
  Peptide Sequence Number=SeqID_78329
atgaatgcgcggtcggcgctggacgaggtcaccgacatgggcgccttcggccggtcgccatccaccttccggagctccgtttccagggacaggcggttccctgccgtggcggggcggtaccacctctacgtctcgtacgcgtgcccctgggcgtccgggtgcctcgccttcctcaagctcaagggcctcgaccacacgaatcaaagctga

SEQ ID NO: 36551 - DNA, 909 bp, Zea mays
  Peptide Sequence Number=SeqID_78330
atgaatgcgcggtcggcgctggacgaggtcaccgacacgggcgccttcggccggtcgccatccaccttccggagctccgtttccagggacaggcggttccctgccgtggcggggcggtaccacctctacgtctcgtacgcgtgcccctgggcgtcccggtgcctcgccttcctcaagctcaagggcctcgatcatgccatcggcgtcacggtcgtgaagcccatcttcgagcggaccaaggagagcgacgagcatctgggctgggtgttccccgccgccgatgacgaggagcccggcgccgagcccgaccttctcaacggcgcccggagcgtgagggagctctacgagatcgcccgctccaactacgccgggaagccaaccgtccccgtgccgtgggacaagcagctgaagacggtggtgaacaacgagagctccgagatcatccggatgctcaacgacgagttcaacggcatcaccaggaaccccgggctggacctctacccggcccacctccgggcctccatcgacgaggccaacgagctggtctatgacgccatcaacaacgacgtctacaagtgtggcttcgccaagaagaaggacgaccgcgtgcttgtgccggatttggggtcgctcaccagcatccatgacagggcgcgtgaactcttctactacctcaagggtgggcaggtggactatggcgaggagcacagcaaggcttgcagccacaacaggtttgggagaatatatcacacagggcactatcctatttgttacgagcacaacccagtgcattttgtggggcactctgctggcgcgcaggttgtgagggtgctgcaacagatgcttgccgacaagagggatggttcatgtgaactggagtacaggattagagcacccaaattaggatga

SEQ ID NO: 36552 - DNA, 330 bp, Zea mays
  Peptide Sequence Number=SeqID_78331
atgacggtgcagaccgcggaggagctcactacccagatcgagcagcagaagctcgagggcactatcctatttgttacgagcacaacccagtgcattttgtggggcactctgctggtgcgtaggttttgtgagggtgctgcatcagatgcttgccgacaaggcagaggaagttgtggtggaaaagaccaaaacaatgatgaaaagcctctacatcttgtcaaaggtgcctttggacaggttgcccttctttctgttcttggaagaggttgttccacgaggaagctaagcttcaagcccttagattcagtgatgattgtccagactgtataa

SEQ ID NO: 36553 - DNA, 1179 bp, Zea mays
  Peptide Sequence Number=SeqID_78332
atgaatgcgcggtcggcgctggacgaggtcaccgacacgggcgccttcggccggtcgccatccaccttccggagctccgtttccagggacaggcggttccctgccgtggcggggcggtaccacctctacgtctcgtacgcgtgcccctgggcgtcccggtgcctcgccttcctcaagctcaagggcctcgaccatgccatcggcgtcacggtcgtgaagcccatcttcgagcggaccaaggagagcgacgagcatctgggctgggtgttccccgccgccgatgacgaggagcccggcgccgagcccgaccttctcaacggcgcccggagcgtgagggagctctacgagatcgcccgctccaactacgccgggaagccaaccgtccccgtgccgtgggacaagcagctgaagacggtggtgaacaacgagagctccgagatcatccggatgctcaacgacgagttcaacggcatcaccaggaaccccgggctggacctctacccggcccacctccgggcctccatcgacgaggccaacgagctggtctatgacgccatcaacaacgacgtctacaagtgtggcttcgccaagaagaaggacgaccgcgtgcttgtgccggatttggggtcgctcaccagcatccatgacagggcgcgtgaactcttctactacctcaagggtgggcaggtggactatggcgaggagcacagcaaggcttgcagccacaacaggtttgggagaatatatcacacagggcactatcctatttgttacgagcacaacccagtgcattttgtggggcactctgctggcgcgcaggttgtgagggtgctgcaacagatgcttgccgacaaggatcgtgataactattggaagatgatgcacaagtacataggttcagatgttacatcacttgtgacacttccagtcataatttttgagccaatgacaatgcttcagaaaatggctgagttgatggaatactgtgagttgttagacaaagcagaagaatgtgaggatccatacatgcgtatggtttatgcttctacatgggctgtttcggtatacttcgcatatcagcgcacatggaagccttttaatccgatccttggagagacttatgagatggttaaccaccagggcattacatttcttgccgagcagatctatatggcttaa

SEQ ID NO: 36554 - DNA, 195 bp, Zea mays
  Peptide Sequence Number=SeqID_78333
atggaccacaaccgcgtcgcggaggtgctacagtgctgcccgacattcctagtgctgacgccgtcagggccgctgcagacctgcttgttcggttgtcaagtttgtcaacgcttccagcaaatagtttgtcataaccatctctccaggagaatcaacccaagtacgcccaaatatcgggttgttaacctttgttag

SEQ ID NO: 36555 - DNA, 1311 bp, Zea mays
  Peptide Sequence Number=SeqID_78334
atgggaattcatgggattccgcgcaggcggcagagttatgaaggccttgaagtaattaactccgatggaggcccagatgtggctgtggaaatagctttaaggggcggatggagccaagaaatctatggttttaaggatcgtgatagctattggaagatgatgcacaagtacataggatcagatgttacatcacttgtgacacttccagtcataatttttgagccaatgacaatgcttcagaaaatggctgagttgatggaatactgtgagttgttagacaaagcagatgaatgtgaggatccatacatgcgtatggtttatgcttctacatgggctgtttcggtatacttcgcgtatcagcgcacatggaagccttttaatccgatccttggagagacttacgagatggttaaccaccagggcatcacatttcttgccgagcaggtaagccatcatcccccaatgggtgctgctcactgtgagaatgagcattttacttatgatatcacgtctaaggtgaagacaaagttcttgggaaattcattggaaatctatccagttggaaggactagagtgacacttaaaaaatctggtgtcgtgttggatttggtgccaccactaacaaaggttaacaacctgatatttgggcgtacttgggttgattctcctggagagatggttatgacaaacctgacaaccggagacaaagctgtgttatatttccagccatgtggctggttcggggctggccggtatgaggtagatgggtatgtgtacagtgcagcggaagaacccaaaataatgattacagggaaatggaacaagtcactgagctgccaaccatgtgaccaagaaggcgaccctcttccaggcacggagctgaaggagatctggagagtcgcccctgccccacagaacgacgggtatcagtacacacactttgcgcacaaaataaacagcttcagcacggcacctaagaagctgttggcatctgattcccggctgaggcccgatagatatgccctcgagaagggcgacatgtccaagtctggctcagaaaagagcaggctggaggagcagcagagagccgagaaaaggactcgagaggccaagggcgagcagttcactccgcgatggttcaacgtgacggatgcggtcgcctccacgccgtggggtgacctggaaatttgtgagtacagcggcagatacacggagcacccgggctgccatagacagctccaacagcaccgacgacgacgacgagatagacgtcacttcggtcgagttcgacccatggcagtatggtggtag

SEQ ID NO: 36556 - DNA, 2490 bp, Zea mays
  Peptide Sequence Number=SeqID_78335
atgcctgtgttgttcgacgactatagcgatgacgatttttatggggcacaacggaagtatagtattgtcgctcgagttgaagttaaattcccgattgaaccacgttatcatgacaggcaacattacattttgtctgacatcaatggagccaagatcgaggccattgctactcggtatgagatagtcaaatacttcaacagtttgctccatgaaaagcatgtctacaagatgcacaacgtatggtttggtcttaatccgggtgcatttaattttcgacatctaaatggtaccatggagttgtatttcacccaacaaactgtcgtagagccatacactgtcccagttcaaatgccgccatttccaaaacatatattcttgaaccttgatgatattgccgagctgccaaacaggactttagttgacattatggctattgtagtccacttggatacaatccatcgcacaatatggggtacattcatgaagattgttataatggatgctaggtggtctttacataccattaaagtttggggtgatttactaaacaaaaatgcactccgctgggcgttggctaatgagaattatagcatcataattgggaccatgtttcggcggttcagaaaacaagatcagatgggacataatgccggtcgcaaaccattcacagacatctctaacattatcattagaggtgatcaaaatgaattgctcggaccaatggtcgatgctaaggagcgtaagaggaaaagggatagggaaagatatgcagcgatgtccattgaacaaaaaaacgagaagaataggaagcgtcgtgaagcacgtcaacgaaacaagggacacaatgtgatgcccaatgtgtcaggaggtgaccaaaatgaacagcttaggttgtataatcagacaccaaggcggaaagagggaaagttagagtacataagaaaacgtagagcactgcaagctagcactttgaatcaggggtccattgccatggaggtcccaacatatacctctgaggttgtccaccctacagcatatgtatcggaacctgattcatcctctgataacgcatgcgactgggttatccctgaatacaccagtacacctttcatgccagcttcaacacaaactaaggatgtcggttcactcgatatgtctactgagccactaagacgtaaacatcatgttctgcgtggtgcaagacaagctatcttagcccgtcaaaacaagaaatttgaaacaaacattgcacgtaacgtggctactttgactgaggatactatcagtgacgtcggacaaatggatgattcgacacaacccggttcaactatagagatcaacaacactgtacaatataggaatacacgccaaagtgcgatcgtggcaacaaatgggagtgcaaacatggtcgaacaaagaagtgggttggagcaaagccagtcggtcccaaggttcatttccaatgttgatgacgatgatgagggtgtcatattcggagaggataatgatgagaacgagggatatatattcgttgatgaggacactaacgaggacttcgagaaagatggtactcaagatcaatctgttgtcactgatgtgcctgacccgtacgacaaggtctacagcaacatccctgaagaaacacatatgttgaagcacgttcccgactgtggttattgcaccgcgaagaagtttgagtatgagccacctgggttttgctgtcgaggtgggaaggttgagctagccccactagagactcctccccagctcaggaggttgtgggatagtgcagactctgatgctaggcactttcgtgataacatcaggttttttaatggccatttttctttcacttccctgtactgttgcctcgacagtatgacaactaatatgcgggattctggtatatacacattccgtgcacaaggcatgatgtaccataatatcaagtcattcggtagtgaatgtggggcagagcataaacacctagagctttacttttacgatgatgatcccagtctcgagcatcgattccgtaagtgtcgtgaagatcagattcagaaagaccaagaggttattaaacagatagttggcatacttcgtggaaatccgtactctgagcaccttaggagcatgggtcatgttgagaaccttgctgactatcacatcgcattgaaccttgaccaaacgttgaaccagaagacttataacacacctctcacttcggaggtggccgctgtctggatcgaggggagcgaacggcgaggccagttcagcaagagtgttatgctacatgggaaggataggtcaagtcatggcatccgctcataccatggatgctacgatgcgctatcatatccactgttcttccctagaggtgaacttggatggcatgcaaatatcccaaaggttggtgtatccatggacgaagtggatgcataccgggcgacgcataggagaaataatgcaaatgatgaagatgcgggttag

SEQ ID NO: 36557 - DNA, 1290 bp, Zea mays
  Peptide Sequence Number=SeqID_78336
atggcatccgctcataccatggatgctacgatgcgctatcatatccattgttcttccctagaggtgaacttggatggcatgcaaatatcccaaaggttggtgtatccatggacgaagtggatgcataccgggcgacgcatagggcaagtaatgcaaatgatgaagatgcggatacgtcgaggggtattcaatccaatacttcatggtaaacgacttttccagcagtttgcggtcgacacatacattaagattgagagctctcatttagatttcatacgtaagaaccaggatcgattaagggcagacctataccagggcttggtggatagcatgttagatggagatgttagaggaaagaaggttggaaagcgaactgtgttgtcaccatcgtttattggcggtcctcgtggcatgagacgtccatatatggatgttatggctctggagctaaaacataggttgactaaacaggatattctcggtaaagtccgagcctacgtctacgtcgtggaatttcagaaacgagggttgccacatgcccattttatactcatcatgcaaaggaagtacaagctcacgtgctctgaacaatatgaccttttgatctcagctgagatcccgtccaacaggtaccctgaactacgaaagatggttatcaagcatatgatgcatggcccgtgcgggtcgctaaaccctaattgcccgtgcactaagggtcgtgcatcgtgcaagaatcaatacccccggcatttccgtgaggcaaccatgcaagggaaggattcatatcctaattacagacgtcgtgacgatgggtgcaaggaaaaggttcgaggatgtgaattggacaatagatgggttgtcccttacaacccttacctccttcggctcttcaactgtcacatcaatgttgaggcgtgtgggagcatcaaggctgttaagtacctgttcaagtacatatacaaaggtcatgatcgtgcgtctgttgttatgagagatgcgagtaaggaaaatggtgatgtagatgagatccagcagtatagagatgcaaggtgggtgactcctccggaagccttatggaggatatatggatttgagcttagccagaactctccatctgtgatgcagctgcaactccatcttccaaacatgcacatggtgacgtttcacgagcaacaaatggtcgagcgagtcgtcaaccgtccaggtgctgataggtcaatgattacagcatattttgaggcgatagctatacgaggaggctcggggcatcctgtatcgggacttccctga

SEQ ID NO: 36558 - DNA, 405 bp, Zea mays
  Peptide Sequence Number=SeqID_78337
atgtataggcacaccaggccttggctctcagaaaagccagtagcagaggtcgggcagtcagatcttagcctgtcactgaaatgtggcgagctggatgcactggttaggacacattcaacatcaaatgagaagctagaagagtcacagctgcaaactgctatgggggcaagcaaaatcaaagtatcccaaggatgcatagatctcctgcaggaatttcatcatctgatagatggcaatatagagtttcttgtaaagttgagagatttggtcattgatgggtacaagaaggttttcaagattttttccagaaacttgatgggcattttcatgtgctttctgggagaagcaaaaaaattcccaggagtcaactgttacagagatattttgcaacatgtgcttgtgtag

SEQ ID NO: 36559 - DNA, 720 bp, Zea mays
  Peptide Sequence Number=SeqID_78338
atgtataggcacaccaggccttggctctcagaaaagccagtagcagaggtcgggcagtcagatcttagcctgtcactgaaatgtggcgagctggatgcactggttaggacacattcaacatcaaatgagaagctagaagagtcacagctgcaaactgctatgggggcaagcaaaatcaaagtatcccaaggatgcatagatctcctgcaggaatttcatcatctgatagatggcaatatagagtttcttgtaaagttgagagatttggtcattgatgggtacaagaaggttttcaagattttttccagaaacttgatgggcattttcatgtgctttctgggagaagcaaaaaattcccaggagtcaactgttacagaggaaaggagtttgaaaaggagaagattgtttccccagatttcaaacagaagtcaagaaaacagtttggattcggttgaggttaagacagaggcaaagtccacaagcaaagtttctggacaacaagagcttggtccatccataacaccattagggcttcgatattttgcaacatgtgcttgtgtagattattgggctgttgttcttccactaattaactcgcataaaggcggacgacagacgaggtgtacacgcagggtatcgctgctgcccgaggacgaggaagcggagaagcgggcgcaggcgcgggtccgggaggacgaggacgcggatcaatggccatga

SEQ ID NO: 36560 - DNA, 4218 bp, Zea mays
  Peptide Sequence Number=SeqID_78339
atggaggtcccaacatatacctctgaggttctacaccctacaacatatgtatcggaacctgattcatcctctgataacgcatgcgactgggttatccctgaatacaccagtacacctttcatgccagcttcaacacaaactgaggatgtcggttcacccgatatgtctactgagccactaagacgtaaacatcatgttctgcgtggtgaaagacaagctatcttagcccgtcaaaacaagaaatttgaagctaacgttgcacgtaacgtggctactttgactgaggaagatatcagtgacgtcagacaaatggatgattcgacacaacccggttcaactatagagatcaacaacactgttgatgacgatgatgagggtgtcatattcggagaggataatgatgagaacgagggatatatattcgctggtgggaaggttgagctagccccactagagacccctccccagctcaggaggttgtgggatagtgcagactctgatgctaggcactttcgtgataacatcaggttttttaatggccatttttctttcacttccctgtattgttgcctcgacagtatgacaactaataagagggattctggtatatacacattccgtgcacaaggcatgatgtaccataatatcaagtcattcggtagtgaatgtggggcagagcataaacacctagagctttacttttacgatgatgatcccagtctcgagcatcgacttcgtaagtgtcgtgaagatcagattcagaaagaccaagaggttattaaacagatagttggcatacttcgtggaaatccgtactctaagcaccttaggagcatgggtcatgttgagaaccttgctgactatcacattgcattgaaccttgaccagacgttgaaccagaagacatataacacacctctcacttcggaggtggccactgtctggatcgaggggagcgaacgaggtgaacttggatggcatgcaaatatcccaaaggttggtgtatccatggacgaagtggatgcataccgggcgacgcatagggcaattaatgcaaatgatgaagatgcggaacctcctacccatctatgtgtgtccgtgcgtgattactactgctacaaatttcagatacgtccaggggtattcaatccaatacttcatggtaaatggcttttccagcagttcgcggtcgacacatacattaagattgagagctcccgtttagatttcatacgtaagaaccaggatcggttaagggcagacctataccagggcttggtggatagcgtgttagatggagatgttagaggagagaaggttggaaagggaactgtgttgtctccgtcgtttattggcggtcctcgtgacatgagacgtcgatatatggatgctatggctctggtgcggaagtttggtaaaccagacatctttcttaccatgacatgtaaccctaactgggatgagataaggagagagcttctacctggacagacaccgcaagatcgtccggatcttgtaaaacgaggtttgccacatgcccattttctactcatcatgcaaaggaagtacaagctcacgtgccctgaacagtatgaccttttgatctcagctgagatcccatccaacaagtaccctgaactgcgaaagatggttatcaagcatatgatgcatggcccgtgtgggtcgctaaaccctaacttcccatgcactaagggtcgtgcatcgtgcaagaatcaatacccccagcatttccgtgaggcaaccatgcaagggaaggattcatatcctaattacagacatcgtgacgatggacgtaaggaaaatgttcgaggatgtgaattggacaatagatgggttgtcccttacaacccttacctccttcggctcttcaactgtcacatcaatgttgaggcgtgtgggagcatcaaggctgttaagtacctgttcaagtacatatacaaaggccatgatcgtgcatctgttgttatgggagatgcgagtaaggaaaatggtgatgtagatgagatacaacagtatagcgatgcaaggtgggtgactactccggaagccttatggaggatatatggatttgagcttagtcaaaactctccatctgtgatgcagctgcaactccatcttccaaacatgcacatggtgacgtttcacgagcgacaaatggtcgagcgagtcgtcaaccgtccaggtgctgataggtcaatgattacaacatattttgaggcgaataagctgtacgaggaggctcggggcatcctgtatcgtgacttccctgagtggtacacttggaagcagggcaaagtgtggcaaaggaggaaacaaaatacgggtggacaagtcggtagaatcgtctctgctctaccatctgaaggggagcgcttctatcttcggctcctcctaaaccatgtgactggtgctacctcctatgtggatctaaggacagtagacggtgacacactaccatcgttttgtgaggcagcacaaagaaggggattacttgaagcagacaacacaatagatgagtgtctcaatgaagctgctctttaccaaatgccatcagcgctacgaaggttgtttgcaacgatactggtttactgcgagccgaatgatgtggctgaattgtggcagagacaccttgacacaatgtccgaggattatcatcgtattactcaaagcaaaacccatttgcagcagatggtcttgattgacattagaaacatgttgcagtcaatgggtaaagacataaagacattccctctccctgctatcatcgatagatatgacgattcacaagttgcaacagctacatctggggttgcggcttccataatgcctggtgggagaactgcccattcacgcttcaagataccacttactattgatgatggtgctatatgtaccttcacgaaacaaagtgggacatcaaagttgctacagaaagcgtcgctcattatttgggacgaggcatcaatggctaagagacaatcaattgaagcattggacaacagcatgcgtgatatcatgggacgccctggtctgccctttggtgggaagactattgtgtttgggggagatttcagacaagtactccctgttgtacgtaaggggtcaagggctcagatagttgctgcctctctacggagttcttacctatgggaatcaatgtgccacctaaagcttgttcgcaacatgagagcaaagagcgacccatggtttgcagaatatttgttgcgtgtcggtggtggaactgaggaagtgaatagcgatggtgatgttcgtcttccagatgaggtatgtgtgccatataccggtgatgaccgcgaccttgacagattgatagatgacatttaccccagtctaaacgaaaacatgtctaatacaagctacatcacttcaagagcaatattgactactcggaacgactgggtggatatgataaatatgaggatgatcgatcgtttccaacgggagcagatgatgtaccatagctttgacaccgcggtggacgatcctaataactattatccatcggaattcctaaacacactgactcctaatggactacccccgcacgttctgaagctcaaaattgggtgcccaatcatgttgcttaggaatatataccctgctaacggactttgcaacggtacacggctggtgggacagacgattcctaatgttgctgtgtacttgcccgaaccagtattctctcatggccagctatatgttgctctctcaagggccacaactcgattgaatgtgaaggtacttgtaattccagtcactgatgacaaaatgaagaagggggtggaaaagaaatgtcgtgagcatcttgcagaacatgtgcgcgttcgtgcgagcggcctcatggcggcgccgtcctcgccgtcgcggcgatccgcgtcctcgtcctcccggacccgcgcctgcgcccgcttctccgcgtcctcgtccttgggcagcagcgacaccctgcgtgtacacctcgtctgtcgtccgcctatacggaacaagacaggtttctcttgtcagccaatagctcgagcacattgcgctcgcagacccccccctgcgcacgccacacgagctcacgtggagggtgacgtcgacgacgaggcagagcacgtgtggcgtgaaaaaagtgctttgctctaccaacctgtttcatcttcccatgggaagcaattattggagaacctttaa

SEQ ID NO: 36561 - DNA, 237 bp, Zea mays
  Peptide Sequence Number=SeqID_78340
atgaagctcctcgagccgaggattgaacaatacctcaccggagacgccggatcgacgtcgtcggacttcaaccggccgccgtcacacgtagaccgagccccacgctccctgtgccatttgattgagccctaccgccgtgagcaggccggagcacacgccgccgacgagcccgaccgcctgcgcacgcggtcagccctattccggctatcaccgtcgacgatccgcacctcgacgtga

SEQ ID NO: 36562 - DNA, 459 bp, Zea mays
  Peptide Sequence Number=SeqID_78341
atgacgacggcggctctcagccccttacgaaagcaaggagacgtcatcaaggtcccgacagccccgacagctgtgcttctacagggctcaagcgctcctccgacggccacgacatcgcatgcacagggctctagcacctcttcgacagccacgttggcatggccctcgtacgagagggtggtcgcgcgggaggacgggctgacgaacaggatctctctctctccctcgcgaacgcttgtaaccccctactgcaagcgcatccgccctgggcgcaggataacacgagtcgcggtatctgagtgcccagcgtcctgggttaaggacgcatgtgccctcaggcgcctaggttatccccagaatattcccataaagcaggcgaggttggcgaaggcatcgagcgaagggtggcgtcttcgccttcgccccaacatttgccctccgagggaccagttcgactaa

SEQ ID NO: 36563 - DNA, 615 bp, Zea mays
  Peptide Sequence Number=SeqID_78342
atgcaggtcctcagtggtaggatctggtgctggctcctggactacctcctgagcatctgcttgctccagaatgaggacgcggtcgggctcgtcggcggcgtgtgctccggcctgctcacggcggtagggctcaatcaaatggcacatggagcttcatgggacgctaaggatgctataggtacaaggaatcgacaaatggcttacaatggggcttggtctacgtgcgacgacggtcggttgaagtctggcgacgtcgatgtggcgtctccagtgaggtattgctcaatccttggctcgaggagcattagtgaggcatgggcgggggcccagtgtgacacgacgaggggctgcgcgcgtgggttgagcgccgaggcgaccttcggaacaagcttcggcttagcaaccttcggcgccaccatcctgcagacagatgatcgtataagtgttaaggacgcatgtgcccccaggcgcctaggttatccccagaatattcccataaagcaggcgaggtcggcgaaggcatcgagcgaagggtggcgtcttcgccttcgccccaacatttgccctccgagggaccagttcgactcagtcatctggtgtcgaagatgtcgctag

SEQ ID NO: 36564 - DNA, 201 bp, Zea mays
  Peptide Sequence Number=SeqID_78343
atggcgaggcgatgtctagtcagcacggaccagactatgactagaggacctcactcattgatcctcaggctgtatgcaagtggtggaaaagctcatggaaggtacacaatgtttactaacgtcatcgactcgagccaggtgagggttcagcgtggaggttcatcgaggtctgttgctcgtagctaccttgccaacgcatga

SEQ ID NO: 36565 - DNA, 186 bp, Zea mays
  Peptide Sequence Number=SeqID_78344
atggcgaggcgatgtctagtcagcacggaccagactatgactagaggacctcactcattgatcctcaggctgtatgcaagtggtggaaaagctcatggaaggtacacaatgtttactaacgtcatcgactcgagccaggtgaggggttcagcgtggaggttcatcgagaggcttattaagccgtag

SEQ ID NO: 36566 - DNA, 195 bp, Zea mays
  Peptide Sequence Number=SeqID_78345
atgcaccaggggagtctttgtaaaggctacgtagtgtatcccgagccattcacctcggtagtgaagatcgggtctgtacaacccaggctagaaagggatcacgacttgtggtatttcctcttggaggagtgctcaggaggtgatgctggcaacatggaggactttgaggagttccaggactacgacgagttctag

SEQ ID NO: 36567 - DNA, 567 bp, Zea mays
  Peptide Sequence Number=SeqID_78346
atgactgctgctgggctgccttcgttggacaatgcatcacccagtggccttgctctccacaatggaaacatgctctgcctctgccttgcactggggatgcttgactgctctggttggttgctggggcggggaggcaagtgtcacacccggttttggaaggcaaaccaaatgcgaaccataggttgtacactttacccacaagtcgtgatccctttccagcctgggttgtacagacccgatcttcactaccaaggtgaatggccagggatacactatgtagcctttacaaagactcccctggtgcatagttgctcattaggtttcgctagtcgtacaaacgcagtacacctccccaaggtccttacggagaggtactcaggaaaaaggcctgagccccctaaggttgttgctcagggaggtctccaacaacacactcaggaacctcggactgctcgttgtctaaataaatttgaatcactaaatttgaagttcatatgcgaaagttatgaaataaacaagtttgggaattcaaaatatgaaattagggctaattctgtgaatatttaa

SEQ ID NO: 36568 - DNA, 732 bp, Zea mays
  Peptide Sequence Number=SeqID_78347
atgctggtagactacacaacgatactcgatagaccatgtgtgtcagtcgaaggcctgacgcaacagggtatcgagagcgtcgtggaagtgacaccaacgagcggcgtcactagtgatgggtctagcgatccatccctttggctccggctcctccaagagctccatgctgtggctcgaactgccaccggcgtcgtcatcgtctccgtctctgtcggggtctcctctagcagttgggatgccctagggtggtgcagggggcatctatggctgaggtgcaagggaaggcggcctctcaaactccacctcccgctgaggcgagggggaagagtcctgctgctcctgctcctggcgtcggtgctcatgctccacgtgcaggcgataatgcagtctctccagcatcacctcctgagcattgagtacactggggacaacctggggtgggggtggtgtgtaaagcaaggaggttgtacactttacccacaagtcgtgatccctttccagcctgggttgtacagacccgatcttcactaccaaggtgaatggccagggatacactacgtagcctttacaaagactcccctggtgcatagttgctcgttagttttcgccagtcttacaaacgcagtacacctccccaaggtccttacgaagaggtactcaggaaaaaggcctgagccccctaaggtatcacaagatcatccacataatcaggataacaatgtcgtatcataa

SEQ ID NO: 36569 - DNA, 257 bp, Zea mays
  Peptide Sequence Number=SeqID_78348
ggcgcgagcctgggcggagcggccgtcggtgcagatcttggtggtagtagcaaatattcaaatgagaactttgaaggccgaagaggagaaaggttccatgtgaacggcacttgcacatggccggaggtagggtccagcggccggaagagcaccgcacatcgcgcggtgtccggtgcgcccccggcggcccttgaaaatccggaggaccgaataccgtccacgcccggtcgtactcataaccgcatcaggtctccaag

SEQ ID NO: 36570 - DNA, 234 bp, Zea mays
  Peptide Sequence Number=SeqID_78349
ccggaggtagggtccagcggccggaagagcaccgcacatcgcgcggtgtccggtgcgcccccggcggcccttgaaaatccggaggaccgaataccgtccacgcccggtcgtactcataaccgcatcaggtctccaagtgctctgaatgtcaaagtgaagaaattcaaccaagcgcgggtaaacggcgggagtaactatgactctcttaaggtagccaaatgcctcgtcatctaa

SEQ ID NO: 36571 - DNA, 339 bp, Zea mays
  Peptide Sequence Number=SeqID_78350
gtctcctcggccgagccccgcaccccctcgcggcctagccgtggccggtcagcaccctaccgcgcccagctccagctggcgctgttggctgcctggccggccatgccggaggtagggtccagcggccggaagagcaccgcacatcgcgcggtgtccggtgcgcccccggcggcccttgaaaatccggaggaccgaataccgtccacgcccggtcgtactcataaccgcatcaggtctccaagtgctctgaatgtcaaagtgaagaaattcaaccaagcgcgggtaaacggcgggagtaactatgactctcttaaggtagccaaatgcctcgtcatctaa

SEQ ID NO: 36572 - DNA, 217 bp, Zea mays
  Peptide Sequence Number=SeqID_78351
cggccggaagagcaccgcacatcgcgcggtgtccggtgcgcccccggcggcccttgaaaatccggaggaccgaattccgtccacgcccggtcgtactcataaccgcatcaggtctccaagtgctctgaatgtcaaagtgaagaaattcaaccaagcgcgggtaaacggcgggagtaactatgactctcttaaggtagccaaatgcctcgtcatctaa

SEQ ID NO: 36573 - DNA, 320 bp, Zea mays
  Peptide Sequence Number=SeqID_78352
atcttggtggtagtagcaaatattcaaatgagaactttgaaggccgaagaggagaaaggttccatgtgaacggcacttgcacatggccggaggtagggtccagcggccggaagagcaccgcacatcgcgcggtgtccggtgcgcccccggcggcccttgaaaatccggaggaccgaataccgtccacgcccggtcgtactcataaccgcatcaggtctccaagtgctctgaatgtcaaagtgaagaaattcaaccaagcgcgggtaaacggcgggagtaactatgactctcttaaggtagccaaatgcctcgtcatctaa

SEQ ID NO: 36574 - DNA, 223 bp, Zea mays
  Peptide Sequence Number=SeqID_78353
atcttggtggtagtagcaaatattcaaatgagaactttgaaggccgaagaggagaaaggttccatgtgaacggcacttgcacatggccggaggtagggtccagcggccggaagagcaccgcacatcgcgcggtgtccggtgcgcccccggcggcccttgaaaatccggaggaccgaataccgtccacgcccggtcgtactcataaccgcatcaggtctccaag

SEQ ID NO: 36575 - DNA, 447 bp, Zea mays
  Peptide Sequence Number=SeqID_78354
atgtgcgtggaggggctagacgacgcagcagggacgctcgccttcggagaccacgagaacgacaggcgcgacggtgccgcggtgcgtgatatgccgttgactttttttcccttgcttgctcgtttgccgggggtgaaatttcgtgcctttgctctcgccggcgaccctccgtcctggagttccgtcgtcggccgctcaaccgcgaggagggagatggagagggtttgtgagaacaacttcgtcccgttcatccggtcaggggagtggtctgatattggaggtcgcgattacatggaagatgcccatgtgtgcatctctgatctggcgaagaattttggttctaactcagtggatgatgaagtcatctccttctacggggtgttcgatggccataacggcaaagacgcagcccattatgtccgtgatacttgccacgggtcattgtag

SEQ ID NO: 36576 - DNA, 1518 bp, Zea mays
  Peptide Sequence Number=SeqID_78355
atgggtcacggcggaatccctagcgccggcgagcgatccgccaatctcgggttgacaattgcgcacggaaaagtcatagccatgctcgggagtcctcaacgtgcctcccaagccagtcgttcgtcccaaagcgaggcatgcgccatttatagggtgcccagggcttcaacggaatccgagttggccgacagaacccacggaggcagctacgccaacgcgctagcctcgaagaagctggtggtgtgggacccatgtgtaagtggcagcaatgagccagcgcgcgtgggtgaaggaggatttgggccgaggagaggggagattcggcccaagaggggctcgtccttcgcgcttctttgccggccgttagagagaaagagagagagtgagacaggatcactcggtagtcgggatcgcgcggcgccaccgtaccccgcccgggacatgtgcgtggaggggctagacgacgcagcagggacgctcgccttcggagaccacgagaacgacaggcgcgacggtgccgcgggtgggagtgctggagtaggattttttattcattgcctgcttggaactaataacctgttcgctttaaggatggagagggtttgtgagaacaacttcgtcccgttcatccggtcaggggagtggtctgatattggaggtcgcgattacatggaagatgcccatgtgtgcatctctgatctggcgaagaattttggttctaactcagtggatgatgaagtcatctccttctacggggtgttcgatggccataacggcaaagacgcagcccattatgtccgtgataacttgccacgggtcattgtagaagatgctgattttcctcttgagcttgaaaaggtagtgaagaggtcatttgtgcagactgatagtaagtttgcagagaaattctctcatcacaagggactctgttctggaacgacggcacttacagcaatgatttttggaaggtcccttctggtggccaatgccggtgactgcagagcggtgctatcgcggcgtggcaccgccattgaaatgtccaaggaccacaggccctgctgcatgaacgagagaaagcgcgtggagtcactgggtggctacgtggacgacggctacctaaacggccagctggccgtcaccagagcgctgggcgactggcacctggaggtcatgaaagggacgggccgggcaggagggggaggggcagggggagggcccctgagcgcggagccggagctgaagatggtcacgctgagcaaggacgacgagttcctgatcatcggcagcgacggcgtgtgggactccttctcgagccagaacgccgtggaggtcgtggacgaggcgctgcggcggggcgccagggacaacctgacggcggtgctggtcgcgttccaccgggacgcgcctcccagggcccaggggggccgagcgagcaggagtacgggcagcagggtcgcgccgagcatatcggccgaggggcttcacagcctccgagtgctcctggacgaaggccagtga

SEQ ID NO: 36577 - DNA, 450 bp, Zea mays
  Peptide Sequence Number=SeqID_78356
atgaacgagagaaagcgcgtggagtcactgggtggctacgtggacgacggctacctaaacggccagctggccgtcaccagagcgctgggcgactggcacctggaggtcatgaaagggacgggccgggcaggagggggaggggcagggggagggcccctgagcgcggagccggagctgaagatggtcacgctgagcaaggacgacgagttcctgatcatcggcagcgacggcgtgtgggactccttctcgagccagaacgccgtcgtggacgaggcgctgcggcggggcgccagggacaacctgacggcggtgctggtcgcgttccaccgggacgcgcctcccagggcccaggggggccgagcgagcaggagtacgggcagcagggtcgcgccgagcatatcggccgaggggcttcacagcctccgagtgctcctggacgaaggccagtga

SEQ ID NO: 36578 - DNA, 1008 bp, Zea mays
  Peptide Sequence Number=SeqID_78357
atggagccgacgcacctaccatccgatggcaacaacggccacaccccaaagaaatcaagtgaaagcgctcttatattgattcggcatggtgaatccctgtggaacgagaaaaatctgtttactggctgcgtcgatgtacccctgacaccgaagggtgttgaggaggccattgaggcagtaatttcttctagcatgtgtattaacttgccggagaaatcatgctttgctggtgatatatgtatttacagatcccagttatcacgcataatgagagtgaacaagctcacaagtggagtcagatatacactacaaggccttaataagcaagaaactgtagatcgatttggcaaagaacaagttcatgagtggcgccgcagttatgatattcctccgccaaatggagaaagtctagagaagtgtgctaagagagctgttgcttatttcaaagatcagttgatggaatactgtgaattgttagacaaagcagatgaatgtgaggatccatacatgcatatggtttatgcttctacatgggctgtttcggtatacttcacatatcagcgcacatggaagccttttaattcgatccttggagagacttatgagatggtaagccatcatcccccaatgggtgttgctcactgtgagaatgagcattttacttatgatatcacacctaaggtgaagacaaagttcttgggaaattcattgaaaatctatccagttggaaggactagagtgacacttaaaaaatctggtgtcgtgttggatttggtgccaccactaacaaaggttaacaacctgatatttgggcgtacttgggttgattctcctggagagatggttatgacaaacctgacaaccggagacaaagttgtgttatatttccaaccatgtggctggttcggtttcaacgatgaatctgagacttttattgttcctgtgttgcccactgtggaatcttatgagaaagtaaagcaggaaagggaatcagctgagagatcttga

SEQ ID NO: 36579 - DNA, 516 bp, Zea mays
  Peptide Sequence Number=SeqID_78358
atggctggggctatctctcaccacgcgctagcattttcgcaatcccactggtgcagtgcgaagaactctagattcggaaagaggacgggcaatgctcgcctggtttatctaaaaggaagatgtggttcaggcagcaaaaaactgggtttgatgtgggcctcgagctcgcagtcttctgtcatggagccgaggcacctaccatccgatggcaacagcggccacaccccaaagaaatcaagtgaaagcgctcttatattgattcggcatggtgaatccctgtggaacgagaaaaatctgtttactggctgcgccgatgtacccctgacaccgaagggtgttgaggaggccattgaggcagatgactgcaatgcttgccatgatgcagcatctgcgcaagaaggtatggtgagctacaaggccttaataagcaagaaactgcagatcgatttggcaaagaacaagttcatgagtggcgcaacagttatgatattcctccgccaaatggagaaagtctag

SEQ ID NO: 36580 - DNA, 453 bp, Zea mays
  Peptide Sequence Number=SeqID_78359
atgtggtttaggcagcagaaaactgggtttgatgtggagctttttggaactgagctcttcttctccattcccatccctttctctgacgatgacattgagttggctgggcgctttggaataagccctatcttggctatacctcagttccaaaaagctcgtttgatgtgggcctcgagctcgcagtcttctgtcatggagccgacgcacctaccatccgatggcaacagcggccacaccccaaagaaatcaagtgaaagcgctcttatattgattcggcatggtgaatccctgtggaacgagaaaaatctgtttactggctgcgtcgatgtacccctgacaccgaagggtgttgaggaggccattgaggcagatgaccgcaatgcttgccatgatgcagcatcggcacaagaaggtatggtgagctacaaggccttaataagcaagaaactatag

SEQ ID NO: 36581 - DNA, 636 bp, Zea mays
  Peptide Sequence Number=SeqID_78360
atgtcccagagtcccagcttttatcccctgagcatggaggaggacggcccggactccggcgtctccgtgcgggttgttgcaactgctcacccgcaaattggggacgagactgccaagacggtcccacgcgcaagtgataggcggtccgcgctgatggcacacaaaataaggagatcaactatattctcattgtatacatttttgggtattacaccggccgcgacccgtcttctcatgggcgcttgctggtgtggtttgctgatcaaaatggggatggtggcgggctcgcacaaccgcaacgagttcgtcatgattcgccatgacggcgatgcgctggtcccgtcgcttctgcgtgtctctgctcgtagattttccatgtccatttcagcgatgcttccgttgcgtcgtgctaagcccacaaagtgtgcgaatgggcaggtctgccagatttgtggtgactctataggtgtttcagccactggcgatgtctttgttgcctgcaatgagtgtgccttccatgtctgccgcccatgctatgagtatgagcgcgaggggaaccaatgctgtcctcagtgcaagactagatacaagagacaaaaatgttggtttcctggcaacttctttgagtgtgtgtaa

SEQ ID NO: 36582 - DNA, 312 bp, Zea mays
  Peptide Sequence Number=SeqID_78361
atgcccggatttgcgccctgctcgcccagatccgaccgtgactttgatttcccaaccgacgcaggagcggtgggtctgaccggccgcgacccgtcttctcatgggcgcttgctggtgtggtttgctgatcaaaatggggatggtggcgggctcgcacaaccgcaacaagttcatcatgatccaccattacggcgatgcgccgggcccagggactacaaggacaaggatggtgtcaagggcctgtgcattgtgggcgccatcaacaactgtacctcccagctccccacctatgggagatcttctcctccataa

SEQ ID NO: 36583 - DNA, 366 bp, Zea mays
  Peptide Sequence Number=SeqID_78362
atggcgaatcgccctcccgcccgccctatcgccacacgccgcaatcccgcccgcccgacgcatgccgcacgcccacctagcgccacccggggaaccctgcagccgcccccgaaccagcccaaagcgagaccggaggggcatgagcgccaccgccttttttcccgcccgcccctccccaatttttctcgcattgtcgcccccgtgctcgaattcacgccctgctcgcccagatccgaccgcgactttgatttcccaaccgatgcaggagcggtgggtctgaccggccgcgacctgtcttctcatgggcgcttgctggtgtggtttgctgatcaaaatggggatggtggcgggctcgcacaaccgtaa

SEQ ID NO: 36584 - DNA, 279 bp, Zea mays
  Peptide Sequence Number=SeqID_78363
atggctcgtagaagatcccaaaagaacaagaagacccaggagaacccaactcggaaggaggtggatgatgagctggacggtgtgacggcgccgttgtcgaatgcggtgcccagaacaacccgagagtcgccggcgttggcgacgaccatgaggtccccctatttgaagatggacagcgcgaggtcgaactggcagtcgccaagcttcttttcgtcgtcaatgagcgacgccaacacgagcgcctcctgccagtggtgtttgttcggggtttccaagtaa

SEQ ID NO: 36585 - DNA, 231 bp, Zea mays
  Peptide Sequence Number=SeqID_78364
atggtcgtcgccaacgccgttgactctcgggttgttctgggcaccacatccgacaacggcgccgtcacactgtccagctcatcatccaccttaagctcaacctcccaccccagccaagagtcatcggtactcgccatgtcgtgcgcgttcgacgactactatatcaaggactatggcgtctgttggggcgaaggtgaagacgccacccttcgcttgatgccttcaccgtaa

SEQ ID NO: 36586 - DNA, 231 bp, Zea mays
  Peptide Sequence Number=SeqID_78365
atgggattcgaacctgcaacccctcaagcaaatgtgctcgtggctaccactacaccacatctcaaccaagagtcatcggtactcgccatatcgtgcgcgttcgatgactactatatcaaggactgtgtcgtcatcttggcgccagaggtgtggcacgtgctcttcaatgatgagaccatgcaaatcgtggcatatatcgaagtctacatgatattgatggttgcaatatag

SEQ ID NO: 36587 - DNA, 144 bp, Zea mays
  Peptide Sequence Number=SeqID_78366
atgtcgtgcatgttcgacgactactatatcaaggactatggcgtcatcttggcgccagaggtgtggcacgtgctcttcaatgatgagaccatgcaaatcgtggcatatatcgaagtctgcatcatactgatggttgtaatgtag

SEQ ID NO: 36588 - DNA, 144 bp, Zea mays
  Peptide Sequence Number=SeqID_78367
atgtcgtgcgtgttcgatgactactatatcaaggactatggcgtcatcttggagccagaggtgtggcacgtgctcttcaatgatgagaccatgcaaatcgcggcatatatcgaagtctgcatgatactgatggttgcaacgtag

SEQ ID NO: 36589 - DNA, 144 bp, Zea mays
  Peptide Sequence Number=SeqID_78368
atgtcatgcgcgtccgacgactactatatcaaggactatggcgtcatcttggcgccagaggtgtggcacatgctcttcaatgatgagactatgcaaatcgtggcatatatcgaagtctgcatgatactgattgttgtaatgtag

SEQ ID NO: 36590 - DNA, 144 bp, Zea mays
  Peptide Sequence Number=SeqID_78369
atgtcgtgcgcgttcgacgactactatatcaaggactatggcgtcatcttggcgccagaggtgtggcacgtgctcttcaatgatgagaccacgcaaatcgtggcatatatcgaagtctgcatgatactgatggttgtaatgtag

SEQ ID NO: 36591 - DNA, 144 bp, Zea mays
  Peptide Sequence Number=SeqID_78370
atgtcgtgcgcgttcgacgactactatatcaaggactatggcgtcatcttggcgccagaggtgtggcacgtgctcttcaatgatgagaccatgcaaatcgtggcatatatcgaagtctgcgtgatactgatggttgtaatgtag

SEQ ID NO: 36592 - DNA, 144 bp, Zea mays
  Peptide Sequence Number=SeqID_78371
atgtcgtgcgcgttcgacgactactatatcaaggactatggcgtcatcttggcgccagaggtgtggcacgtgctcttcaatgatgagaccatgcaaatcgtgtcatatatcgaagtctgcatgatactgatggttgtaatgtag

SEQ ID NO: 36593 - DNA, 144 bp, Zea mays
  Peptide Sequence Number=SeqID_78372
atgtcgtgcgcgttcgacgactactatatcaaggactatagcatcatcttggcgccagaggtgtggcatgtgctcttcaatgatgagaccatgcaaatcgtggcatatatcgaagtctgcatgatactgatggttgtaatgtag

SEQ ID NO: 36594 - DNA, 144 bp, Zea mays
  Peptide Sequence Number=SeqID_78373
atgtcgtgcgcgttcgacgactactatatcaaggactatggcgtcatcttggcgctagaggtgtggcacgtgctcttcaatgatgagaccatacaaatcgtggcatatatcgaagtatgcatgatactgatggttgtaatgtag

SEQ ID NO: 36595 - DNA, 144 bp, Zea mays
  Peptide Sequence Number=SeqID_78374
atgtcgtgcgcgttcgacggctactatatcaaggactatggcgtcatcttggcgccagaggtgtggcacgtgttcttcaatgatgataccatgcaaatcgtggcatatatcgaagtctgcatgatactgatggttgtaatgtag

SEQ ID NO: 36596 - DNA, 2193 bp, Zea mays
  Peptide Sequence Number=SeqID_78375
atgtacgaacacctccccgcgttcccgatcgcgccggccgccgtcggcgactgccgcggcatccccttcgacccttcctttctcccgcgcctcctcctctccgccacctcctgcacctcccccttcctcgccgagcgcgcagtctccgccctccacgcgaccggtctcaagctcggcgcgctcccctcctccctcccggcctcgaacgccctcatctccgcctactcccaagcggacctcctcccctccgccctccgcgtcttctccctcctcagccacccctccaccgcctcctacaccaccgtcctctccgcgctctcccgccacggccgtccccacgaggcgatctccctcttcgccacctccgcgtccgcggtcgcccccgacgccgagctcctctcctgcctcgtctcatgctgccgccgcgcgtccgccttactccccgcgcgcgcggcgcacgcctacgggatcaagaacgtggcggcgctggccttctacgcctcggcaggtccggcgctggtcgccttgtacgcgagccgcgggaaggtcggtgcggctaggagggtgtttggctacatggacggcttggacgtggtgtcctggaacgccatgatcggcgggttcgctagtgccgggatggacgaggagtcgtgggcctgcttccgggagatgcactcgagaggtgttcgagggaatgcccgcacagctgtggtggtgctgggatcttgtgacatggagtccggcaggcaggtccatgggactatagtgagtagtcatggtggttcttcaaacgccattttgtggaacgcgttgatgagcatgtattcgcgtgccggctgtgtcactgatgcagagagggtgttcctggagattgtaaagaaggatgttgtgtcatggaatgtgatgatcggagcgtttgcgaagaatggatatggagaaagggcccttgaatttgtggacatggtgttgcagtgtggtatgaagccagactctgtgacattcacggccgttctcatggcatgctgccattgtggcttggttgatgaagggcttgtactattccagcgctttgtgtcagttgttgggctcgttccaactatggagcagtgtgcttgcattgtggacttgcttgcacgtgctgggaggtttctggaggccttggaatttatcggccagatgtcagtgagaccaaatacagttgtctggggtgctttgctgtctgcaagtaagatgcatcacaacgtggaatttgcaaagattgcatttgaacaactggttcaggtggagcctgagaatgctgggaattttgtgacaatgtcaaacatatatgcaaaggctgggatggtagaagatgcaaagagagtgaggatgatgattgatagtgtagaacaacaaaagattgatatggagaaagggctccttgaacttgtagccaatgttagtaacaaatttgttgagttgcggcttgaaaggatggcagacaagaagatcaaagggactgattcatctcgcattatctcttccacaaaatatttgcaaagttcagtagggcctaagctaattgaaggtactaatgaagatgatctcaataacctccagaaaacagtaagtcacagtgccaattttgtggcatcgatgcagcaagaacatcctataagccttgtattgactgaaaacaaaagcaatttgcaagaaattttagttgaacagaagattcctacaggtgtttctattaatctttcaccaaaaatggatagcagtgaagtgccatgcaaggcttatagcagtgaagtagatgatccaaacacaatgaaatcaaacacatctagttgcatgtttgaggcatcaaagcagcaagaatgccctataagcctcagtttgcttgacaagaaacacgatttgcaagaagtttatgttgaacagaatgttccttgtggtgattatgttgccctttcaccaaaagcagacagtagggaattaacatcagccaatgaggttcctgatggttttttaactttctctagaaaggcttatgaatcaaaggaagcccaagatgattatatcacattggaagcttcagaagttacttatgaaacaccacctgccatcatgaaaagggtgaaagaagatagaccactgatcgcctacagatttcataagcgccaaatgagcctaggagacacacggcactga

SEQ ID NO: 36597 - DNA, 765 bp, Zea mays
  Peptide Sequence Number=SeqID_78376
atggcagacaagaagatcaaagggactgattcatctcgcattatctcttccacaaaatatttgcaaagttcagtagggcctaagctaattgaaggtactaatgaagatgatctcaataacctccagaaaacacaagaacatcctataagccttgtattgactgaaaacaaaagcaatttgcaagaaattttagttgaacagaagattcctacaggtgtttctattaatctttcaccaaaaatggatagcagtgaagtgccatgcaaggcttatagcagtgaagtagatgatccaaacacaatgaaatcaaacacatctagttgcatgtttgaggcatcaaagcagcaagaatgccctataagcctcagtttgcttgacaagaaacacgatttgcaagaagtttatgttgaacagaatgttccttgtggtgattatgttgccctttcaccaaaagcagacagtagggaattaacatcagccaatgaggttcctgatggttttttaactttctctagaaaggcttatgaatcaaaggaagcccaagatgattatatcacattggaagcttcagaaggaaagatgctgttggggacctttggcgtccgaaggtcctcaaaaacaggatttaacagtatttctgcagtacaatgtgtgaacaggtatcctcggactaaagtcggcattgcaatagaccggaataatacgaaggttgacacagagccgaaggtgcgagcaggaaagcttcggcgcgacagcaaagagtga

SEQ ID NO: 36598 - DNA, 327 bp, Zea mays
  Peptide Sequence Number=SeqID_78377
atggtgcttcgccccgcgcttgcgtgctcgacggatcacagcagcgagccacgcccttcaacttcgtttcggtctctcgtgtgcgacaacgcattcgtcttcacgccgcatgtgcagcaaccacgacggagatttgatatgaccttcggcgtccgaaggtcctcaaaaacaggatttaacagtattcctgcagtacaatgtgtaaacaggtatcctcggactaaagtcggcattgcagtagaccggaataatacgaaggttgactcagagccgaagggtgcgagcaggaaagcttcggcgcgacagcaaagagtggaaccgacttaa

SEQ ID NO: 36599 - DNA, 432 bp, Zea mays
  Peptide Sequence Number=SeqID_78378
atggtgcttcgccccgcgcttgcgtgctcgacggatcacagcagcgagccacgcccttcaacttcgtttcggtctctcgtgtgcgacaacgcattcgtcttcacgccgcatgtgcagcaaccacgacggagatttgatatgaccttcggcgtccgaaggtcctcaaaaacaggatttaacagtattcctgcagtacaatgtgtaaacaggtatcctcggactaaagtcggcattgcagtagaccggaataatacgaaggttgactcagagccgaaggtgcgagcaggaaagcttcggcgcgacagcaaagagtggaaccgacttaaagatgaaaaggctattcagacctcaatagactactatagagttattatcaaatgtaaagggcatgaatgtaattttgtaagggctgtgtcccgtgtctataaatag

SEQ ID NO: 36600 - DNA, 396 bp, Zea mays
  Peptide Sequence Number=SeqID_78379
atgcagggccgatcgcaatggcctggatcacacgtgggcctccatgttggacgaggccgcgagataagacgacctcatcacaggtcttcgcccggcgacgcgtgggacaaaggcgtccgaaggtcctcaaaaacaggatttaacagcattcctgcagtacaatgtgtaaacaggtatcctcggactaaagtcggcattgcggtggaccggaataatacgaaggttgactcagagccgaaggtgcgagcaggaaagcttcggcgcgacggcaaagagtggaaccgacttaaagatgaaaaggctattcagacctcaatagactactatagagttattatcaaatgtaaagggcatgaatgtaattttgtaagggctgtgtcccgtgtctataaatag

SEQ ID NO: 36601 - DNA, 792 bp, Zea mays
  Peptide Sequence Number=SeqID_78380
atgccgccgcgcacgagaaagactgcgcgcaagtcgaccgggccgtttggtgtgccccggcatcaacttgccccacaacatgaaggtagcagcagtggtagtaacgatccgatcggggatctagaagcacaagttgatcagcttcgagtagaactccgacataggaacgatctttgggttgcggatggcgacagaatcaatgaattgaggacagaaatccgccacctgcaagaccagcttgcggatcaggatctagcgctcgactgggctgtgaactctcgttcactagccttggcaaaggaagctagagctcgagcccgcgaggaagagcttagctcagctgttgataacttgcagcctgcgatctccgtccatccagtcgagaggtcgtgcgcgcgtggatctctgcgtggaagggatgaagattacggcgcacctggtgctgaagccatcgacctctcgagccgggagctcctcgtccggcggcgagtcgggcccggagacggtggtgattcgttgcccgcaccatcgctcaacgcacccagccaggccagcggcagtccgtccagcacgaaggtccactcccacaatagaaatgggctttgtgcggttacattcatggatgatcattatcctgtacggagtgcattttctcttttaaatcagcatacaacatactatgtagttgtagttgcactcaacatagctacaatgttttgtgcactggacattggcaatgccaaaactgtttgctcctccctagatgctattggttgtgttagcttcaaataa

SEQ ID NO: 36602 - DNA, 246 bp, Zea mays
  Peptide Sequence Number=SeqID_78381
atgaagattacggcgctcctggtgctgaagccgtcgacctctggagccgggagctcctcgtccggcggcgagtcgggcccggaggcggtggtgctcgcgaacgcgatagacgtcagccacttcggctacttccagcgcagcgccgcccgcgagttcatcgtcttcgttgcccgcaccgtcgctcagcgcacccagccaggccagcggcagtccgtccagcacgaagagaattcgagcaacgcttga

SEQ ID NO: 36603 - DNA, 402 bp, Zea mays
  Peptide Sequence Number=SeqID_78382
atgcctgcacaggtttcaaatacacgtatattagtctgtgatttggtgctcgcgaacactatggacgtcagccacttcggctacttccagcgcagcgccgcccgcgagttcatcgttttcgttgcccgcaccgtcgctcaacgcacccagccaggccaacggcagtccgtccagcacgaagaatacaaggtccactcccacaatagaaatgggctttgtgcagttgcattcatggatgatcattatcctgtacagagtgcattttctcttctgaatcagagaaaattctctcagctttccttttttggggcatggtttatcattaaaatgttgacaactttatttacaactatggagatgctagataaaaatgtcgacaactttattgctattgtcaagtag

SEQ ID NO: 36604 - DNA, 1050 bp, Zea mays
  Peptide Sequence Number=SeqID_78383
atggccgagctggtgctgggtcgccggagtccgtatgggcggtgtcggggccgagtgcttagcgcaaggtcctttgtgcaagctggccaaagcgggcgcggtctcccgggtttgggccagcttttcctggttgttggaccgcgccagcggtttgggcccaacactatgaatcaacaagaagcccctatgggagttggagagtttctacgagattttggtgttccagtggtcctgtggcgactacttgaagaagtcggatataccgaagcacccaagtaccagtggtcacgcacggttcttagaggacaaccatggtatgaggtagtagtgcgtattccagaacgtgctagaaaaccatcttggccatattggatgttccatgctgaaggaatgactccttgggagggtgctcaggtagctgccttagaggcgctaacaaccatttgttaccagaaatgggaggaaatacaagtcacatctatgaggttgttccctgcagttgccttaagtgatccatttgtgtatcatcaccaggcccgattaatggaaagcattcctattgggcaggattctgttgaatcggcatctgctcgagttttgatggtcgtgctagagttgcaacttactcgagggcacagtcgtcaaaagtggcagcagttgtacactggaagttatgcagcatttaagatgatggaaatggccaagaatagggcttgtacccaggcacaagaacgacttgaggaaacaaaggttcaagcggaacagattattggactagagcatcaggtgacagaacttcagacgcaacaccaagctgatcagaatcgcattaaggagcttgagcatcagctaactaatgctcattctaaatcaaaagttttgagtcagcaacaagaagaaattcgcttgtatgctgttgttgttagagcagaccttaaggaaaccataagcttcataagccatcaggatcaggcgatcaaagaattgaatcgtgctcatccaatggaatttcaagtagcacaacggcttgtcaaccatctgcagcaagca

SEQ ID NO: 36605 - DNA, 222 bp, Zea mays
  Peptide Sequence Number=SeqID_78384
atggggacgagcccggtcaggccgcgcgacgggtgcgggagatcctccacggattccgcggattccgttttgggcggcgagtccgacccgaggaaggagaagatgttcctggtttccgggcccggctgccaccttcagaaatatcgcgccatggatatgggtcagcccctcgccggcgataagaacgccaccgcagcggatggtcgtcggcggctgcggtaa

SEQ ID NO: 36606 - DNA, 240 bp, Zea mays
  Peptide Sequence Number=SeqID_78385
atgaccagagaccttgataccaacatgcgccaagcagcagaatcctgtgtgtacattcacaggaggctctcagtttcgccgcgctttactgtcgggcgtaaaagaccattcgtcaaccaacttcatagagggagggggcctgaaaaggtccagtgcaccatcaagtgcttctcccgctacatgagaaggtccgacttctgtcccgacaagatccgcagggatgttcgggtgcagttgtga

SEQ ID NO: 36607 - DNA, 939 bp, Zea mays
  Peptide Sequence Number=SeqID_78386
atggatatgggtcagcccctcgccggcgataagaacgccaccgcagcggatggtcgtcggcggctgcgtgcgggtgagctcgccagcacgattacagccggtgaagctcatccgattgcggccgagaacgaagaagagagtgaagtgactgaagagaagacaccaccacctttggaatctcagacagagacttggctctacttcgacatctgcgagtccgagcctgactcacctgtaaacgaaggcaagccccggtgtgctgaccgcggaccctttaactggtcacatgcctcgtcatggcatacccttgagagtcttttccttagtcgggtgaggaagcgacaaatttttgttgcttttgctccaaggtggtaccaaatgaggaaaaacaagactgaagtgcgggaggactcggtcctccacttaggatcttttgcttataacctatcgggaggagtttgtgcctcccttggtttgtataatattactactctgcactcacttttagctctgacgggtgaaacgttcctggtaaggaatgatctatgggtcacggatgcagccatccgctacttacaagaccaactcgcgaaacgagatttagcactcgattgggcggttaactctcgtttactcgcctgggctaaggaagccaaagctcgagcccatgtggaggagcttagcttagccatggataacttgcaggtctataatacactacataaagaagttcatgtgttgtattcacaactgcacccgaacatccctgcggatcttgtcgggacagaagtcggaccttctcatgtagcgggagaagcacttgatggtgcactggaccttttcaggccccctccctctatgaagttggttgacgaatggtcttttacgcccgacagtaaagctaccaaaagtaaaaaatggcttaccaagtacccgtga

SEQ ID NO: 36608 - DNA, 1002 bp, Zea mays
  Peptide Sequence Number=SeqID_78387
atgaggacatatggtgtcgcggcacctacaagctgcgcgtcgacttcagccgctcacgccgccagcacaagagatggcctactcgcccttcgctgcctcgaccgcgacgctaggctcttcaagcgctgtcgcgacgagtccgctcccgccgtccctgcctccaattcgactcctacacccactaaagcagccctgcccgcaagaatcacctatccgatactcattccctccttgtcgcccgacgtagcagctcgccgggatgctattgagtcagaggtgctagcactctcagtctgcattcatcttggattatggcttgaggctatgactgttcagtcagcattcacatgcaattggaaattcgtattctgggcgatgcgatcttatgagtatgcgtggttagtgactcatcacaaattgagatggcaggaagcagttgaagcaaaaggattgagagatgatacaacttgcattgtcattgacataatatcaccaaagaaaccaaaacacactatacaatctcaaagaacgccaggaaaaggccttgtgcttctaaaaaatttctttttaaggaaaacaacatctaactcgttgtctctccattataagaataattattctgagccagatttggaggaggtctttgagggtggatgcccatccctatcaaggaggtatcattggaattcagtctttagttcgacaaataacggcttagtagcactagaaaaagagggggtcatgattccacaatctgtgcagtgtgctggttcagggacatggaatcaccaggcggaaaatagcgccgctcgctccgatccgactgtcgtgtcaaccacccagacaaagactgacaacaagtcacgatcaaccaccgagttcggcctcgggcgcaacaggaagctccgcctcgcccgacctcaggctccggcctcgggaggaggtttccgcctcgcccgacctcaggctccggcctcaggaggaggtctccgcctcgcctga

SEQ ID NO: 36609 - DNA, 603 bp, Zea mays
  Peptide Sequence Number=SeqID_78388
atggggaatctcttgcagcctggagctttggaagcagttgaagcaaaaggattgagagatgatacaacttgcattgtcattgacataatatcaccaaagaaaccaaaacacactatacaatctcaaagaacgccaggaaaaggccttgtgcttctaaaaaatttctttttaaggaaaacaacatctaactcgttgtctctccattataagaataattattctgagccagatttggaggaggtctttgagggtggatgcccatccctatcaaggaggtatcattggaattcagtctttagttcgacaaataacggcttagtagcactagaaaaagagggggtcatgattccacaatctgtgcagtgtgctggttcagggacatggaatcaccaggcggaaaatagcgccgctcgctccgatccgactgtcgtgtcaaccacccagacaaagactgacaacaagtcacgatcaaccaccgagttcggcctcgggcgcaacaggaagctccgcctcgcccgacctcaggctccggcctcgggaggaggtttccgcctcgcccgacctcaggctccggcctcaggaggaggtctccgcctcgcctga

SEQ ID NO: 36610 - DNA, 425 bp, Zea mays
  Peptide Sequence Number=SeqID_78389
atgcaggcagcatgcaaccgcaccaggagggcgcaccctttcgacttcgccgcgtctggcatggaggcccaggcccacacgtcatggaccgggaaaggggatatcccgacctcaggctccggcctcaggaggaggtctccgcctcgcctgacccccgaactcggcctcgaccgcggtctcgggaggaatcacgctacaaggagcaagaccggtgtcccatctggcttaccccggcgacgggtaatgatggtgccccgcgtgcgccatgacgccagtggctctcagccccttacgacagcaaggagacgtcagcaggatcctcgccgcgctgccagctgtgctcctacaggactcaggcgctcctccggcggccacgccatcacatgtacagggcccaagctctcccccaacggccacgttggcat

SEQ ID NO: 36611 - DNA, 162 bp, Zea mays
  Peptide Sequence Number=SeqID_78390
atggacattgtcctggccttcagccttcatggtcttagaactgaaccagcatggacaggcaatgaaccagactaccagacgttgaacactaatgtaatttcttgcagattaaaagttggttcaaggttcttgaaaatattaagcctagcaaaacagattcgt

SEQ ID NO: 36612 - DNA, 141 bp, Zea mays
  Peptide Sequence Number=SeqID_78391
atggacattgtcctggccttcagccttcatggtcttagaactgaaccagcatggacaggcaatgaaccagactaccagacgttgaacactaatgtaatttcttgcagattaaaagttggttcaaggttcttgcaatattaa

SEQ ID NO: 36613 - DNA, 141 bp, Zea mays
  Peptide Sequence Number=SeqID_78392
atggacattgtcctggccttcagccttcatggtcttagaactgaaccagcatggacaggcaatgaaccagactaccagacgttgaacactaatgtaatttcttgcagattaaaagttggttcaagtttcctacaatattaa

SEQ ID NO: 36614 - DNA, 756 bp, Zea mays
  Peptide Sequence Number=SeqID_78393
atgaccgtgagctcggctagtataccagttttacactctgcagaggtggtaccctttacccacaagtcatgttacccatctgccaagggatcgcgacttcccatacacctctaccgaggaggcgaggcagggaccgccatcgcagcaaaatcctcccgagggcctccctacactgaccactcccctactgcccttgcccctttcggactcaaactcgccaccttcgggaatttccagggcgactcggctataattcaccggactgtccggtgtacaccggacagtgtccggtgcgccaagggaggtcggcctcaggaactcgccagcttcgggaaaagccaacggctcgtccactataattcaccggactgtccggtgtgcaccggactgtccggtgcgactccagagcaacggctacttcgcgccaacggctacctgctgcggcatttaatgcgcgcacagcgcgcgcaggagtcagaatcgcccatgctggcacaccggacatcaaacagtacctgtccagtgtgcaccggacacccaggcgggcccacaagtcagaagctccaacggtcagaatccaacggcagtgatgacgtggcaggtggcaccggactgtccggctcagttgtagctcgtagtacagtgaacgaaagtgttcctcgcaaaagtgctaaatgtcgacttgcacttttcaggcggcttagcgatctgcgaccttctgggagagctctgccacattcttcaccatcagcgaac

SEQ ID NO: 36615 - DNA, 723 bp, Zea mays
  Peptide Sequence Number=SeqID_78394
atgaccgtgagctcggctagtataccagttttacactctgcagaggtggtaccctttacccacaagtcatgttacccatctgccaagggatcgcgacttcccatacacctctaccgaggaggcgaggcagggaccgccatcgcagcaaaatcctcccgagggcctccctacactgaccactcccctactgcccttgcccctttcggactcaaactcgccaccttcgggaatttccagggcgactcggctataattcaccggactgtccggtgtacaccggacagtgtccggtgcgccaagggaggtcggcctcaggaactcgccagcttcgggaaaagccaacggctcgtccactataattcaccggactgtccggtgtgcaccggactgtccggtgcgactccagagcaacggctacttcgcgccaacggctacctgctgcggcatttaatgcgcgcacagcgcgcgcaggagtcagaatcgcccatgctggcacaccggacatcaaacagtacctgtccagtgtgcaccggacacccaggcgggcccacaagtcagaagctccaacggtcagaatccaacggcagtgatgacgtggcaggtggcaccggactgtccggtgtgcaccggactgtccgcggtaaatcgacctactaccggctggaaaccttcctgttagaaggcagccagggcaacgacctgatggactacagcaaagagcag

SEQ ID NO: 36616 - DNA, 168 bp, Zea mays
  Peptide Sequence Number=SeqID_78395
atggcgaggtgtatgggagtcgcgaccccttggcagatgggtaacatgacttgtgggtacaggcatttgagaacaagtccccaacagggtacaacctctgcagagtgtaaaactggtatactagccgagctcacggtcatgagcagcttaggactctcgcatgattaa

SEQ ID NO: 36617 - DNA, 144 bp, Zea mays
  Peptide Sequence Number=SeqID_78396
atgtctaacttccctaccgtgccggctacccgcctgtggaggtcgtcgacgggaaggggatccgaggacatccgcaaaccctccaactcctccaaggccttcaaaaggctccagcactcctccgacggccacgacatcacatga

SEQ ID NO: 36618 - DNA, 489 bp, Zea mays
  Peptide Sequence Number=SeqID_78397
atgggtcagcgcgagacggagcacgaaggggggaaaggagacaggcaaaaggggaaacccgcggccttcgtgttgtcctgcgcccaggtcaggcgtaaggagaaggtccagagttcgtcgtcttccggagccgaggctgagtccaagccctggggtcgggcgaggcggagtccatcgtccgaggccgagacgggggccgagccctggggtcgggcgaggcggagcttcctatggcgcctggggccggacttggctactgtcagcctcactctgtcgagtggcacaacagtcggagcgacgcaggcggcgctgtcttcttgtcaggccggtcagtggagcggcgaaaccatccttgcattaaatgctcctgcgatatggtcggttggcgtggcgatctggccaaggttgcttctcggcgaagactgggcctcgggcgagccgaagctttgtgctgatgggggttaccagctgagattaggagtcttgggg

SEQ ID NO: 36619 - DNA, 222 bp, Zea mays
  Peptide Sequence Number=SeqID_78398
atgagcgccgcgaggcgactccgcctcgccactgaaggaggattggaagcctggttgccgaagctggcggcgtcggcacggagattgggctgcggagatgggggccacagcagcggctcctccggtcacggcgacgtagggaggcagatctgcagacagataaggattcggaggcgggatcaggagctgaaagaacctgttcgaggtggcctagactcgtag

SEQ ID NO: 36620 - DNA, 1191 bp, Zea mays
  Peptide Sequence Number=SeqID_78399
atggacgcacgtgcgctggcgccctgcaggcacgtgacgccgtggtgtcgcccagctgggccctgggccgtgcaggcgtcggccacctgcgcgcagcagcgggaccgcgtccagctgccggcgccgagagaagttatgggccttgggcccacacctgcctccctacgtcgccgtgaccgggaggagccgctgctgtggcccccatctccgcagcccaatctccgtgccgacgccgccagcttcggcaaccaggcttccaatcctccttcagtggcgaggcggagtcgcctcgcggcgctcatcgggcgcgcggcggggcggcgcggtccctcgatgctggtgcacgagatggcggcgctgcaactgcagcggaggcgcgtggactgggcgcactcccgccccgtcctcgcgctcgacatcgcctggaacgtcgccttcgccgcgacggccgccgccatgctctcgtcctctgccgaggagagccccatcaagccgctccacctgtgggtcttcccctcctccttcagcgacgaggccgagtcgcctcgcggcgcgcggcggggcggcgcggtccctcgatgctggtgcgcgagacggcggcgctgcaactgcagcggaggcgcgcggactgggcgcactcccgccccatcctcgtgctcgacattgcctagaacgtcggggcggcgcggtccctcgatgctggtgcacgagatggcggcgctgcaactgcagcggaggcgcgtggactgggcgcactcccgccccgtcctcgcgctcgacatcgcctggaacgtcgccttcaccgcggcggccgccgccatgctctcgtcctctgccgaggagagccccatcaagccgctccacctgtgggtcttcccctcctccttcagcgacgaggccgagtcgcctcgcggcgcgcggcggggcggcgcggtccctcgatgctggtgcgcgagacggcggcgctgcaactgcagcggaggcgcgcggactgggcgcactcccgccccatcctcgtgctcgacattgcctagaacgtcgccttcgccacggcggccgccgccgtgctcttgtcctctgctgaggagagccccgtcaagccgctctgactgtgggtcgtcggacagctcggacgccgacagcgaagatgacgaaagggcggaagggaggagcaggtgggacacgatctaa

SEQ ID NO: 36621 - DNA, 1173 bp, Zea mays
  Peptide Sequence Number=SeqID_78400
atggcggcgctgcaactgcagcggaggcgcgtggactgggcgcactcccgccccgtcctcgcgctcgacatcgcctggaacgtcgccttcgccgcgacggccgccgccatgctctcgtcctctgccgaggagagccccatcaagccgctccacctgtgggtcttcccctcctccttcagcgacgaggccgagtcgcctcgcggcgcgcggcggggcggcgcggtccctcgatgctggtgcgcgagacggcggcgctgcaactgcagcggaggcgcgcggactgggcgcactcccgccccatcctcgtgctcgacattgcctagaacgtcggggcggcgcggtccctcgatgctggtgcacgagatggcggcgctgcaactgcagcggaggcgcgtggactgggcgcactcccgccccgtcctcgcgctcgacatcgcctggaacgtcgccttcaccgcggcggccgccgccatgctctcgtcctctgccgaggagagccccatcaagccgctccacctgtgggtcttcccctcctccttcagcgacgaggccgagtcgcctcgcggcgcgcggcggggcggcgcggtccctcgatgctggtgcgcgagacggcggcgctgcaactgcagcggaggcgcgcggactgggcgcactcccgccccatcctcgtgctcgacattgcctagaacgtcgccttcgccacggcggccgccgccgtgctcttgtcctctgctgaggagagccccgtcaagccgctctgactgtgggtcgtcgggtacgccacccagtgactggtccacgtcgggctcgtctgcgccgacacccgccgcgagacatggcgcgcccgaagatcggtgtctgatgtcgagtctgccggtgctgggacagacagctcggacgccgacagcgaagatgacgaaagggcggaagggaggagcagctattcttcgatatttggattactctcacagctatacaggtcgttgcgagacgatgaacacgttgatatcatttctgtggtggatcattggattctactggatattctcaggtggggaggtgctcaagcacggcgctccaaggctgtattggtatgccaccttcatttttgttgcatctggattcaccaatgacaacgtgcaattagtttggtttgattataccaaggattga

SEQ ID NO: 36622 - DNA, 753 bp, Zea mays
  Peptide Sequence Number=SeqID_78401
atgtccggtgcacaccggacagtccggtgccatcttctagccgttggctcggccacgtgtcccgcgcagattgcgcggccgaccgttggcccggccgaccgttggctcaccggacagtccggtgcacaccggacagtccggtgcacaccggacagtccgaaatggcccaagggcacatttccctttcaccctctcaacggtgcccggagcgtgagggagctctacgagatcgctagctccaactacgccgggaagccaaccgtccccgtgctgtgggacaagcagctaaagacggtggtgaacaacgagagctccgagatcatccggatgctcaacgctgagttcaacggcatcgccaggaaccccgggctggacctctacccggcccacctccaggcctccatcgacgaggccaacgagctggtctacgacgccatcaacaacgacgtctacaagtgcggcttcgccaagaagaaggacggctgcgtgctcgtgccggatttggggttgctcaccaacatacatgacagggcgcgtgaactcttctactacctcaagggtggacaggtggactatggcgaggagcacatcaaggcttgcgaccacaacagggcactatcctgtctgttacgagcacaacccagtgcattttgtggggcactctgctggcacgtaggttgtgagggtgctgcaacagatgcttgccgacaagctaggctgatcgctgccatggcgatcagctatgaactatga

SEQ ID NO: 36623 - DNA, 363 bp, Zea mays
  Peptide Sequence Number=SeqID_78402
atggcggtggacagtggagatgcggccgaagggaagagtcgagacacggatggaggagtcgttgctcggatggagggggctgcggagccacgcagcgtgaggcaacgcacgaggactgccgggcacacggctttcttggtggactggcgagcggaggaggatgggagagatgagaattgggtggtgggcggctttaatggcggcagaggggaattgccaaggcaggcatggcatacggtgatgggaaggcggggcgtgggagtaacggtggaacagacgatgcagatcgaccgagtagaaacgaacggctcagatcgacgcaaggcagaacaaggtgaggcagcctaccccttaccttcttaa

SEQ ID NO: 36624 - DNA, 1552 bp, Zea mays
  Peptide Sequence Number=SeqID_78403
ggaagacaccgctcctgcgcccaggtcgcgggccgtccgacccaaacccgcggaccgtccgcgccgtcgcagagggcactaccaggcgatccggcgacctgtcgcaggccgccactactgttcaccttgcggagccgaacccaaggtgccaagtaccgccaagcggttcattatagtgtttggtgaccaaaaaggcatcaacatactttttggtgactccgctggggacgaggttgcagatctacaaaatcaggcttacatggccgattctaaagatctcaacagtgcttctccaaacagcgacacaaggctgactaatttatcggccgcagagcatgaaaacttagaagatgacatgaagaagatggatgaggagatccaacgacaacaagatcagatgctcaaggtggcaaaaaagtggtacctctcgcacttcaaggtagatcgccaccagaaggtcgtaaaggagagggaaatggacgccgattacatgtcatccatgctgcaacagctccccacgataggtgatgccaggtcggaccgtccggagcaccagaagtcacttgtgatccgcctaatgcggaaggccgacataaatataaccggccacccaagccccaagaaccaaaaaaggaagacaccgctcctgcgtctaggtcacggaccgtccggcccaaggccgcggaccgtccgcgccgtcgcagagggccctaccaggcgatccggcgacctgtcgcaggccgccactactgttcaccttgcgaagccgaacccaagccaatctgagccgttcgtttctactcggtcgatctgcaccgtccgttccaccgttacccccacgccccgccttggcaattcccctctgccgccgcccgcctcccaattctccgctctcccatcctcctccgctcgccagtccgccaagaaagccgtgtgcccggcagtcctcgtgcgttgcctcacgctgcgcggctccgcagccccctccatccgtgcctctactcttcccttcggccgcatctccactgtccaccgccataacggccttgctaccaaggtagagaagtcacgaaagcagatgaaggaacgtaagaacagggtaacgaaaatccgtggtgtaaagaagacaaaggctggagatgccaagaagaagggaggaagttacttgccttgccatttctctcatcataggctttggcacactacccggtgcctcgccttcctcaagctcaagggcctcgaccacgccatcggcgtcacggtcgtgaagcccatcttcgagcggaccaaggagagcgacgagcatctgggctgggtgttccccgccgccgccgacgaggagcccggcgccgagcccaaccctctcaacgacgcccggagcgtgagggagctctacgagatcgccagctccaactacgccgggaagccaaccatccccgtgctgtgggacaagcagctgaagacggtggtgaacaacgagagctccgagatcatccggatgctcaacgccgagttcaacggcatcgccaggaaccccgggctggacctctga

SEQ ID NO: 36625 - DNA, 1131 bp, Zea mays
  Peptide Sequence Number=SeqID_78404
atggccgccaacgaccacgtcttccgggccaccaacgaggcatccgtcgccctcctgcgcagcctccgcgccggaaccgtcgaccagagattcaaagccttcatccaccacgcggacgtctacaccgctgcccctgaggagctggtcgccggcctggagccggtgccgggcaccaacgtgacggaggacgggtacaacagacagtggtacatatactgtccaaagcgatacaagaacggcgagggaaggaccagcgggcacaggctgcgcgcggtggagaccgccgggacgtgctggcacacggagactggcccgaagcccatgcagggcttgcccggcgccacggtctgcagcctatcctacggccacaaggagaaggaggacgaggggacgtcgggtcggcatcgcttccaccgaatggggtggaggatgttcgagtacgacgacacccagggcggcggcggcgaccacgtgctgtgcaaggtgcaccgttcgtcctcgtctctggccaagaacaagtcgaaggccaagaggacggcgacaggcgatcaccccgaggcgccgccaaccaaggttatccacgacgtgcaggtccagatgcaggaccccgccggcgccatcttcaccggtgcttacccgacgatggatgatcccctgctgatggtcagaggcgaggaggcatcagaggcggagcacggtggtgacttgggcaagttcaacatcggtggcttattgctcaacatcgacaatgtcgattggaaagctttgctagacaatgtcgatggagagcagcagcaacaacaaccatgcgctgagccggccaagcagagcagcgtgcaggtgcaggtggaccccgccgccactttgatgccctccaatgttcatggtcatgaacaaggcagggattccatgatggtcggaggcgaggaaggacagcgtcgacgcattgaggagcaggtcagcgtcgacgacttgctcgacgtcaacaatgtcgattggaaagctttgctagatatgctagaagacgatgaggagcaggggctgccgctgcagcagcagccatgcgctgagccggcggccgagcagagccagagcagcaggatcgaggacccggccgtgccacccgtttga

SEQ ID NO: 36626 - DNA, 471 bp, Zea mays
  Peptide Sequence Number=SeqID_78405
atggggtgtaggggcgacacgcagattcgcgtcatgattgggctagccgataaaccatcacctgcatcgtccccggcgacgagagaacgtacgctagccggccgtcaccacctggagatcggagatcggtggcatatggccgccaacgaccacgtcttccgggccaccaacgaggcatccgtcgccctcctgcgcagcctccgcgccggaaccgtcgaccagagattcaaagccttcatccaccacgcggacgtctacaccgctgcccctgaggagctggtcgccggcctggagccggtgccgggcaccaacgtgacggaggacgggtacaacagacagtggtacatatactgtccaaagcgatacaagaacggcgagggaaggaccagcgggcacaggctgcgcgcggtggagaccgccgggacgtgctggcacacggagactggcccgaagctgccttcggccaagtaa

SEQ ID NO: 36627 - DNA, 1290 bp, Zea mays
  Peptide Sequence Number=SeqID_78406
atgaagcattattcccttgaggataatgaaccttggacgaaggttgacaaaaatacgattacgaagctagccgataaaccatcacctgcatcgtccccggcgacgagagaacgtacgctagccggccgtcaccacctggagatcggagatcggtggcatatggccgccaacgaccacgtcttccgggccaccaacgaggcatccgtcgccctcctgcgcagcctccgcgccggaaccgtcgaccagagattcaaagccttcatccaccacgcggacgtctacaccgctgcccctgaggagctggtcgccggcctggagccggtgccgggcaccaacgtgacggaggacgggtacaacagacagtggtacatatactgtccaaagcgatacaagaacggcgagggaaggaccagcgggcacaggctgcgcgcggtggagaccgccgggacgtgctggcacacggagactggcccgaagcccatgcagggcttgcccggcgccacggtctgcagcctatcctacggccacaaggagaaggaggacgaggggacgtcgggtcggcatcgcttccaccgaatggggtggaggatgttcgagtacgacgacacccagggcggcggcggcgaccacgtgctgtgcaaggtgcaccgttcgtcctcgtctctggccaagaacaagtcgaaggccaagaggacggcgacaggcgatcaccccgaggcgccgccaaccaaggttatccacgacgtgcaggtccagatgcaggaccccgccggcgccatcttcaccggtgcttacccgacgatggatgatcccctgctgatggtcagaggcgaggaggcatcagaggcggagcacggtggtgacttgggcaagttcaacatcggtggcttattgctcaacatcgacaatgtcgattggaaagctttgctagacaatgtcgatggagagcagcagcaacaacaaccatgcgctgagccggccaagcagagcagcgtgcaggtgcaggtggaccccgccgccactttgatgccctccaatgttcatggtcatgaacaaggcagggattccatgatggtcggaggcgaggaaggacagcgtcgacgcattgaggagcaggtcagcgtcgacgacttgctcgacgtcaacaatgtcgattggaaagctttgctagatatgctagaagacgatgaggagcaggggctgccgctgcagcagcagccatgcgctgagccggcggccgagcagagccagagcagcaggatcgaggacccggccgtgccacccgtttga

SEQ ID NO: 36628 - DNA, 495 bp, Zea mays
  Peptide Sequence Number=SeqID_78407
atggcccggcacgggacccgctcaaacgaaggcccaggaccgcccccaccaccgaatttcctgcccgataatgtgccggcagtagtcgagcgtaaggagaggatccaggtgtacaatgggggtgtagcagagtgctacgtgtctagcggggggagagctagcgccctaagtacatgccaatgtggcagccggagagatcttggcaccctgctggtcgggcgacgtggaggctcctctgaagccgaggtcgagtctgtcttccatggccgaggccgagcccgagcccctgggtcgggcgaggcggaggttgttcggcagaggctagggcggagtccgagccctggggtcgggcgaagcggagttcgtcgtcttctggggctgagcccgagtccgagccctaggtcgggcggagcggagttcgccgtcttccggggcctagcccgagtccaagccctaggtcgggcggagcggagttcgccgtcttccggggcttag

SEQ ID NO: 36629 - DNA, 213 bp, Zea mays
  Peptide Sequence Number=SeqID_78408
atgaagctgtggaaggagacttccaggagttccaagactacgacgagttctaggtgtgggttagcggcaacccccagtcggctgcctatgaaggctgcgtttatctacgtttcttttccgcactttgatttattgcgtaaggagaggatccaggtgtacaatgggggtgtagcggagtgctacgtgtctagcgggggagagatagcgccctaa

SEQ ID NO: 36630 - DNA, 1494 bp, Zea mays
  Peptide Sequence Number=SeqID_78409
atgtggcgtctctcgagtgtccgctatccgggcaacggatcgtcctcccgccacggtgaagagtccggtacttcctttcccctttccctggcgattccgttcctcagtgcagtgccgttgtcgcgctgcgctttgtcggaggcggcgaccaagctaggatccaagcggccatgggtgggcgggtcctgcagtggaccgctccatgcgcttggaaggaaggaggagggcggcgtcgagagcccgatcgaggtcgttcgaggcaccgcagcagtccctcgccggagactcgccatcaccaaacgacttcgacgtcagctgccttcgttcaagattggtgccgaaaaaaggaagcgcaaccgtcgcacaatgacatcagactggaaccatctgatgccaaagtatggcagcttcctcagccaagcagatcttgataatttggaccccgaccactttggtaataacctgcagttggatggaaacgcagagggatctaccccaccatcttcagtgaagaaggcaactcaaccaactaagctagcaaacttcttctcagaagatgatatgaggctttgtcatgcttggcttgcagtcagttgtgacccgatagttagcacaggccagaagcgtcaaggtttctggaatcgaattactgaggcttacaactcgagacatggaactatgccagaaaggactactaaatctttgatgagtaggtgggacagcatcaaaacacagtgttcaatcttctctgggtacatgactgttgtccttcgacaaaaccccagtggcctctctgatgcaacaaggatgaatcgaaatggatggaccatcacatgggtcagcaaaatcagagatctaacccagtttcaaatcaatcccacactgtcgacgttgatgcattcgtccaaggaaaaggcaaagaaggcccgatctgtggacacatcgtccacggattcaaagtacctgacccggatgggtgaactttcattggaacatttgtctgtttacaaatcagtagcctcaactaaggaaaggaagttggagtccatgaacagagtaaacaggcagaaactgatcctagagaagaagctgaaccttgagaaagtgaagatagatcggcaaaaactaaaggaggacaaggaagaggaggtaatgatcccaaacatggatctaatcttcaatgtttcctctatgtacaggggtaaacgaacagaggacgatcttcaagtgctggaccggatccggagggcggacgtgggccggaccgcccgagttggccgcctcgtcctcggcggcggggcagacgtggaacagggcgttgggctggtagcggcggggacagagcttggctgggcgttctccagacgctccggcaactcggcggccgcggacagggctggggcacggagcgacggagctgggcagaggatccaggtgtacaatgggggtgtagcagagtgctacgtgtctagcgggggagagctagcgccctaa

SEQ ID NO: 36631 - DNA, 1047 bp, Zea mays
  Peptide Sequence Number=SeqID_78410
atgaagaacgtagaccgaccaccttccaatccaaaacggatcataatccagtctactcaggagtgcttcagcgttgacataccccgtgctccggcggggactgttagacccgaaacaaggcatgctgctgatgaggatgatgactttatgccattatccaagaagcgtaacttggacgacagccctgggaaagttttgaagaaggtagtcactaataggaggaaagcagtgcccccaccccgacagcagaggctgaacgtcagatgcaacccccaagatgtgttagtaagcatacagatattaaatgacagacagcaacaagcaattgcacgtaggggattttctagtattcttgatatgagactggacgcactcggcagcagatcacacttagcttggctgatggaaaagctcgaccacaatgacatgacaattcgagctggccctggaaaggagctgaaaattacaaaggatacggtgcacctaattttgggtttaccgaatgctgggggaggaactgcattgggcatcgatgaagctgttgttgccaacaatttgagagctgaacttggtctatcgaaagaagattttggggttacagctctacaagatcgtttgaggaaaggttctgacgatgatttaagcatcagatgctttttcttgatattgttcaataggttgttgttccctactgccagctggggaataacgaaccatgaggttcttttaaccgagcagatggatcgtttccaccagattgactggtgccagctcattttcaatgatttatgccaagctgccaagaagtggcataataggagcgttacgaacgtttctacaaccatctatggatgttccatcgttattcttaatttcaacataatattcagtgatatgctatatatttacttaataattttcaatttacaacaacataagaccaggaccaacacttttgatgttcctcgtcctgacccatctggacagcactcaattcacatcgaactcccgctcatcagggatttgatatcaagcaagctgaattag

SEQ ID NO: 36632 - DNA, 1026 bp, Zea mays
  Peptide Sequence Number=SeqID_78411
atgaagaacgtagaccgaccaccttccaatccaaaacggatcataatccagtctactcaggagtgcttcagcgttgacataccccgtgctccggcggggactgttagacccgaaacaaggcatgctgctgatgaggatgatgactttatgccattatccaagaagcgtaacttggacgacagccctgggaaagttttgaagaaggtagtcactaagcggaggaaagcagtgcccccaccccgacagcagaggctgaacgtcagatgcaacccccaagatgtgttagtaagcatacagatattaaatgacagacagcaacaagcaattgcacgtaggggattttctagtattcttgatatgagactggacgcactcggcagcagatcacacttagcttggctgatggaaaagctcgaccacaatgacatgacaattcgagctggccctggaaaggagctgaaaattacaaaggatacggtgcacctaattttgggtttaccgaatgctgggggaggaactgcattgggcatcgatgaagctgttgttgccaacaatttgagagctgaacttggtctatcgaaagaagactttggggttacagctctacaagatcgtttgaggaaaggttctgacgatgatttaagcatcagatgctttttcttgatattgttcaataggttgttgttccctactgccagctggggaataacgaaccatgaggttcttttaaccgagcagatggatcgtttccaccagattgactggtgccagcttattttcaatgatttatgccaagctgccaagaagtggcataataggagcgttacgaacgtttctacaaccatctatggatgttccatcgttattcttctgtattatttggatcctttgcatgactcagcggcaccccagaacaaacgtggaacaccacgaatcaaatactttgataggaatattattcaagccctgacaagagctgacaagggcaagatacgcaaaggagaagaagcatttggacattgctcg

SEQ ID NO: 36633 - DNA, 697 bp, Zea mays
  Peptide Sequence Number=SeqID_78412
cataagaccaggacaaacacttttgatgtacctcgtcctgacccatctggacagcacacaattcacatcgaactcccgctcatcagggattttgatatcaagcaagctgaatcagcttccatcctgccaccgcctgggtttcatagagaagttgtcacattttgatacggaggttggtaaggcgtgttcagttattaaacagactcttcagcagattgttgagaaacaatacaatctatctgatgtttttggcgagttaattgatgaggtcctccgtgctgagtcgggggacaatgaagatggttatgatgtgcagaaaacaaattcaaaatcagatgatattcttccccagacagcagaaggatgtacgtgtccggcccccccaactgtacccgatatgtctactccattttcccagcaggatacgcagtttaaagacacacagggtaaacatggtgacggtggcaagaacatgccgaccaacacaaacgtcactcctaaagcaacaccacatatggaacctgacgcaccgatatttgatgcgactccgcaaatcaagtctactggcggcgtccaacaagcggcagaaacagacctgcccgacagtggtccatgctttgatcagactccatctgaacatgtttctgttgaactgatccagctacaaacactccacagatcatggttcccatggtaa

SEQ ID NO: 36634 - DNA, 294 bp, Zea mays
  Peptide Sequence Number=SeqID_78413
atggcgggcgaggccggggcgggtgggagcaggtctgctagagctgcagagaacgtcaaggacccatatgtccagggtgtcggcgaatgggctgtcaaggagcacaacaggcagaccggcgagagcttgcagttcgccgaggtggtcagtggcatggaacaggtggtcgccggcaccaactacaagctcaacctcgcaaccaaagatccaacatcgtcttaccaagcagttgtgtttgatccgttgccaaactccaccaaaaaacgccagctcatgtccttcaagtctatttga

SEQ ID NO: 36635 - DNA, 555 bp, Zea mays
  Peptide Sequence Number=SeqID_78414
atggcctacgtcacgggcaataagccatgtggtcgcattagaccctcggccgagcggcagcggaggggccatgtgccttctgggcccgatggcgttgtctccgagaacgccaccttaactgctcacgagatacccctggggttgttctccgcgcagctaagggtagccgcgcaggcatcgtgccttcataccgtagtaaggggtacccctaatccagggagatgcaactcctacaaagggcaccatgttaataatgaattaattggggttcaaacagtgaaggttatcgccatctggaggtctgctagagctgcaggtgtcaccacgctgagcggacagtatgtcaaaatagagaacgtcaaggacccatatgtccagggtgtcggcgaatgggctgtcaaggagcacaacaggcagactggcgagagcttggagttcgccgaggtggtcagtggcatggaacaggtggtcgccggcaccaactacaagctcaacctcgcaaccaaagatccaacgtcgtcttaccaagcagtcttaccaagcagttgtgtttga

SEQ ID NO: 36636 - DNA, 549 bp, Zea mays
  Peptide Sequence Number=SeqID_78415
atgccgtgggggcacatcgcctgtcagaagggtgggaaggcggcgtgtcctctccgcaataaatgcggaggccgcgcggcccagagcccttacgtcatgctccgcccgctggcctacgtcatggacaataagccatgtggcagcattagacccttgactgggtggggagcggaggcgctccggatagagcctggacacgcgtcaataccggacctatgcctaggtcacggtacttcctctcccgggaccttgttatgggtggtctggagctcacttggtggggtccggaccctatccaacggctccaggctgctttacttctggggtccgggttgtgcgcccaggggtcatgtgtcttctgggcccgatggcgttgtctccgagaacgccacctcaaccgctcacgagatactcctggttactgtcggcccgcctatggtcacgccgactgccacgcctgcccccgcggctgactggcccgtgacctccgtacttaatgtctttgttgggccatgcgcggggtgcctcgagttgctacgtcgattttga

SEQ ID NO: 36637 - DNA, 486 bp, Zea mays
  Peptide Sequence Number=SeqID_78416
atgaaggccaagtcacaccatcaaccaaatcaaggaggtacctgcaaaaattgtgccacaagcaaggctgagtatactaatactcagctagacttacccggttacaatggatcaagcagtctcattagctgcgagaagcagacgattcgaatcgagtttttaaaccttgcaaggcctcaccgccttggcatacaatgctccactgaccccggccaccgccgtgcagtggccgcacttgtacccaccatatctagaatgggagacccagtctcaggtcgcgtgagggataaagtccgcgcccggcttcactcaggtatccgcacgttaatccttattccaattttgtctcatagacaacgcatccccatggatccgtgtccacagaccatcatcattctattatcaaaatggatacaagcaattcctgacctcgcgcgagtgctagaaaaatcactcgacttctaccgagattctgatttagcatag

SEQ ID NO: 36638 - DNA, 282 bp, Zea mays
  Peptide Sequence Number=SeqID_78417
atgaaggccaagtcacaccatcaaccaaatcaaggaggtacctgcaaaaattatgccacaagcaaggctgagtatactaatactcagctagacttacccggttacaatggatcaagcagtctcattagctgcgagaagcagacgattcgaatcgagtttttaaccttgcaaggcctcaccgccttggcatacaatactccactgaccccggccgccgccgtgcagtggccgcacttgtacccaccatatctagaatgggagacccagtctcaggtcgcgtga

SEQ ID NO: 36639 - DNA, 285 bp, Zea mays
  Peptide Sequence Number=SeqID_78418
atgaaggccaagtcacatcatcaaccaaatcaaggaggtacctgcaaaaattatgccacaagcaaggctgagtatactaatactcagctagacttacccggttacaatggatcaagcagtctcattagctgcgagaagcagacgattcgaatcgagttttatccttgcaaggacgagtgccctagtggccagggtgtcacgctccacaagatcgcgacagccataggaggtggtgtatcggttgctaaggcgcagcgtctttggaaggctgtagtcgggccgtga

SEQ ID NO: 36640 - DNA, 288 bp, Zea mays
  Peptide Sequence Number=SeqID_78419
atggtgccgacttctaaggcgtgggacaagattaaaaagaccaatccccaaccgagatgcaggagcgcaaatggagggatgaaggccaagtcacaccatcaaccaaatcaaggaggtacctgcaaaaattatgccacaagcaaggctgagtatactaatactcagctagacttacccggcctcaccgccttggcatacaatgctccactgaccccggccgccgccgtgcagtggccgcacttgtacccaccatatctagaatgggagacccagtctcaggtcgcgtga

SEQ ID NO: 36641 - DNA, 180 bp, Zea mays
  Peptide Sequence Number=SeqID_78420
atggtgccgacttctaaggcgtgggacaagattaaaaagaccaatccccaaccgagatgcaggagcgcaaatggaggctcgacgtgtcgagactggatgccagcatacctaaaagagttgggaacggcccctaggaggcggcctcgactaggacctggacctgaacacagcttcggctag

SEQ ID NO: 36642 - DNA, 186 bp, Zea mays
  Peptide Sequence Number=SeqID_78421
atggtgccgacttctaaggcgtgggacaagattaaaaagaccaatccccaaccgagatgcaggagcgcaaatggaggcctcaccgccttggcatacaatgctccactgaccccggccgccgccgtgcagtggccgcacttgtacccaccatatctagaatgggagacccagtctcaggtcgcgtga

SEQ ID NO: 36643 - DNA, 390 bp, Zea mays
  Peptide Sequence Number=SeqID_78422
atgcaggccaagatgcaggtcatcggcaagtccatgcagtccatcgtcaagtcactcaactccatgctcgccactaggaacctccagaagatgttcgagaccatggacaatttcgaacgccagtttgtcaacatggaggtcgcggacgactacgggctagaggtcttcgttggtctgccacaagccaccgcgcacgccatccctgctgccaaggataaggagaaggtcgatgagtatgatctctctcgccgcctcgccgagcttaaggcccacgactgggaggggctttcagtcttctcaggtgatgatagattcatcctagcccctgcacacttagcatgtgctttgttgtggctgccttctaatgttgttgaagaactgctagtgtga

SEQ ID NO: 36644 - DNA, 394 bp, Zea mays
  Peptide Sequence Number=SeqID_78423
atgcaggtcatcggcaagtccatgcagtccatcgttaagtcactcaactccatgctcgccactaggaacctccagaagatgttcgagaccatggacaatttcgaacgccagtttgtcaacatggaggtcgcggacgactacgggctagaggtcttcgttggtctgccacaagccaccacgcacgccatccctgctgccaaggataaggagaaggtctatgagtatgatctctcttgccgcctcgccgagcttaaggtctacgactgggaggggctttcagtcttctcagggaagggtggacttgccttcatcgaagctttcctggcacagaagatctacttccggaagttcgggctccggcccttcttccagggctacgggttccggatctgcg

SEQ ID NO: 36645 - DNA, 597 bp, Zea mays
  Peptide Sequence Number=SeqID_78424
atgcaggtcatcggcaagtccatgcagtccatcgttaagtcactcaactccatgctcgccactaggaacctccagaagatgttcgagaccatggacaatttcgaacgccagtttgtcaacatggaggtcgcggacgactacgggctagaggtcttcgttggtctgccacaagccaccacgcacgccatccctgctgccaaggataaggagaaggtctatgagtatgatctctcttgccgcctcgccgagcttaaggtctacgactgggaggggctttcagtcttctcagggaagggtggacttgccttcatcgaagctttcctggcacagaagatctacttccggaagttcgggctccggcccttcttccagggctacgggttccggatctgcgaggctgacgattctaagggtaggctcaattcggtcggagggggttgggagggggctgtccacggggaggtggcggagttccgcggcggggatcaccgccggtgggctctaggtgagggactggggctgggaagtggtgcttcgggttcgcggcctcgtgagggagctgctcggctcactcaatttctcgctggaccaacgtag

SEQ ID NO: 36646 - DNA, 132 bp, Zea mays
  Peptide Sequence Number=SeqID_78425
atggccagggttcgtggagattgtctcggccgtgttgtgcccgttccttgttcctcacaggggtactacaccaaagtattagagctatatctaaggaataactttggtaatggttccatagcaaagttgtag

SEQ ID NO: 36647 - DNA, 465 bp, Zea mays
  Peptide Sequence Number=SeqID_78426
atggccagggttcgtggagattgtctcggccgtgttgtgcccgttccttgttcctcacaggggtactacaccaaagtattagagctatatctaaggaataactttggtaataaattcccagaagaagatgataaaattcaagaagtcgtttctgaagaggagtctgcttcagtgcctgctcatcaagcctgtatgatcaaggactatcttaactggccacatgccctggatatgggacagggtaagcttgaacctggctattccatacatgaaaagacaatcgcgcactgggagtggagagatggcgagagtggcacgtaccctcctggcaaaggaccgcctaaaaggggtggtgcgctctcgggtggcgcggacctgttcatgcagtggaggatccgtgggaacggtagacatatgcaagggttaagcgctacatatgtcgtgtggttagagatcctcagctga

SEQ ID NO: 36648 - DNA, 465 bp, Zea mays
  Peptide Sequence Number=SeqID_78427
atggccagggttcgtggagattgtctcggccgtgttgtgcccgttccttgttcctcacaggggtactacaccaaagtattagagctatatctaaggaataactttggtaataaattcccagaagaagatgataaaattcaagaagtcgtttctgaagaggagtctgcttcagtgcctgctcatcaagcctgtatgatcaaggactatcttaactggccacatgccctggatatgggacagggtaagcttgaacctggctattccatacatgaaaagacaatcgcgcactgggagtggagagatggcgagagtggcacgtaccctcctggcaaaggaccgcctaaaaggggtggtgctctctcgggtggcgcggacctgttcatgcagtggaggatccgtgggaacggtagacatatgcaagggttaagcgctacatatgtcgtgtggttagagatcctcagctga

SEQ ID NO: 36649 - DNA, 531 bp, Zea mays
  Peptide Sequence Number=SeqID_78428
atgcagcctcccgaccatcaagtcacatgggatgaatttaagttggcattttgggagcactacattccagaaggagtgctccatatgaagcaagaagaattcatgaagcttaagcaaggtgcagtatctcaacaagttcaatcatttgtcccaaagatggccacctgcctcgacctctcctatagcagggatgtcagcacagcgctggcagttgaagccaagtatgcaggccctgggaagtcaaagggctttggaggtgacaggtccaaccagggacctgaaaagcgacaaagcctgtattcatccgtcctgccactgcctccacttcaacaacttagtcgagtgcccctggtactcgtttccccgcactcccgagttcaacaactggctgcttcaattgtgggaagtctggacacttcatcaaagactgcccgtatccgaggcgtaacaactctaataatcagcaaaaccctgggagttcaggccaaggcaagggaaacacgacaaataatgcaacaggaaaaaatatga

SEQ ID NO: 36650 - DNA, 255 bp, Zea mays
  Peptide Sequence Number=SeqID_78429
atggtgttggtcgccgaaagagaggcacaagaagggaaagaacctggaagtctaggagcagctacagagacccggattgtccagaagccggtctactatgtcagcgaggtcctccatgaagcaaaggcactacaagaaatttgtccttttatgacaaaatacctaatgacaaggaactgtgccattggcgtcgatctggaggtgccgatcgatgatttgtccgggttgctgttgataatgtgcccagattgcaag

SEQ ID NO: 36651 - DNA, 363 bp, Zea mays
  Peptide Sequence Number=SeqID_78430
atggtgttggtcgccgaaagagaggcacaagaagggaaagaacctggaagtctaggagcagctacagagacccggattgtccagaagccggtctactatgtcagcgaggtcctccatgaagcaaaggcactacaagaaatttgtccttttatgacaaaatacctaatgacaaggaactgtgccattggcgtcgatctggaggtgccgatcgatgatgtgaccgggttgctgttgataatgtgcccagattgcaaggatgtgagggtgtttgctgctaataccacgtactccaataacgttggaaagagatttttcaagtgtcctaggaagaaccgtagaaatgtcagtgaagtggttgaataa

SEQ ID NO: 36652 - DNA, 603 bp, Zea mays
  Peptide Sequence Number=SeqID_78431
atggtgttggtcgccgaaagagaggcacaagaagggaaagaacctggaagtctaggagcagctacagagacccggattgtccagaagccggtctactatgtcagcgaggtcctccatgaagcaaaggcactacaagaaatttgtccttttatgacaaaatacctaatgacaaggaactgtgccattggcgtcgatctggaggtgccgatcgatgatgtgaccgggttgctgttgataatgtgcccagattgcaaggatgtgagggtgtttgctgctaataccacgtactccaataacgttggaaagagatttttcaagtgtcctaggaagaaccgtagaaatgggacatgtgataggttttggttcgaggaagaatatttggtattccttcaggataatggatatctaccgtcagcatcctccaccattacagcaagttcgacaaccaaggttcctgagcttttgggaaaaattgacagcttagagcaaaatctgaacaaggtgacgaaaatggaaatatgggccttcgtgctcttggacacctcttgtgtaatctgtgtctttgtgatgtatgttggaaataaagatatctattgcttatga

SEQ ID NO: 36653 - DNA, 870 bp, Zea mays
  Peptide Sequence Number=SeqID_78432
atgactctcgacgtcaagctcatcctcgacgagttcaacaggaggttcgacgagtgggagactcgctgggatcgacgcttctcgtctgccgcgtacatcgaccaaccgcccaccccgcccagcgtcaaccacccctccgacgcatctgcccgcgcgccgcccacccgggctgcggccgttggggccgtcgtcaccgccgacaactggggcggatgcttcgatgacggcgagctgtactgcgcagcgccatccgtcatcgccgacgactggggaggattatttgatggcgaggtcgcgactgtcaacaccgagttcgccgaccaccggtacggcccatcctccaccgaccccgacgcaccgcacgatgcggacgccgacagcttcttcatcaacaccggcgaagggccggtagagccaatttttggcgatacggccgtaggcgcgttcggtgacgtgggtgctgtcccagatctagtggcggaggaggaggtacctgtcgacacgcccaccaagtgtttgatgagagtcctcaatcgcggcgactactatggcgcagacgcttcctccgccgtcgacgcggcggtggtgctgctcgccgaagcgggctgcacgctcctcatcccgccgcaccacccctcggtccccgccccgtgcctcctcgagggcctcgccgccttcgcggcctcctcgcctgcgcggctccaccagatgcttctcccgacggccctgcacatgcccgagcctcgctcgtgcactcctctcctttcccgcgctccactgctcactcgagcactcacagagacggttctcgtttatcctcctcaacggatgtttgaagaattcagtgataaggaattaacccagttttga

SEQ ID NO: 36654 - DNA, 894 bp, Zea mays
  Peptide Sequence Number=SeqID_78433
atgactctcgacgtcaagctcatcctcgacgagttcaacaggaggttcgacgagtgggagactcgctgggatcgacgcttctcgtctgccgcgtacatcgaccaaccgcccaccccgcccagcgtcaaccacccctccgacgcatctgcccgcgcgccgcccacccgggctgcggccgttggggccgtcgtcaccgccgacaactggggcggatgcttcgatgacggcgagctgtactgcgcagcgccatccgtcatcgccgacgactggggaggattatttgatggcgaggtcgcgactgtcaacaccgagttcgccgaccaccggtacggcccatcctccaccgaccccgacgcaccgcacgatgcggacgccgacagcttcttcatcaacaccggcgaagggccggtagagccaatttttggcgatacggccgtaggcgcgttcggtgacgtgggtgctgtcccagatctagtggcggaggaggaggtacctgtcgacacgcccaccaagtgtttgatgagagtcctcaatcgcggcgactactatggcgcagacgcttcctccgccgtcgacgcggcggtggtgctgctcgccgaagcgggctgcacgctcctcatcccgccgcaccacccctcggtccccgccccgtgcctcctcgagggcctcgccgccttcgcggcctcctcgcctgcgcggctccaccagatgcttctcccgacggccctgcacatgccgagcctcgctcgtgcactcctctcctttcccgcgctccactgctcactcgagcactcacagagacggtacaaggttctcgtttatcctcctcaacggatgtttgaagaattcagtgataaggttctacatcggcttgggggcaagccgaagctttaa

SEQ ID NO: 36655 - DNA, 1605 bp, Zea mays
  Peptide Sequence Number=SeqID_78434
atgactctcgacgtcaagctcatcctcgacgagttcaacaggaggttcgacgagtgggagactcgctgggatcgacgcttctcgtctgccgcgtacatcgaccaaccgcccaccccgcccagcgtcaaccacccctccgacgcatctgcccgcgcgccgcccacccgggctgcggccgttggggccgtcgtcaccgccgacaactggggcggatgcttcgatgacggcgagctgtactgcgcagcgccatccgtcatcgccgacgactggggaggattatttgatggcgaggtcgcgactgtcaacaccgagttcgccgaccaccggtacggcccatcctccaccgaccccgacgcaccgcacgatgcggacgccgacagcttcttcatcaacaccggcgaagggccggtagagccaatttttggcgatacggccgtaggcgcgttcggtgacgtgggtgctgtcccagatctagtggcggaggaggaggtacctgtcgacacgcccaccaagtgtttgatgagagtcctcaatcgcggcgactactatggcgcagacgcttcctccgccgtcgacgcggcggtggtgctgctcgccgaagcgggctgcacgctcctcatcccgccgcaccacccctcggtccccgccccgtgcctcctcgagggcctcgccgccttcgcggcctcctcgcctgcgcggctccaccagatgcttctcccgacggccctgcacatgccgagcctcgctcgtgcactcctctcctttcccgcgctccactgctcactcgagcactcacagagacgactgcatggtggggttgattggatttcttcttatggtggatatatgcatgtcaatggtgacaacattctacatcaagaattgggggtggttaatcaatgctcctataattgggctgttgggaaaatttctggagttactggattctacaaacagcataacgaaggattaccttgtggggctgcatcactgcacacttcttggctcatgcagcaaaaaccattcacatcccttcagcaaattgaggagggcattctggtgcagatggcgcaagaagtacagtgcatgaattggcaggttctcgtttatcctcctcaacggatgtttgaagaattcagtgataagttatcattgaacaaagatggaggtgcaggaaagaatttgtatattattaagacagttttattccagctagaagtgcttctacatataacagttttttgtgaggtttcggcggtcagcaataagttcatcaccttcccttggaatcctggtgtttcaaaggttctacatcggcttgggggcaagccgaagcttaagaaggagttagccaccaacatagaaaggcatttactaccagaaatgctagaagtggccaatggctatatttttcatgagcttcatctgacgcttgcctctattggagtgacacatatgatcagttgtggtaaatatttgatatggatcattggcttgctaactccatgggatccgggcagagtggtcttaaacctcaagttcgtgatgctttggcttgagggcaagccaaatcttaagaaggggggaatgtcaggcatccagtga

SEQ ID NO: 36656 - DNA, 423 bp, Zea mays
  Peptide Sequence Number=SeqID_78435
atggaatgccgcctccaccacctcgcgctgctgctcggcctcctcgtctgggcggcggcggccgccacgggaggcggggcgcagccggtgtgcgagccctccatcatcgccacccagatcgcgctcttctgcatgccggacatgcccacagcgccctgctgtgagccgatcatcgcttccatcgacctcggcggcggcgtcccctgcctatgccgcgtcgccgcccagccgcagctcgtcctcgcccgcctcaacgccacccaccacctcgcgctctacgcctcctgcggaggacaacacactatgggcgcccacctcgccgccgcctgccaacaagatttggttcttagctttttgcgttcgtctttgcttgatggtgtttcgttgcgagtttccgaaacgtttatgctgttctccttttga

SEQ ID NO: 36657 - DNA, 2322 bp, Zea mays
  Peptide Sequence Number=SeqID_78436
atgaactcaggatccaggaagataacaagagattcacaggaacagaggaagcagaggtttgagacgacgaagaagcctgtacccgtcactggatgcctgacaccctcccccccccccccagcattcatggaatgccgcctccaccacctcgcgctgctgctcggcctcctcgtctgggcggcggcggccgccacgggaggcggggcgcagccggtgtgcgagccctccatcatcgccacccagatcgcgctcttctgcatgccggacatgcccacagcgccctgctgtgagccgatcatcgcttccatcgacctcggcggcggcgtcccctgcctatgccgcgtcgccgcccagccgcagctcgtcctcgcccgcctcaacgccacccaccacctcgcgctctacgcctcctgcggaggacaacacactatgggcgcccacctcgccgccgcctgccaacaagctccgtcacctcccgccaccgtcctcgtgctcgccccgccgccgccacaagcagccaacacgcgagacgacccctcccccgctgcagccgagcaagaagccgtcccctacaggggccaccgccgccgcccacggcctggccaaccccacgccagcccggccgccgcgcccacgatgcccccgcccccgccaccgcactccggctccgacaagggctgcgtcgtagtcgtctccgccgctctcgagctcgtcttcttcgtcatggctggcatcgtcttcgtcctcgatcttagaagacagctggtggggctaaagagcccaaaccttgggtccaggacgggcagaggggcgcgagccctccgccgccaccatcttcagatcagatactgccaccaccgccgctcgtgtcagcccgaccgccatcaccgtgggggcagtggcagcaacagcagcaggggcggcagcagcagcaacgtgtgccccgcttccaaggccactggaaggttcacggccccaaggcctcctcttcttcggcgtccgtggacgttccttccccaccggtcgccatgcccgccgggggtctggttcccatcggcatgcgcctactggggacgtcgccggcgatccgtcagcggctaccatggatgctccttcctcgtcggtgccaagcccaccatcggcggtggcccagggggttcctgttgcgtttgcccccactgtgcagatgacgccggcgctgagttggcgccatcagacccccaggatccgcctgtcaccgtcgaggcaacaccttcgggttcccaagttccagctgggggtccagaagtggcggcgttgccaacagctgctgcaggcccaacaggtatcggatgctccgtcggtggtaggcgtggggggcgcgtccagctgtcccgccgcaaactccggagggtccggaggaaaccgaggcgacgactatccggtgagagtgggaggcgctcgaaaccgagcaccaacgccttggcgactggagctaaggacttcaaggaggagatccggaaggtgtctgaccgagaggaggaggtgacccggaaggagagaagcttggtcaagaagaaagaacacctagaccgaaaggaagaggccgtcacagctctccatgataagctgaaagcttataatgcagtgctggagaaacagcgagacaagcaggctgcggctgaggcgaagttgcagcaggagcttgccgacaaggctagtgacattgctcgcgctgagggaaacctcaaggcgagggaagcttccctggtgaaacgaacaactgacctcacttggcaggaggaggacctcgctttcagggaggagatgtgggcaaggcggaacaagctgctggatgagcttgagctcgaggcagaggagaaagggaagcgtctggaggggaaagtgtggacactggaggagcaggtccgtcagttccaggcggcgcatgcgacgcagacggccccgggctcccaggcggtggaggtgatgaggaagacacttgatgacctccgggcagagcaacacgccggagctcagcgcatcgctgcctgggctggcgaggcaagcacgacgctagtgccattggggatgagtcccatcccggcattggtgcggtcggcgtccatctccgacgcgctcccgatactggattccgctgctgaccgcctccgacgtctggatcagattcttggcgcccgcttggaggccgagggcagcagactctgccgtcggccattgagcccggtggccgacactgaagatgctgcctggaagagcgtacaggatgctgtggatgcggtggtcgggcgcttccagcgggatcctgctgacaatgagtag

SEQ ID NO: 36658 - DNA, 456 bp, Zea mays
  Peptide Sequence Number=SeqID_78437
atgtgggcaaggtggaacaagctgctggatgagcatgagctcgaggcagaggagaaagggaagcgtatggaggggaaagtgcagacactggaggagcaggtccgccagttccaggcagcgcaggctgtacaggcgacgcagacggcctcgggcccccaggcggtggagccggcgtccatctccgacgcgctcccgatactggattccgctgctgaccacctccgacgcctggatcagattcttggcgcccgcttggaggccgagggcaacagactctgccggtcggcaatcgagtacgtattgacatgcttccggagccacgacccgaccatctccttagggccagtcattgcgggtccggtggccgacactgaagatgctgctcgggagggcgtacaggatgctatggacacggtggtcgggtgcttccagcgggatcctgctgacgatgagtag

SEQ ID NO: 36659 - DNA, 600 bp, Zea mays
  Peptide Sequence Number=SeqID_78438
atgggagatttgtggaccaacataagggctgatctcacaaagatgcaatggctgctgcaaatcaaggcagcagtgcaacatgagcaacaccagctagcgttgtccgcacggctccggacgtcggtagctgtgggcatacaagctgctgcttgtggcttccttgcactacagaaagtgcgggagatgcgccggcagatgctcaaggcagccttggtgacggttgacctcggcacacgtcggcgcgacctcaccttgtcggacgactatcagcagtggcaccaggccgctatctcgaagtgcgagcatgatacgtgtcccgcgggcgacgaacttcaactctacgacagcggcggtagggaagacactcacctcgtcatcaacaagggcacactatttagcgccaccacattccgctaccggccgccacgagggcgcctccgctggtgtttggttttgggtcaagtagactcggtctttgagcacccgttatgcggcagctcgagggcgagctgcttgtccaggaggggtgtagtgtcaggacctaaggaggcccacagaggggttgcggtagcagcagccatgggccctaagggggattag

SEQ ID NO: 36660 - DNA, 558 bp, Zea mays
  Peptide Sequence Number=SeqID_78439
atgcaatggctgctgcaaatcaaggcagcagtgcaacatgagcaacaccagctagcgttgtccgcacggctccggacgtcggtagctgtgggcatacaagctgctgcttgtggcttccttgcactacagaaagtgcgggagatgcgccggcagatgctcaaggcagccttggtgacggttgacctcggcacacgtcggcgcgacctcaccttgtcggacgactatcagcagtggcaccaggccgctatctcgaagtgcgagcatgatacgtgtcccgcgggcgacgaacttcaactctacgacagcggcggtagggaagacactcacctcgtcatcaacaagggcacactatttagcgccaccacattccgctaccggccgccacgagggcgcctccgctggtgtttggttttgggtcaagtagactcggtctttgagcacccgttatgcggcagctcgagggcgagctgcttgtccaggaggggtgtagtgtcaggacctaaggaggcccacagaggggttgcggtagcagcagccatgggccctaagggggattag

SEQ ID NO: 36661 - DNA, 1665 bp, Zea mays
  Peptide Sequence Number=SeqID_78440
atgcaagccacgctccagaaggttgagcaagggctgctgcaaatcaaggcagcagtgcaacatgagcaacaccagctggcgctgtccgcacggctccggacgtcggcggctatgctcgaggcagccttggtgacggttgacctcggcacacgtcggcgcgacctcaccctgtcggacggccatcagcagtggcaccaggccgctatctcgaagtgcgagcatgatacgtgtcccgcgggcgacgaacttcaactctacgacagcggcggtagggaagacactcacctcgtcatcaacaagggcgcactatttagcgccaccacattccgctaccgtccgccacgagggcgcctccgctggttattgttgcgacctattccaggtatagagaagcgcgcgagcttccctctagtctgcgttggagcccctcgcgaggattcccacacgaggaccaagctcctagttgggaaggaacttctatggccagaattggataaattgctccgccaggaagatgattcttcaactgcaccaactccttacacagctgctatcccagaatatagagttgtgtttgtcaaaccagaggatgacatgtacattaacaagtcttttgctctcagtaatggccatactgtttatgacattcaacatccttgcagagcaaatgtggctgttcggcgagagcttcatacaccagcttctgaccgatcctgcattcatttagagtttgatattgctggaactggcctaaaattgctgattagtcctctttacctatatagatatgaaactggagatcatgttggtgtctatgctgaaaattgcatcgaaactgttgaagaggcagaaaaactgctaggttattcaccagatactttattctctatttatgctgaccaagaggatggtaccccgctctgtgggggttctttgccacctcctttcccgtccccttgcacagtgaggactgcgcttacgagatatgcagatcttttgaattcgcctaagaagagtgctttactggcgctggctgctcatgcatctgattctaaagaggctgagcggcttagacatctcgcgtctcctgctggaaagaaggactatttgtcctcgcctgcagccaagatactactcaatatcttcctcaccgagcattcgactcccttggaagatagcaaagactgcagctgggctccaatttttgttaggcaatcaaacttcaaactgcctgctgatcctactgtgcccattataatgattggccctgggactggtctggcacctttcaggggcttcttacaggaacgactagctttaaaacaggcagaggtggaactgggccatgctgtcctcttctttgggtgcagaaatcggaagatggacttcatatacgaggatgagctcaataattttgttgatgccggtgccctctctgagttgatcgtagccttttctcgtgagggtcctacaaaagagtatgttcagcacaaaatggcgcaaaagggcggctacatttatgtttgcggtgacgcaaaaggcatggctagagatgtccatcgcacgctacataccatcgtccaggagcaggggtctatggacaacaactccaaggcagaaagctacgtgaagagcctgcagatggaagggagatacttgagagat

SEQ ID NO: 36662 - DNA, 456 bp, Zea mays
  Peptide Sequence Number=SeqID_78441
atgacgtggcagggggcaccggactgtccgttttcagataaaccctttacttattttatcgacggtcgtgctttgttcttggagtccaactattttgatcctattgggaaggcaaggtgtacatttgatggcctccgatatggtgcagccttcaatcctctacgatgcgcgagaatgttgctccggaggatggctgaaaaactcccggtgctgctacactaccagagtcttcatgtgcatacttacttcaagaactcaaggggtgacaaatccttttgtagcacggaatgcagagaaaagttcatggtaaacgagatggaagatgaactaaaagaagagggtttcggtgattcagtggagccttcttgcagtttgtctattttatatgacaagtcactgagatatagcattattgtctatattaatatttatattgctggtagcttctttaactga

SEQ ID NO: 36663 - DNA, 267 bp, Zea mays
  Peptide Sequence Number=SeqID_78442
atggctgaaaaactcccggtgctgctacactaccagagtcttcatgtgcatacttacttcaagaactcaaggggtgacaaatccttttgtagcacgaaatgcagagaaaagttcatggtaaacgagatggaagatgaactaaaagaagagggtttcggtgattcagtggagccttcttgcagtttgtctattttatatgacaagtcactgagatatagcattattgtctatattaatatttatattgctggtagcttctttaactga

SEQ ID NO: 36664 - DNA, 1035 bp, Zea mays
  Peptide Sequence Number=SeqID_78443
atgacacgggatgaagtccccacagagcgactggagtcgagggtcgaggagtgggagggaggatgccccaaatgtgctgaacttaagctatcgcgtgagaacgcagctttctgtgatatagcattattgtctatattaatatttatattgttggtagcttctactttaactgatctcaatggggcatttgggtggctagcaattcacattgataatttaaaagtgaatttcatgtgtacatttgatggcctccgatatggtgctgccttcaattctctacaatgcgcgagaatgctgctcaggaggatggctgaaaaactccgagtgctgctacgctaccagagtcttcatgtgcatacttacttcaagaactcaagacccagcgagaagctcaaagaaggggaagacatctacatctatcagggtgacaaatccttttgcagcacggagtgcagagaaaatttcatggtagacgagatggaaggcaagggaggctggaagcaccttttttgcatgggagctgcatggagagaacttattggtagaaaacaaactttgaccagattcttgaatgtgccaagggaaaaaggtattagttgggaccttctgtttatacaagggaaaaagccgctcactcggaagctttccatccctgctggagtactcagcccatacagacggctcattcttatctgcatggcctgtaactgctgcacagcgcgctacggctggcgtagcggcagcaactgctggatgttgccttctctttatgtctcctctactctacgcctacgagctttctttgtttctaactttttctgtggtttcgctttcaacaagctcaagcggtcaacagatcaacttagacgaaatgcagatgcagtggaaatattaaggaagaccagattccctcatgttcatggagcaggtgaaaagaagtcaccagagacaattctggatcatgagactatgagaggactttggcaacaaatgttcggtttgggcttctctgggtggttctatgatactttataa

SEQ ID NO: 36665 - DNA, 375 bp, Zea mays
  Peptide Sequence Number=SeqID_78444
atggctccagcgcaatggtccactccaacggacacctgcaaaagcgctacagtgcgcggacagttcgcgcagagtcagagcagcgccagaaggttgggcgatgtggaggctcctccgaggtcgaggtcgagtctgtcttccgtggtcgaggtcgagtccgagcccctgggtcgggcgaggcggagaccgtcggctaaggccagagctgagttcgagccctggggtcgggcgaagcagagttcgttgtcttccggggctgagcccaagtccgagccctgggtcgggcggagcggagttcgccgttgtcttcaggggctgagcccgagtccgagccctgggtcgggcggagcggagttcgccgtcttccggggctga

SEQ ID NO: 36666 - DNA, 342 bp, Zea mays
  Peptide Sequence Number=SeqID_78445
atggctaaaaacttggatgccttgaagtggtggtggttgggggtatttatagccccaaccaccaaatcaaccattggggttgggctgttgtcgatgggtgcaccggacagtccggtgcgtcagccacgtcacccaactgttagggttctgacggttttgaccgttggagctctgacatcttggtgcaccagacagtccggtgccgcatcggacatgcactgttcactgtccggtgttgcaattgatctgtcgtccctaattgttgttgatggaaaggtctgctgggatctgtacgttgatgggcttgtggtcagttctggtggctataacgatactaagtag

SEQ ID NO: 36667 - DNA, 507 bp, Zea mays
  Peptide Sequence Number=SeqID_78446
atgtcgtcgcgcgtcgacattcgcgtccccaaatccccggtttctcttccttcctgttcgcggacggcgcttccgcgcgtcgacgttcgtgtcccaaatcccgccccggttcggcgcttccccacatcgaggcgccacaccatcgccgccggtcccgatagcgtcgacagcgcgtggccccatcgttcgcgaaccaacctggccaagggtgccctgctgctgacggacaaggacctggagtcggaggagagcctgtggagtctgtacgagcggtggcgcagcgtgcacaccgtgtcgcgggacctcacggagaagcagagcaggttcgatgcgttcaaggaggagtttgtcagcaagtacacgggcgccaaggtcgtcgaccccgactctgaggctgccgctgccaggctcgccagcgacgtgtgcgtgtcgtccagcgacgagtcgccgccgcaactggccgcctctgccgtgaataccatcgtcaccgccttgaaggaccactga

SEQ ID NO: 36668 - DNA, 603 bp, Zea mays
  Peptide Sequence Number=SeqID_78447
atgtcgtcgcgcgtcgacattcgcgtccccaaatccccggtttctcttccttcctgttcgcggacggcgcttccgcgcgtcgacgttcgtgtcccaaatcccgccccggttcggcgcttccccacatcgaggcgccacaccatcgccgccggtcccgatagcgtcgacagcgcgtggccccatcgttcgcgaaccaacctggccaagggtgccctgctgctgacggacaaggacctggagtcggaggagagcctgtggagtctgtacgagcggtggcgcagcgtgcacaccgtgtcgcgggacctcacggagaagcagagcaggttcgatgcgttcaaggaggagtttgtcagcaagtacacgggcgccaaggtcgtcgaccccgactctgaggctgccgctgccaggctcgccagcgacgtactggagagacacgaagccgtcaccgccgtgaaggaccaggggcagtgcgccagctgctgggcctgggcgcggctcaattgttcgtctcctgttgtggtacgatcagaaacagatactgcagccgttgcctgcataccagatgcaaggagggacactagccgtatgtttgagagacactag

SEQ ID NO: 36669 - DNA, 1866 bp, Zea mays
  Peptide Sequence Number=SeqID_78448
atggataaggacctggagtcgaaggagagcatgtacgagcggtggagcagcgtgcacaccgtgtcgcgggacctcacggagaagcagagcaggttcgaggcgttcaaggcgaactccaggcacatcggcgagttcaacaagatgaaagacgttccctacaagctcggcctcaacaagttcgcggacctgacgcgggaagagtttgtcagcaagtacacgggcgccaaggtcgttgaccccgactccgaggctgccgctaccgccgccaggctcgccagcggcgtgcgcgtgttgtccagcgacgagttgccgccgcagctggttgcctccactgtgaacgccatcatcaccgccgtgaaggaccacagagccgtcaccgccgtgaacggcgttaatttattctgcattgcagactggagagaccatggagccatcaccgccgtgaaggaccaggggcagtgcggcagctgctgggccttctcggcagtgggtgcgaacaaaaggaaagttgagaagattgaaaatgactatcccaaatgcaagttcattgcacaatgttttatatatgatatagatgttgcttatgatgtgttaattactatacaatcaattgtaaaatatgttgttgtgttgttggacaaatctggggaaccaaatgggaaaatatacacatgggatgctacatttctgcgaaagcgtcttggatactcagctcataagctgctcagtgttgatttccctagcgaagatgctggaaaaggatggcagagtaaaattgtaaagcagctcgtccactgttccctgctcgtgaagatcgcctttctcttcaatcgcaacgccgatagaaggaacacagaagggtcaaatcaatacccttatgtctccccttctggatcaggctccgccgccggtgccgtggcctgcatcgcatgcccgacgctctacgcctacctgaagaagacggaccccggagtgcccgcgcagctgctggagtacgacgagcggttcgggcagtacggctgcgacttcaccttctacgactacaaccgaccggaggagctgccggcggcgatgaagcacgcctaccgagtcatcgttgccgaccctccctatctgagtaaggagtgcttggaaaagtttgccaaagcagtatctttcctcgcacgacctgaaggttcattcctgctgctactcacagatcactcagttgaattgattgatttgtatttggccatttgggtgtgcaactgggcctcgacttctccagatgtgatgggtcaacgacagaggcaccctcttgctcccatcggcggcagcggcgatggcacctccttccatctgcaacaacccatggaggccgacgacggtgcatttggggtttgggacgacggtcgcgtggatgcccctacccctcacggctgtgcggtccaccctggctccctccctggatgcagctggcgctcgctgcgggtgccggtggacaagcgatcgctcgagatggcggtggaggtggatgcgaggtgggagcccatgggggcgttggagtactacgactactggcgggccatgtacagcgcccgcagcaacagattgcccccactgtatttccctctacacaaacaggaggaagagattgtgatagtaaagctccctattgttggggatgagaatgtctcaatatatgcaaatggaccataccaaacttctcctttagacgctgcaccagtcaagaaggagtccgagagccaggcatggctcggattaggaccgaatgccatcaagtccaacctgaacctgaagcacacaacgacacagccaaataagacagcacaacaacctcaccaaagcctttgcaggacgatctga

SEQ ID NO: 36670 - DNA, 462 bp, Zea mays
  Peptide Sequence Number=SeqID_78449
atggctgatttgactgaagaagtcagtgattgctgcttcagcagcggttggtggggcccatcctacggcgcctgccgctactgcccagcctacgacgccctgatgttgcctaggcattgcaacgggagcctccactccagcgacggcgcgctgcccacgacctcgacctcctcccccacgaccacggcctcaaccgctccgccagcaccgccccccgtggccccgttcacctcgtttcctcagcgcctccgtcaccatcgacgtcggaaaccacccagacccccgctcccaggccccgcagccgcgcatccctccgtgcccgcccgcagccgcgccgcccgtggtgccgccacaacggttgtctcctctacaccgcatgccccccttaagagcctgtacggcggtcagatcgacacacggaggaacaaccgcggtgaggagctcctcttcaacagcagcaag

SEQ ID NO: 36671 - DNA, 612 bp, Zea mays
  Peptide Sequence Number=SeqID_78450
atgcccacgacctcgacctcctcccccacgaccacggcctcaaccgctccgccagctccgccatttacgcacacgacttcaacctcgcccgattcagcgcacgcacgacttcaacggcgcgcaggctcaggctccgcgacggccgccacctcgccgagagcggcgtgccccgggatcaagctaggttcgccgtcgtcttctcccacggattcattggctcccgagaggacaccgtccgcgcctcccaggtaccgaccgatccaagcaccaccaccaccgccaatgggggacgtccacgaccccgcgtccttctccccgctctcctccgacgctggcctctccccgcacttccctcccgcgctcgcggacgccggcgccggcgcgctggacctgtccttcacctccaccgcctccgcctccacgtcctccttcaccaccgcgaccacgttcagcgcgcggagctcgctgtcgctgccgtccttctcctcctccacctcgctctccccgcgcccgcactcctcctccgcttcactcgcccgccaggatcaaggtcgttgccgtctccaggtccatcaaatgcgacaaggtcgagcgcgcgcaattctgctctga

SEQ ID NO: 36672 - DNA, 657 bp, Zea mays
  Peptide Sequence Number=SeqID_78451
atgcccacgacctcgacctcctcccccacgaccacggcctcaaccgctccgccagctccgccatttacgcacacgacttcaacctcgcccgattcagcgcacgcacgacttcaacggcgcgcaggctcaggctccgcgacggccgccacctcgccgagagcggcgtgccccgggatcaagctaggttcgccgtcgtcttctcccacggattcattggctcccgagaggacaccgtccgcgcctcccaggtaccgaccgatccaagcaccaccaccaccgccaatgggggacgtccacgaccccgcgtccttctccccgctctcctccgacgctggcctctccccgcacttccctcccgcgctcgcggacgccggcgccggcgcgctggacctgtccttcacctccaccgcctccgcctccacgtcctccttcaccaccgcgaccacgttcagcgcgcggagctcgctgtcgctgccgtccttctcctcctccacctcgctctccccgcgcccgcactcctcctccgcttcactcgcccgccagagaccagcacatgccttgtcaacaattgatagcaacagcggttatggagctgagcaaggtgaaaagaaactcagggcagctattgctgcaacctattggctaccttggtattga

SEQ ID NO: 36673 - DNA, 252 bp, Zea mays
  Peptide Sequence Number=SeqID_78452
atggaagcagttcttaccaagcttggcggcgtggaattcctcggccacagagaaggcggatctgcggcagagttacagctccggcgagcgattcccaagtttgacagcaaccttggccggctgaagatggagccaggccaagccgcgactgggtcggcaagtgggcgagggcgacgcacccgcacggggatctcgccagggttcagcgcagctcggaaatcccaggcatcgagcgggttagggaggagatga

SEQ ID NO: 36674 - DNA, 252 bp, Zea mays
  Peptide Sequence Number=SeqID_78453
atggaagcagttcttaccaagcttggcggcgtggaattcctcggccacagagaaggcggatctgcggcagagttacagctccggcgagcgattcccaagtttgacggcaaccttggccggctgaagatggagccaggccaagccgcgactgggtcggcaagtgggcgagggcgacgcacccgcacgaggatcttgccagggttcagcgcagctcggaaatcccaggcatcgagcgagttagggaggagatga

SEQ ID NO: 36675 - DNA, 267 bp, Zea mays
  Peptide Sequence Number=SeqID_78454
atgcggatccgcggcggagatgatcttcggcgagaaatcagtggtgacccggcacacgaactctcgattaatacggtcctaaacgtatcagggaagggagcgaagacaacagaggtttcttaccgtgattccgtgtgcttaacagcactgcccgcgacgagcagcgacacagaggcgatgaagggggtccggcgagcaattcccaagtttgacggcaaccttggccggctgaagatggagccaggccaagccgcgactggtgtttaa

SEQ ID NO: 36676 - DNA, 451 bp, Zea mays
  Peptide Sequence Number=SeqID_78455
gacggcgggtgagcgcggacggaggaattcggggaaggagaggggaaattggggcgcgtcccgggttgtggacgtcggggcggagcttaccgtggcaatggacacggcggagctccaacggcgacggaggaacaagctcgggcggtggcggttcgcggcgatggcgatttggcgtgcgcgcagcgagggagaggtggaagagggggccggttggtgcgcaaatgagggagggggagatggcgagcaaggctcggggctcaagtggccgagggcgaggtggggcgagccccacgcgcgacgtgggcgcggagaccgcggcacgcgcggcggcggttacgcgaagacggagaagctgacaagccgggcccgcgacgcagagagagagaagaaagccctcgtcctcggggaaccgtattctaagtctgtgggcaagatggcttcggccccatag

SEQ ID NO: 36677 - DNA, 524 bp, Zea mays
  Peptide Sequence Number=SeqID_78456
gcgaactccagggacccttcggggaaacggagacgcgacgatggcccgggtcgacggtggcggctgcacggaggacggcgggtgagcgcggacggaggaattcggggaaggagaggggaaattggggcgcgtcccgggttgtggacgtcggggcggagcttaccgtggcaatggacacggcggagctccaacggcgacggaggaacaagctcgggcggtggcggttcgcggcgatggcgatttggcgtgcgcgcagcgagggagaggtggaagagggggccggttggtgcgcaaatgagggagggggagatggcgagcaaggctcggggctcaagtggccgagggcgaggtggggcgagccccacgcgcgacgtgggcgcggagaccgcggcacgcgcggcggcggttacgcgaagacggagaagctgacaagccgggcccgcgacgcagagagagagaagaaagccctcgtcctcggggaaccgtattctaagtctgtgggcaagatggcttcggccccatag

SEQ ID NO: 36678 - DNA, 216 bp, Zea mays
  Peptide Sequence Number=SeqID_78457
atggcggagtccacggggcgggtcgatacatatatctgcacaggggtgaggttcttctcgggcggagtccgcacgaacggcgagatccacggcggttcgcaagccatgcgcgcggccggtgagcgagcctcggcgaaagaagcgcactcagctcaaccaccagagaggtcggctgacctgacccgtggggcccaggtgacagcgagattattttag

SEQ ID NO: 36679 - DNA, 534 bp, Zea mays
  Peptide Sequence Number=SeqID_78458
atgcacaacacattcacggtagaaacgaagctccgacggcaaattcaggccgccaccggggtcgttcctttcctcgggatggcccgcgaaatcttcaatcgacaaccccgcaaggccccctggataagactttcgaaggcacgggtcgtcggcaatctgaaggttcacacacagcggcctcggttccttccgcggcggcgagcctttcacccgcactccctctcctctgtctctctctgtgggttccacggtcaagctccagcgcctatggaggagtccacggggcttataagctcacgcccccgcggatcacatcaaacgagcgtgagcaagcggaggaagggcggtctcttacatgcgggtcccgcgtcacagtggttagcgcgtgttgtgaagtctggtttccggaacccatccgtcagcacgcagagggcaaaggcgctggtgtgtgggccacaccagtcggcgcacagcagaggcggtagtgggccggttcggtcgggaagagggaaaaatccttggtgggctggatga

SEQ ID NO: 36680 - DNA, 759 bp, Zea mays
  Peptide Sequence Number=SeqID_78459
atgtactgttcaatgtccggtgtgccagtgcgcgcgtgcctgacttctgcgcgcttctggcgtgcattaaatgcgctgcaggctgccaagttccagagtcgcgtcttcttggagcaccggacactgtccgatgacttgggtgacttacccaaggtgaagacgaccgcagggatgatgttccacggtgagggcggtccgctgctcccacggaggccggtgatggctgtgcggcgggctttggggcgaaatcacaccacgcagtccgcccacgcgccaccagcgaacccgaccggcccagggaacgaggtcgacggcaagcaccgttgtttatccgcggcggcgagccttcacccgcactccctctcctctatctctctctgtgggttccgcggtcaagccctagcgcctatggcggagtccacggggcgggccgatacatatatctgcacaggggtgaggttcttctcgggcggagtccgcacgaacggcgagatccacggcggttcgcaagccatgtgcgcggccggtgagcgagcctcgacgaaagaagtggactcagctcaaccaccagagaggtcggctgacctgacccgtggggcccaggtgacagcgagtaagtggccgatggccgacttaacgcgcgcgcccgcggaggctgcaatccggacccacctgtcggcgcgcggacgcgaaggagatgggtcgccgggaggcaacaaggaggtgggccaaaaccagtcctgcggcccaattagctag

SEQ ID NO: 36681 - DNA, 1095 bp, Zea mays
  Peptide Sequence Number=SeqID_78460
atggcgtctccgccccactcagtcgaggtccggacccccggcgactcgccgcggcccaccgccgctctcctctccccctccgtggccgcaccccagccctccatcgcctcccgcctcctgctcctcctcactgcagccgttgccgccgctacggccttcgtcctgctccgccgcccatcaccgtcggatttacactgctctccaaggaaggacagggacttgctctaccccgtgatccactcccccactgagctgctttcctaccgaggtcgcgaactcctcctgtgcgagatccacgctgctctccatggaaggccggggacctgctgtaccccgatgtggaaatctcatcctcggcgattcaaggtgactggctacactatggaggatgttcttatgcaagaacctaaagcaggaattttgaagccagctttcaccattttgcttgatagagacaaaaagtctatacttctattaattaggggaactcatagcatcagagatacattaacaactgccactggtgctgtggttccatttcaccataccatcgtacaggaaggtggtgttagcgacttagtactaggatatgctctcagggccttgtctggcacaagcattgcagatgtgcccagacttcaaaataaaggtttgaattatttcatagccattttctttgtctttgatgctagagttgttggacattcactgggaggtggtacagctgctctgttgacatacgttctgagggaacagaaggagcgtccacagtttactggtgcacggttctgcctgggccgcagatggaaggttctgcatgccccgctcgaccccgccccgccccaccctacacatgcccgccagaatcgccaccatgacaggctatccgaggtcagccgcatcgaggaggtcgaggagcccctcaagccggcgctcaccttcgcctcaccgtccgagagaaggatcagagcggggggagtagggtccgggctgatgagcgtgtcgctggtggcgcggtccaccatggagcctgccatggagggtggggggaacgatcggagggaggccccgcaggcggggcggccgctactgtag

SEQ ID NO: 36682 - DNA, 378 bp, Zea mays
  Peptide Sequence Number=SeqID_78461
atggcgtctccgccccactcagtcgaggtccggacccccggcgactcgccgcggcccaccgccgctctcctctccccctctgtggccgcaccccagccctccaccgcctcccgcctcctgctcctcctcaccgcggtcgtcgccgccgctacgaccttcgtcctgctccgcccgcccatcaccgtcgtgaccgcggcgtccgccaccgcgcgtccgctctccaagcccgtggtgctgctcaccccctgtcatcctcggcgattcaaggtgttctggtcaccccctgtccttctcgctctttactctttgattgagattagggttctagggatttacattgctctccaaggaaggacagggacttgctctaccccgtga

SEQ ID NO: 36683 - DNA, 831 bp, Zea mays
  Peptide Sequence Number=SeqID_78462
atgactacttcacgccaacggtcacctgcaggcgcatttaatgcacgccagaagcgcgcagaagtcaggcacgcgcgcgctggcacaccggacactctacagtacatgtccggtgtgccaccggacatccaggcgggcccagaagacagaagctccaacggtcggaacccaacggcctggcccatctcccatgaaaccctaatccgcggccgcggcatccagccctgcgcccccgcccgtggcttgctcgcctccacccgcggccgcgacttccagtgccctgcgccaccgccgcttgtcaggctccaccgccccatcttctctcccgctggacagcctgcaacgccccaaagcatcgcctgccgatggcgtctccgcccccactcagtcgaggtccggacccccgacgactcgccgcggcccaccgctgctctcctctccccctccgtggccgcaccccagccctccaccgcctcccgcctcctgctcctcctcaccgcggtcgtcgccgccgctacggccttcgtcctgctccgcccgcccatcaccgtcgtgaccgcggcgtccgccaccgcgcgtccgctctccaagctctccaagcccgtgggatttacactgctctccaaggaaggacagggacttgctctaccccgtgatccactcccccaccgagctgctttcctaccgaggtcgcgaactcctgtgcgagatccacgctgctctccatggaaggccggggacctgctgtaccccgatgtggaaatctcatcctcggcgattcaaggtgttctgctcaccccctgtccttctcgctctttactctttgattga

SEQ ID NO: 36684 - DNA, 369 bp, Zea mays
  Peptide Sequence Number=SeqID_78463
atgacgcctagggaacttaacaactaccctcgaaaagatactctttacgtgtggacagcaagcgccagtgaaatagttgcttcagcacttcatgacaattgcaaagctgttcttgttggcgaaaggacttttggcaagggcttaatccaatctgtatttgaacttcatgatggttctggtattatcgtcacagttggcaaatacatgacaccaaaccacaaggatatcaatgggaatggaatagaaccggattacaatcgtcttcctggtactctaagaaaacgccagatttcttttgtggcaattgaattctgcaatatttcaatgaagccagaggttacctttcacgatgtggaattaaagaattaa

SEQ ID NO: 36685 - DNA, 462 bp, Zea mays
  Peptide Sequence Number=SeqID_78464
atgacgcctaggaaacttaacaactaccctcgcaaagatactctttacgtgtggacagcaagcgccagtgaaatagttgcttcagcacttcatgacaattgcaaagctgttcttgttggcgaaaggacttttggtaagggcttaatccaatctgtatttgaacttcatgatggttctggtattgtcgtcacagttggcaaatacatgacaccaaaccacaaggatatcaatgggaatggaatagaaccggattacaatcgtcttcctgatttcaatgaagccagaggttacatttcacgatgcggaacaaataaagcggatgctctgcctgactactacacgaccctccatgtcgcgcgcgctgatacgataagcagcgtatcggcgagcgtcgatacaacctctacagcacagggcgagcatgttgctggtggcctctgcggcatggtgcaagaaatatag

SEQ ID NO: 36686 - DNA, 564 bp, Zea mays
  Peptide Sequence Number=SeqID_78465
atgaacgtatgtgagctcactcttgctgtctcacatacaccacaggtcaagaccagaactcctgttatatataaagatgtgacattcgatcctgtgccactatacatcatatgtatgagacttggtcccagcatacctggtgtttatgttcgcgcccgggtcttggtgccccaaaatccgggtgtgacacttcatgacaattgcaaagctgttcttgttggcgaaaggacttttggcaagggcttaatccaatctgtatttgaacttcatgatggttctggtattgtcgtcacagttggcaaatacatgacaccaaaccacaaggatatcaatgggaatggaatagaaccggattacaatcgtcttcctgatttcaatgaagccagaggttacatttcacgatgcggaacaaataaagcggatgctctgcctgactactacacgaccctccatgtcgcgcgcgctgatacgataagcagcgtatcggcgagcgtcgatacagcctctacagcacagggcgagcatgttgctggtggcctctgcggcatggtgcaagaaatatag

SEQ ID NO: 36687 - DNA, 414 bp, Zea mays
  Peptide Sequence Number=SeqID_78466
atggcggtggtcggcgagcaggtgagggctcccgcctctgattccctcccaggctcctcgagcggccaagcgtctgtgtgtggccgtgtgggcgaaccacatgcgccagccgccgtgcgccctgggcgagcacgtgaggccagagggatcatgtccagactcacactgggctcgttgctcggccttattgagctagagatcctccaacacagcggcaccgacaccaaggctcaggctaaagtgtttgaaaaggaaagagaacaaacaaaaatgggtatagtcaggaataaggaaaagcattgtggatgggattcattcttttctatggttcacctcgttctggtgatatatgaaatgatacatcagataagtgggaagaggaagtataatgcaatggataatcataaaaagtga

SEQ ID NO: 36688 - DNA, 312 bp, Zea mays
  Peptide Sequence Number=SeqID_78467
atggcggtggccggcgagcagcatgtcctcgtgctcttcacagggatcatgtccagactcacactgggctcgttgctcggccttgttgagctagagatcctccaacacagcggcaccgacaccaaggctcaggctaaagtgtttgaaaaggaaagagaacaaacaaaaatgggtatagtcaggaataaggaaaagcattgtggatgggattcattcttttctatggttcacctcgttctggtgatatatgaaatggtacatcagataagtgggaagaggaagtataatgcaatggataatcataaaaagtga

SEQ ID NO: 36689 - DNA, 399 bp, Zea mays
  Peptide Sequence Number=SeqID_78468
atggcggtggccggcgagcagaaaagtattgttctggatattatcttgaaacttttgctcaaccaaccttttgagaagattccctatgcagcttctgaatatcatatgcatgtcctcgtgctcttcacagggatcatgtccagactcacactgggctcgttgctcggccttgttgagctagagatcctccaacacagcggcaccgacaccaaggctcaggctaaagtgtttgaaaaggaaagagaacaaacaaaaatgggtatagtcaggaataaggaaaagcattgtggatgggattcattcttttctatggttcacctcgttctggtgatatatgaaatggtacatcagataagtgggaagaggaagtataatgcaatggataatcataaaaagtga

SEQ ID NO: 36690 - DNA, 249 bp, Zea mays
  Peptide Sequence Number=SeqID_78469
atggtgggtacaagtgcggtcactgcacgcgcggcagccggggtcagtggagcattgtatgccaaggcggtgaggcctggacgcgaacggggaatcgatggggacggttgtcatgtgcagggtcggagtaccctgacatgccgtaccatgcaggaattggttgatggtgtgacttggcctaccaccctgccaccgggttggacggtcgagtgggatgtggctccggcaggagaggagcatgaggagtag

SEQ ID NO: 36691 - DNA, 228 bp, Zea mays
  Peptide Sequence Number=SeqID_78470
atggtgggtacaagtgcggtcactgtacgacggcagcccggggtcagtggagcattgtatgccaaggcagtgaggcctggacgcgaacggggaatcgatggggacggttgtcatgtgtggggtaccatgcaggaattggttgatggtgtgacttggcctaccaccctgccaccgggttggacggtcgagtgggatgttgctccggcaggagaggagcatgaggagtag

SEQ ID NO: 36692 - DNA, 471 bp, Zea mays
  Peptide Sequence Number=SeqID_78471
atgtcaaccgtccccatcgattccccgttcgcgtccaggcctcaccgccttagcatacaatgctccactgaccccagctgccgccgtgcagtgaccgcacttgcgggggagctcgtcggtggcgaggagttcggcctatccagggcacaattgaccaatcaaacgggtcagagagcttcaccagggatcaaggaaggcgggcggccgaagtccggtgaggtcgatcttcgccttccggtgaagttcttccaggtccgagggcttggaaagcttcacaagctaatggcgaagctaaccgagcggctggcgcggcttgggagtgactatagtgggctggccacggtggccgaggctctggcggcaatggcgggcggaaaggagctcgccggagctaaggaggggcgtctggccaatgatggatttgagctatggatcaaggtgaacacgattgatctttggctcaaggtctga

SEQ ID NO: 36693 - DNA, 471 bp, Zea mays
  Peptide Sequence Number=SeqID_78472
gccgtatctgccccggcgtctcacagttgagtggcagccctaggtgccaggaagaggtctgcgccggacttttgcaaagattcgcacgtttgcgacctctggcgacatttgaacactggaagaaacaaaccgccacgtgttcgacgccgtctgccgcgccagagcacgcccgcgcgcgcccgcgccgcgcccaagccaagccagtgccctggtccgcgtccgcgactataaaacgcccaggagccttggccgtacccctccgcacgcgctcaagcctcaccggagctcagttcgccgccccctcggagaggactgtgcacgtctccgtgaagctccccgagcgaggaatcgggctctgcttcaccggagaggccggcccaaggtcaccggacttcaaccgaccgccggcaaccgtggaccaagaccctccccgagccaaccctacacttcgccggaactccctcgccgccg

SEQ ID NO: 36694 - DNA, 545 bp, Zea mays
  Peptide Sequence Number=SeqID_78473
gccgtatctgccccggcgtctcacagttgagtgacagccctaggtgccaggaagaggtctgcgccggacttttgcaaagattcgcacgtttgcgacctctggcgacatttgaacactggaagaaacaaaccgccacgtgttcgacgccgtctgccgcgccagagcacgcccgcgcgcgcccgcgccgcgcccaagccaagccagtgccctggtccgcgtccgcgactataaaacgcccaggagccttggccgtacccctccgcacgcgctcaagcctcaccggagctcagttcgccgccccctcggagaagactgtgcacgtctccgtgaagctccccgagcgaggaatcgggctctgcttcaccggagaggccggcccaaggtcaccggacttcaaccgaccgccggcaaccgtggaccaagagtacatcctcgtgccggagcaaggagctgctcaggaggtagccccagatccagcaccagagccagcaccagaggacctgcctgccactgctttggaaggcaagccccggttttatgcataa

SEQ ID NO: 36695 - DNA, 477 bp, Zea mays
  Peptide Sequence Number=SeqID_78474
atgcggagaagatacatccgacacaagggtcccacacggcagcgcccgcggtcaagggtgtacgcgcggcgtgagacaccgaggacccaggcccgcacgtcagtgacttcacagaaaagaaaaagggaacgaggaaatgggctgtcgtgggactgtaacctcgctgacggagagtacgtcctcgtgccggagcaaggagctgctcaggaggtagccccggatccagcactagagcctacaccagaggatcttcctaccactgctttggaaggcaagccccgcagattgccctcctcatgcgacctgagacgtggtctcccattccggttatggtgggtacaagtgcggtcactgcacgacggcagttggggttctttggaggacatggttgctggagtgacttggccgtccatcttgccaccaggttggactgtcgagtgggaccccgcctcggctgaggaggagcatgaggagtga

SEQ ID NO: 36696 - DNA, 207 bp, Zea mays
  Peptide Sequence Number=SeqID_78475
atgcggagaagatacatccgacacaagggtcccacacggcagcgcccgcggtcaagggtgtacgcgcagcgtgagacaccgaggacccagacccgcacgtcagtgacttcacagaaaagaaaaagggaacgaggaaatgggctgccgtggggtagaagagagaaagagtgggccgaattggagaagtcagcccaaactaggttttag

SEQ ID NO: 36697 - DNA, 423 bp, Zea mays
  Peptide Sequence Number=SeqID_78476
atggcggcggaccgagcacgcacacaggcatccggcttgctgcgtcgaggggatgagatgtggctacgcgtcatagaggagaagcgacacatatatagggctcgggacagagaccggaacggccagctagagacccccgattcccacggagcgcgcagagaactcgcgttctgtttgagggaggaggaatcggtccgaaccggccatccgcgatcctggcgagaagaacgactcggtgccgtgggcccaccaatcagtggcatgagcgtggggcgcacagcgcggcgtgagacaccgaggacccaggcccgcacgccagtgacttcacagaaaagaaaaagggaacgaggaaatgggctgccgtggggtagaagagagaaagagtgggccgaattggagaagccagcccaaactaggttttag

SEQ ID NO: 36698 - DNA, 1476 bp, Zea mays
  Peptide Sequence Number=SeqID_78477
atgacgacgatcgacatggccggagctgctgctgccgcgacgggctcggggtctccgtacgtgcggcgcgtgcaagttcctgggccggcggtgcgtgccggagtgcgtgcgtgttcgcgccctacttcaacagcgcgaccacgaccagggcgccgcgcgctgccgcgcttcgccgccaaccacaaggtgttgggcgccagcaaagcaacacctccaagctgctgtcccacctccccgtcgccgaccgctgcgagaccgtcgtctccatcacctacgaggcgcaggccaggctccgcgacggcgcgaccccgtctacggctgcgtcgcccagatcttcgctctccagcagcaggtcgccatcctgcaagcgcagctgatgcattgcagaccaaggcgcagctcgcgtgcggcgtccagggcgccgcgcattcgcctgcgagccaccaccaccagtggccggacaacgccagcatcagtgctgggaggcgggaggaggcgctagctgacatgtgcgtggttcggctgcagttgggagccaagccaaacctgcagggggatcggagaactaaccttcgagagcgcgcgcagcgggggaatctcaagcctgggaagaacgcgcagttgtcggagtcggagatcaagcagctctgcgctgccgccaaggagatcttcctgcaccagcccaacctgctggagctcgaggcgcccatcaaaatctgcggtgatgtccatggccagtactctgatctcctgaggctattcgattatggtggctatccgcctcaggccaactaccttttcttgggtgattatgtggatcgtggaaagcaaagcttggaaacaatatgtcttcttttggcctacaaggtcaagtacccagagaacttctttcttctaaggggaaaccatgaatgcgcatcagtaaatcgcatctatggtttttatgacgagtgcaaacgcagattcagtgtaaagctgtggaaaacattcactgactgttttaactgcttgccagtgtcagcattgatagacgaaaagatcctctgtatgcatggtggtctatctccagagttgaacaagctcgaacaaatacttaatctgagtcgccccacagacgtgcctgatactggattgctctgtgaccttctttggtctgatccttctaatgaagcaacaggatgggccataaatgatcgaggtgtttcatatacatttggtcctgataaagtttctgaattccttgagaagcatgatttggacctcatctgccgagcccatcaggttgtcgaagatggatatgagtttttcgctagccgccaactcgtaacaatgttttcagcccctaactactgtggagaatttgataacgctggtgccatgatgagtgtagatgagacattgatgtgctccttccaaatactgaaacctgcgaggaaggtgttgggtggttcaactaataacaaatcaggcttcaag

SEQ ID NO: 36699 - DNA, 1161 bp, Zea mays
  Peptide Sequence Number=SeqID_78478
atggatccggccttgcttgacgacgtcatacgccggctgctggaggtgaagaatctcaagcctgggaagaacgcgcagttgtcggagtcggagatcaagcagctctgcgctgccgccaaggagatcttcctgcaccagcccaacctgctggagctcgaggcgcccatcaaaatctgcggtgatgtccatggccagtactctgatctcctgaggctattcgattatggtggctatccgcctcaggccaactaccttttcttgggtgattatgtggatcgtggaaagcaaagcttggaaacaatatgtcttcttttggcctacaaggtcaagtacccagagaacttctttcttctaaggggaaaccatgaatgcgcatcagtaaatcgcatctatggtttttatgacgagtgcaaacgcagattcagtgtaaagctgtggaaaacattcactgactgttttaactgcttgccagtgtcagcattgatagacgaaaagatcctctgtatgcatggtggtctatctccagagttgaacaagctcgaacaaatacttaatctgagtcgccccacagacgtgcctgatactggattgctctgtgaccttctttggtctgatccttctaatgaagcaacaggatgggccataaatgatcgaggtgtttcatatacatttggtcctgataaagtttctgaattccttgagaagcatgatttggacctcatctgccgagcccatcaggttgtcgaagatggatatgagtttttcgctagccgccaactcgtaacaatgttttcagcccctaactactgtggagaatttgataacgctggtgccatgatgagtgtagatgagacattgatgtgctccttccaaatactgaaacctgcgaggaaggtgttgggtggttcaactaataacaaatcaggcttcaagtccgcaaggcctgggggcgttagtaacccgcgtgttaccgaggcaaagaccattgacccgctgctccgcgcgtgggcaaaccccatcatgacttctactattcccgctacattgcaggcaacggagacatgcggatgggactggacgacaccgtccacctactcccctacacaagccgacgagccagcctacactgcagcatacaacgctgcttcgctcgcacgctaa

SEQ ID NO: 36700 - DNA, 189 bp, Zea mays
  Peptide Sequence Number=SeqID_78479
atggaattaccactagacgcgcagagcagcggaagacgtctcgatgtagacgaacgcgtcgagcagtgccgtgcagtcgccggcgtccttcacgtccttgcacggttcgtccaagtgctccagatgcagcacctccgaggtggcgaattaggttatcccttaaccgcgcccccgcccctcattatatag

SEQ ID NO: 36701 - DNA, 189 bp, Zea mays
  Peptide Sequence Number=SeqID_78480
atggaattaccactagacgcgcagagcagcggaagacgtctcgatgtagacgaacgcgtcgagcagtgccgtgcagttaccggcgtccttcacgtcctcgcacggttcgtccaagtgctccagatgcagcacctccgaggtggcgaattaggttataccttaaccgcgcccccgcccctcattatatag

SEQ ID NO: 36702 - DNA, 189 bp, Zea mays
  Peptide Sequence Number=SeqID_78481
atggaattaccactagacgcgcagagcagcggaagacgtctcgatgtagacgaacgcgtcgagcagtgccgtgcagtcgccggcgtccttcacgtcctcgcacggttcgtccaagtgctccagatgcagcacctccgaggtggcgaattaggttatttcttaaccgcgcccccgcccctcattatatag

SEQ ID NO: 36703 - DNA, 189 bp, Zea mays
  Peptide Sequence Number=SeqID_78482
atggaattaccactagacgcgcagagcatcggaagacgtatcgatgtagacgaacgcgttgagcagtgccgtgcagtcgccggcgtccttcacgtcctcgcacggttcgtccaagtgctccagatgcagcacctccgaggtggcgaattaggttatctcttaaccgcgcccctgcccctcattatatag

SEQ ID NO: 36704 - DNA, 189 bp, Zea mays
  Peptide Sequence Number=SeqID_78483
atggaattaccactagacgcgcagagcagcagaagacgtctcgatgtagacgaacgcgtcgagcagtgccgtgcagtcgccggcgtccttcacgtcctcgcacggttcgtccaagtgctccagatgcagcacctccgaggtggcgaattaggttatctcttaaccgcgcccccgcccctcattatatag

SEQ ID NO: 36705 - DNA, 1414 bp, Zea mays
  Peptide Sequence Number=SeqID_78484
atgaagcaagtcgaccgtcctccaaataaccccaagcgtataacaatccagtcaagccaggagtgcttcagtgtagacattccctctgcagaacatcataacccatgtccagaagttgaaaatccttcaaatgctgacagtcaaaatgtgaccaatgaaacagttcagattgattctgatgaagatgacttcatgccagctatgaagaagcgcaatgtttctgaaagccacacaagagtgttaagaaaagtcgtgacaaagagggttaaacatgaggagctaccccgacagaggcttaatgtgaggtgcaaccctcaagatgtcattgcaagcattaaccttttgaatgaaagacaacgtgaggctataagacgcaaaggcttctcttccattcttgatatgacagtagatgcgctgtgcagtagatcacacctccaatggttgatggacaagctagaccccaaggatatgacaatacgtcctggtccaggaaaggaactcaagatcacaaaggatattgttcatcttattcttggcgtgccaaatcatggaggtggtaaacctttgggtattgatgaagcagttgcagcaagcaacttgagggcagagcttggtgtggccaaagatgagttcaatgtggcagttctacaggatcgattaaggaaaggcgaggatgatgacctttcaatcagatgtttcttcctcattctattcaaccgtttgctgtttccaactgctagctggggcatcacatatcatgaggtgcttctcacagaagaaatgcaccgtttccatgagatcgactggtgccagttgatttttaatgatctatgtgaagctgccaagaagtggcacaaccggatcaccacaaatgtctccacgactatctatggatgctccattgttgtccttttgtactacttggatcacctgcatacagccgctgccccccataataagagtggcacacctcgcattaaattttttgataagaatatcataaaagctttgaccaaagctgacaagaggaaggttcgccatggggctgaatctttcggacactgtgaaccggagtgcaggaccaatatttttgatgcaccgcgccctggccccatgcctcggccaacttttaacatcaaacttccatctatcaaagagatgatgtcaagtaagatcaacgatctcccccatcgtcatcgatctaaattcacagatattcttgctgcatatgacttggaggttgacaagtcatgcgtagccataaaagatagcatcgacaaaattattgtcaagcaatatgacatagcagacaagtttatagaattgatagacgaggtactacgtgccgagtctgaaaatttggagaacgagacggatgagccacagcaaccgggggattcggctgattcagcag

SEQ ID NO: 36706 - DNA, 1476 bp, Zea mays
  Peptide Sequence Number=SeqID_78485
atgaagcaagtcgaccgtcctccaaataaccccaagcgtataacaatccagtcaagccaggagtgcttcagtgtagacattccctctgcagaacatcctaacccatgtccagaagttgaaaatccttcaaatgctgacagtcaaaatgtgaccaatgaaacagttcagattgattctgatgaagatgacttcatgccagctatgaagaagcgcaatgtttctgaaagccacacaagagtgttaagaaaagtcgtgacaaagagggttaaacatgaggagctaccccgacagaggcttaatgtgaggtgcaaccctcaagatgtcattgcaagcattaacattttgaatgaaagacaacgtgaggctataagacgcaaaggcttctcttccattcttgatatgacagtagatgcgctgtgcagtagatcacacctccaatggttgatggacaagctagaccccaaggatatgacaatacgtcctggtccaggaaaggaactcaagatcacaaaggatattgttcatcttattcttggcgtgccaaatcatggaggtggtaaacctttgggtattgatgaagcagttgcagcaagcaacttgagggcagagcttggtgtggccaaagatgagttcaatgtggcagttctacatgatcgattaaggaaaggcgaggatgatgacctttcaatcagatgtttcttcctcattctattcaaccgtttgctgtttccaactgctagctggggcatcacatatcatgaggtgcttctcacagaagaaatgcaccgtttccatgagatcgactggtgccagttgatttttaatgatctatgtgaagctgccaagaagtggcacaaccggatcaccacaaatgtctccacgactatctatggatgctccattgttgtccttttgtactacttggatcacctgcatacagccgctgccccccataataagagtggcacacctcgcattaaattttgtgagaagaatatcataaaagctttgaccaaagctgacaagaggaaggttcgccatggggctgaatctgtcggacactgtgaattcggaagctcgacggagacatgctatgcagttggacatattcttgctgcatatgacttggaggttgacaagtcatgcgtagccataaaagacagcatcgacaaaattattgtcaagcaatatgacatagcagacaagtttatagaattgatagacgaggtattacgtgccgagtctgaaaatttggaaaacgagacggatgagccacagcaaccggggaattcggctgattcagcaggacacacagttgatgccacccagcccacacccgatatgccatcccaagcttcgcagcttgagacccaactgggtgctactcagttcgaagaaattcacgaaagacaacagcatatccgtacagtccttgttttcctttcccgacgaatcggatgtggttcagatcaacag

SEQ ID NO: 36707 - DNA, 1308 bp, Zea mays
  Peptide Sequence Number=SeqID_78486
atgacgtcggtggttctcagccccctatggaagcaaggagacgtcagcaggatcccagccgcaccgccagatgtgcttctacagggctcaggcacttctctgacggccacgttatcgcgtacacagggttcaagcacttctccgacagccacgttggcatatttttatgaacgtataacaggacagaacatatatgctaatgtgtttcatatgattgcagctaatgcattatttggttacagcaagcaagtcgaccgtcctccaaataaccccaagcgtataacaatccagtcaagccaggagtgcttcagtgtagacattccctctgcagaacatcctaacccatgtccagaagttgaaaatccttcaaatgctgacagtcaaaatgtgaccaatgaaacagttcagattgattctgatgaagatgacttcatgccagctatgaagaagcgcaatgtttctgaaagccacacaagagtgttaagaaaagtcgtgacaaagagggttaaacatgaggagctaccccgacagaggcttaatgtgaggtgcaaccctcaagatgtcattgcaagcattaacattttgaatgaaagacaacgtgaggctataagacgcaaaggcttctcttccattcttgatatgacagtagatgcgctgtgcagtagatcacacctccaatggttgatggacaagctagaccccaaggatatgacaatacgtcctggtccaggaaaggaactcaagatcacaaaggatattgttcatcttattcttggcgtgccaaatcatggaggtggtaaacctttgggtattgatgaagcagttgcagcaagcaacttgagggcagagcttggtgtggccaaagatgagttcaatgtggcagttctacaggatcgattaaggaaaggcgaggatgatgacctttcaatcagatgtttcttcctcattctattcaactgtttgctgtttccaactgctagttggggcatcacatatcatgaggtgcttctcacagaagaaatgcaccgtttccatgagatcgactggtgccagttgatttttaatgatctatgtgaagctgccaagaagtggcacaaccggatcaccacaaatgtctccacgactatctatggatgctccattgttgtccttttgtactacttggatcacctgcatacagccgctgccccccataataagagtggcacacctcgcattaaattttttgataagaatatcataaaagctttgaccaaagctgacaagaggaaggttcgccatggggctgaatctttcggaaactgtgaa

SEQ ID NO: 36708 - DNA, 345 bp, Zea mays
  Peptide Sequence Number=SeqID_78487
atgtggctctttgtttctgttcttgttctaccctctgttgagtggccaaaacgtgcgaatcttgccctaagacctgtgagagatctcttccctgcacctaggggctacctagttcatggtgcgcggaccgcccccttcgaagcgcccggtcaggaggtgggcctccgcttccttgggtggctacaggaggagctggaggtgctcccgaccattgtgacggacctcatgtccttcgcctcccttatcacctgcgagggggccgtgaatgccttgtcccacgagggatgcgagcacttcaaggtcttcgaccagtcggacgaaggcttcgagcgcggaatcttctag

SEQ ID NO: 36709 - DNA, 210 bp, Zea mays
  Peptide Sequence Number=SeqID_78488
atgcgggtcacgcgggggcgcgcgtcgggcttgctctggcgagctcagagcgcgtcgaacacgtggctctttgtttctgttcttgttctaccctctgctgagcggccaaaacgtgcgaatctttccctaagacctggtattaagtgcactacatcttgtataattggcctgttgggggccttcggcttccgaaggtcctcaaaaacatga

SEQ ID NO: 36710 - DNA, 465 bp, Zea mays
  Peptide Sequence Number=SeqID_78489
atggcggcgcgacttatcggcggcgagggaggtttggcgaggggcggggttggctccgggaggttctggcggtcacagcgagggtctactctgagggtcggacgcggctgggagaggctctgctggccagtctacggtggcgggggatcgggtggccgcgggcacgccgtgcgcggggcaatgctggtgatctggtgctccggtgaggtcgagcgcgctcggaggagtacggtcgaagtccctgggggctttataggcgcgggcgcgggcaacggcgccggcttggctttggcgcgaacgggggacgcgggggcggcgtcgggcgtgctttggcgagctcagagcgcgtcgaacacgtggctctttgcttctgttcttgttctaccctctgctgagcggccaaaacatgcgaatcttgccctaagacctgtgagagatctcttccctgcacctagggctacctag

SEQ ID NO: 36711 - DNA, 333 bp, Zea mays
  Peptide Sequence Number=SeqID_78490
atgaacaaaaaccctggcaatcgaaatgccattacaaacggaactccggttccccctccgcaggtacgaacaaccccactccatgggggaaggcctgcggagcaacagaagactgacgagcggctcgccgccgcccgttctgactgcgacaacaaccacccccgccccgggcggcgaagcggcttaggcagcagcttcggggcaggtgttgcgacaggagggctctcacccgcagaggacgagaaccagccattcaggccgggagacggagacccagggctactggcgccctacctatcccggtatggctggaggaagtccccgtgggactga

SEQ ID NO: 36712 - DNA, 567 bp, Zea mays
  Peptide Sequence Number=SeqID_78491
atgaacaaaaaccctggcaatcgaaatgccattacaaacggaactccggttccccctccgcaggtacgaacaaccccactccatgggggaaggcctgcggagcaacagaagactgacgagcggctcgccgccgcccgttctgactgcgacaacaaccacccccgccccgggcggcgaagcggcttaggcagcagcttcggggcaggtgttgcgacaggagggctctcacccgcagaggacgagaaccagccattcaggccgggagacggagacccagggctactggcgccctacctatcccggcatggctggaggaagtccccgtgggaccgagggatgccattctcccccaggcgcgggggaagaaaaaggcagccgacccatgcgggggcagccccccgactcgcctcatccttcatcttggcctggacgacgaaaatccttgaggccgagggaggggtagaggccgcagcctggctcgcttcccccaccatcaaaccggaggtcgccatcccgggtgaccaccggtggaggggtgtggccgggctgcgtgatgaaaatccttga

SEQ ID NO: 36713 - DNA, 324 bp, Zea mays
  Peptide Sequence Number=SeqID_78492
atggtgtctccggtgagctgcaagcgggtaatccgagtggacgtccgtgccccgttcgttgggggccagctaggggcccagaggcacgcccaaaagtacctgcggcaactggcgcgccggttgcttgacgcgtgggcctgggcttccaagctggcgtgtcagaagttggagaagcacgtccacctgcctggccaaaccccgccgccggcggtcacccaagatggtgacctccagttcgacggtggggaaagcgggccaggccgcgacctctactcctccctcggcctcaaggattttcgtcatccaggccaagatggaagatga

SEQ ID NO: 36714 - DNA, 387 bp, Zea mays
  Peptide Sequence Number=SeqID_78493
atgggcaccgaacatggtgtctccgatgagctgcaagcgggtaatccgagtggacgtccgtgccccattcgttgggggtcggctaggggcccagaggcacgcccaaaacgactggcgcgccggttgcttgacgcgtgggcctgggcttccaagctggcgtgtcagaagtcggagaagcgcgtccacctggcgcggttgcatgccgcctacatggctgcccgccccttccgcccgttggtctgggcaaaacctggccacaccccgccaccggcggtcacccaagatggtgacctccagttcgacggtggggaaagcgggccaggccgcggcctctactcctccctcggcctcaaggattttcgtcatccaggccaagatggaagatga

SEQ ID NO: 36715 - DNA, 660 bp, Zea mays
  Peptide Sequence Number=SeqID_78494
atgggcaccgaacatggtgtctccagtgagctgcaagcggggtccgagggctcgatgcctccctccgatgggattccgttacaagatcgttcccgctggtctcggaaatgtcctaggcaactggcgcgccgattgcttgacgcgtgggtctgggcttccaagctggcgtgtcagaagtcggagaagcgcatccacctggcgcggttgcatgccgcctgcatggctgcccgccccttccgcccgttggtctgggcaaaagtgggggtcgcttgtaaccgctgggcggtcgtgcgcaccacgcgcggcggtttggcttcttctgccctgagccgcctggccacaccccgccaccggcggtcacccaagatggtgacctccagttcgacggtggggaaagcggaccaggtcgcggcctctactcctccctcggcctcaaggattttcgtcatccaggccaagatggaagatgaggcgagtcggggggctgcccccgaatccctcggcccgttcgaccttgttgtctggggctcccctagcttagttaaagagacccctcggccgcccttcgatgagccgagagccgacgccaaagtcgatcagccgaggcctcgggtcgggctggcgcccttggaagccggctggccgaggccccaggggtaa

SEQ ID NO: 36716 - DNA, 369 bp, Zea mays
  Peptide Sequence Number=SeqID_78495
atgacggaggcacagggacgcgacggggcgacgatggcagagctccggctgcgcaagaaccactccggtgagcgagggccggctgaaccagggagggaaggggcacaccaaagggtgtcccgagaagctgacggtaaggcgaagctcaccgtggcactggacggggcgcgggcgcaacggcggccatggaacaggcggtggacgtcggcgggcggtggcggaggttctcggttcgtgtgggcagagcgagagagagagcgaaagagctgggtagagggcggaaatggaagaggggaggtgggtgagcagggtgcggggttcacaaggggcgcgggggctcggttgtggccggagaacacgcagacgtgg

SEQ ID NO: 36717 - DNA, 510 bp, Zea mays
  Peptide Sequence Number=SeqID_78496
atgacggaggcacagggacgcgacggggcgacgatggcagagctccggctgcgcaagaaccactccggtgagcgagggccggctgaaccagggagggaaggggcacaccaaagggtgtcccgagaagctgacggtaaggcgaagctcaccgtggcactggacggggcgcgggcgcaacggcggccatggaacaggcggtggacgtcggcgggcggtggcggaggttctcggttcgtgtgggcagagcgagagagagagcgaaagagctgggtagagggcggaaatggaagaggggaggtgggtgagcagggtgcggggttcacaaggggcgcgggggctcggttgtggccggagaacacgcagacgtgggtgcgtccacggtggggagatcgtgggcgagaggttagggacacgctgacaagtgggtcggtggggcagagagaaggagagcggggtctgcctgtcaggcacagggacgcgcgggcgcaagcgcgcgcgggctgggtttaa

SEQ ID NO: 36718 - DNA, 678 bp, Zea mays
  Peptide Sequence Number=SeqID_78497
gggctcgccggtggtgacgaaaatggccggagcaggagcgatgcccaacgaacggtggagaggcggatgtgcagcgagacggctccaatgatgttgcgcaggccgcgctggccgcgccgggccaccgcgccgccgcgctggggccgatctgccgcgctcgtgcctgggcaccgggatgctgcgccgcgcctgcacgctggccgcaccggttggttgcgggccaccaagccggcagaccgcgctggccgcgggcgagcagagagggcagtggtgaggctcctggtgcagcagtcgcgaggagagagggagagaggttacgcgcagggagagaatgcagggcggctccaaggcatcgtgcacgttctggttgaggagggagaggggccgactggtgggccagctcggcaaggcatgcagcacatgcaagcgacgaccaggggcggttgctgcgtgagcgaggggcaaaggggcagttccagatcatgggtgttgactgagctactgcatgcctatatggatgagacgccggactccactcttggaaaccatgcatgcaaagaggcccgtcacgcttgcaagaaaactagagacgccaaccaccatggcatgcatatacgaaccacatgcaaggaaaaagaaaacaaatacctccatgccatgcacgtgagagaaaaatag

SEQ ID NO: 36719 - DNA, 768 bp, Zea mays
  Peptide Sequence Number=SeqID_78498
atgctcacctcgcaacgacgacggatggctagacgagttcgcagcgaggcacgtgcccaacgacggcgagggacggacaggacagcacaggggctcgccggtggtgacgaaaatggccggagcaggagcgatgcccaacgaacggtggagaggcggatgtgcagcgagacggctccaatgatgttgcgcaggccgcgctggccgcgccgggccaccgcgccgccgcgctggggccgatctgccgcgctcgtgcctgggcaccgggatgctgcgccgcgcctgcacgctggccgcaccggttggttgcgggccaccaagccggcagaccgcgctggccgcgggcgagcagagagggcagtggtgaggctcctggtgcagcagtcgcgaggagagagggagagaggttacgcgcagggagagaatgcagggcggctccaaggcatcgtgcacgttctggttgaggagggagaggggccgactggtgggccagctcggcaaggcatgcagcacatgcaagcgacgaccaggggcggttgctgcgtgagcgaggggcaaaggggcagttccagatcatgggtgttgactgagctactgcatgcctatatggatgagacgccggactccactcttggaaaccatgcatgcaaagaggccggtcacgcttgcaagaaaactagagacgccaaccaccatggcatgcatatacgaaccacatgcaaggaaaaagaaaacaaatacctccatgccatgcacgtgagagaaaaatag

SEQ ID NO: 36720 - DNA, 684 bp, Zea mays
  Peptide Sequence Number=SeqID_78499
atggctagacgagttcgcaacgaggcacgtgcccaacgacggcgagggacggacagaacagcacaggggctcgccggtggtgacgaaaatggccggagcaggagcgatgcccaacgaacggtggagaggcggatgtgcagcgagacggctccaatgatgttgcgcaggccgcgctggccgcaccgggccaccgcgccgccgcgctggggccgatctgccgcgctcgtgcctgggcaccgggatgctgcgccgcgcctgcacgctggccgcaccggttggttgcgggccaccaagccggcagaccgcgctggccgcgggcgagcagagagggcagtggtgaggctcctggtgcagcagtcgcgaggagagagggagagaggttacgcgcagggagagaatgcagggcggctccaaggcatcgtgcacgttctggttgaggagggagaggggccgactggtgggccagctcggcaaggcatgcagcacatgcaagcgacgaccaggggcggttgctgcgtgagcgaggggcaaaggggcagttccagatcatgggtgttgactgagctactgcatgcctatatggatgagacgccggactccactcttggaaaccatgcatgcaaagaggcccgtcacgcttgcaagaaaactagagacgccaaccaccatggcatgcatatatga

SEQ ID NO: 36721 - DNA, 192 bp, Zea mays
  Peptide Sequence Number=SeqID_78500
atggcgggcggaaatacgctcgccggagctaaggaacggtggctggccgatgagggtgagtgcggggcgaagagaggaagtaatggctcttggtgtggctttttaagagaaaccctaggtgacactggggtgtcacagtcgtcccccccaatgggtgtgaccaagggacgtcttggtacaaagagcgtttag

SEQ ID NO: 36722 - DNA, 186 bp, Zea mays
  Peptide Sequence Number=SeqID_78501
atggcgggcggaaatacgctcgccggagctaaggaacggtggctggccgatgagggtgagtgcggggcgaagagaggattcgagttagggatcaaggtgaacatccctgatctttggctcaagttatttgatgctcatgcttactttggttcacaggaagtaatggctcttggtgtggctttttaa

SEQ ID NO: 36723 - DNA, 405 bp, Zea mays
  Peptide Sequence Number=SeqID_78502
atggcgggcggaaatacgctcgccggagctaaggaacggtggctggccgatgagggtgagtgcggggcgaagagaggattcgagttagggatcaaggtgaacatccctgatctttggctcaagcctccatgtgattcagtctcccatggttgtagcgtggctgagagcggttgcctgctccaggctgagacacattctgctttgccggggcactggggcctgactgctgctgggctgccttcttcggacattgcatcacctagtggccttgttctccacaatggaaacatgctctgcttccaccctgaactggtgctgcttgactgctctggttgcttgctggggcgggaagacgaggtgcctgctgattctgcctctggaactgacatattcctgactgattga

SEQ ID NO: 36724 - DNA, 552 bp, Zea mays
  Peptide Sequence Number=SeqID_78503
atggcgggcggaaatacgctcgccggagctaaggaacggtggctggccgatgagggtgagtgcggggcgaagagaggattcgagttagggatcaaggtgaacatccctgatctttggctcaagccatggggcaaggacaagaaaggtccgggttcgccgcgtcgctccggcggcaaacggaaatgtgagccaagtccttcgtcagagtacttcggtgactctaagtacttggaggaggagttctcctccgagtccgagggatctccggggatagccgccgaggtgtggacgtacatccggtccatcgagcgcgccagacttgagggcttggatgagtcggaggtctcctcggatgaggagaactcttccgactcgttcgaggaagggagcggcggtgacggcgaggacgagggtgacgacggtgatagcagtggcggcgacaatgacggcgacgacgacggcaagggcggtggaggcgacggcggtagcaggggcggcgacgatggcaagggcgacagcagcaaggccagtggaaaagcgccactggcttaa

SEQ ID NO: 36725 - DNA, 426 bp, Zea mays
  Peptide Sequence Number=SeqID_78504
atgggcaaggacaagaaaggtccgggttcgccgcgtcgctccggcggcaaacggaaatgtgagccaagtccttcgtcagagtacttcggtgactctaagtacttggaggaggagttctcctccgagtccgagggatctccggggatagccgccgaggtgtggacgtacatccggtccatcgagcgcgccagacttgagggcttggatgagtcggaggtctcctcggatgaggagaactcttccgactcgttcgaggaagggagcggcggtgacggcgaggacgagggtgacgacggtgatagcagtggcggcgacaatgacggcgacgacgacggcaagggcggtggaggcgacggcggtagcaggggcggcgacgatggcaagggcgacagcagcaaggccagtggaaaagcgccactggcttaa

SEQ ID NO: 36726 - DNA, 1386 bp, Zea mays
  Peptide Sequence Number=SeqID_78505
atggcaggagtaggggagactctccgcagcttcatggaggagtttggggatcaaggagaggactccattatcttgtcaccgcggctgaaggagattagtactcctgaccgccccgctgccctccgtttcctaggcgaacggttttctgagatttttggaagtccttattacatggctccagaggtgctaaagagaaactatggcccagaggttgatgtttggagtgcaagagtgattctgtacattcttctttgtggtgtccccccattctgggcagaaacggaacagggtgttgctcaggcaatcattcgatctgtcattgatttcaaaagagatccatggccaagggtgtctgataacgccaaagaccttgtcagaggaatgctgaatccggaccaaaaacgacgattgacagctcaccaagtgcttggtcacccatggttgcagaacattaagaaggctccaaatgttaatttgggtgaaaccgttaaggccagactccaacaattctctgtgatgaacaagttcaagaagcatgcacttagggttatagctgagcatctttgggtagaagaggctgctgacataaaggatatgtttgagaagatggatcttaacaaggatcaaatgcttagtttcgaggagctgaagcttggtctgcataagtttggtcagcaaatgcctgatgcagatgttcaaacactaatggaagcggcggatgctgatggaaatgggtccttgaattatggagaatttgttacattatttgttcatctaagaaagatcggaaatgatgagcatctgcataaggcatttgcatacttcgaccggaaccagagcgattatattgaaattgatgaactccgtgagtcattagctgatgaccttggacaaaaccgtgaagagattatcaatgccatcatccgtgatgtagacaccgataaggatggcaagataagctacgatgagtttgcgacgatgatgaaggccggaacagacgggaggaaagcatccagacagtactcgagagagcggttcacaagcctgagccttaagctgcaaaaggatggatcgctgcagatgacgattacacggcgtgccttttatgaccgaaggatctcccggaggtcagtggtgatggagtccaagggttttgtcttcaagataatgggtggatgtgacaagcaatgcttcacaatgaagcaaggagttctgacttctagtatgcaaggtgcttctagttctagttcaatctctcgatgtcttgaaagtaagaaggtgaaaaagaagtttgaggatgtcgaataccaaaagcttcttccctgtcacaacgagagcttggccaagaggaggtccaagctttctactgctaccaccttcgcttaa

SEQ ID NO: 36727 - DNA, 1353 bp, Zea mays
  Peptide Sequence Number=SeqID_78506
atggcaggagtaggggagactctccgcagcttcatggaggagtttggggatcaaggagaggactccattatcttgtcaccgcggctgaaggagattagtactcctgaccgccccgctgccctccgtttcctaggcgaacggttttctgagatttttggaagtccttattacatggctccagaggtgctaaagagaaactatggcccagaggttgatgtttggagtgcaagagtgattctgtacattcttctttgtggtgtccccccattctgggcagaaacggaacagggtgttgctcaggcaatcattcgatctgtcattgatttcaaaagagatccatggccaagggtgtctgataacgccaaagaccttgtcagaggaatgctgaatccggaccaaaaacgacgattgacagctcaccaagtgcttggtcacccatggttgcagaacattaagaaggctccaaatgttaatttgggtgaaaccgttaaggccagactccaacaattctctgtgatgaacaagttcaagaagcatgcacttagggttatagctgagcatctttgggtagaagaggctgctgacataaaggatatgtttgagaagatggatcttaacaaggatcaaatgcttagtttcgaggagctgaagcttggtctgcataagtttggtcagcaaatgcctgatgcagatgttcaaacactaatggaagcggcggatgctgatggaaatgggtccttgaattatggagaatttgttacattatttgttcatctaagaaagatcggaaatgatgagcatctgcataaggcatttgcatacttcgaccggaaccagagcgattatattgaaattgatgaactccgtgagtcattagctgatgaccttggacaaaaccgtgaagagattatcaatgccatcatccgtgatgtagacaccgataaggatggcaagataagctacgatgagtttgcgacgatgatgaaggccggaacagacgggaggaaagcatccagacagtactcgagagagcggttcacaagcctgagccttaagctgcaaaaggatggatcgctgcagatgacgattacacggcgtgccttttatgaccgaaggatctcccggaggtcagtggtgatgagggcctccaagatcaggaagttgttcaacctttctaaggatgatgatgtacgcaagtacgtgaacacatactgcaggacattcactaccaagaacagtaagaaggtgaaaaagaagtttgaggatgtcgaataccaaaagcttcttccctgtcacaacgagagcttggccaagaggaggtccaagctttctactgctaccaccttcgcttaa

SEQ ID NO: 36728 - DNA, 1017 bp, Zea mays
  Peptide Sequence Number=SeqID_78507
atggtcgcgttggcgtcggcctccgatgaaaccctagccgccgtcttgtaccacctcaagccccacaccgtcgacaccttcctcccccctcgccgcgccggccctcaatctgcgtccgcgacagtctccatggaaggtgagtccgtgcgtggattgtgtacccctctgccccggatcgtgctcgaccctgcgatggccgccgtcgccatccatggccgcgttgtggcgtctgcattggactccgcctcgccaccatccatggccgtcgtcgtggggctctgctcatcgagctctaggtactccgtgacaataatgcttgctggtgtgatcgatggagaggcacttgatcctacgacaactttggcctggcattttttttcatgggttagttttgctcatttagatccgcttgctatatattttgcgcattcgttacttctgactgtcacaggaattccatgggcattcttaacagagctccaagacatatattaccctgctgctaatcatgtcaacaagagtgactacgacaaatgtgaaggttttcctctacctcaaaatcgcagcgatggagccggatccggtcgccgctggggcatcctcctcgccgccgccttcaccagcgccggccacgtccccgccgtggcaaacgcgaggagcggtggattgcgcggataccggaggagacctgaatctcgcgccgccgccgtcgcctcagcaggctacaggttcgttctcttgcagcagatggccagtagggtttgctgcgtccgtctcatggtggggaaattgttcgtagttgagaacatcgcggtgggcagcgaggtggagcaggaggagccaaagaaggaggtgatggcaggagtaggggagactctccgcagcttcatggaggagtttggggatcaaggagaggactccattatcttgtcaccgcggctgaaggagattagtactcatgaccgccccgctgccctccgtttactgctgtcagtttttactctgacagactcctaa

SEQ ID NO: 36729 - DNA, 246 bp, Zea mays
  Peptide Sequence Number=SeqID_78508
atgccgaagctatcacctataaagcttcggcacagtgacttgtctcaagacgaaggagtgaaccgacttaaagatgaaatgaccaataaacccatgatagtttgtgtcatgattgtaattgattgtaaagggcataaatcatttgagaacaagtctccaatagtgaggaagcagcaatcttttgttgcttttgctctaaggtggtgccaaaagaaaaatctcaagagtgaagcctcgggaggatga

SEQ ID NO: 36730 - DNA, 423 bp, Zea mays
  Peptide Sequence Number=SeqID_78509
atgcaactctacgctcgcctaagccaagaagataaggcggtcatgctcaaacttctaaaaagagcgagagagcaaagcgaagctcgtcaaaggatagaagatattctctccacaaaaatgctaagctttgaagagttgactaaagaacatgaggagctaaagtgctctcatgattatttggtccaaagcaaatcttcctttgagctagaatttgcaggagcaaaggatgatacatatcaaaagctcaaagaagaaaatgagaggctgttgggggtatgcttcgtagtcgaagatcctaaagaaagagaacaccttcggcagatcctctcagaagcagcaccgaagctatcacctataaagcttcggcacagtgacagatctcaagacgaaggggtgaaccgacttaaagatgaaatgacttaa

SEQ ID NO: 36731 - DNA, 192 bp, Zea mays
  Peptide Sequence Number=SeqID_78510
atggcggcgattgaggacttctatcaagggtcccgtgacgaggtatgcttcgtagtcgaagatcctaaagcaagagagcaccttcggcagatcctctcagaagtagcgccgaagccatcacctataaagcttcggcacagtgacagatctcaagacgaaggggtgaaccgacttaaagatgaaatgacttaa

SEQ ID NO: 36732 - DNA, 264 bp, Zea mays
  Peptide Sequence Number=SeqID_78511
atgggagaaaaaggcagtgtatacattttacttggttcaattcgcattgcagattatgtgcgctacagaaagatcacttccaacatgaatgaacgctttccagatgctacatcagaagagctcgatgtagaaacaggagaacaggctgaagaagaggttcctctacggcttctccatgggagcttcagctccacaggaaggattctctctactgggacggtgccgtgctgcttgccccaatgtgcaagggttattgtatattaa

SEQ ID NO: 36733 - DNA, 2043 bp, Zea mays
  Peptide Sequence Number=SeqID_78512
atgtccgcgcggagaagctcgtcgcggcgggaggccaggaaggccgcgagcgtggggagcgggtgcgaggatgtggcgagcaccagtgcctgctcggcgagggagaggaaggagtgcggcggcggcggcgtctggtgcgactgtcgcggcgcgggggccggcgcggtgaggtggagcgggagcgaggagggggatgacgacggtggcgcggccgggaggagcgggccccgtttcctcggctctgatctcgcgattcgtcgagtatgccgcagagggagcggaccccgaagaggagcaggcactgcagccgagcagagggcgcggtggcttactgggggcgcaggggtgagctccgacacgtcgagaggagagacggggtggggcgaggggtttcggccatgggcgattagtgagggcgtacacagggagcgtgcggaagtggcagagctggttgaggtcgtgggggaggaggtcacgggagtggagctcgtgcgtgcggcgccgtcgcggaggcggaggttgccgaagaggatgacatgcgtcgttcgcatatggaagctgggctgcattagattcaatgtacgatcgtctcgagtcgtttcgcaaaagaaatttatgtcaaatgaaaaatacttcaatatgaacagaagacaaaggcgatccagtggtgtgtttgggaaggtttccgcggtcgggcggcgccccccagtggcgaagatgatccgactaccgacgtacgcagcgttcagcctgctggcgacggcgtcggcggcgtactacgcgttcagcagccgtgagcagttctacccggcgatggtgtacctctccacctccaagatctgcttcgtgctgctcctcaacacgggcctcgtcgccatgtgcgtcgcctggcagctcgccaggcgcctcttcctcggctcgctccgtgaggccgaggttgagcgcctcaacgagcagtcctggcgggaggtcatcgagatcctctttgctgtcaccatcttccgacaggatttctctgtttcctttcttgccatggttgctgcgcttctcctcgtcaaggcgctgcactggcttgcacagaagagggtcgagtacattgagaccacgccctctgtgcccttgctctcgcacatcaggatcgtctccttcatggttttcctgcttaccgtcgactgcctcttcctgtcaaactcgctcaggtcactcatacagaagcaggaggcgtccgttgccatcttcttctcctttgagtatatgatactagcaacatccacagtatcaacattcgtgaagtatatattctatgttagtgacatgctaatggaaggtcaatgggagaaaaaggcagtgtatacattttacttggagctcataagtgaccttgtgcacttgtcattatacatgctcttcttcatagctatcttcctgaactatggtgtcccgctgcacttgattcgtgagctatatgagactttccgcaacttcagaattcgcattgcagattatgtgcgctacagaaagatcacttccaacatgaatgaacgctttccagatgctacatcagaagagctcgatgtgagtgatgctacatgtattatttgccgtgaggagatgactacagcaaagaaactgctctgtgggcatctgttccatgtgcattgtctaaggtcgtggctagaacgccaacacacttgccccacgtgcagagctccaatcattcccgcagataatggacatgctgtatcagcacgacaacatggagcccaggctggggttcagcctggtactgccactccatcctcagaaggagcaccaggtgagaacatgagcaggcaccaagcaaaacttgaagctgctgcagcggcagcttctttatatggaaggtcttttgtttatcctccagcaaacaccctaaaaagtgctgtctcccttgaggtggctcaggcagcaccaaaccctagttgccgccgcctcttctcccctccctgccttgccaccatcagagtgagtgtagatgtatttggaaccaacaaccatggttag

SEQ ID NO: 36734 - DNA, 192 bp, Zea mays
  Peptide Sequence Number=SeqID_78513
atggagacgtacattgctggttctcgcttgtcaaagtatgtcctagtgtatttctcaattctcttcataagatttcgcgctgggattgtcactagagaaatgttagcgcttccgaagccacaattcatgctaattggtttactggaagcgctaggtgctgcttcaggcatggctgctgctggtaatcaatga

SEQ ID NO: 36735 - DNA, 324 bp, Zea mays
  Peptide Sequence Number=SeqID_78514
atgtcgaagtcgtcttttgtaaggcattctggtgaccttgctctgaaattcttggagtttgttttcattgatggtgcaaaatgccttgagggaaagaggcctgatatatttgtagtcaactcttttggttctggtttccaactaattagcacttcatacattctggatagaatcgattataccgtttcgtcatctgacttgtttgaggaactttggtcttcctttacagacatagaaggtgctctcaaagacattaaaggacctctcagagatattgagggaactctgatcgctactgaaggagctctcatggccattgaatga

SEQ ID NO: 36736 - DNA, 1074 bp, Zea mays
  Peptide Sequence Number=SeqID_78515
atgcccgtcccgcccctcctctcgccacttcgcctgccctcgccagcgccgcccctccaccgcaatggagcgccatggcggcgcccgacgcaactacgtgccgcactacgggtcccccctccgcttcacctggggctcgccgcggcccgtggcgatggcgtgaggcggttcgtcgggacgctgggctcgaagagagcgcgagctgttggtgcaattagggtttctgcgatctctggagacggcggtggcggtgctggtggtacgggaattgcggcggcagcggccgccactgtggtctttgctgtgatgaaccgggtgctctacaagctggcgctcgtgccaatgaagaattaccccttcttcctcgcccagttcgccacatttgggtatgtcctagtgtatttctcaattctcttcataagatttcgcgctgggattgtcactagagaaatgttagcgcttccgaagccacagttcatgctaattggtttactggaagcgctaggtgctgcttcaggcatggctgctgctgctatgttgcccgggccatctattccagtgttgtcacaggagtttgttttcattgatggtgcaaaacgccttgagggaaagaagcctgatatatttgtagtcaactcttttggttctggtttccaggcactttttattttcctactccttccatttctctctaacttgaaagggattccttttgctgaactccctgcatacctaacccgtggtgctgcatgctttctgaatgtgggagggaatctgaaggatttttcagattgccatggagctcctttgctaccacttctctacataactctgaacatggccttcaacatttctgtccttaatcttgtgaagatgtctacagcagtggttgcttcgctgacatcaactttagcagtacctctttccatctatatactgtcactgcctctaccatatctacccgaaggaacaaatttgagcgcatcttttttgattggtgttgctaccttagtgctcggattgcttctatacaatcttcctcaagaatcaaccaatcaagtaaaggaagattaa

SEQ ID NO: 36737 - DNA, 669 bp, Zea mays
  Peptide Sequence Number=SeqID_78516
atgaggaggtatatcgtgagttcatttcatgagcccggtggaatcatcccatttgtctctgcaaatattgggtcagtggaaaaggaccatattcatggggatctgactttaccatccgtcagtgttttactttctataagctacaatggtgctaatcaaggaagtaaatatgaaaccaaccttcaaccagggactgctacggaggatatgatggctttcgaagagcagaatgcagacaagtctcacttagaagcctaccagttcaagcgcatcacatacacggcgacccatgtacagcaagggaccaggaagcgcaagggagatggatgggaaagaaattcggagccaggaacgaaccagtgggcacaggtggacatggcggccatagctgcggcgggatcggaagtcggcggctgccgctgccatggcagttccaaactgcctcgtctcgccgcttggcctgtggctcctgatgaactattatatatatatgtacatgaagttcccaagagaaaaaaaagaataaaaatgaacagagctagaacggatctgattttttgttgcttcctacaccagcacaactttccttacttttcccccaggtcgatgttcctaggaatgcgaatgtcggtgtccaagtgttggatccctgaattgatgaatggatga

SEQ ID NO: 36738 - DNA, 570 bp, Zea mays
  Peptide Sequence Number=SeqID_78517
atgaacaacctggggcagatgggcgtggccatgggctacgtggacgtctccctcttcgtctccatgaccagcatctggggattcttcggtcgcatcgcctccggcaccatctccgagcacttcatcaagaaaagagcgccaagggagaatacaactaaaggttggtttcctaaagaagtgcctacatcatcacaggcagcacccaatattactcctccaagtgatgatgtgcctgcattttcagagattgtgctcacaatacctccgccaggagaggatgtgcttgcatcttcacagatagtgcaaccaatgtctcctacaagagagtttggacagttatctgcaaaactgggtaatgtcatcagctattgggtgcatttttctgcaaaactggaaggaacaagcatcaggcgacgaccgtctcgattgcgggagaagggagtgcccctcgagtatccgcagttcatcaggagccacaggccaagcggcgagacgaggcggtttggaactgccatggctgatgaggtaaggaaaatggaaggtttctgtgtaaaccagtgctacaagtga

SEQ ID NO: 36739 - DNA, 1122 bp, Zea mays
  Peptide Sequence Number=SeqID_78518
atggcggggatgcgttgggggcgatggctggggctggtgatggcggtgtgggtgcagtgcatctctggcaacaactacaccttctctaactactcgcacgcgctcaagacgctcatgggcctcacgcagctgcagctcaacggcctctctgtcgccaaagacgtcggcaaggcattcggcctcctcgcggggctagcgtacgaccgcgtccccacctggctcctcctcactgtcggctccctcgagggcctcctcggctatgacgcgcagtggatggtcgtgtccggggccgtcgccccgctcccctactggcagatctgcgtcttcctctgcctcgacgggaacagcaccacgtggatgaacaccgccgtgctcgtcacctgcatccgcaacttccgccggagcaggggccctgtctccggcctgctcaagggctacgtcggcctcagcaccgccatcttcaccgacacctgctccgcgctcttcaccgacgacccgacctcgttcctcgtcatgctcgccgtcgtgccggccgccgtctgcgcgctcaccatggtgttcctccgcgagggcgccgccgctgtagacgacgaggacgacgggctctgcttcgccgcaatcaacttgctcgccgtggcaatcgcactgtacctcctcgccgcggacctcacgaggctcggcacgggggcggggtcgtctttgtcgccatgctcctggtgctcctcgcgtcccccgctaccgtgtcggcgatcctggcgtggagatcgtggtgatcctaccgtgtcggcgaacgccgacctagaggaggcagactccttggtggccgcggccgtgccgctgcttctcatggtgaaggaggcacgtgctcccgaagagcggctgtggctcggggaggagcacacgatcgcgcagacgctcacgtcgctggacttctggctgatgttcgcgtcgttcctgatgggtgtgggcacggggctggccgtgatgaacaacctggggcagatggacgtggccatgggctacatcgatgtctccctcttcgtctccatgactagcatctggggattcttcggtcgcatcgcctctggcaccatctccgagcacttcatcaagtgcatctaa

SEQ ID NO: 36740 - DNA, 495 bp, Zea mays
  Peptide Sequence Number=SeqID_78519
atggtggtggccccctgggtgaagtaccttagccaagaatacgaccccatgttaacgtgggctgcccgcacctaccgctccccctcttgcccatctttcagagaagcagagagccacgaccgtggggctttgggcacgaagaaggacaaccagacggctttggcgcgtgacacggcacagcacgagtacgaaggcccaggggaggcagggacggcctcgggtcgtcgaacggagcagaggatgacgtcgaggtggccacgggcgtcacgacgagctgcttgccggcgacaaagaacagaggcgacgacgagcagaggaccggcaggggtcagccgcggtcgagttcgtcgggcagggctcggccaaggcagcagaggaggtcgccgacgcggggaaaggtcgacggcgctcaaggggaggacggggaacgacgtcgaggtctccggcggtgtcgagctcaaagtggtcgggaactggcgctcggtcttaccttaa

SEQ ID NO: 36741 - DNA, 489 bp, Zea mays
  Peptide Sequence Number=SeqID_78520
atggtggtggccccctgggtgaagtaccttagccaagaatacgaccccatgttaacgtgggctgccagcacctaccgctccccctcttgcccatctttcagagaagcagagagccacggccgtggggctttgggcacgaaggacaaccagacggctttggcgcgtgacacggcacagcacgagtacgaaggcccaggggaggcagggacggcctcgggtcgtcgaacggagcaggggatgacgtcgaggcggccacgggcgtcacgacgagctgcttgccggcgacaaagaacagaggcgacgacgagcagaggaccggcaggggtcagccgcggtcgagttcgtcgggcagggctcggccaaggcagcagaggaggtcgccgacgcggggaaaggtcgacggcgctcaaggggaggacggggaacgacgtcgaggtctccggcggtgtcgagcttcactgcggcgagctccacaacgacgatggatga

SEQ ID NO: 36742 - DNA, 504 bp, Zea mays
  Peptide Sequence Number=SeqID_78521
atggtggtggccccctgggtgaagtaccttagccaagaatacgaccccatgttaacgtgggctgccagcacctaccgctccccctcttgcccatctttcagagaagcagagagccacgaccgtggggctttgggcacgaaggacaaccagacggctttggcgcgtgacacggcacagcacgagtacgaaggcccaggggaggcagggacggcctcgggtcgtcgaacggagcaggggatgacgtcgaggcggccacgggcgtcacgacgagctgcttgccggcgacaaagaacagaggcgacgacgagcagaggaccggcaggggtcagccgcggtcgagttcgtcgggcagggctcggccaaggcagcagaggaggtcgccgacgcggggaaaggtcgacggcgctcaaggggaggacggggaacgacgtcgaggtctccggcggtgtcgagcttcactgcggcgagctccacaacgacgatggacgaccaacagaggaatga

SEQ ID NO: 36743 - DNA, 225 bp, Zea mays
  Peptide Sequence Number=SeqID_78522
atggggaagcctatcccatcactcctcatgctcctcctctgccgagtgaccgcacttgtacccaccataaccggaatgggagaccacgtctcaggtcgcacatcgcaatccccatggattcgagtccacagaccatcatcattccgatttgaaaagtggatacaatcaaatcctgacctcgcgcgagtgctagaaaaatcactcgacttctaccgtgatccctaa

SEQ ID NO: 36744 - DNA, 171 bp, Zea mays
  Peptide Sequence Number=SeqID_78523
atggggaagcctggcccatcactcctcatgctcctcctctgccgagaccacgcatccccatggatccgtgtccacagaccatcatcattccgatatgaaaagtggatacaatcaattcctgacctcgcgcgagtgccagaaaaatcactcgacttctaccaagatccttaa

SEQ ID NO: 36745 - DNA, 354 bp, Zea mays
  Peptide Sequence Number=SeqID_78524
atgcagtacaatggatcaagcagtctcattagctgcgagaagcagatgattcaaatcgagttttatccttgcaagatcagggcccaccgccttggcgtacaatgcctcactgaccccgactgccgtcgtgcagtgaccgcacttgtacccaccataaccggaatgggagaccacgtctcaggtcgcgtgaggggtaaagtctacgggcaggttcactcaggtatccgcacgttaatccttattccactttcatctcatagaccacgcatccccatggatccgtgtccacagaccatcatcattctgatatataaaaatggatacattcaattcctgacctcgcgcgagtgctag

SEQ ID NO: 36746 - DNA, 285 bp, Zea mays
  Peptide Sequence Number=SeqID_78525
atgcagggttcttgtctgaccgccatcgcagcaaaatcaaccaaggacctccctacactgaccactcccctactgcccttgcccctttcggcaatagcaaactacccaagtgattcaggggtaaacaagtctggactgcgcgctaaatcccagaatgtgcaggggctaactcagaagattcaccagacccaggggctctttagcaaatgggcacggcgaaggggtatctgcgcttcagagccatcggatccaagtcctgcggccatgattagatcctaccgttga

SEQ ID NO: 36747 - DNA, 135 bp, Zea mays
  Peptide Sequence Number=SeqID_78526
atgaaacccaaatcaaaatcggctcaacaaggtggtggctacgacgaacctgctgaagcgttatttccagagattgtagagcagaagctgctggccacgatatacggtgggcgcaaggcgacgagttggttcaag

SEQ ID NO: 36748 - DNA, 639 bp, Zea mays
  Peptide Sequence Number=SeqID_78527
atgcagggttcctggctgaccgccatcgcagcaaaatcaaccagggacctccctacactgaccactcccctactgcccttgcccctttcggcaatagcaaactacccaagtgattcaggggtaaacaaggtggtggctacgacgaacctgctgaaggcgttatttccagagattgtagagcagaagctgctggccacgatatacggtggcgcaaggcgacgagttggttcaggtgagcaattccggcctcaacagcagaccaccgcgcaagattctgccgcgcccaggtttccggcgatcttcgacgcgtggtttcccccttccgtgggcagcacagggtggccgatgaggctgttccacacaaacaaattgccagcatcgatattgccgagcgtgacgccgttgagaatgatggaggggcggcgcgaggtcacggcggaggagcttgggcgctgcagggagctcgccgaggaggactggccgagcggacctggcagggagccatccgccgtaggatgctcgccatgggaaggccatcttggtgagcgcgcaagggtcagagggcatggcgcccaagccttcatttatacggaggagaggaggtcgatggcgcttggattgcggatcgcgcgctggtga

SEQ ID NO: 36749 - DNA, 727 bp, Zea mays
  Peptide Sequence Number=SeqID_78528
atggccgtcgacgccctactctcctccatgggccggcgctcgagctccactcctcaccatggcgccctcctccctggcgctcgctccctgcaggcgagcagccggcgcaccttttcttcctccctggtctccacagcaaagcagcaaggagctctgctcctcctcttccatggacgtcgcccctctctcccatggcgtgacgccgtgctcctccaacccagtgcctccatctcccacccgacctcctccctctctgcgatccccatggccgtccggccctgcacagcgatccctttccctggctccagcacgcagagcagtttttccgggtccgaactcgagcagtggcccaccgtcgcccatggacgacctccatggaggccgcgcccctctcccttcttctcccctgctcgttatcccttacgcagcagcagccgggtcttcgtctgtccgcggcatgcagtaagcagggtgccccttcttcctcccgcttcacgccaacaagctcctgccatggccggatctaccccctccatggacgcccagaaattccagcagcgagcccccttcctcgctgttcgtcgtggtgcccgccggctgttcgacaaaatgtgcagcaagccgcgcgctgcagcagccctcccgttcgatctccactcccctcgtcgcgtgtcatcgctctcgtgctcgctgcgcagccccatccgcgacgccgtcgaaactcgtg

SEQ ID NO: 36750 - DNA, 231 bp, Zea mays
  Peptide Sequence Number=SeqID_78529
atggccggatctaccccctccatggacgcccagaaattccagcagcgagcccccttcctcgctgttcgtcgtggtgcccgccggctgttcgacaaaatgtgcagcaagccgcgcgctgcagcagccctcccgttcgatctccactcccctcgtcgcgtgtcatcgctctcgtgctcgctgcgcagccccatccgcgacgccgtcgaaactcgtgggaagaaaaagaactag

SEQ ID NO: 36751 - DNA, 300 bp, Zea mays
  Peptide Sequence Number=SeqID_78530
atggccggatctaccccctccatggacgcccagaaattccagcagcgagcccccttcctcgctgttcgtcgtggtgcccgccggctgttcgacaaaatgtgcagcaagccgcgcgctgcagcagccctcccgttcgatctccactcccctcgtcgcgtgtcatcgctctcgtgctcgctgcgcagccccatccgcgacgccgtcgaaactcgtggtgagaaacaccccgttgcccttgctattatcatatttttgcgctcggaattgtttgaactgttgcgtgaatataatcacagctag

SEQ ID NO: 36752 - DNA, 1278 bp, Zea mays
  Peptide Sequence Number=SeqID_78531
atgacttggccttgggaggatggcacaaattcgttggccgtggctaagagaagaatgagagctcactttgagttcatggagaagttgggagtcaacaaatggtgcttccatgatagggatattgccccggatgggaagacacttgaagaaacaaattctaacttggatgagatagtccagctggcaaagcagctgcagggtgagaccaatataaagccattgtggggtaccgcacagctctttatgcatccacgttacgtgcatggcgctgctacgagcccagaggttaaagtatatgcttatgcggcagcacaagttaagaaagctttggaggtcactcactacctaggtggtgaaaactatgtgttctggggtggaagagagggttaccaaactcttctgaatactgatatgaagagagaacttgaccatctggctaattttcttcaagctgttgttgactacaagaagaagattggattcaacggaacactattgatagagcctaaaccacaggaaccaacaaaacaccagtatgactgggatgttgcgactacgtttgcttttctacagaagtacggtcttacagctgccatcatgaattggagactgcacggattaatgggctgcttggaaatatcgatgcaaacactggtgatcctcaagttggctaggaaaggagactttgagacgctagaaaagaaggttctagagtggggtgagcccgctgttgcatccggcaagcaggtggcgctcctctctctctctcacgccagatcaggaggagcactgttctcccccgacgctgcttcgcggagacacctccggtcgcgcggtccagaagaaatcaccgactccgcttcgcggcagttgcaaccacgggacgattctggcggtggtcgggcgacgacacggcagcgatgcaagaagcctcactccgacccggtccacttcgtcgaggaccatgaggctaaggacgacgggccccatagaggaggcgatgccgacgttcaactgcaagcgaaccgatggctggtgttcgtcgccgcaatgtggctgcagtccatggccggcatcgggtacctcttcggcgccatctcgccggtcatgaaggccgcgctgggctacaaccaacgccaggtggccgcgctcggcgtcgccaaggacctcggtgactgcgttggcttcctcgctggctcgctctcggccgtgctgccgtcatgggcgatgctgctcatcggctccgctcagaacttcctcggctacagctggctctag

SEQ ID NO: 36753 - DNA, 760 bp, Zea mays
  Peptide Sequence Number=SeqID_78532
ctgccatcatgaattggagactgcacggattaatgggctgcttggaaatatcgatgcaaacactggtgatcctcaagttggttgggacacagatcagttcatgacagacattgcagaggctactttggttatgtcaagtgtagttaagaatgctaggaaaggagactttgagacgctagaaaagaaggttctagagtggggtgagcccgctgttgcatccggcaagcaggtggcgctcctctctctctctcacgccagatcaggaggagcactgttctcccccgacgctgcttcgcggagacacctccggtcgcgcggtccagaagaaatcaccgactccgcttcgcggcagttgcaaccacgggacgattctggcggtggtcgggcgacgacacggcagcgatgcaagaagcctcactccgacccggtccacttcgtcgaggaccatgaggctaaggacgacgggccccatagaggaggcgatgccgacgttcaactgcaagcgaaccgatggctggtgttcgtcgccgcaatgtggctgcagtccatggccggcatcgggtacctcttcggcgccatctcgccggtcatgaaggccgcgctgggctacaaccaacgccaggtggccgcgctcggcgtcgccaaggacctcggtgactgcgttggcttcctcgctggctcgctctcggccgtgctgccgtcatgggcgatgctgctcatcggctccgctcagaacttcctcggctacagctggctctag

SEQ ID NO: 36754 - DNA, 486 bp, Zea mays
  Peptide Sequence Number=SeqID_78533
atgctgctcatcggctccgctcagaacttcctcggctactgctggctctggctcatcgtcaccaggcaggcgccagcgctgcccctctggatgaatgatcaggtgctcgacaaaggcatggtggtgatgggagctcctcaaggccaacaaaatggtttcaaggaggcagccaactcggtggagttcctagtggcggtgccttggtaccttaaacaggtcgctacacccatgttggtagaacctttgctcaagaagcttgacatcatggtcgtggagatctccaacctctatcaggtggctacgctggtcaacgatctatgcaggtcgaagagcgtgaacgacctatcctccccatcatgccaaacccacaaggatgacgacaacaacaacctagaggacgaggatgagtggcaggatgggaagaagttcgatgcggtggccaccttcaagatcctcagcgaggttgacattgctcaccttagttag

SEQ ID NO: 36755 - DNA, 579 bp, Zea mays
  Peptide Sequence Number=SeqID_78534
atgcggcttcatacccttagagatgatgtggttttataccctcagaggtatgaagacagagaacctacacattgcattcctgtgcatacattgagtgatatttgcaggatatgtctaccactgaaaacaatgaaagttccttttgtgctagaaagaagacaatatcctataaaaatttgttatgctatgacaatcaacaaaagtcaaggtcaaacgctatcacaagtaggtatttacctcaaaaaacctgtattcacccatgggcagctttatgttgttgtatctcgagtgacttccaaagaaggtttgaaaatattgattgaagacgatgatggaaggtcaaacaaggagacaaagaatatagtttacaaagaaatattcatcgcattgccactaatggtaaatgccaaggacgaccacatgagggatagcctcagctcagtaccctccgcttcatattcgcttaccaatctcatgaatcattcaaggaacgaggaaggaacaaggattagtagaagaacatgtaccgaccaacagctattctggccgaggacagagtcgtctaccggcaaccgatga

SEQ ID NO: 36756 - DNA, 213 bp, Zea mays
  Peptide Sequence Number=SeqID_78535
atgagcgggtctgttcactgttttgtcgtgacctatggtccgaccgtaccggtacaacttagcatcgtacgttgcccgaggaggggtacgatgcggcttcatacccttagagatgatgtggttttatactctcagaggtatgaagacagaggacctacacattgcattcctgtgcatacattgagtgatatttgcaggatttttgggttctag

SEQ ID NO: 36757 - DNA, 303 bp, Zea mays
  Peptide Sequence Number=SeqID_78536
atgaagtattatttgaggtttgttttgtatctgaaggaagtgaagtatattgataaatgcagcatgtcatatgaattacattattcatttgcatctgaagttgggtcgtggcctatggtccgaccgtaccggtacaacttagcatcgtacgttgcccgaggaggggtacgatgcggcttcatacccttagaggtattgttgacgcagggaagggttatacaacctattgtggttgttcgaggaaatgaagatggtattggttatattgggactattgagttctatatttacaagtatttctga

SEQ ID NO: 36758 - DNA, 177 bp, Zea mays
  Peptide Sequence Number=SeqID_78537
atggcggtcctgcaagggattcctgcattggagcttcctataactgtagcgggttttctgaagctagtggaactttgtaaaggcctcgtagtgttaccctgcctcgcctcctcggtagaggtaaagaacaggtaccgcaggatgaagcgcatggaggatgctgtgaagagttcatga

SEQ ID NO: 36759 - DNA, 195 bp, Zea mays
  Peptide Sequence Number=SeqID_78538
atggcggtcatgcgagggattcctgcattggagcttcctataactgtagcgggttttctgaagctagaggaactttgtaaaggcctcgtattgttaccctcccttgcctcctcggtagagtctcacacccacccacaggtcaagaacaggtaccgcaggatgaggcgcttggaggatgctgtgatgtgttcgtga

SEQ ID NO: 36760 - DNA, 186 bp, Zea mays
  Peptide Sequence Number=SeqID_78539
atggcggtcaggcgaggaatccctgcattggagattcctataactgtagcgggttttctgaagctagtggaactttgtaaaggcctcgtagtgttaccctgcctcgcctcctcggtagaggtcaagaacaggtaccacaagatgaggcgcatggaggatgttgtgacatgttcgtgcgaggtctag

SEQ ID NO: 36761 - DNA, 855 bp, Zea mays
  Peptide Sequence Number=SeqID_78540
atgaccccgacactcgtgattgggaaaattgtggcatttgagatgtcacgtaaaatgggtcaagaggaggagccgatttcttcaagaccatatgcttttgaatgtgatgaacacaaaacgatgaaagacaagaagaaggatccaagcttaagctccttaagtgaagaagaagaagaaggtgatgatgatggtgatgatgatgatgatgatgatgatgatgatgaagcctcgacatcatcctctgaggatgaagaaacagttcgacgcgttggaaagctggtaacccccatcagcacaaagctgcaaaggcctgatgggcgcgattcaggtcaaggcctcgtccactcaagggacacgatctcgccttgcccgagcccggcctcgggcaaagacagccgacctaggaggattcacgtctcgcccgagggtcccctcaagcaacaggcacaccttcgactcgcccgaggcccagctcgggcaggcttcgcgaagaagcaaccttggccagattgcctcgccagccgaccggatcgtaggagcattcaatgcaaggatcgcctgacacattatcctgacgcgcgctcttcagtcgacagagccgaagtgaccgcagtcacttcgcccctccactggctgactgttggcacttgctctcggtcgcaaggggggccaacaagggtgaacaatgacgtcaacagggttacacgcaagatggcaatagctctgttaatctggcctctcacgagcactgtgcggggaccagcgactgcagcgaaggcctcgagcgaagggtggcgtctttgccttcgccccaacatttgccctccgagggaccagttcgacaaagtcacctag

SEQ ID NO: 36762 - DNA, 777 bp, Zea mays
  Peptide Sequence Number=SeqID_78541
atgaccccgacactcgtgattgggaaaattgtggcatttgagatgtcacgtaaaatgggtcaagaggaggagccgatttcttcaagaccatatgcttttgaatgtgatgaacacaaaacgatgaaagacaagaagaaggatccaagcttaagctccttaagtgaagaagaagaagaaggtgatgatgatggtgatgatgatgatgatgatgatgatgatgatgaagcctcgacatcatcctctgaggatgaagaaacagttcgacgcgttggaaagctggtaacccccatcagcacaaagctgcaaaggcctgatgggcgcgattcaggtcaaggcctcgtccactcaagggacacgatctcgccttgcccgagcccggcctcgggcaaagacagccgacctaggaggattcacgtctcgcccgagggtcccctcaagcaacaggcacaccttcgactcgcccgaggcccagctcgggcaggcttcgcgaagaagcaaccttggccagattgcctcgccagccgaccggatcgtaggagcattcaatgcaaggatcgcctgacacattatcctgacgcgcgctcttcagtcgacagagccgaagtgaccgcagtcacttcgcccctccactggctgactgttggcacttgctctcggtcgcaaggggggccaacaagggtacctgagcgcccagcgccttgtgctaaggacgcatgtgccctcagctacctaggttatccccagaatattcccataaagcagggttacagactgtaa

SEQ ID NO: 36763 - DNA, 606 bp, Zea mays
  Peptide Sequence Number=SeqID_78542
atggtggctctgatggtggagcggtggtggtgggtgtggtgtttggtggaggcgcagcggttcgcatggcggggaatgccgtcggcgggcggagctcaagctaactcggcccggcaatggaagggggaagaaggacatggcacggcctttggagagcgaggaacaggcgaacagcggctccgctttggatgcgtcatgggcgggggcgcggagcgtggagactcgatctgggcgttcggtgcaaaccaaaattccgttcggttcacggtttcaccgaaaaaaccgaactggacaccgagggtgagtgttggggcgaaggcaaagacgccacccttcgctcgaggccttcgctgcagtcgctggtccgacggagacaaaacgggcaaggacacccttcgcctgattcggcaccaggcgaaggcctgcgacgtcgtcatcccaccgtgcggcctcgtccagctcagaggcccacgtgtgatccggcccattgtaacgggccctgcgtggccgccgcgtgttacaggcctaatttgtaaaggcattcctgtaattacagtctgtaaccctgctttatgggaatattctggggataacctaggtggctga

SEQ ID NO: 36764 - DNA, 1053 bp, Zea mays
  Peptide Sequence Number=SeqID_78543
atggatatagtggtggaggaaggaaataccgatgttggcaatactgttgaaccatcgtatgaggttgtggctagaagtggttgttcagcacaattgtcaactaatgacactaatgaacatgaattggatatagagagcgaggatagtaaggtcagtgttggtaatgctgcaaaacaatcacacgatgttgtgggagtaggcattgactgtattttcaatcatgtaaaagtgtcaactgaagccgatcttgggacacaaccggatgtgatacacctgacatctttggatgttccaaatgaatcaagtcaaataagttctgagcagaacaaacaagatgctttggacacacttattagaatatcacaacataagaaaccaaagaaattgaatgtagctcgagttgtctctgaagattataagtgcaccccagaagatgttcagcttattgaatacattaaaacattaccggggaaacaagttgtggtggacatcgacagcgcatggttaaatagaaatgatatggaatgtctttttcatggtgacatccaagtgtctggcgaagccctcagtgcatatatacactgtattagggatgaagagcatttacttcatagagaaggtggaaaggtcttcttggagaacacattcatttccagtctgcttaagcgtgatggcgaccctaaaatgctcttaaattgtaaggaagacacaattgaaaaaagggtggacgactatttacagtctgacatggtgttcattccaatgaatatagaaaattttcactggtacctggcagttctgaatgcaaaaaaaaatgagttaaaaggtatagaaagacagattaaacttgcagcagaacataaagagctttaccaaggcaagtggtcgaaccttgatgttgcatcatggccagttatagagaagatcacaacacaaatgcaaacggatggggtatcttgcgggctatggatgataaactatatggaatactggacaggatcctccctatctgataacgtaactcaggatgatataacaatttttcctttttaa

SEQ ID NO: 36765 - DNA, 384 bp, Zea mays
  Peptide Sequence Number=SeqID_78544
atggggatagacaacgccaaatatttaaagaaacattggattcagagcactaaaccttatccaatttctttaagtcttcaaaaacttaaagatatattggatgtaaataagccgatggatacagattgttttaacatggctgttcggatgatcgcatgcaatgatgccttgttcttgttggaagacaaataccactacatggatctacagttctgttccataactaaatttggtcgagaccctcgccttcgtgcaaagccagatatcaacatgttggcaaaattattagaatgttggcctgacatggagtacgatgtttcagattgcaaacaaattctattgcccttttctttcatgggtcacttcacctttatatgtacttaa

SEQ ID NO: 36766 - DNA, 2001 bp, Zea mays
  Peptide Sequence Number=SeqID_78545
atggatatagtggtggaggaaggaaataccgatgttggcaatactgttgaaccatcgtatgaggttgtggctagaagtggttgttcagcacaattgtcaactaatgacactaatgaacatgaattggatatagagagcgaggatagtaaggtcagtgttggtaatgctgcaaaacaatcacacgatgttgtgggagtaggcattgactgtattttcaatcatgtaaaagtgtcaactgaagccgatcttgggacacaaccggatgtgatacacctgacatctttggatgttccaaatgaatcaagtcaaataagttctgagcagaacaaacaagatgctttggacacacttattagaatatcacaacataagaaaccaaagaaattgaatgtagctcgagttgtctctgaagattataagtgcaccccagaagatgttcagcttattgaatacattaaaacattaccggggaaacaagttgtggtggacatcgacagcgcatggttaaatagaaatgatatggaatgtctttttcatggtgacatccaagtgtctggcgaagccctcagtgcatatatacactgtattagggatgaagagcatttacttcatagagaaggtggaaaggtcttcttggagaacacattcatttccagtctgcttaagcgtgatggcgaccctaaaatgctcttaaattgtaaggaagacacaattgaaaaaagggtggacgactatttacagtctgacatggtgttcattccaatgaatatagaaaattttcactggtacctggcagttctgaatgcaaaaaaaaatgagttaaaaggtatagaaagacagattaaacttgcagcagaacataaagagctttaccaaggcaagtggtcgaaccttgatgttgcatcatggccagttatagagaagatcacaacacaaatgcaaacggatggggtatcttgcgggctatggatgataaactatatggaatactggacaggatcctccctatctgataacgtaactcaggatgatacaacaatgtttaggtttaagttacctgcaatattatgggactcgagattaaacacaaagaaaggacatcaaaatcttgaccacaatgtggatgaagatggagagagttcaagtgatgttcaaataatcgatactccattaacatcaacaaacacgcaagaactgatgtttgtattatgcacatatatcatggggatagacaacgccaaatatttaaagaaacattggattcagagcactaaaccttatccaatttctttaagtcttcaaaaacttaaagatatattggatgtaaataagccgatggatacagattgttttaacatggctgttcggatgatcgcatgcaatgatgccttgttcttgttggaagacaaataccactacatggatctacagttctgttccataactaaatttggtcgagaccctcgccttcgtgcaaagccagatatcaacatgttggcaaaattattagaatgttggcctgacatggagtacgatgtttcagattgcaaacaaattctattgcccttttctttcatgggtcacttcaccttatatgtacttaacatggacacgagaagcatctatataatggactccatgcctataccatcatggtttaagggtgatcatcctagcatgcattatatacataatatacattatattgccaataatatgaatgctgccatggaattggccaatcctacatggaaagacaatatttatatgtggcgtcgtatagtaccaacatgggttccaagaacattaaactgggatttatctggctttcttgttatcaactttatgcacgattggaatggtataaggttaccctgcatttgcactaatgggaatgacctgaggaccaaattcttagtagaattattgaagtacaaggacaatgaatccaaagacaacattccagaagaaatacaagaaattattaggcacatcagatag

SEQ ID NO: 36767 - DNA, 216 bp, Zea mays
  Peptide Sequence Number=SeqID_78546
atggagtacgatgtttcagattgcaaacaaggatttatctggctttcttgtatcaactttatgcacgattggaatggtataaggttaccctgcatttgtactaatgggaatgacctgaggaccaaattcttaatagaattattgaagtacaaggacaatgaatccaaagacaacattccagaagaaatacaagaaattattaggcacattagatag

SEQ ID NO: 36768 - DNA, 780 bp, Zea mays
  Peptide Sequence Number=SeqID_78547
atggggatagacaacgccaaatatttaaagaaacattggattcagagcactaaaccttatccaatttctttaagtcttcaaaaacttaaagatatattggatgtaaataagccgatggatacagattgttttaacatggctgttcggatgatcgcatgcaatgatgtcttgttcttgttggaagacaaataccactacatggatctacagttctgttccataactaaatttggtcgagaccctcgccttcgtgcaaagccagatatcaacatgttggcaaaattattagaatgttggcttgacatggagtacgatgtttcagattgcaaacaaattctattgcccttttctttcatgggtcacttcaccttatatgtacttaacatggacacgagaagcatctatataatggactccatgcctataccatcatggtttaagggtgatcatcctagcatgcattatatacataatatacattatattgccaataatatgaatgctgccatggaattggccaatcctacatggaaagacgatatttatatgtggcgtcgtatagtaccaacatgggttccaagaacattaaactgggatttatctggctttcttgttatcaactttatgcacaattggaatggtataaggttaccctgcatttgcactaatgggaatgacctgaggaccaaattcttagtagaattattgaagtacaaggacaatgaatccaaagacaacattccagaagaaatacaagaaattattaggcacatcagatag

SEQ ID NO: 36769 - DNA, 351 bp, Zea mays
  Peptide Sequence Number=SeqID_78548
atgaagggcgagggcaggatctcgaatccggtggcaaacggcagggacgctggaggccacgggtggaagctggcaagctgcggcccggacgctgcagcccgcggctggcggctggcaagcagcggggacgctagagaccgcggtggcaagctgcgggggcggccgggacgctgcgtgcctgatggctggcgcctggcaagcggcggggtgctggagattagggtttttggcaagtggccgggacgctgcgtgcctgatggctgtgcgggatcggacaatatcagacgtcgggagaatggacggctgagatcgcagaatggtaaaaacggcaggctacccttaccgtcttaa

SEQ ID NO: 36770 - DNA, 1386 bp, Zea mays
  Peptide Sequence Number=SeqID_78549
atgaagggcgagggcaggatctcgaatccggtggcaaacggcagggacgctggaggccacgggtggaagctggcaagctgcggcccggacgctgcagcccgcggctggcggctggcaagcagcggggacgctagagaccgcggtggcaagctgcgggggcggccgggacgctgcgtgcctgatggctggcgcctggcaagcggcggggtgctggagattagggtttttggcaagtggccgggacgctgcgtgcctgatggctgtgcgggatcggacaatatcagacgtcgggagaatggacggctgagatcgcagaatggcacaggcacggtaaaggtccacaacgtctcacttaaagcatcagagcaagatattagtgagttcttctcattttttggtgagattgtgcatgtagaattgaaaagttgtgatgagcggtcgcaatttgcctacatcacgttcagagataatcaaggagcagagagggatatgcttcttacgggagcgactatagaagatatggctgtcatcatcacaccagccatcgattacaagctaccagcgtttgttttagctgatctagagaaggctgaggatattgcagtttctatgttagccaaagggtttgttctcggcatggacgcagttgaaaaagcaaaggctttcgttgaaaagcatcagctcacatcaactgcaactgccaaagtcgcttcccttgacaggacaatgggcttaagccagaagttcagcaccaggaccttagtggtgaatgagaaaatgaaggagatggatgagaagtaccaggttgcagagaagaccaagtcagcattagctgcaaccgaacagactgtctctactgctagttctgtcatcatgagtaacaggtatatccttacaggtgcagcatgggtaactgatgcctacaacaaggttgcaaccactacaactgatgctagcaagtcgataaaggaaaggatgatggctgagcaggagggagccaatcagagcggtgaaaccgcaaaagttgatttgcttgaaatctctgaagcgaatgagcaagagtggaagcgtcatgaagatgactctacaaagaacgtcgttcaagaaagtcctgaaatgacttctgagaaggatcctagctgccacgagagtgaagtatccaaggccaatgttcatgatagcgttctaatgacagagcaaagtgagcgagagcataatcaacccgaaggtgaatttgcaaacactcatgtcccaggaagccctgtcactattccggtcaccgtgtccactattgacgggaactctagcaacggtcccaagaagcctgattctgctgaggctcttcagctaaatttttcaccctttagtgttgctttcgagcagtag

SEQ ID NO: 36771 - DNA, 1074 bp, Zea mays
  Peptide Sequence Number=SeqID_78550
atggcaggcacaggcacggtaaaggtccacaacgtctcacttaaagcatcagagcaagatattagtgagttcttctcattttttggtgagattgtgcatgtagaattgaaaagttgtgatgagcggtcgcaatttgcctacatcacgttcagagataatcaaggagcagagagggatatgcttcttacgggagcgactatagaagatatggctgtcatcatcacaccagccatcgattacaagctaccagcgtttgttttagctgatctagagaaggctgaggatattgcagtttctatgttagccaaagggtttgttctcggcatggacgcagttgaaaaagcaaaggctttcgttgaaaagcatcagctcacatcaactgcaactgccaaagtcgcttcccttgacaggacaatgggcttaagccagaagttcagcaccaggaccttagtggtgaatgagaaaatgaaggagatggatgagaagtaccaggttgcagagaagaccaagtcagcattagctgcaaccgaacagactgtctctactgctagttctgtcatcatgagtaacaggtatatccttacaggtgcagcatgggtaactgatgcctacaacaaggttgcaaccactacaactgatgctagcaagtcgataaaggaaaggatgatggctgagcaggagggagccaatcagagcggtgaaaccgcaaaagttgatttgcttgaaatctctgaagcgaatgagcaagagtggaagcgtcatgaagatgactctacaaagaacgtcgttcaagaaagtcctgaaatgacttctgagaaggatcctagctgccacgagagtgaagtatccaaggccaatgttcatgatagcgttctaatgacagagcaaagtgagcgagagcataatcaacccgaaggtgaatttgcaaacactcatgtcccaggaagccctgtcactattccggtcaccgtgtccactattgacgggaactctagcaacggtcccaagaagcctgattctgctgaggctcttcagctaaatttttcaccctttagtgttgctttcgagcagtag

SEQ ID NO: 36772 - DNA, 1023 bp, Zea mays
  Peptide Sequence Number=SeqID_78551
atggaaggaattgatgccaaggtcacggtatctcgcccgcgcccccaccaacctcgagcccgcccgccaccaatctcgctgtcgggtgcccttccttcctcgactcccccaaatgctgccaagtcccccaccaacgccgcccttccttccccagcagcccgcccccgccagattcacgctccgcgcgccccactagccgcgcgagccaccgccgggatactcgccaccaatcatcgccaccagtttcgcgctccgcgcgtcaagagcagccgtcacaatgatgccgcacgagggagaggaaggaaggccgcgcgagtcgccgccgggaaagacgcgcggcatcaccgtaaagcgaggtccggttgcgcgcgagggagaggaaggaaggtcgcgcgagtcgccgctgggaaagccgccaagcatcaccataaggcgagatctggttgcgcgcgagggagaggaaggaaggccgcgaccttcgcgcccccaccaaccctgcccccgagcccgcccccctccaagctcgcccctgacctgcctcccaccaaaccggaaggcgagatccgtggacgcgccccattccatacgcggcgacaacattcactgcgcccccttccttgcctcaatcgactgctattagaaggatggacagaggaacatcttgtgaggacgagatgtggttctatgactgttgccgtgtacggagacggggacaagccaacgcttataatgtacccggatgtagctctgaactacatgtcctgtttccaaggatttttcttctgctcggaagtggcgtctttgctgctacacaacttctgcgtctaccacaccaatccccaggggcacgagatgggagcagctccaatgtcgtcagatgtgccggtgccatgtgttgctgatctcgctgatcaagtcgcagatctctacgacgacctccaggctcgactggaggcagacaccgtcgggatggcttcttcatctgtaattgggatgatagttttattacgatttacaggttga

SEQ ID NO: 36773 - DNA, 540 bp, Zea mays
  Peptide Sequence Number=SeqID_78552
atgtcctgtttccaaggatttttcttctgctcggaagtggcgtctttgctgctacacaacttctgcgtctaccacaccaatccccaggggcacgaggtcagtgatgctggttcaatccctgtgataagagtcctacagatgggagcagctccaatgtcgtcagatgtgccggtgccatgtgttgctgatctcgctgatcaagtcgcagatgtgcttcatttcttcagattagtccagttgcaattggatttatgcttttttccttttgttcgtggcatcttgtttcctatggtttttatgcagcaaacttatgtgggtaatagcactgatcttgatgatgaaccagatggagaaaatccttgcggcgtaaagaaagacttggaagcaatggtgttccacccagaacaagctggctcaaggttcaagtacgacgcgctgcagcccgcccggcccagcgttgcagcgacgacgacgccccgctgcggacctgcggtcccggccgtccgtccgtcggtgatgctactagctgccaccagctag

SEQ ID NO: 36774 - DNA, 428 bp, Zea mays
  Peptide Sequence Number=SeqID_78553
tcttgcatgtaaaagggcatgtggtggtggctatctatcagattgacgatgcatcggagatccgatcggctaaccgaaagcgttgtgacgaagctcttgccgaaccggtcacaacgatgttctgggttgccctagaagatgaacggatgatttttcttcttcgttcatccgaccatggtgcgcttcctgtcccgttgcctcactattttgcaaagagtagacaaaaagtcactactcacatgagtgcagctagcaacgaaggccttgcgctaccacaggggggcaacaagaccatgccataccttgagccagcttgttctgggtggaacaccattgcttccaagtctttctttacgccgcaaggattttctccatctggtcatcatcaagatcagtgctattacccacataagtttgctaaggcatga

SEQ ID NO: 36775 - DNA, 342 bp, Zea mays
  Peptide Sequence Number=SeqID_78554
atggggaagaggcgcgaagctccgcgcggaagcgtcagagcattttctcgcggcagccaagctgaaccccaacgatggcgtcccttccgcttccttggccaccactatgcgcgcggcggtgacaatcaacgagcggtcaagtgctatcaccgtgccgtgaccctcaaccctgacgactctgaggctggggatatggcgcaggacacactctgtggcttgctagatgttgaagggaaggagagcttggagcttgctgtctgcaaggaggcagctggcaagtcaccgcgtgcgttgtgcaccccatggaatattattttaaaccgatatagcgccgacttgtaa

SEQ ID NO: 36776 - DNA, 423 bp, Zea mays
  Peptide Sequence Number=SeqID_78555
atggaggagtccaatttagctgctaatacaaagttacattctacagtgattgtcaatcttatgatagtggacaataaaagaacagttcacctacggacccaacatcgtgatatcattctcccatatgaagttgtggagcagctgttgcataccagtaaaaaatgtgacaagagatatttgttacacctgtatttgcatgctttatttgagatagatatacacgctggaaaggattttcatgatatgcaggtggagctttatgcagactacgagacaaggatgctactacccttccttctaaccagtcagcattacaggcttgacaaggcatatgaaatctttgcacaaaaagaacttgtaagggagcaagttttgtccttggtcgaatgggcaatgctaaggaagctctatcgacaattataa

SEQ ID NO: 36777 - DNA, 1545 bp, Zea mays
  Peptide Sequence Number=SeqID_78556
atggggaagaggcgcggaagctccgcgcggaagcgtcagagcatttttctcgcggcagccaagctgaaccccaacgatggcgtccccttccgcttccttggccaccactatgcgcgcggcggtgacaatcaacgagcggtcaagtgctatcaccgtgccgtgaccctcaaccctgacgactctgaggctggggatatggcgcaggacacactctgtggcttgctagatgttgaagggaaggagagcttggagcttgctgtctgcaaggaggcagctggcaagtcaccgcgtgcgttctgggctttcttcggagacttggctatttacagaggttctgattggatatgttatgttaatgaatcttacgacttcattttgtatcggtcattagctgaattgtatgtgatcaatggtcaatacgaaaagacactttctctttatgctgaactcctgaagccagaagtattcgagtttattgagaaatacaacttgtatgatgctattcatgataagattgtcaatcttatgatagtggacaataaaagaacagttcacctacggacccaacatcgtgatatcattctcccatatgaagttgtggagcagctgttgcataccagtaaaaaatgtgacaagagatatttgttacacctgtatttgcatgctttatttgagatagatatacacgctggaaaggattttcatgatatgcaggtggagctttatgcagactacgagacaaggatgctactacccttccttctaaccagtcagcattacaggcttgacaaggcatatgaaatctttgcacaaaaagaacttgtaagggagcaagttttgtccttggtcgaatgggcaatgctaaggaagcgtgattgtgcaaaccaaatcctgaaggctgccatggccatcaacagcaatactttagtagagatggaggtccctgaaccttatcttgactccctaccaaagaatggacggtcaaccttaggtgatatcatataccgctacataacctctgatcagttctcccctgagtgccttcttgattgcctggatctatccatggagtaccaggccctggaagtcgcaaaccgtgttgaggcgtcagtgtatgtgtggcgtcggagggttgctgccaaaccagtaaatggattgggccgaagcagcagtgctagatcatcatggggcatggatggtaggtccctgtcgctgtgcttggtggagctcatgaggcgcgacgacgtcggcgctgctgcggctaacaggaacaggaatggcagcgtgatgagggtgaaggagaaatgcagcgaggaggagggcgactcagtgtgctccgtctgcatcgacggcggagagctgctgctctgcgacaagtgcccgtcggcgttccaccacgcctgcgttgggctgcaggccactccggagggcgactggtgctgcccgttgtgcagatgcggcgtgtgcggcggcagcgacttggatgatgataccgctgaggggttcacggacaagacaatcatctactgcgagcaatgcgagtga

SEQ ID NO: 36778 - DNA, 756 bp, Zea mays
  Peptide Sequence Number=SeqID_78557
atgaaggccaagaaggggaatctctggcgccagttggcggaggagaggagggacgcgaataaggccattgccgacgcgcaggctgctcaagccgacgctaaacttgcgcgggcggaggccagtctcgcccgccaacgcgccgaggagctggaagcgcggctcggcggccttcgcagccgcgtggataaagccgagaccttgacgtgcgtggagatggcgcatgacgaggaggttgaagaccttggtgacctagacaacacgctgcccgaggcctcgctgccggaggcctcgggggtggatctagtgccgccatctgatgtgggcaagggcccctcgtcgacccccgcaccgactggagatggcgaggaccccgcgccagcccccgcgctgacgggcgaggacgcctcgaaggcggtggtcgaactggctgccgaagaccccgcggctgtggccgggccttcgcaggttctgacgtttgggcctgcgcatgcaaccgctactgacaatactatttttgtggcggcctcaaccgtagtgcctgccgatgatgattcgtgtggctttgtgtctaagtgttttgagtctgatgattctaggagtttgatttcgtggacagaggagtcttcggatgaaggcttggattattttgcagcattagatgtggctgcagcggagccttcgccgctcgtggagggttccgatggtctcctgggtgcgagtgctgggtataggcggcgaagggtggtggcgaaatag

SEQ ID NO: 36779 - DNA, 360 bp, Zea mays
  Peptide Sequence Number=SeqID_78558
atggcggcgactggtgcgaagggtgcttcgcaggactcgtggtccgacttctgcgtgagcaacgcgattccgtcggccgccaccgctaaggacatgatggcgcatgacgaggaggttgaagaccttggtgacctagacaacacgctgcccgaggcctcgctgccggaggcctcgggggtggatctagtgccgccatctgatgtgggcaagggcccctcgtcgacccccgcaccgactggagatggcgaggaccccgcgccagcccccgcgctgacgggcgaggacgcctcgaaggcggtggtcgaactggctgccgaagaccccgcggctgtggccgggccttcgcaggtggctgaatag

SEQ ID NO: 36780 - DNA, 504 bp, Zea mays
  Peptide Sequence Number=SeqID_78559
atggagaaggatcgccaagacgcggcgcagaagcgtcgggcggtcgttaggatcggggatcctttccgcgaggcgaagaaggcgcggggacgcgaagtctgccgcactgggcccaggaagtcttcggcaggtgcgaaggctgctacttctagcgcgggcaagccacccttgggcgagcctacgaaggggcgaaggttgtcgcgtattgacaaagcggcgacgcgtgttgccgacttcgacacagatatctgcgtgggggattatcttgttgggtcggatgtggggcaactggctgttgtcccgactccggttgtggccacttcaccgatggcggcgactggtgcgaagggtgcttcgcaggactcgtggtccgacttctgcgtgagcaacgcgattccgtcggccgccaccgctaaggacatggcagccgacttcgctgaccatgtcgcgtcgggtgctctgactgcggagtttgctgcagaagtcgagcgtctccgtgcgtag

SEQ ID NO: 36781 - DNA, 474 bp, Zea mays
  Peptide Sequence Number=SeqID_78560
atggccttgctagacccttgcgagtgcttccagcctgaggtggcactcaacttggcgcgcaacctgctcggatggggtgtgctgatgtttgccgggaggacttgtgctggtgtctctcctctcagcgaccttgccaccgaagagtttgtgttctttgtttccaaactccccagcgggttggctctgccgatcccatctttcttcgtgcagctgctggaggggcttggcctccagcctctacccgtggcgtcctacttcatccttcaggcggccatcatcgcctacctccgcgggatgaggacggaggcgaggacctcttcgcatgcgctgaggtggtcgccatcgctggcaagccaccggtgcaaaggtggccgccgccgctggcgagccgtcggtacggaggtggccgccttcgctggcaagctgctcgaagtagaggtggtcgccgtcgctggtgaggctgcccggaactag

SEQ ID NO: 36782 - DNA, 198 bp, Zea mays
  Peptide Sequence Number=SeqID_78561
atggccttgctagacccttgcgagcgcttccagcccaaggtggcactcaacttgctgctagaggggcttggcctccagcctctacccgcggcgtcctgcttcatccttcaggcggccatcatcgcctacctccgtgggatgtccgtggaggcgatgctccttcccgcttcttcctccagcattcggggtgaaggatga

SEQ ID NO: 36783 - DNA, 834 bp, Zea mays
  Peptide Sequence Number=SeqID_78562
atgtcagagcctgggctgttggttttggtggagacgaagaggcgcatttaccgcgggcggtggcattctcctcacgcggcagactggtctgctgctttcggcggagccgttatggccttgctagaccctcccgagcgcttccagcccgaggtggcactcaaattggcgcgcaactcgctcggatggggtgtgctggcgtttgccggaaggatccatgtcggtgtctctcctcacggcgacctcgccgctggagagtttgtgttcttcgtcttcaaactccccagcgggcggccatcgtcgcctacctccgtgggatgtccgtggaggcgacgctccttcccgcttcttcctccagcattcggggggaaggatgatcaccagcctcgtgaaggtggacagcgggctgagccatgggtccatccctcgtgcccccaacaatttggggtgggaagcgagccgtgctgcggctccatctctttggctttgatggcttcagtgccgcctccaacgccgccttccaccgccaagcggggagtggctgcccatccaccacacgggcgacagtcaggccgtgcgcaggtccaccgcacccacagtggcccttgcaccgccggccaccgcaggccacgctgcttcgatgccgcccgagggtcatacaagacgccgtacgccatggaggtggcggccacgtgcttggatggctcacggtacgggaccaggctgagcgactacatggctccggaccaccccaggagacaagcttttgggtacggaaccaggctaagcgaccacactgctccggaccaccccatggaacgagctcctgttctttag

SEQ ID NO: 36784 - DNA, 222 bp, Zea mays
  Peptide Sequence Number=SeqID_78563
atgaagtattatttgaggttggtattgtatctgaagataaatgaagtattatttgaggtattgttgacgcagggaagtgttatagaacctattgtggttgttcgaggaaatgagatggtagagattaaccttcttggcgagttcaaccatattagcaacacaattgataataagaggagttgtgatgctagggttgcagtgttcaggttatatttgaagtag

SEQ ID NO: 36785 - DNA, 105 bp, Zea mays
  Peptide Sequence Number=SeqID_78564
ggaagtgttatagaacctattgtggttgttcgaggaaatgagatggtgcttgttgctcatccagggaagtgggaagtagcagcacatccaccttcactctcataa

SEQ ID NO: 36786 - DNA, 111 bp, Zea mays
  Peptide Sequence Number=SeqID_78565
atggaacaacagtgtcatgttaaacgtgtcttgtcaatatacagtgtggaggtgcttgttgctcatccagggaagtgggaagtagcagcacatccaccttcactctcataa

SEQ ID NO: 36787 - DNA, 267 bp, Zea mays
  Peptide Sequence Number=SeqID_78566
atgtcggacgaccttgttgttcctgtccactttgaagttggccaagaatcttgctttcgcctcctggatcatccgctccttgtgctcctcgaactggagctgctcgtcagccggcaaggcgccaattactcaagagaaccagcggcggtgctctctggtcaggcgcggacggtccgtggcacggggccggacggggcggcggaaatcgccggcggcggcctggatctcgctcccgggagggaccccgtcggggaggagagatcctag

SEQ ID NO: 36788 - DNA, 267 bp, Zea mays
  Peptide Sequence Number=SeqID_78567
atgtcggacgaccttgttgttcctgtccactttgaagttggccaagaaccttgctttcgcctcctggatcatccgctccttgtgctcctcgaactggagctgctcgtcagccggcaaggcgccaattactcaagagaaccagcggcggtgctctctggtcaggcgcggacggtccgcggcacagggccggacggggcggcggaaatcgccggcggcggcctggatctcgctcccgagagggaccccgtcggggaggagagatcctag

SEQ ID NO: 36789 - DNA, 267 bp, Zea mays
  Peptide Sequence Number=SeqID_78568
atgtcggacgaccttgttgttcctgtccactttgaagttggccaggaactttgctttcgcctcctggatcatccgctccttgtgctcctcgaactggagctgctcgtcagccggcaaggcgccaattactcaagagaaccagcggcggtgctctctggtcaggcgcggacggtccgcggcacagggtcggacggggcggcggaaatcgccggcggcggcctggatctcgctcccgggagggaccccgtcggggaggagagatcctag

SEQ ID NO: 36790 - DNA, 258 bp, Zea mays
  Peptide Sequence Number=SeqID_78569
atgtcggacgaccttattgttcctgtccactttgaagttggccaagaactttgctttcgcctcctagatcatccgctacttgtgctcctcgaactggagctgctcgtcagccggcaaggcgtcaattactcaagagaaccagcggcggtgctctctggtcaggcgcagacggcgccgcggcccaagacgacggtggccctaggcagcggcggcacggttgccaggggtgcggtgcacccagcgtgggatcaggggtag

SEQ ID NO: 36791 - DNA, 193 bp, Zea mays
  Peptide Sequence Number=SeqID_78570
atgtcggacgaccttgttgttcctgtccactttgaagttggccaggaactttgctttcgcctcctggatcatccgctccttgtgctcctcgaactggagctgctcgtcagccggcaaggcgccaattactcaagagaaccagcggcggtgctctctggtcaggcgcggacggtccgcggcccaaggccggacg

SEQ ID NO: 36792 - DNA, 1464 bp, Zea mays
  Peptide Sequence Number=SeqID_78571
atggcggccgaacagaatgtcacaggccagcaaggcgctcatactgtccgtcgctctcctcgtgtagaaaacaagagaaagcaattagataaaaatgaattgaagaaaaggagaaagaggttaaggttgaaagtccttcctatacaagatgccgaaagtgatgatgaacaagacccagagtttgttcctgctggcgatggttctggcgacgacaacgttggtattgttggtggcgatgagaagaagggtataactaagacacgagctatacgatgctcacctgggaagtttataaagcttgtgaatgctctatctgatgaattgaaaagtgaagtagttgccaaggggtttggcagcctgctgagattcaagccgcacttattgtccagaaagttgctcagctggctgatgcggaagcttaacccggaaacgatgaaattagagattggtggtgggaaagagattccaatcactgagcacattgtttggtgtgttttgcagttaccaaacgttggcagtgatccgccccccatgtctgatgcagatgctcgtgccttgcgggatgagctgggggagcaaatttgtggcaaatcttatagacgcatatctggtatcaatatatctgttatcactgataaactgcagaagaggattctcactggggagctgggcctgagagcctttttcatggcagcatttcagtgtctgctattctccaacactgacactcgcatcaggattgatgatgtaaagtatactcaggacatccagaacatgggcaacaagaactggtgcaaagtggtagttgacaggctcagcatagctgctcgtctttatagaaaggattttgcggagaaaggcattaacgcatccatcagtggatgcgggatcttcgtagctctgagaagtatcactgacacgtgctacgacgcccccattggtgctctagcaatattacatgatccagtaccagcacctgccccagtagcagaccctaacccaacagcagcacctaacccaggagcagcagcatctgccccagtagcagcaacacccactgctactggcacatctgctgatgtgcttggaacatcctatgatcccgcctgtcatgcttccttcaatatccaacccccagtcttttaccagtaccctagctttagatcttcttttgaagcccagtcgtattcaacaatatcccgcgaccttatggcaaaagctcaccacgagtgctacactggcattcagaagcttatcgctgacgctatcgttgagaagcgagctgccaaagagcgtaggaggaaggtgaagaatgacactagagcaggagcaggatcaggaactagtccaattgcaccggaggaccaatctggaggaggtgatggtgaagaaattatacggagtcccgttgcaattgacactagagcaggagcagtatgtatcgaattaccgttgatgttgtag

SEQ ID NO: 36793 - DNA, 1167 bp, Zea mays
  Peptide Sequence Number=SeqID_78572
atgaggaaggtgaagaacgaccctagagcaggagcaggagcaggaactagttcaattgcaccggaggaccaatctagaggaggtgatggtgatgaaattatacggagtcccgttgcaattgacactagagcaggagcaggatcaggaactacttcaaatgtaccggaagaccaatctggaggaggtgatagtgaagaaatacagttggattgcagtggtggagatcttgatgatagcttagattttatgagaaccccatcgtgtggtgatgacattgatctggaagagggaaatttgaatagaacacctcctgatttacgtgggtcaatccgaagtattgatgatatattgcaaatgatgtattccccagagcactttgcaagcattgatggcgagggagcacctgagacagaagaggagcctctgagcagggacactgggatgcagcatcctactgcccaggatcatataacttactcaaggaggagcgataggtccattcaagttgccaacatacagaaggcagagactgagaagaagaaggctgagattgagatgaagaatgctgaagctgaggaggctgagaagagaaaggctgaagccgaacaagctgataagaagaaggcagaagaagctgagaataagagaaaggctaaggccgaagtagctgagatcaagagaaaggctgtagctgaagaagctgagaagaagaaggaagaagaagctgaggataagagaaaggctgaggccgaagaagctgagattaagagaaaggctgaggccgaagaagctgagattaagagaaaggccgaggctgaagaagttgagattaagagaatggctgcagctgaagaagttgtgaagaagaaggctgatggcgagaagaaggttgaagcggaggagaaaaggatacaggttgcaatgcagaaacagctaaaggacaacatcaaagctttgaaaaagccggtgcccgctgccaagttaaagaagatgttccagttacaaatgtcaaaagaatatgctgagcagcgccaacagtacgaggataggttgaacatgcttcgtcaggaggccaaagatgagattgatagtttggagaagagcattgatggccaggcaggacccagctcatcatttgatgatatccagttcccggcgggagtctga

SEQ ID NO: 36794 - DNA, 744 bp, Zea mays
  Peptide Sequence Number=SeqID_78573
atgctttgtcaggaggccaaagctgagattgacagtttggagaagagcattgatggccaggcaggatccagctcatcatttgatgatatccagttccctgcggagtctgatgatgatatcaacaatttgacccaaccaatccgactttctcaagacaaagtctcagtagaccaggctgatttcagcgagtttcaaaggatgatattcaagcgcctaggtgatagagtgctgaagaagcctagggagtacatatccccgttcaagatccctcgtaatcgacctgagatacccctggccaaggttgttgcacttaggcggaagatcgcctctgatcctgagctgaaaaggagaattttgttggagtttggccttcttgttggactcacaggaatcatagacctttttgtgcactgcatgcaacatgatgatattgtgcacaaggtcgattcttgtggatacagagtgtttctgaccactggtttttatgtttttgtccctatcaaagatggtgctcactattttgtatactgcttcaattttatccataagcgtattgatgtgctggactcgaacgactacttcctgaattgttctaatcaggaagaacggcacaaggctgtctttgccaaaatcccaatcattgatgcagccttccagaaagtttccaacctcaagttacccagagttagcaagtggaggcggccttttattgatgtgccaaagcaagcaggtcaaagcgattga

SEQ ID NO: 36795 - DNA, 336 bp, Zea mays
  Peptide Sequence Number=SeqID_78574
atggggagtcatgatccccgggcaaaacgggaatcacggctcatgggtaaagtgtgcgacctctgcagagggttagaaactgatatatcagccgtgctcacggttgcctttggtgcaatctatgctcaggtacctaaggtgggggacaaggactacgattcggatgaggccgacaaaattcgacactttaactctcaagccacaactatactcctcgcctccttatgccgagaggagtataataaggtgcaagggttaaagacggccaaagaaatttgggacgtcctcaatattgcacatgaaggggacgaggtgaccaagatcaccaaacgataa

SEQ ID NO: 36796 - DNA, 297 bp, Zea mays
  Peptide Sequence Number=SeqID_78575
atggggagtcatgatccccgggcagaacgggaatcacggctcatgggtaaagtgtgcgacctctgcagagggaatgaaactgggtcggacgagggccagcttgctatggttgcgcctggcgcggagatcgcgacggcggccatagtgccgaaagcgaggggggaggcccttgacgccggaggcgaggtgtcggccctcgccgtggtcagggacgaggcgggcgcagcgacccgccggctgaagggagtgacggaggcgctgagtcaggcgacggaggcgctgcgtcaggtccgctga

SEQ ID NO: 36797 - DNA, 258 bp, Zea mays
  Peptide Sequence Number=SeqID_78576
atggggagtcatgatccccgggcagaacgggaatcacggctcatgggtaaagtgtgcgacctctgcagagggaatgaaactgatatatcagccgtgctcacgagatacttgatcagagatggttggtttacagatgatgatgatgatggttatgactatggtaatggttgcctttggtgcaacctatgctcaggtaaagaagaaggtgtcgaggtggacctccaggagttccaggatttcgacgagttcgaggattag

SEQ ID NO: 36798 - DNA, 237 bp, Zea mays
  Peptide Sequence Number=SeqID_78577
atggggagtcatgatccccgggcaaaatgggaatcacggctcatgggtaaagtgtgcgacctctgcagagggaaggaaactgatatatcagccgtgctcacgagatacttgatcagagatggttggtttacagatgatgatgatgatgatgatggttatgactatggtaatggtaaagaagaaggcgtcgaggcgaatctccaggagttccaggacttcgacgagttcgaggattag

SEQ ID NO: 36799 - DNA, 369 bp, Zea mays
  Peptide Sequence Number=SeqID_78578
atggctctgatccgaacctggagatacctgttaatgtactttactccagaaacattgttaaatcatgtttttgaggaccttcggaagccgaaggcccccaacatccactcaatcaaattatcgtatctcatggaagatcgggccgcgtctactatcaattggtatcagatttccaggttgcccgcgagcagattcctgactccattctggggtgacccaaacttgattaggtaccttggagaggaccaacaaggacttgggaaaggccaaggtgttgaggaggagcagcaagggcgtccacaacaggaaggagatcaagtccgagtcggctgcgactctatctcgggttccaggacgagtctgcactaa

SEQ ID NO: 36800 - DNA, 330 bp, Zea mays
  Peptide Sequence Number=SeqID_78579
atgacgaaggtgatgcttgccgaaggtgttcaaaactcaagaagtggaagtgagttcaccggaggcacgggtcgcagcccatgcaagattacattaatgccctttacatttatcaataactctatgataattcttcgaggtctaatctggtttttcatctttaagtcggtttccttttccgccgttctcccgaagctcttctacacacagcttcggctctacgccaaccttcgtgttccttgtgcttcttcatactgtggctctgatccaagtccgaagatacctgttaatgtactttactccagaaacattgttaaatcatgtttttga

SEQ ID NO: 36801 - DNA, 375 bp, Zea mays
  Peptide Sequence Number=SeqID_78580
atgactgatgactacgtcggcgctcttagaggtaacagccgagtgacttatgacgacgtcggcgttttagagaaaaatggaaatgatatcaaattacaaatgtaccttcagctcgtgagaagcccatgcaaaattacattaatgccctttacgtttatcaataactctatgataattcttcgaggtctaatctggtttttcatctttaagtcagtttccttttccgccgttctcccgaagctcttctacacacagcttcggctctgcgccaaccttcgtgttccttatgcttcttcatactgtggctctgatccaagtccgaagatacctgttaatgtactttactccagaaacattgttaaatcatgtttttga

SEQ ID NO: 36802 - DNA, 330 bp, Zea mays
  Peptide Sequence Number=SeqID_78581
atggctcaccggagagcttggtccacgcgcgcaagcgggcgaccgaagtccggtgaagtcgatctcgggcttccggtgaagtcctgccgggtccgagggcttggaaagcttcacgggccacttgcggagctagccgaagcactggctcgacttggggatggctggagtgggctggccacggtggccgaagctctggcggcagtggagggtggaaaagagctcgccggagctaaggaggggtggctggccggtgatgagatatggagcccggaaatccggtctgtctccctgctcaaacccgaggcaaatccagggttttgtcgtgtctag

SEQ ID NO: 36803 - DNA, 150 bp, Zea mays
  Peptide Sequence Number=SeqID_78582
atgaagctttccaagccctcggacccggcaggacttcaccggaagcccgagatcgacttcaccaaacttcggtcgcccgcctgcacgcgtggaccaagctctccgagtttaaaattaaaaatagaaactgaccaaaccttgtttaattaa

SEQ ID NO: 36804 - DNA, 642 bp, Zea mays
  Peptide Sequence Number=SeqID_78583
atgctcaacagtagcctcggaagcttgctcctggtcctcttcttagacagatccttgctcggggatgagcacaaattacaacttttgacggtgtatgatcttcttgagttagacaaggttaacttcacttatgtaagacctttgggtggtatacttggtaaattgggtcaaactttagctaagtttttcctcactgatcagtccctgggctactattcaaatgagtcactgacattgcagaaaacccctcgggttcttctaatcctaacccgaggtccttctcctaacttaaacagtaaccgcggtggaagaaagggcggaggggcttaccggcggcgagattgctccggtgaggtggtcaaggacgtaggggaggtctcggggatcacagcgatgtgtgggtcaccgtcggggatggtcggagtcggccggtccacgtgcgcaggtggagatgctcgtcggcggcgaggagtccggcctgctcacggtgcgatagttcaattgaacgggtcagagagcttcaccaaggaacaaggaaggggtgtgcgcgaggaattgaagaatggctcaccggagagcttggtccacgcgcgcaggcgggcgaacgaagtccgggtgaagtcgatctcgggcttccggtga

SEQ ID NO: 36805 - DNA, 720 bp, Zea mays
  Peptide Sequence Number=SeqID_78584
atggctatccagcgccaacggtcgactctaacagaaggaacagtgcagcacagtaccgcacagaaaaaatctttgaaaattcttgcaacacacccaatgggtgtgcccaaggggtgtcttggtagaggcaggaggggttgcggttggcctcgccacgctgacggcaaacgcaagcgtgccccgagtcctcccttggaggactttggggactcagagtactcagaggaggcctcctccgagtcggaccgttcgcctgctccggcttctcccccggcgtcatctgaggactcggatgcctccatggggctccccaccgcggcccgggcgtactggcgctccatcgagcgcgtcgggctcggtgggtcggatgagtcaggggtctcctcggatggggcagactcctccgactcttccgaggagtggagaggcggtgatggtgacgacgagggcgacgtcagtggcgacgacaacgacgagggtgacggcggcgacaacggcagcgagggtgacattggcaacgacagcggtgacgatggcgacgatggtgacaacggcagcaagggcgacggtggtgacggcagcaacaagggcgacggtggtgacagcagtggcgacggcggcaagggcgacagcggcaagggcgacggcggtggcagcagcaatggcggcaagggcgacggcagcggcggcaaggccagtggcatagtgccactggtttaa

SEQ ID NO: 36806 - DNA, 420 bp, Zea mays
  Peptide Sequence Number=SeqID_78585
atggggctccccaccgcggcccgggcgtactggcgctccatcgagcgcgtcgggctcggtgggtcggatgagtcaggggtctcctcggatggggcagactcctccgactcttccgaggagtggagaggcggtgatggtgacgacgagggcgacgtcagtggcgacgacaacgacgagggtgacggcggcgacaacggcagcgagggtgacattggcaacgacagcggtgacgatggcgacgatggtgacaacggcagcaagggcgacggtggtgacggcagcaacaagggcgacggtggtgacagcagtggcgacggcggcaagggcgacagcggcaagggcgacggcggtggcagcagcaatggcggcaagggcgacggcagcggcggcaaggccagtggcatagtgccactggtttaa

SEQ ID NO: 36807 - DNA, 363 bp, Zea mays
  Peptide Sequence Number=SeqID_78586
atgggggctccccaccgcggccccgggcgtactggcgctccatcgagcgcgtcgggctcggagtggagaggcggtgatggtgacgacgagggcgacgtcagtggcgacgacaacgacgagggtgacggcggcgacaacggcagcgagggtgacattggcaacgacagcggtgacgatggcgacgatggtgacaacggcagcaagggcgacggtggtgacggcagcaacaagggcgacggtggtgacagcagtggcgacggcggcaagggcgacagcggcaagggcgacggcggtggcagcagcaatggcggcaagggcgacggcagcggcggcaaggccagtggcatagtgccactggtttaa

SEQ ID NO: 36808 - DNA, 774 bp, Zea mays
  Peptide Sequence Number=SeqID_78587
atggcgagtaccgatgcctcttggctgggctgccaaacgaagtgcatcccgggctcatcagcgaggacactcacacaacgtcagcaacgaccgtcgtcccagcgcacaagaattcatggccgaccagtagcaacttacgtgaacaacccgagagtcgccggtgttggcgacgaccatgagatccccctgtttgacgatggacaacgcagtgcagccgctctggaccgcttccaagtgacggctgccccggagcttaccgtacacagcggcgtatgcggccacgtaggactgcttccagaggtcgaactggcagtcgtcaagcttcttctcgtcgtcgatgagcgacgccaacgctcgcctcctgctagtggtgtttgttcagggtttccaactaggcgtgggatgtatgtgggaatgagaatgggctttgcggggagggggaatgagaaatgcagaacaaggaatgagaatggcagggaatgcataacaaggaatgagaatggaagggaatggtggcagaacatgagaatggactctgcggggagggggaatgggaaaggcagaacagggaatgagaatggcaactgtgcagggaggggggaatggaaaagcagaacagagaatgggaatggcagaacatggaatggcagcctaccccttactgccttaataagttgtagagatttgatagggtctctactcttttggcagttgtatggcctgtatatcatctttactggcaccatctgctataacagtcgtcgaggaacttga

SEQ ID NO: 36809 - DNA, 207 bp, Zea mays
  Peptide Sequence Number=SeqID_78588
atgcacttcgtctggcagcccagccaagaggcatcggtactcgctatgtcgtgtgcatccgacgactactatatcaaggactgtggcgtcatctcggcgccggaggtaacgcagaggaggaccgacagcaatgaccaatttgtcatcctcgccactgtcgagatagcttttgtgccgtataaggctgactccaataagagcacctaa

SEQ ID NO: 36810 - DNA, 243 bp, Zea mays
  Peptide Sequence Number=SeqID_78589
atggctccatcacgcagtccagctcatcatccacctaaagcccaacctgccacacaggttccaacaatcaaggactgtggcgtcatctcggcgccggaggtgacacacaggaggaccgacagcaatgaccagttcgtcatcctcgccactgtccgggtgtgggatgtgctctccaatgatgagaccatgcaaatcgtggcatatattgaagtctgtatgatactgatggttgtaatgaagtag

SEQ ID NO: 36811 - DNA, 264 bp, Zea mays
  Peptide Sequence Number=SeqID_78590
atggcgcgacggcggcccgggtcgacggtggcggacctccgcggctgcacggaggacggcggggggagagggcgagcggggttctgggctcaagtggccgggggcggggcggttgcgagctccacgcgcgacgtgggcgcggagaccgcggcaacgcgcagctcgggcggcggttacgcggagacggcggagatgacagccggggcccgcgggcagagggagaggggaaagcgggcgcgggcgcggggaaaacgggcgcgctga

SEQ ID NO: 36812 - DNA, 744 bp, Zea mays
  Peptide Sequence Number=SeqID_78591
atgaacgtatgtgagctcacccttgctgtctcacacccccccacaggagaagatcaggtgaaaagatcgttgagccagttcactcctgctcaatgggacaaggatcagtggcatcctttcatggggccactgcggttcatccatcccaaccatccgcgagtacaactcctacttgcaagacagcaaaccggtgaagaaggttggagccttctgttggctctctctagctatatgcatagtggagctgcttatctgcatgaagtttgggcatggggcaccggaggggggcggtccacggcgaagcggctcggcggcggcgcaaaagggctccggcgagcaattgaacgcgacaggaggcaatacaaaggtcgggagggggcgggagaggttccttacctcaaggcggactccgggaactcctcggtggcggcaatggcgcgacggcggcccgggtcgacggtggcggacctccgcggctgcacggaggacgacggcgcgggggaggtgagagagggggtctgctggtgcgcaaatgggggaggggggagagggcgagcggggttctgggctcaagtggccgggggcggggcggttgcgagctccacgcgcgacgtgggcgcggagaccgcggcaacgcgcagctcgggcggcggttacgcggagacggcggagctgacagctggggcccgcgggcagagggagaggggaaagcgggcgcgggcgcggggaaaacgggcgcgctga

SEQ ID NO: 36813 - DNA, 1275 bp, Zea mays
  Peptide Sequence Number=SeqID_78592
atggaggcgaagcagcgcccgcggcacggcgaggagaggaggccgccggcgacggacaacggcggcggcggcggcgaggagtacgacccatggacggcgtggctctacaagccgcacaccatctcggtgctcctcgtcggcgcctgccttctcatctgggcaagtggagcactcgatcctgaaggcgctgctgctcacagtagcttgacatcaatcaagaggggtgtctgggctatgattgcagccttccttgcctactgcacgcttcaggcaccttcaactgctcctggcaattttgtcacaggatacttattaggccccatcctgctgtctggcgcctggtacatggactggctgtcgtttacctcgttgctctaccttcctccttttccagttttggcaactcagtccgaagcgcatactggttcttatctgtttctcattttccagaatcgtgacgatgctcgccagttcatgaaacaccttcaccctgatcttggagttgaattgccagagagatcttatggagctgattgccgtttgtatgttccagaaaaccctaaaaacaagttcataaatatttatgagacattgtttgatgaatttgttgttgcccatatccttgggtggtttggcaaagctgtgatgatacgaaatcaacttctactttgggtattgtcgatcggctttgagctaatggagctaactttcagacatatgttgccaaactttaatgagtgctggtgggatagcattattttggatatcttgatctgcaattggtttggtatttgggcaggaatgcacacagtccgttactttgatggcaaaacatatgaatgggtcggactgagccgccaacgaagcatcatgggtaaggtgaaaagatcgctgagccagttcacccctgctcaatgggacaaggatcagtggcatcctttcatggggccactgcggttcatccaagttctgttcctctgtgttgtcttcatgaccgtggagcttaacacattcttccttaagttttgcctgtggatccctccaaggaatcccttagtcgtgtacagattgatcctctggtggctgattgccatcccaaccatccgcgagtacaactcctacttacaagacagcaaaccggcgaagaaggttggagccttctgttggctctctctggctatatgcatagtggagctgcttatctgcatgaagtttgggcatggagagggagtatatgttaaaaaggctgcaaaccgcttgcctgacattcagtaa

SEQ ID NO: 36814 - DNA, 291 bp, Zea mays
  Peptide Sequence Number=SeqID_78593
atgggacctggcaaagtccgccaccccagctcaggctcaggaaaatttgtgttattatggttaacactcagatttgcactatgttcccaggtgcacgcctccctgagggattgggtaaagatcaatgtcagccctgaggtctctgaatctacaaggatcatctatggaggttcagtaactgctgcgaactgcaaagagctggcagcacagcctgatgtcgatggtttccttgtgggcggtgcttctttgaagcccgagttcatcgacatcatcaacgccgccgccgtgtga

SEQ ID NO: 36815 - DNA, 462 bp, Zea mays
  Peptide Sequence Number=SeqID_78594
aatggaaccacagatcaggttgagaagattgtcaaaaccctgaatgaaggaaatgttccctcttcagatgttgttgaggtcgttgtcagtcctccttatgtgttcctcccggtggtcaagagccagctgcgccaagagttccaagttgctgctcagaactgctgggtgaagaagggaggtgcattcaccggtgaaattagtgctgagatgctcgtcaaccttggcgttccctgggtcattcttggacactctgaaaggagagctctgctgggagaatcaaatgagtttgttggagacaaggttgcttttgctctgtctcagggactaaaggtcattgcatgtgttggtgagacccttgaggagagggaggctggttcaaccatggatgttgttgctgcacaaacaaaagcaattgctgtcgttggctgctgcctctcaggtgtcacagtagagttactgtag

SEQ ID NO: 36816 - DNA, 1797 bp, Zea mays
  Peptide Sequence Number=SeqID_78595
atgactgtgcgccccttcggctccatccacatccggtggaccagcgcaaagaaagcgggcccgcatgtcatggaccgggaaaggggacgttgtggaaaggatccttctcggcggaggaagcgggccccgagccctcctactgatcaggggttcgaaggctggcccctcggaagggtttcgacagccgccctagagcactcggacttcaagcccattactgatcaggggttcgaaggctggcccctcggaagggctggcccctcagaagggttcaacagtcgccccagagcacgcagagtgagggatgactctgggtacgttcgatacatagccgaggctcgggctacgctcctgagacaagttcacgcctcgcccgagggcctcctcagacagcgggtgccccctcggctctcccgaggctcggctcgggcaggcttcattgtgaagcaaccttggccataccgcctcaccaacagaccgcttcgcaggcgcattaaatgcaggggatgcctgacgccgtatcctgacacacacgcctcagtcggccaggccgaagtgaccgcagtcacttcgcccctcttctttactatccgacatgacaggaaaacagcgtcgctcgctccactccgactaccgtgtcagccaccccggcaacgactgacaacaagtcacgatcaaccaccgagttcaagcctcgggcgcaacaggaagctccgcctcgcccgacctcacgctccggcctcggaaggaggtttccgcctcgcccgacctcacgctccggccttgagaggagatctccgcctcgcccgaccctcggactcggcctcgaccccggtctcgggaggaattgcgtcctcgcccgaccccggcctcgacctcaagagaagtctccgcctcgaccgaccctgggctcagaccgaccgcgctaacaggggaaacatcatttccctattcctagcctgctcaggctacgaagaacaagaccggcgtcccatctggcttaccccggcgacgggactcaggcgctcctccggcggccacgccatcacatgtacaggacccaagctctcccccaacggccacgttggcatgtacacagggcttaggcactccactgccggatacaatggaaccacagatcaggttgagaagattgtcaaaaccctgaatgaaggaaatgttccctcttcagatgttgttgaggtcgttgtcagtcctccttatgtgttcctcccggtggtcaagagccagctgcgccaagagttccaagttgctgctcagaactgctgggtgaagaagggaggtgcattcaccggtgaaattagtgctgagatgctcgtcaaccttggcgttccctgggtcattcttggacactctgaaaggagagctctgctgggagaatcaaatgagggactaaaggtcattgcatgtgttggtgagacccttgaggagagggaggctggttcaaccatggatgttgttgctgcacaaacaaaagcaattgctgagaagatcaaggactggagcaacgttgttcttgcctatgaaccagtctgggctattggaactggcaaagtcgccaccccagctcaggctcaggaagtgcacgcctccctgagggattgggtaaagatcaatgtcagccctgaggtctctgaatctacaaggatcatctatggagtaactgctgcgaactgcaaagagctggcagcacagcctgatgtcgatggtttccttgtgggcggtgcttctttgaagcccgagttcatcgacatcatcaacgccgccgccgtgtga

SEQ ID NO: 36817 - DNA, 342 bp, Zea mays
  Peptide Sequence Number=SeqID_78596
atggccggagtcggtcggtccacgcacgcaggcggggatgctcgtcggcggcgaggagtccggcctggtcacggcgagatagaggaattggatgggtcagagagaataccgaagtccggtgaggtcgatctcgggcctccggtgaagtccggccgggtccaagggcttggcaagcttcacgggccactggaggagctagccgaagcactggctcgacacgagggtggctggagtgggctggccacggtggccgaagctcttgcggcaatggcaggcggaattaagctcgccggagctaagggaaagtggccggccgatgaagatgagtgcggggcgaagtga

SEQ ID NO: 36818 - DNA, 481 bp, Zea mays
  Peptide Sequence Number=SeqID_78597
taaccgcggcggaagaaagggcggaggggcttaccggcggcgagattgctccggtgaagtggtcgaggacgcaggggaggtctcggggatcacaacggtgtgcgggtcgccgtcggagatggccggagtcggtcggtccacgcgcgcaggcggggatgctcgtcggcggcgaggagtccggcctggtcacggcgagatagagcaattggatgggtcagagaggttcacgggatgccagagaagatatgggtgcaaggaatcggtcagagactcactggatagctcggtccacgcgcggcggcggaagaccgaagtccgtgggctggccacggtggccgaagctatggcggcaatggcgggcggaattgagctcgccggagctaaggagagggggctggccggtgaggagatatggagccaggaaatccggtctgtctccctgctcaaacccgaggcaaatccaaggttttgtcgtgtctag

SEQ ID NO: 36819 - DNA, 414 bp, Zea mays
  Peptide Sequence Number=SeqID_78598
atggccggagtcggtcggtccatgcgcgcaggtggggatgctcgtcggcggcgaggagtccggcctggtcacggcgagatagagcaattggatgggtcagagaggttcatgggatgccagagaagatatgggcgcaaggaattggtcggagactcactggatagctcggtccacgcgcggcggcggaagaccgaagtccggctactggcggagctagccgaagcactggctcgacttgaggatggctggagtgggctggccacggtggccgaagctctggcggcaatggcgagaggaattaagctcgctggagctaaggagagggggctggccggtgaggagatatggagccaggaaatccggtctgtctccctgcccaaacctgaggcaaatccaaggttttgtcgtgtctag

SEQ ID NO: 36820 - DNA, 228 bp, Zea mays
  Peptide Sequence Number=SeqID_78599
atgggggaggacgacaaggtcatcgtcgagcgttgtgccagggaatggagtcgcccaccggcagctcctcaccaccgacaggaagcaactcgtggagatgctcaagcggtcaccctatttcctctccacccacgtccacctctaggtccacgcgggcgaccaatccaacgaggcaccgttctccccatcaaggttcctggatctgaacaagcctcgcacaaaaattag

SEQ ID NO: 36821 - DNA, 966 bp, Zea mays
  Peptide Sequence Number=SeqID_78600
atggagcagtgcgatatgggcacgttcaaggcgtccggccccggcggccagcaccgcaacaagcgcgagtccgccgtccggctgaaacaccttcccaccggcatcatcgcccagatattacccctgaagtccagcgttagaggaaaagatgttggcccccaaatcggtccaaataactcaaaattttctccagaaatgcaagcattattagacctattgtttgctgttgaaggttctgtatcagatgcagcaaagattttagggtgcgcggatcccggccctcctccccacaccgcctctcccttcgcctgggctccaccttgtcgtgatctccgccgcggtgccgcggatcccggcacgcccgctcgcccggatctcgccgtgtccgcgcatggatcccgcccgctcgcccggtctcggcacgctctcacggtggaggcgcccctctccgccacgctcgcgaggcctccgcccgcctcccccaccgtgacaagtacccccgcggccccgcctccgtccgacgcccctaccacaccgccatctccgtgccccctctccctcccccagtgtgatgcccccccgtgccatggtgccctcgcctccgcccccatcaaacacctgcccccgcccacgctctcccacgatctctgccgccacgtctccgccgtcgtccgcaattggttcaggttagatctgcgtttggtggccatccccatcctcatcctcttccgcgcgcccacgcccactcttcatcctatttccgacatgggggaggacgacaaggtcatcgtcgagcgttgtgccagggaacggagttgcccaccggcagctcctcaccaccgacaggaagcagctcgtggagatgctcaagcggtcaccctatttcctctccacccacgtccacctctaggtccacgcgggcgaccaatccaacaaggcaccgttctccccttcaaggtaacctag

SEQ ID NO: 36822 - DNA, 876 bp, Zea mays
  Peptide Sequence Number=SeqID_78601
atgccttatgaggtatcacgagacgacacgcgtcatattcttttgcttaatgactcttgccaggttgtaaggggtagggttgtctctcctggttctgccttcagtcaatctgcaccgtccatctatatgcgtcaaatcatcaccgtccgtctcgtcgcctccgcttcaagcctcctccatccctcgatcgcaactgctcgctaccctcctctcccggcctcacccgcgctcctccagccgcggccgctgccgctgctgcgctgccacgcgccctcccagtacaaatcccagctccgcttcctctcctccctctcctcctcatccgtgcccaccagctcagatgctcccagcgacggcgggggcggccgcgacggggaagaggatggcgcgaagagcggcgaccacgtcgattacttggggatgagcaacgaggagctcatggagcagtgcgatatgggcacgttcaaggcgtccggccccggcggccagcaccgcaacaagcgcgagtccgccgtccggctgaaacaccttcctaccggcatcatcgcacaggttgtggaggatcggtcacaacataagaaccgagcgtctgctttatctcggcttcgaaccctaattgctcttaaagttaggaggccgataaacctggaagactacactccacctgttgagcttcttcagatattacccctgaagtccagcgttagaggaaaagatgttggcccccaaatcggtccaaataactcaaaattttctccagcatgttcctgttgttataattcaatggctaatgcattatgtgatagtcgcctagagggggtggataggcgaaacctgaaaattaaactttatcccccaactagatcccttgattag

SEQ ID NO: 36823 - DNA, 264 bp, Zea mays
  Peptide Sequence Number=SeqID_78602
atggtggtggtggcggtgggagggggcggaggcggcggctgggggacgtgggaagagctggtgctgggcggcgcagtgctccggcacgggggcgccgcgtgggccaccgtcgccgaggagctccggacccgttccccgtgcaccttctcggccgaggctgtgattggatatgatttacaatgcaaatgcaatgattttgactttttgagtagaacaaaggggagcccagaaacaatcatgtatgcattaatgaagtgtgacaca

SEQ ID NO: 36824 - DNA, 1881 bp, Zea mays
  Peptide Sequence Number=SeqID_78603
atggtggtggtggcggtgggagggggcggaggcggcggctgggggacgtgggaagagctggtgctgggcggcgcagtgctccggcacgggggcgccgcgtgggccaccgtcgccgaggagctccggacccgttccccgtgcaccttctcggccgaggctgtgattggatatgatttacaatgcaaatgcaatgattttgactttttgagtagaacaaaggggagcccagaaacaatcatgtatgcattaatgaagtgtgacacagaatgtgaagcaaaatttgcagagatacagttgcggtactccgcatgcaatgcttggtttgaagagcttcgtaagcagagagttgctgaactgaaaagggaattggagaagtcggaaaattctatcggatccctccaatctgtgattcaaagcctcagcaatagcaaacatgttgacgggagttctgaataccacaccagtcatactgaatcatgtccccgctctgaaaatacagcagatactaattcctcaggtaaagaaacatccagggatagatcatcagctgctagtttcacagaggaggcaagcaacagtcagaaatctcagaaagtgcagcagtgtgatactgattcaattcaagctatcaatccatcaccagatgagtcatatccccaggcccaagttgaaaaggtcggtcccaaagatggcttgctttggggttctagaaaacaaagaggagggagagctagaaggacacttctgaaaggtggtgatagtagcggggatggtgagcctacatctacagcattcatacagagggagggttcgtctaaaggctgcatgaagaacttcataactccaaaagtagaaccagttgttatgaagaagggtgtgaaaattccaaaagtagaatctggtgtgatgaataaggatttgaaaacttcaaatgtaggatccggtataatgaagaagtgcttgaaaactcccaatgcacaagctgatatgctgaagaaggatgtgagaactcctaaagcagaatccgatgttataaagaaggggttaaaaattcccaaagtagaacctgatgttatgaagaagggcttgagatcttcaaaggcagaatgtggtcagcctgtgattgagagagttaaactgaagctggcagagattttaaatactatatcaactcaagatgactgcaaaatgttgcaatgccaacttgatacccagaggaaaagagctagatataagaagatgattcgccggcatatggacttccgaatgcttcactctaagatcaagagtggcgcaatctcttgcaccaaggagcttctgagagatgtgctcattttcatcaataatgtaataaccttctatccgaaggctacattggagcacatggctgcggttgagcttcgtgagtctgcatgcaaaactgtgaagcagagtgcaagcttgttcttgaaaagccatggagagatcggaacagctggtgcccccgtagtaaagaatactcgagtcctgcagcctcgatgccctggccccggtgatgcaaggccaagcaaggtttcttcaagggacgctactgccagggaaggagatggcaagcgccctagtgatcagctggctaatcaaaagactatacagagaaatgagccagccaagaagagaggtgtgggtcggcctccaaagagtgggcataggattgctggggcacaggaagatagccccataaaaggcaggaaaaggggcgctggggcacaggaaggtagccccatcaacggcaggaaaaggggcgctggggcacagctagatagccccggcaaaggcagaaagaggagtgcggcagcacaggagaataaccccagcaaaggcggcaagaagagccggcggtga

SEQ ID NO: 36825 - DNA, 1215 bp, Zea mays
  Peptide Sequence Number=SeqID_78604
aggaaaagagctagatataagaagatgattcgccggcatatggacttccgaatgcttcactctaagatcaagagtggcgcaatctcttgcaccaaggagcttctgagagatgtgctcattttcatcaataatgtaataaccttctatccgaaggctacattggagcacatggctgcggttgagcttcgtgagtctgcatgcaaaactgtgaagcagagtgcaagcttgttcttgaaaagccatggagagatcggaacagctggtgcccccgtagtaaagaatactcgagtcctgcagcctcgatgccctggccccggtgatgcaaggccaagcaaggtttcttcaagggacgctactgccagggaaggagatggcaagcgccctagtgatcagctggctaatcaaaagactatacagagaaatgagccagccaagaagagaggtgtgggtcggcctccaaagagtgggcataggattgctggggcacaggaagatagccccataaaaggcaggaaaaggggcgctggggcacaggaaggtagccccatcaacggcaggaaaaggggcgctggggcacagctagatagccccggcaaaggcagaaagaggagtgcggcagcacaggagaataaccccagcaaaggcggcaagaagagccggcgccgttcccacgacacaatcagcaccaccggtgtcctcgctgccaaggcgcccgcccgctcgtgtgacgagtggcgttcgtccaccgcccattccgcgctcagctctgagggcctcccgcccgccgcggcatcatctccggctcctctcgtcgccacgaatggtaaggggggcgataggtgtcctaagatgaaactgcggttgcatctgttcgtcctgtgcgtgatcattatattcctggtgtacaacatggctaactttcaacataagcagacaacgaggcaggttttcctcttcctaaactatgatatgtgcctccaatgtaaacatcaggtgtctgacagagatgctgttaaggtgcctcaaaaggctgaggctaggattggttatttaccccatggtatagtggagtctaactctgacatggacttgaagccattgtggctgactacaagtgcacggtcaaagcagaagcctaaacaaaatgataattttttgattgctattgctgccggtataaatcagaaaaaaactgtggatgctattatgaagaag

SEQ ID NO: 36826 - DNA, 468 bp, Zea mays
  Peptide Sequence Number=SeqID_78605
atgacccagttcttgaaggatgagggggtcgttttgtcgccggaggatgaaaataagagggagaaggtgatccgagagctcaagaagatagtgatgcattgggccaacgcggtggcttatgagcagagtgtgccccaggggctggccacagctaccgtcctgacatacgattcttacacattaggggtggggaggatggctggccagtttgccaagccaaggtccgaaccgttggaggagagggatggcgtcaagctgccaagctataggggcgacaacgtcaacggcgacgacttcaccgagaagagtcgcgtgccagacccgcagaggatgatccgcgcctactcgcagtcggtggcgacgctcaacctgctccgcgcgttggcgaccggaggttacgctgccatgcagcgcgtcacacagtggaacctcgatttcatggatcacagcgagcaaggtgataggtga

SEQ ID NO: 36827 - DNA, 1716 bp, Zea mays
  Peptide Sequence Number=SeqID_78606
atggagtgggaggaagctgggcgcatgccgcccaatatgtaccgctgcttcactggcctttgcgaggctgcctcgcagggaggcgccataccgaccgctgctaccgggggtaacaataaggtcaaagttttcggaagcgatgggaaggtgtggttcgcaggccgccttcaccggtacacaacactcagtgctacagctgactggcgatcaagtccagacaacagtagcgccccctaccccagcgccgagccaggaccggcgaggaacacaagtcaactagtcaagtcgccgtgcggctcaccagctggcagccagcgagccagcagcggcacctggcgatccgatccaacgagccgcagggccacgaacacgacctcactaccgcatcctgccgtccaacccatccagctcactccgcgaccaatggctcgggccccaggagtcaggacgcccgcgttaagcaaacgaccgagccccgccgcgccgtcccgccagcgcgcagttaaaaacgcgggtgcacgcagcgcacccgtcgcttcgcttccttgctggctgtggctgcttcgtccgtcccacccaatcggcctctcccctccgctccccagcaggagcagccagcccagccctgacgcttcctccccacccggcgtgcaatcgctcccagtcctgactcgttcgctggaccgaacaccgcccggtggtgctcttccgccgtgcttctccgggctcctcctcgccgcccgccgcccggcggcgccgtcctggtggttccgtggggcgccggtcgggcgcgatcggccgtgcggccacccggctctcagtctcaggagaggcgtccctggctctcggggcagactgcacagcgtgtgcgggatatattgtaaaatggaagtactgcgtgatatgcacctgccaccaggatttggattccatccttcggatactgaacttgtttctcactacctgaagaggaaaatacttggccagaaaattgagtatgatcctataccagaggttgatatatataagcatgaaccatgggatttacctgcaaagtgcaatcttccaatcgaggacaacaagtggcatttctttgcctctcgtgacaggaagtaccctactggctctaggtcaaacagggcaacactcgctggttactggaaatcaactgggaaggaccgagccataaagctgaagaagcgaactctaggaacaaagaagactttagtctttcatgagggtcggcctccctctggcagacgcactgagtggattatgcatgagtattacatagatgagaacgaatgtaaagtcagccctgatatgaaggatgcttttgtcctctgccgtgttactaagagaagtgactgggaactggataatgaggtgggcaacaggtaccctcatctggaacaactagatgctgctgctgcatcagttgccagcactgtaaagccagaagatgcggttgccacagttatctgtccagaagaatctaatcgtgctgctacaccagttggcagtgatgaactatctaatgatgttggtcaggaacctatcactcctgattcatcacctccaaacggtggtaaagaactggaagtatggctggaagaactgttggatccttcaccttcatttaaccttgtagctgatactcgttctgctgatgtgtctctgactgaccaatatgctgaatcgtccgtaagtttctga

SEQ ID NO: 36828 - DNA, 159 bp, Zea mays
  Peptide Sequence Number=SeqID_78607
atggagtgggaggaagttgggcgcatgccgcccaatatgtaccgctgcttcactggtctatgcgaggctgcctcgcagggaggcgccataccggccgctgctgtcggggcgtatggccactgtacaggctctttggatcgtgcgttgcgacagtcgtga

SEQ ID NO: 36829 - DNA, 1230 bp, Zea mays
  Peptide Sequence Number=SeqID_78608
atggccgccggttctggccccgccccgcccgcggaagcgcagcccccgccgccgatccaccacctgccgccggacgcgctccacaacgtgctgctccgcctgcagctgcgcgacgccgtcgtgtgccgccccgtctcgcgcctcttccacgagaccctctcgccgcagctcctcgcgctgctccccagcctgcgcctcctcctcctccgccacccgcgtcccgacggcggcggctgcctccacgccttcgaccccgcgcgccgcacctggctccgcctccccttcgcccacttcctcccctaccactccttctcccccgtcgcctcatccacgtccctcctctacctctgggtcgagacctcctcctccacctcgcccctggccctccccccgtccacctcctccgcgtcttccgcctcgcccgtgcacccgcccaaatcgctcgccgtctgcaaccccttcgccggcacgtaccgcctcttgccccagctcggatccgcctgggcgcgccacggcaccgtcctcgccggccccgccggcacggtgctcgtcctcaccgagctcgccgcgctatcctacaccccctccggatccgccaagtggatgaagcatcccctctctctgccgtccaagccgcggagccccatactggcctccgacgccgtcttcgcgctctgcgacgtcggcacgccgtggcgcagccagtggaagctcttctcctgcccgcttgccatgctcacggggggctgggcgcccgtggagcgagcggcgtggggagacgtcttcgaggtcctcaagcgtccccggctcctggctggggccggcggccgccgggtccttatgatcggcgggctcaggtcctcctttgccatggacgcgccatgctccacggtcttaatactccgcctagatctggccaccatggagtgggaggaagctgggcgcatgccgcccaatatgtaccgctgcttcactggcctatgcgaggctgcctcgcagggaggcgccataccggccgctgctgccgggggtaacaataaggtcaaagttttcggaggcgatgggaaggtgtggttcgctggtaagcgagtgcgcgggaagcttgcaatgtgggaggaagatgagatggggagcagtgggaagtgggactgggtggatggtcttcctggctatggtgatggtgtataccgtggatttgtgttcgatggcgggttcacagcgattccttga

SEQ ID NO: 36830 - DNA, 390 bp, Zea mays
  Peptide Sequence Number=SeqID_78609
atgaggattagtcgggaccttgcgtggttccggatacctcgggtttcttgcggtctatggatggtgaactatatggaatattggatagggtcttctctgtctgataacgtaactcagaatgatataacaaagtactcaagattaaacacaaagaaaggacatcaagggactgaccatcatgcggatgaagatggaggaagttcatatgatgttgagataatcgagactccttgttcaaccacttatatcatcatgtgctctgcccgctacattaacatcaacaaacacacaagaactggtgcattatgcacatatatcatggagatagacgacactgaatatttggacatctatgatctttctttaactatgaaaacaaatgtttattga

SEQ ID NO: 36831 - DNA, 1562 bp, Zea mays
  Peptide Sequence Number=SeqID_78610
atgtgactcccttgtcatccttggatgttcaaaatgaatcaactcaaataagttctgatgtggatacgttggagcagatcgaacaagataacttggacactttgattaggatatgcgagcataacaaaccaaagaagttgaatgtggctcgagttttacccaaagattatacgtgcactacagaagatcttcaacttattgaatacattaaatcactaccgggaaaacaagttgtggtccttagtgcatatatacattctattagagatgaagagcatatacttcatagagaaggtggaaaggtcttcttagagagcacgttcatttccagcttgcttaagcgtgatggtgatcctaagatactcttgaattgtaaggaagacacacttgaaaacagggtggacaactatttacaagctgacatggtgttcattccaataaacatagaaaattttcactggtacctggcgattgtcaatgctaaaaaaaatgaggtacatatactcgattctatgggaccacaaataacggatcgtcgagacctttatactacattaaaaggtctagaaagacagattaaaattgtagcagaacataaagaacttaaccgggataagtggtcagacattgatgttacatcatggccagttatagaaaagattacaaagcaaatgcaaaccgatggggtttcttgcggtctatggatggtgaactatatggaatattggacagggtcttctctgtctaataacataactcagaacgatataacaaagtttagatttaagctacctgcaatattgtggaactcaagattaaacacaaagaaaggacatcaagagactaaccatcatgcagatgaagatggaggaagttcatgtgatgttgagataatcaagactccttgtgagttacctatatcattaaatgcatcatcccaggttcaaccatttatatcgtcatgtgctctgcccgctacattaacatcaacaaacacacaagaactgatgagtgcattatgcacatacatcatggagatagacgacgccgaatatttggagaaacattggattcagagcaccaagccttatccaatttctttaagtcttcaacagcttaaaaatatattggatgtaaataaaccgatggataaggattgcttcaacatagctgttcggatgatcgcatgcagtgatgccttgttcttgttggaaaacaaataccactacatggatctacagttctgttccataactaattatggtcaagaccctcgccttcgtgcaaagctagataccaatgtattggcgaatttatttgaatgttggcctgacatggagtatactatttcagattgcagccaaattctattgcccttttgtttcttgggtcacttcagtttatatgtatttaacatgaacaccagaagcatctatataatggactccatgcctctaccatcatggtttaagggtaacgatccaagcatgcattatattcacaaaatacataatattgccaataatatgaatgttgccatgaaattggctaatcctacatga

SEQ ID NO: 36832 - DNA, 4674 bp, Zea mays
  Peptide Sequence Number=SeqID_78611
atggatagcgtgtatgctggggagcatcgagcaagtgcattgggtaaattgtgggttctaccggcttccttcatcggcggaccgagagacatgagacgacgatacatggatgcctttgctctcgtgcaaaagtacggtaagccggacatatttcttaccatgacatgcaatccaaattgggaggagataaccagcgagctagaaccaggtcaaaaatcacaagaccgttgtgatctggtggtgcgagtttttaaggctaaactagacaatttgaagcatcaactcttcaaaaagcacatacttggtgtcgtggcagcacatgtctatgtgattgagttccaaaaaagaggtctaccacatgcacacttccttcttatcatgcagacaggcagtaagctaactgttctagaccagtatgacgctgttatatcggcagaacttccagataagaacagattcccagaactttttgatatggtagtcaaacacatgatgcatggcccatgcggacatctcaacatgcaaaatacatgtatgaagaatggtagttgcaagtgccactatccacgactatttggtgagacaacgcttcagggcaaagactcgtaccccatttacagaagaagagatgacggacaaaaagtacgagtaagggggcatgacttggacaaccgttgggttgttccttataatcctactttattgaggatgtatgactgccacattaatgtggaggtttgctcaagcattaaggctgtgaagtatatatacaagtacattcataagggtcatgatagggcatctgtcactgtgatcgacgttgatggtggtcaaagtattaacgagattgagaacttcagagatgccagatgggtatcaccacaagaggctttatggagaatatatagtttcgatctgcatggtatatctcccccagttctgcaactacagctccacttgcctggcatgcatcttgttagttacaatataaatgatgatatgcgtcaggtcttaaacaaggataacattgacaaatcgatgttaactgagtactttagagcaaatcagttgtttgattgggcatcaaactacttatatagggagttccccgaggtggcaaggtggtggccaggtgcaaagaaatggacagcgcgtcaacaacgtatgcaagttggaagaatagtctcggcacacccagcagagggagaacattattatctaagggtgctacttaatcacgtgaggggtgctacctcatttgaaagtctaaggacatacgacggtaatgtatatccaacttttcgtgaagctgccgaaaaaaggggtcttattgaggcagacaacagcatcgatgagtgcttaactgaggcgtcaggatttcatatgctaccttctcttagaaggctatttgcgacgatcctggttttctgtgagcctactgatgtggttggtctgtggaacaaacatttggaggcaatgtctgatgacttctgtcgaacccatagtaactcaaatgtggtcgagcagttagtgttgttggatattagagatatgcttcaaacaatgggtaaggacatcaggttattccctctacctgcaataaaggacgagcacgacaatatggcagatgttgttagagagatatttgaagagatgaatattccagaagaccctgaggctgaatttgtggtttcatctctcaaccatgagcagagacacgcttatgacgtgatattatcatcggtggagaatattagtggaggtgtcttctttgttgatggtccaggaggaacaggcaagacatttctgtacaaagctttgctggcaactgttcggcgctctggaaagatagctattgctactgcgacgtcaggagtagcggcatctattatgcctggtggtaggaccgcacattcaagattcaaaatcccattgaacataaaagaaggtgacgtgtgtagcttcactaaacagagtgggacagccaaaatgttacgaaggtcatcactgatcttatgggatgaggccacgatgactaaacgacaggcaattgaggcacttgataagagcatgagagatataatggatagacctgatttgccttttggagggaaaacagtggtatttggtggcgactttagacaggtccttccggttgtacggaaaggtacaagggcccaaatcataaactcaacgttgcgtagatcttctctatgggatagcatgcaacatcttagacttgtgcgcaacatgagggcacagtcagatcaatggttttcagactatctactacgtattggtaatgggatcgaagagacatgcaacgatgataatgtgagattacctgacgagatatgcattccttacaccggtgaagatgatgatgttgatagattaattgaagaaatatttccatcgctagagacgaacatgcataatcgagattacatcacatctcgagcgatcttgtcaacaaaaaatgaaaatgttgacaagataaatatgaggttcatcgatcgcttctcagggcaagagatggtttaccatagtttcgatgttgctgttgatgatcctaacaacaactatcctcctgagttcttaaactctctcacaccgagtggactgcctccgcacatcctcaaactaaaggtcaactgtccagtgattttgctccgaaatcttgatcctcccaacgatatggatgaagaaaaggttgatgtcggcactattgttaatccatcatttgaggttatggcgggtagtggttgttcagcacaaattctaatcaaatgcagtgacacacacgaattggataataatgatggggagaatattaaggacattgttggtaatgttgtagaacaatcgcttgatgttgtggcagtaggcagtgacccagttcatgtgtcagctaagccgatgttggagaacaaccgaatcgaacaagataacttggacactttgattaggatatgcgagcataacaaaccaaagaagttgaatgtggctcgagttttacccaaagattatacgtgcactacagaagatcttcaacttattgaatacattaaatcactaccgggaaaacaagttgtggtccttagtgcatatatacattctattagagatgaagagcatatacttcatagagaaggtggaaaggtcttcttagagagcacgttcatttccagcttgcttaagcgtgatggtgatcctaagatactcttgaattgtaaggaagacacacttgaaaacagggtggacaactatttacaagctgacatggtgttcattccaataaacatagaaaattttcactggtacctggcgattgtcaatgctaaaaaaaatgaggtacatatactcgattctatgggaccacaaataacggatcgtcgagacctttatactacattaaaaggtctagaaagacagattaaaattgtagcagaacataaagaacttaaccgggataagtggtcagacattgatgttacatcatggccagttatagaaaagattacaaagcaaatgcaaaccgatggggtttcttgcggtctatggatggtgaactatatggaatattggacagggtcttctctgtctaataacataactcagaacgatataacaaagtttagatttaagctacctgcaatattgtggaactcaagattaaacacaaagaaaggacatcaagagactaaccatcatgcagatgaagatggaggaagttcatgtgatgttgagataatcaagactccttgtgagttacctatatcattaaatgcatcatcccaggttcaaccatttatatcgtcatgtgctctgcccgctacattaacatcaacaaacacacaagaactgatgagtgcattatgcacatacatcatggagatagacgacgccgaatatttggagaaacattggattcagagcaccaagccttatccaatttctttaagtcttcaacagcttaaaaatatattggatgtaaataaaccgatggataaggattgcttcaacatagctgttcggatgatcgcatgcagtgatgccttgttcttgttggaaaacaaataccactacatggatctacagttctgttccataactaattatggtcaagaccctcgccttcgtgcaaagctagataccaatgtattggcgaatttatttgaatgttggcctgacatggagtatactatttcagattgcagccaaattctattgcccttttgtttcttgggtcacttcagtttatatgtatttaacatgaacaccagaagcatctatataatggactccatgcctctaccatcatggtttaagggtaacgatccaagcatgcattatattcacaaaatacataatattgccaataatatgaatgttgccatgaaattggctaatcctacatggaaagacgatatttatatgtggcgtcgtatagtaccatcatgggttccaaaaacattaaactgggatttatcaggctttcttgttatcaactttatgcactcgtggaatggtaaaaggttaccctgcatttccactacttcaagtgtactgaggaccaaattcttggtagagttgatgaagtaccaggacaatgaatgtaatgacaatattccagaagaaatacaaaagattattaagcgcatcagtgtttag

SEQ ID NO: 36833 - DNA, 270 bp, Zea mays
  Peptide Sequence Number=SeqID_78612
atggctcgcaactcggcgtcctccctgcttgtgtggtgcttgctgcgtgctcgacgaaatgccgcagcgagcagcggtcatgagatcccctccgtgttgcttgcatcgacccgatctgcgcagtcccgacccaaggcgttgcgtgggtgtttggacagccccacactacgtcgtcgatctgcgcggttcgaccgtctccgcgtctcgcatcgccggcccttgtcgacgtcacgccttgcgcatcgctcgtcggcaaagagcccaaactaa

SEQ ID NO: 36834 - DNA, 648 bp, Zea mays
  Peptide Sequence Number=SeqID_78613
atggcgcgagcttcatttttcagagccgccgaagctcctcctcatggcgcccccactccctgctacatcttctctcagcctcctctcaccctcccaagacagccaaagcaggggccttcttccccatggaggccgagccccctgctcccagccgtgacgcccagaattttttccagcagagagcctcttcccatgggcgccacccccctgcaatttccccttgccggcgcccagaaatcgcagcagcatgctccttcgcctcgcgcgttgagtgctcgacgaaatgccgcagcgagcagcggtcatgagatcccctctgtgttgcttgcatcggcccgatctgcgcagtcccgacccaaggcgtcgcgtgggtgtttggacagccccacactacgtcgtcgatctgcgcggttcgaccgtctacgcgtctcacttcgccggatctgcgcagccccaacatcgacgccgttcaccccggcgaggaaccccgtgttttgcgtggagaaggcaagccgctcaacgctcgtcgacgtgcggagctatgcacacatcgaatcgccaacgttcttacaaacaccgattgggtttgtttatggatcgcatttgcggttggagaacaagaagttgtttgctgtgtgcgatttgtag

SEQ ID NO: 36835 - DNA, 874 bp, Zea mays
  Peptide Sequence Number=SeqID_78614
atccggcgaagtgagacgcgtagacggtcgaaccgcgcagatcgacgacgtagtgtggggctgtccaaacacccacgcgacgccttgggtcgggactgcgcagatcgggccgatgcaagcaacacagaggggatctcatgaccgctgctcgctgcggcatttcgtcgagcactcaacgcgcgaggcgaaggagcatgctgctgcgatttctgggcgccggcaaggggaaattgcaggggggtggcgcccatgggaagaggctctctgctggaaaaaattctgggcgtcacggctgggagcagggggctcggcctccatggggaagaaggcccctgctttggctgtcttgggagggaagaaagccggcgtcgagctcctggacatggggtcgctggagcgtcggcttcattccttgagcagggcgtcggccattggggctgctgggaatgggaaccgctggctgctggaggttgaagatgacggagaaaactgctcgcagggggaagcaccggctggaaaaatggaggctagggcgagctcaggatggctgctccctgcgccacgctccattggaggagacagcaagggcgccgatccacaccatggagagctcctgcgcacagaggaggaaaggatccctgcaccgaacgccgtggagaagaggggcgctggcagagatgggagcagaaagcttgggtgccatggctgggagcgcgatggagagggcagctcgctggtggctgttgctggcgtgaagcagggaggaagaagctggcggctggaaatttttgaggggtgggaatggaaaattgccaagggcaaggggagaggggttcatatttatagaggagctctagggttatggtttccttag

SEQ ID NO: 36836 - DNA, 627 bp, Zea mays
  Peptide Sequence Number=SeqID_78615
atggcagatctcgccggcacgactagcagcgtggtgcatgctcagggtttacaggatcttatgaccacattacgtgctttcgaggatgtcaaccactggctccagaccaagttctcccaggtagatatcgagctcaaacagtttatcaaaggctactcagatgccttacaacctgaattagggatgaaactgctaattgcacatggaagtcaccaagaacttggtaaaggtgattcaatgacaaatctaatgattaacatgtgcgatgtggttcacatgttaatgcatgcaactgaagtgcattaccaatgtcccaagagcgtaagggtacagtctgatgtatctgaaaggattgctaatggaactagtgttcatgtaaatattcctgttcaaaatttgaatctggatattgaagagcaatcacacaaacactcgatttcacacatccaggagccaaacactaataattcagaaggatccctggctggtgctgctgtctgggatgtattccgcaggcaggatcttccaaagcttaatgaatatctagctgttcatcgggaagaatgtgcagctagatgtcaagcagtgtcttctgtaatgactcatttcttccctatgtcaaattag

SEQ ID NO: 36837 - DNA, 921 bp, Zea mays
  Peptide Sequence Number=SeqID_78616
atgttctttgaccatgccattggtatcaacgttccaaggtcccgcttcctaccagttaaggcgacatcagatttgaagctagtacagtctgatctatataccttggttgatggcttcgttacacgtaattcagccagaacaaatccatcaaatccctcaattgaacttggtcctgagttcaagaaggttgggagcttccttggtcgcttcaagtccatacctagcattgttgagcttgacatcttgaaggtttccggtgatgtttggttcggttctggaattgtactgaaggggaaagtgaccatcactgcaaaacctggcgtcaagctagaaatcctagacggagcagtgattgggaataaggttcacatgttaatgcatgcaactgaagtgcattaccaatgtcccaagagggtaagggtacagtctgatgtatctgaaaggattgctaatggaactagtgttcatgttaaatatcctatttatgatcaaacagtgtaccttaacgattatcataagaagatgttgaaggatcaatatgagggactgaagacaatcgagcagattacaatggactcagcttcggtcgagaccaatatgttcaagctctgcaaggtgaggtttgttcagtttggccaaaaaggcatcccctacctgaacacctacgatggtcgcgccatccgctacctcgacccgctcatcaaggccaacgacaccatcaaaatcgatctggagaccaacaagatcatggacttcatcaagtttgacgtcgacaacatggtcatggtgactggcgggaggaacaccgagcgtgtaggagtcatcaagaacagggagaagcacaagggcagcttttgctgcttggagctttttgctatgtctagttttctcctatttgttgtacaggaaaacttagaatag

SEQ ID NO: 36838 - DNA, 597 bp, Zea mays
  Peptide Sequence Number=SeqID_78617
atgtcctcgtctccatcttcaatgaaccgccgtcccccgggcccgctagcgttggggctggagtccttggcgaagaagaagacacatagtaagaagctcaccgtcaaacctcatccagatccagtcgttgccctccaatggtcgaatatggaacgtcttgtctcttcctttggatccagcagccggtgctcctcctctggatctggcgcaatctttgccaaatggacacagggaacctatgccccacaggactgcacaacacgtgggataggtaatgcaggtattgcccccgctggctgtggctggccgttctttgaccatgccattggtatcaacgttccaaggtcccgcttcctaccagttaaggcgacatcagatttgcagctagtacagtctgatctatataccttggttgatggcttcgttacacgtaattcagccagaacaaatccatcaaatccctcaattgaacttggtcctgagttcaagaaggttgggagcttccttggtcgcttcaagtccatacctagcattgttgagcttgacatcttgaaggtttccggtgatgtttggttcggttctggaattgtactgaag

SEQ ID NO: 36839 - DNA, 1368 bp, Zea mays
  Peptide Sequence Number=SeqID_78618
atggatggtggcaacacacttccaactacaccggcctcacagccatcatcgaccatactatctcaagcagggcaaggatcaggtgtcacacaaaacaagggggctgccttcatccgcgagccgtcgctaacaccggagagtcgcaaagtttcgtctagcgctaagacaccatcaggagcccacaacacccctggtgccaacactctccgcctgctgcctctagaactgtcaaattcgcaggatgacgcttacagtgtgctagatggatctacaaacaagactgacaaaagtgttaccggaaaaagaaataaaaccaagatagtggatgctggtgcacttgagcccctgcttggttatttgcgatcaagcgatccaaatttgcaggagtacgccactgctgctctccttacactttcagcctcatccaccactaagcctgtcataggtgcctcaggagcaatccctctacttgtggaagtcctcaaaggagggaatccccaagccaagaatgatgctgtgatggccctgtacaacctctccacaatcgcagacaaccttcaagctatcctttctgcccagccgacccccccctttaatagagctactgaagggtggcaagagtgtcgggtggccttgacatccgaggaaggcggagtgctcgccgtcgtagaggtgcttgaggagggctcccttcagggcagagaacacgccgtgggagcgctcctgacaatgtgcgagagcgaccgcagcaggtacagggacctcatcctgaacgaaggggcgattcctggtcttctcgagcttacggtccacggcacgcccaagtcccggatgaaggcccacgtccttcttgacctgcaattattatcttctgcctttaaccactgtagggcgcccgaaggggcgcctaatgttctataccctggaaaagagaaaagagaagggcgaaaacagcataacatagaggaaaacatccacctcccacgaaaaccaccagcacgctgcacgctgcacgccgccgcgccgcacttctccccatccggcgccttctctatcctcgccgctgaagacgtcgtgccgtgcgtagctagcagtgctgacgcgcgctcgtcgaataaggattggatttggcttttcgtccccccaccgcctcctccggtccttcccctgccactccctattctcctcgtccgaagcggcaagctcaagctcaggagctcgcaaccgaggagtaccaatttctctagggatttggcgtatccaccagggagcaggaatagggtgaggcttcctgatggcgggggcgaaagcggatgtagacgcggaaacaggagacggcggctccttcagcgagcagaggctgattga

SEQ ID NO: 36840 - DNA, 1287 bp, Zea mays
  Peptide Sequence Number=SeqID_78619
atgggggacatactcattcctagccttatggttggagactgctctcacagccttaggctcctgcatactgatcttgttttgcttgatgaagagggaaacagcatacatgcccaggtctatcctccgttatgccaacagttcagtgcgctgcttgatgatggaggggtatacaacctgaagtatttcttagtcaggaaagctaacagattctacaaaccggttgaaaactgcaatatgatcagctttacaaagtggactacggttgatgttgtcctccagatcccccttgcttttccggtttgcacatataacctcactcccatagaacagctgcaaccgcacgtggactacaaggaatatttcacggatgtgctcggtgttgtcagtgtggtctcccatgtttcgtcgctgcgcacaaggggacgacaggctgaggttatgaagagaacagtcactataagcaatgcaagggatattgggccaaccgttgatgttgtgctttggggcgagcgggccacagctttcctagctaaacagatccacagggacagtggatcctcaccacagataataatatttgttggcactctcgtgaggagttacgctgataatgtgtctttatccggtggatcatcatgcaagtggtacataaatgcaccggtcccggaagtaaacgctctcagaactagtgctgaaaccaaccaccaccctgtcatttgggatcaggggaaagcagctgctgagggtacagtgattgcagtgcctgaacataagaaactcaaggatattaagtacctccatccttttgaaaataagaagaaggaatggcttgtcatcgtaaagattctcaagattgatagatcatggtggtacaacgcatgcaaaaaatgccttaggacaaccaaaccacacggtgacacatacaagtgcaccaatagttcctgtgacagcattggatcgcctaccccaaggtacaagatatccctcaccgctgaagacgacactgacaccgccgaatttatcttctttggacgaatggcacagcgcctcattaaaaaaaatgtggacaccctcatctcgactaatccacccgatttcattccaaaagagattacaaatctactggaaaagtatttcgagtggaatgttagcttcaccgaaagcacaattatttatggcaatgtttccttccaagtgaatgctataaacgcagaaatggatggtggcaacatacttccaactacaccgtcctcacagccatcatcgaccatactttctcaagggtaa

SEQ ID NO: 36841 - DNA, 3090 bp, Zea mays
  Peptide Sequence Number=SeqID_78620
atgaacacaattgatcagccatcctcttcgacgccggcacatgcgacacgttatgcaattccattccactctcagcgggaacgggtcaaaagcgtgtctgctgttgcgcagcgcaggcttgtgtacaacctttgttgcagaggagacccagaggtggcccgtttattgcttaacatgctagatgagcataacaagctggtcgcggcatttcgctttgctaaagaacgtttagacgaagaagggaaccaaaaggtgacgttgcgattgttaggctgtaacacacgacatgacgcacagtacaacttaccagccaatggtgagcttgctgctgtaatagtgggcgattgctcatcttcacagtacaagtacgatgtcctcgtgcaggctagagagggtggcctcaaacatgtttcgtgcttgcacccgtcctacatggccttgcagtacccgcttcttttcccttacggtgatcgtggataccaccttggaataaaatattctgacgtgggaggaggcgatgcctcatgccgcaagtatgttacaatgcttgaatttgttaggcatcgttcccattacaggctcaacgaaccgaacccattagcggttgatgcatattacggcaggctgagcaaccagctagcggttgatgcatattctacgatcgaagcgtctcgattgcaattcatagcggatcaccaaaaggaattgcgttgtgaatccgttcaggggataaccgacgccattggcaggggtctcaccagtgcagattcagttggtggaagggtaattgtgcctgcgtcttttacgggcggtcgaaggtaccatgtaatgaactaccaggacgcgatggccatctgtagagtatacggcccaccagatctctttgtcacgttcacatgcaaccctaaatggaaggagatagtcgatgcgctgcgcttcgagcctggtcagcagccatgcgatcgttctgatatcgttgtaagggtcttccatatgaaggtcgatgaattcatagcagacattagagaaaataaagtttttggtcctatacgtgctggtcctcaaatagccccaccaaatgagatccgcgaatacattgatgccagatacctatcaacatgtgaggctctatggcgaatctttgagttcgacattcactttagagtaccttctgtggaacgcctggcggtacacttacctgcaaaaaacattgtacgatatgagccaggggcagacctacaaacgttgcttttaagccgtgcagcgaagaagacaatgttaactgaatggtttgaaacaaactcgaaatacagtgatgcgcgtcacctgccttattgtgatttcccaaaagagtggtcgtgggactcttctgttagatgttggcgtagaaggaggtcgtcgtctaccaagattggacgcatgtactacgtgcacccaacagctggggagctatactatctacgcgtgctcttgatgtttgtttctggcgcaacgagcttcgttgatataaggaccttccaaaatactgtgtacgaaacgtttagagaggcgtgcgaagcccgtggtttgctcgaaggtgacaacgagtggaaccttctatttgatgaggcaatagtctctgcgtcggcgtctcagcttcatcagctgttcgttactattgtcgttcattgtcctgtttgcaatattcgtgctttgttcgataaatattggatctactttaccgatgacatacatcgtggacttaaagaagcccttggcaacccacactacacagctccacatgaacaactcctcatgttgctttcgaggaaactagcagacacgtttgctaacagtggtgccaacatagctgattatgagctgccgatcttaccggcccgtggtgatgaagtgtttggcaaccgactgatagacgacgaactaagccctggaccattactattgtgtgaccatgctgccactgctgctgtctcacagctaaatgctgaccaacgattcatttttgaaatgcttattgaatctgcgctctcctgctcgccaggcctattttttgtatgtggacatggtgggacgggtaagactttcttgtggaacgctatactcacgcatttgaggtcccgacaaaaaatagtgcttgttgtggcgtcctctggtgtggcttcgctgctattaccaaaaggacgtactgctcattcacgtttcaaaataccctttgatctacatgagagtagtgtttgtggtgtcaagagaggtaccatgctatctgaacttatacaacggacttctcttgtcatatgggatgaggcgccgatgacccataggcattgctttgaggctctagataggactatgcgtgatattctatcggaacataaagcagaaaatgcgaacataccatttggtggcaaacctattgtccttggaggagactttcgtcaaattttacccgttgtgcgcaaaggctcacgagctgccatagtgaacgcatcaattacaagctcaccactgtggcaacatgcaactgttttgaaactacgaagaaatatgaggctctccaacccttctttacatgggaaggaacctgcaaacatggaacaatttagcaaatgggtcttagatatcggcgatggtgctctgccggccgtgacaagaggagacgagtccgaacctacatgggttacgattcctgaagatttgttgatacacaccgatggtgatgcagttgcgtccctcatatccgagatgggggacatactcattcctagccttatggttggagactgctctcacagcttgtgtgtgcgtgtctctagactttgggagttccttcatcctcaggatgacagtaggctcctgcatactgatcttgttttgcttgatgaagagggaaacagcatacatgcccagatctatcctctgttatgccaacagtttagtgctctgcttgatgagggagggatcccccctgcttttccagtttgcacttataacctcactcccatagaacagctccagccgcgcgtggactacaaggaatatttcactggtaaccttctaggcatagtggtttacatgttacaagtaacataa

SEQ ID NO: 36842 - DNA, 210 bp, Zea mays
  Peptide Sequence Number=SeqID_78621
atggcgagagtgacacgtaccctcctggcaacggatcgcctaaaaggggtggtgtactctcgagtggcgcggacctgttcatgcagtggaggatccgtgggaatagtagacatcaagcatatccttgagagtcttttctttagtcgggttatagtttttgtgctgctgttgatggtgttaagtgccggtgggctcggccttcttatataa

SEQ ID NO: 36843 - DNA, 210 bp, Zea mays
  Peptide Sequence Number=SeqID_78622
atggcgagagtggcacgtaccctcctggcaacggatcgcctaaaaggggtggtgtactctcgggtggtgcggacctgttcatgcagtggaggatccgtgggaatagtagacatcaagcatacccttgagagtcttttccttagtcgggttatagtttttgtgctgctgttgatggtgttaagtgccggtgggctcggccttcttatataa

SEQ ID NO: 36844 - DNA, 210 bp, Zea mays
  Peptide Sequence Number=SeqID_78623
atggcgagagtggcacgtaccctcctggcaacggatcgcctaaaaggggtggtgtactctcgggtggcgcggacctgttcatgcagtggaggatccgtgggaatagtagacatcaagcatacccttgagagtcttttccttagtcgggttatagtttttgtgctgctgttgatggtgttaagtgccggtgggctcggccttcttatataa

SEQ ID NO: 36845 - DNA, 210 bp, Zea mays
  Peptide Sequence Number=SeqID_78624
atggcgagagtggcacgtaccctcctggcaacggatcgcctaaaaggggtggtgtactctcgggtggcgcggacctgttcatgcagtggaggatccgtgggaatagtagacatcaagcatatccttgagagtcttttccttagtcgggttatagtttttgtgctgctgttgatggtgttaagtgccggtgggctcggccttcctatataa

SEQ ID NO: 36846 - DNA, 210 bp, Zea mays
  Peptide Sequence Number=SeqID_78625
atggcgagagtggcacgtaccctcctggcaacggatcgcctaaaaggggtggtgtactctcgggtggcgcggacctgttcatgcagtggaggatccgtgggaatagtagacatcaagcatatccttgagagtcttttctttagtcgggttatagtttttgtgctgctgttgatggtgttaagtgccggtgggctcggccttcttatataa

SEQ ID NO: 36847 - DNA, 1830 bp, Zea mays
  Peptide Sequence Number=SeqID_78626
atggggctcttcaccgtgacgaagaaggccaccacccccttcgaaggccagaagcccggtacctccggcctccgcaagaaggttcccttcccgacttttccttatctatcccccgatctccgggccccagtccggatctctctgtttctgcgacgcggcgggttcgtgctcgattctgcaccactctgtaaattctgtgcacgtctcaaattgcttgaggttactgtattccagcagcctcattatctgcagaactttgtccagtcaacattcaatgcccttcctgcagaccaagtaaaaggtgcaaccattgttgtctctggtgatggccgctatttctcaaaagatgctgttcagatcataacaaaaatggctgctgccaatggagtaagacgtgtttgggttggacaaaacagtctcatgtctactcctgctgtatctgctgtcatccgtgaaagaattggtgcagatggatcaaaggctactggtgccttcatcttgacagcgagccataacccaggtggtcctacggaggactttggtatcaaatacaatatgggaaatggtggacctgcccctgaatccgttaccgacaagattttctctaatacaacgacaatctctgaatacctcatctctgaagaccttccagatgttgatatttctgttgtcggtgtcaccagcttcagtggacccgaaggcccctttgatgtggatgtctttgactctagtgtaaattacataaagttaatgaattatgatgcgctccatggtgttgctggagcttatgccaaacacatctttgtggaagagcttggtgctgatgaaagctcactgttgaattgtgtcccaaaagaggactttggaggtggtcatccggatcctaacctcacctatgcaaaagagttggttgaacggatgggtcttggaaagtcatcctcaaatgttgaacctcctgaatttggtgctgcagctgatggagatgctgaccgcaacatgattctgggtaaaagattctttgtgacaccatcggactctgttgccattatagcggccaatgctgttcaatcaattccttactttgcttctggcctgaagggagttgccaggagcatgccaacatcagctgcccttgatgttgttgcaaagaatttgaatctcaagttctttgaggtgcctactgggtggaaattttttgggaatttgatggatgctggaatgtgctcaatctgtggtgaagaaagctttggcactgggtctgaccacattcgtgagaaagatggcatctgggctgtgcttgcatggctttctattattgctttcaagaataaggacaaccttggaggagataagcttgtcactgttgaagatattgtccgtcagcattgggccacatatggtcgccattattacacacgctatgactatgagaatgtcgatgctggggctgctaaggagctgatggcaaacctagtaagcatgcagtcatcactttctgatgttaacaagttgatcaaggagatccggtctgatgtttctgaagtagttgcagctgacgagtttgagtacaaggatccagttgatggctctgtgtccaagcaccagggcatccgatacctcttcggagatggttcacgactggtgttccgtctatccggaaccggttctgttggtgccaccatccgtgtctacatcgagcaatacgagaaggattcctccaagaccggcagggattcacaggaggcccttgctccactggttgatgttgcgctcaagctctccaagatgcaagagtacactggccgctctgcccccaccgttatcacataa

SEQ ID NO: 36848 - DNA, 849 bp, Zea mays
  Peptide Sequence Number=SeqID_78627
atggcgcccctcctctccttggcgacgccgttaacccccccccccccccaccaccaccacggcaccgaacgccttggcgacctgctcgaccacggctgggtgcggcccgaccgccagttcacggcagccgtattcgacgatgtcgtcctcctgtgggagggagacgacgagccgacgggggcggtgagggcgaggaggatggggccaagaggaggacagaccgaattgccggactcgacgccgcttccccctgcgcgcatcgcgcctgctctcccgagcctgccccccgatgcaccgacgcgcaatcgcgcgacccccaaggccaatgtttcgtggctacagaggtgggcgccctacgacctcgacccctcccatcctatggcagctctggcccccatcccattcccgaccaagtccatcgaccgcatcgtccaccgcctctgcaacctcgccctcagtcctgaagttgacaaatttgtgaagcatggaatccacaagtgccaccctcagtcctgttgtagaaacaggaaatgccagcccactgtttctactgtttgcaagccaacagccggccatattcgtgctgatgaggatacgaggcagagatcttgtgatactaatgaatcttgcggtgcattaccaagttcctccaatcctacagttgaacctttgccttcaaattctctggggaatgctattgttgatggtatgtcacaaggaagtgctgaaatggactgttcagatgatgatgttaatactgtttcacgaattccaactaccagtggagcaagggcctcctgtgaatccctgccggtcttggaggaatccttctcgtattgctcgatgtag

SEQ ID NO: 36849 - DNA, 174 bp, Zea mays
  Peptide Sequence Number=SeqID_78628
atgggaaccaatgggcatctcgacctcgacacgggaggtaaatccgtagatcaaaagatgaaagacatgtaccgagaggcgttgtggcagaagagaggtcgtcctcgggagttatatccggacgtatctagtaaggatgctcctgttcctcctgaactccccgtgccaacctag

SEQ ID NO: 36850 - DNA, 504 bp, Zea mays
  Peptide Sequence Number=SeqID_78629
atgaggaaccttggggatgaaccggagaaaaaaaaaaggagggaaaagagacagggtaatgaggcaaagatgaaagacatgtaccgagaggcgttgtggcagaagagaggtcgtcctcgggagttatatccggacgtatctagtaaggatgctcctgttcctcctgaactccccgtgcctaactgtgactgtggcagactggcttggggacatgagaggtgtttctttttccagtggatcgatggtcctgataaatttgaccctcgatatcttcttttcgttaattggttgagtggaaagaccagtcatgagcgttttaagcgttgggtacctcctcccccgaatcctccaccaatgacggatgaggagaaggaggtagcaacagaaagacggatggactcaccgcctcgatgcgattgtggagaccgtgctgtcatcgacgaagactatgacaagcagttctgttgtccgaacattgattatgtgagcccattgatacgctaa

SEQ ID NO: 36851 - DNA, 1302 bp, Zea mays
  Peptide Sequence Number=SeqID_78630
atgtaccgagaggcgttgtggcagaagagaggtcgtcctcgggagttatatccagacgtatctagtaaggatgctcctgttcctcctgaactccccgtgcctaactgtgactgtggcagactgacttggggacatgagaggtgtttctttttccagtggatcgatggtcctgataaatttgaccctcgatatcttcttttcgttaattggttgagtggaaagaccagtcatgagcgttttaagcgttgggtacctcctcccccgaatcctccaccaatgacggatgaggagaaggaggtagcaacagaaagacggatggactcaccgcctcgatgcgattgtggagaccgtgctgtcatcgacgaagactatgacaagcagttctgttgtccgaacattgattatccatacgggtggcgtaagtgtcgtttcagagagtggttgtatggtcctttgtcccattggccagagccagaggtaaaggaaaagagatacatggggtgggcggcagaagaggtcaaatttgatccagtactctgcaaatgtggtattgaagctaagtatggattagttccttcggagcttggtgttggatatttttgtggacatatggtcgattacgatgaggagacgaggaaatgcagttgggagagttacgacgacaaaggagaggtgatgcgcacaatagagtccaagagaataatgggacagaagatgcgttgtggatctcgactcgttgattcgtacattaacgatcgcatacgcgacatgcgtagggaagcaaaaactgccttttatgatagcccgaagcgtgcagagtataggaggttgaaggcggcagatgagaagagagcacaggatgcaagggaatgggaagcggctcaagccgagaaacagatgttggataatcttgctgatcgcctcaagggaaagattggaagcggcgtaaactatttggccgatgaggcgcatgcgagatatgttcaggataaaatggcaacggttgagctgatggaggaggaggacgacgacacatgtagattgagtgagcttatcgccctcgcagaggcaggattacatgaagaagaggaggatgacacgtcaaggttgagtgagctcatcgcactagctgaggcaggattacgtgctcaagaggaagaggatgagtttatgtcacaggccgccgcagaggtagaggcagcttattacaagaagaaggttgatgaggctgaggctgaggatgagctattctcccaagttgcagatgaagcagaagccaattattacaaaaaaaactggtga

SEQ ID NO: 36852 - DNA, 324 bp, Zea mays
  Peptide Sequence Number=SeqID_78631
atggctggagagcgcctgctccaagggagctcggccatggcggctgatggagatggaagccgtcggccatgggagggaaaagctcctgctcgccatggacagaaaaagggagggaggaagggcgccgtccctgctacaagggtgccgagcgccatggctggccgaggggaggaaggggacgagctgagctccctgtgcgctgccgtgtgggaggactgctgcgcgagggagaagaagacagggaggagagtggcggctaggagaattagaggggtgggaatggaaaatttccaaatttgcaagggagaggggtcctatttatag

SEQ ID NO: 36853 - DNA, 615 bp, Zea mays
  Peptide Sequence Number=SeqID_78632
atgggcgacggcgactcgctgcgggtgccgtttggtggggaagatggggaggaaatggagcagcagcgctgcgcatggatgctgctgggcgccggacagggcaacagagggcggctggccatggaggaaaggagctgctgcgtcgccatggacctggacctcaccgaggtcagcccaaggagctacagcgcgcagggagaaaggctgcctgctgcagcgcgaagaagaaaacaggggcgtccatggaggaacgcaggtagggagtcgggtctgggcgtccatggctgctggagcttctgcccctgcgcgcaccaagcagggaaggaggaaaatggggcgtcggctgctctcctgcagggagcaagcgccagggaggagggcgccatggtggggagcgcctgctccaagggagctcggccatggcggctgatggagatggaagccgttggccatgggagggaaaaactcctgctcgccatggacagaaacagggagggaggaagggcgttgtccctgctacaagggtgccgagcgccatggcagctgccgtgggatgcctgctgcgcgatggagaagaagacagggaggctgctgcggcggctggaaaaaaaatga

SEQ ID NO: 36854 - DNA, 495 bp, Zea mays
  Peptide Sequence Number=SeqID_78633
atggaggaaaggagctgctgcgtcgccatggacctggacctcaccgaggtcagcccaaggagctacagcgcgcagggagaaaggctgcctgctgcagcgcgaagaagaaaacaggggcgtccatggaggaacgcaggtagggcgtcgggcctgggcgtccatggctgctggagcttctgcccctgcgcgcaccaagcagggaaggaggaaaatggggcgtcggctgctctcctgcagggagcaagcgccagggaggagggcgccatggtggggagcgcctgctccaagggagctcggccatggcggctgatggagatggaagccgtcggccatgggagggaaaaactcctgctcgccatggacagaaacagggagggaggaagggcgttgtccctgctacaagggtgccgagcgccatggcagctgccgtgggatgcctgctgcgcgatggagaagaagacagggaggctgctgcggcggctggaaaaaaaatga

SEQ ID NO: 36855 - DNA, 1119 bp, Zea mays
  Peptide Sequence Number=SeqID_78634
atgcatcgcatccctccaccttccgagcccccggatggggagcgcccgtgttgccttcgtcttgttgttggaggagcgcaaccttacggaggtgggcacgcttcagccatcgctcggcttcaaggattttcatcaggcagcccggctgcattccctcaccgatggtcacccaggatggtgaccaccagttcaatggtggggagaagcaagccgggctgtagcctctgccccgccctcagcttcaaggatcttcatcatccttgctgtggcggggggcaagctgagccggggttccacctccagcatgggccagtgggccacctcctccttcagcattcaggggagagggtgctcatcggcctagcggagggggcggacttcggcaacgcggggccgtccggccgcaagcgtcgtcagctccagcgtgcctggctcgctggctcagctggctctggcgctgcttccggtgccacctcccactgctggggcgtagcgtggctgtccgctcaccgtggggcggctgttgcgccgtgcgcaccggaggaccgtccaggatgtcgcacgccgctagggtggcgttcgtgttcttggattgtcctatccccactccggcacgacgcctccgcgcggaggtcgatgcctgcccgtccgggaggacttgagtggggatctgccgtcggagaaggtttctccgccgacgagaccgtcggcgccacccgcgggctgaggtggctctttggctttgatagcttgtcctcgcccctcgagtggggacgtgggcgagggccttgtcgcagcagtgtctgctctgaggccctccgatgtggaggttgttcatacccgcaggagtggaaccagagttccatttgtaatggcaccttgagtgccggtaggcgtaggagtccctcggctcggtcggccttgccacgcaaggcttctattgctcagttaaataacccttggctgctctgcgatgagccggagccagaggcagcggtgtcagcgtggacagaggcagagtcggctcgagaagaagcttcgtcggcccgggagcacgtggcctccctggccgaggaggtgcagcagcggcagctagagcttggccaagttgtccgctag

SEQ ID NO: 36856 - DNA, 336 bp, Zea mays
  Peptide Sequence Number=SeqID_78635
atggggagcgcccgtgttgccttcgtcttgttgttggaggagcgcaaccttacggaggtggatgccattgtcggtgctgaggtggtggcaaccggagaaggtttctccgccgacgagaccgtcggcgccactcgcagactgacctccggctctttggctttgatagcttgtcctttcccctcgagtggggacgtgggcgagggccttgtcgcagtagcgtctgccctgaggtcatcgctgctgttgtttagccgcccggagcggaggtcgttgtcgctgctgatggagcagtcagcggcgagccacccggagtttgtcgtcccgcgggccctctga

SEQ ID NO: 36857 - DNA, 987 bp, Zea mays
  Peptide Sequence Number=SeqID_78636
atgatgaagatccttgaagctgagggcggggcagaggccgcagcccgacttgcttctccccaccatcgagctagtggtcaccatcttggggtgcccacctccgtaaggttgcgctcctccaacaacaagacgaaggcaacacaggcgctccccatccgggggctcggaaggtggaaggatgcgatgcatgagggaagtgcgaagacatggctaccacccgggggtcgatccctttttaaagacggctctccccactcgcgtcctcaggcgtcgtggactaagtcttcactgacgtaccccagggtcctccccctacgacacgggggctgggtcccacgcgtcatgcaaagctggcccgggacagaagaagccaaaccgccgcgcgtggagcgtgtaaccgccccgcggttacaagcactcctccatcctcgccgaaaccaacggttgaaagggcaaaccgccatgcaggcggcgtgcaaccgcaccacggagacgcaccccttcaacttcgacgcatccagcgtggaggcccaggcccacacgtcatgtaaccggtgcgccggttactacgtgcgaaaaactgcaccaccacttgcgccaataccgtgccttctcgactgcggaaccggtgccgcgactcgaggcaaccctgcacatggcccaacagtgccaaccgagcacatcggtcacgggtcagtcagccgcgggagaaggcgtgacggtcgatatggccaaaagtgggccggcagtaatggcggcagcaggcgagcggaagcggcggtcaaatcgtctgcaggctcacgtcctctcctggagcagcaggggagccctctcccacggcgtgaagacgatgcgcccgtgttccgtccctcgaacggctcgcacaacggctgccccgcgaaccacctgtcccgtcgcattaacttcgcggcagggcaggcgacacctttggcaggcgaagcgggcgacgtttcacctccgccatga

SEQ ID NO: 36858 - DNA, 267 bp, Zea mays
  Peptide Sequence Number=SeqID_78637
atggcggagggcgaggaggctccgactggatctatggcggggggcgaggtagctccgacgaggtacatggcgcgggtggaggcagctgcgattccgacgaggtccacgttggagggcgaggaggtcgcgactggatctatggcggggggcgagtgggctgctgcaggatccatggtggaggaggggaagggcatcatttcctctcctatggttaagttgattgaaacttttgctgttttttgcaagtctcagtttcttttcatgtga

SEQ ID NO: 36859 - DNA, 297 bp, Zea mays
  Peptide Sequence Number=SeqID_78638
atgacgtggcagggggcaccggactgtccggtgtgcaccggactgtccggcgactttcagaaagatatggatattaagtcagatgagaaagctaccaaatttgataccaatgtgcagccagttgatgttaagtcgaatgagaaaggggctggtgtgggcattgttgaggcttctcatggaaaagctcatgtggttattacaaatcccctgataacagtgcccatacagttggagacaccaatcgttaataggctggatggaaataatggaacatctttgaatccaccagcgggttag

SEQ ID NO: 36860 - DNA, 1647 bp, Zea mays
  Peptide Sequence Number=SeqID_78639
ggcatcatttcctctcctatggttaagttgattgaaacttttgctgttttttgcaagtctcagagagctgcttatagggagaaggtgttaattgaagcagagaaacaatttctgcatgatttcacttttttcaaggaaaatttattagttgattttggccaaatagtggatgtcgaatgcattgacagtacttgccaagttctgtgtgacaaggtcaggggttgttgttcaatttgcaagtcaaggtgtactgaagctatcatcgattctctaaaaattttggctgaagcaatgactattaagcatcaaaagtttttgaattccaacaaccttctggcgaaagatatggatattaagtcagatgagaaagctaccaaaattgataccaatgtgcagccagttgatgttaagtcgaatgagaaaggggctggtgtgggcattgttgaggcttctcatggaaaagctcatgtggttattacaaatcccctgataacagtgcccatacagttggagacaccaatcgttaataggctggatggaaataatggaacatctttgaatccaccagcggagtgtgctcatcctctcaacaagccattccattactcaaaaactgataagttgggtctctttccacgtacaaagcttttctcacctgtgggtctttttgaccttcaaattacagatgatgaaagtgatcacaatggaaggggcagaaatactgcagctgctatatgtcctggtgttccaattgggctaggccaacttgctcctcctatagccacccatgttgtttatggtgcaacatcagcagcggcaacaggttgtgttaacaatgatgtttatagtggtgttgcttctgtggtgttgtctcagaatccaaaggcacatgctgctggtgcatttttagcagggaatgatactatatatgagcctacgctagcattgaacttttcaaagttaaactcaactgaaagacataggaactctggaggaataagtggcaaaaaggaagaagttattgtcattgctgatgatgtaggggctgatcaggaggttcaaactgttgttgttaatatggttggcgctaatttacatggtagtagtagatccaaatcagcaactgcagttgatcagatgtacaatgatatgaacatattcaacgtagagtcagaagctgggggattctttttgggaaatcaactagaagttggaaatgtagtcaggaatgatgttggtgaaaattggttacaagttcaaaatgctcacgcccgttttccatgttctaatgtgctattgcgatgttataatattctttgtggcatggggcggagccaatggaaagatttggtcgcagttcggttttccaaaaccaccactgtaaattgggaatcttttggactgtcaatagaacccaatggtcactgtgacaacttttttattgctggattttgccggaaacattttgaagatattcatcctaggctgtcaaagaaacatttcttttatccaaaagtggggcattcgatgatggaatacaacagccaatatgaagttgaagatctaaggaaatcgtttctgggggctaattcttctttgaagttgcatcgctctaacaaggttttttgtttgcttagtttattgtaa

SEQ ID NO: 36861 - DNA, 843 bp, Zea mays
  Peptide Sequence Number=SeqID_78640
atggaaccagtcgtattgaaccgcgaaagagccgcagcggaccgcctaaaacggatgcctatgctgtttgacgactaccgtgaagaagatttttatgggctaccacggaaatacagtattgtcgctcgggtagaagttaaattcccgaaggaaccacgtttccgtgacagacaacatttcgttttatctgacatcaatggatccaagatcgaggccataacatatatgtatgagacagtcaaacatttcgacaatttgctccatgaaaagcatgtttacaagatgcataatgtaaagttcagtcttcatccgggtgaatttaattttcgtcatctaaatggtcccatggaattgtgtcttgaccaacaaactatcgtggagccatacactgttccaattcaaatggcgccattcccaaaacaaatactcttgaaccttgctgatattgccgagttgccaaacaggactttagtcgacattatggctgttgtagtccacttggatacaatacaacgcacaatgtggggccctttcagaaagattgttataatggatgctaggggatatttacatatcattaaagtttggggtgacctactaaacaaaaatgcactccgctgggcgttggctaaggaggattatggcataataattgggactatgtttagacggttcagaagacaagagtgcctcgagtcttcggatcataccacaatacacttcaatccgttccatcacaacacccatcattttggacatgtgattaattgtggcattcattgcagcaatccaaaaagctttggtggcgctgaacaaccgtcagtttgctgtgacatttcttga

SEQ ID NO: 36862 - DNA, 1467 bp, Zea mays
  Peptide Sequence Number=SeqID_78641
atggaaccggtcgtattgaaccgcgaaagagccgcagcggaccgcctaaaacggatgcctatgctgtttgacgactaccgtgaagaagatttttatgggctaccacggaaatacagtattgtcgctcgggtagaagttaaattcccgaaggaaccacgtttccgtgacagacaacatttcgttttatctgacatcaatggagccaagatcgaggccataacatatatgtatgagacagtcaaacatttcgacaatttgctccatgaaaagcatgtttacaagatgcataatgtaaagttcagtcttcatccgggtgaatttaattttcgtcatctaaatggtcccatggaattgtgtcttgaccaacaaactatcgtggagccatacactgttccaattcaaatggcgccattcccaaaacaaatactcttgaaccttgctgatattgccgagttgccaaacaggactttagtcgacattatggctgttgtagtccacttggatacaatacaacgcacaatgtggggccctttcagaaagattgttataatgaatgctaggggatatttacatatcattaaagtttggggtgacctactaaacaaaaatgcactccgctgggcgttggctaaggaggattatggcataataattgagactatgtttagacggttcagaagacaagagtgcctcgagtcttcggatcataccgcaatacacttcaatccgttccatcacagcacccatcattttggacatgactcgaagggtggcaaaattagatgtaactccagaaataaaaaggtcactctacagactacagatgtaactcaagaaacaaaaagatcagagaatcagggtttctttatggagaacggagaaccaacagaaacagatcagatggaacataatgatggacgcacaccattgacaaacatctcaaacaccattactatagctgatgaaaatggatcgaaaaggcttggtccaaatgtcgatgctaaggaacttagtctttcagatggctatagcacaattgatttcacaaactttgcaacacaagttccaaatgtgaatcgagatgatgatagcgattggttgcataggaatgagacattcaagtcagacaatgttttcacaacaagagaccttcttacaccaggcggtgtgcatgaaactgttggtaacacacctaaccataatttgggaagggctgcctactttagagagcggtacaaaaacttaactccagccgagagggagcttaatcgtgaacgccttaggttgtataataatacaccaaagcggaaagggtcaaagatagagtacataagtagagcactgttggctgacacattgagtcaggagtccatcgccatggagtccccaacatatacccctgaggttgtacaccctacaacagatgcaattgaacctaatggatccgctcttaccccatgcgactag

SEQ ID NO: 36863 - DNA, 6555 bp, Zea mays
  Peptide Sequence Number=SeqID_78642
atggagtccccaacatatacccctgaggttgtacaccctacaacagatgcaattgaacctaatggatccgctcttaccccctgcgactgggttatccctgatatcgccagtaacccgttcctaccagcttcaacacagaccgaggatgccgattcactgcgtatgtctactagaccactaagacgtaaacaacatgtgccacgtggtgaaagacaagctatcttagcccgtcgaaaccggcaatttgaagcatccatttcaaggaacatggctactgtggctgaggatatcattagtgacgccgaggaaggggatgatcggacacaaccccatatgactgcaaagatcaacaacaatggtaattactatcatttttatccccccttttatcctgaatgcccagttgatgacgatgacggtgtcgtatttgaagacgatgctgatgagaacgagggatacctattcgctgggcaatatgaggataccgatgaggatatagagatcgatggtagtcaagatgaatcgagtgccattgatgttcctgacccgtacgacaaggtgtatagcaacatccctaaagaaacccatatgctaaagactgttcccaactgcggttattgcaccgcgaagaagtttgagtatgagacacctggtttttgttgtcgtggtgggaaggttgagctagccccactggagacccctccccaactcaagaggttgtgggatagtgcagactctgatgctaggcactttcgtgataacattaggttttttaatggccatttctctttcacttccctatactgttgcctcgatagtatgacaactaatgtaagggattctggtatatacacgttccgagcacagggcatgatgtatcacaatatcaagtcatttggtagggatggtggggcagagcataaacaccttgagctttacttttatgatgatgatcccactctcgagcatcggtaccgtaagtgtcgcgaagagcatcaacagaaagacaaagaggttattcgacagatagtcgacatactacgtggaaatccgtactccgagcaccttaggaccatgggtcacgttgagaaccttgatgactatcgtatcgcgttgaacctagaccagacgttgaaccagaagacatataacacacctctcacttcggaggtggccgctgtctggatcgaagggagcaaagggcgaggccagttcagcaagagtgttatgctccatgggaaggacagttcaagccactgcatccgctcataccatggatgctacgatgcactatcatatccattgttcttccctagaggcgaacttggctggcacggaaatatcccaaaggttggagtatccatggacgaagtggatgcataccgtgcgacacatagggcaagtaatgcaaatgatgaaaatgcggcggaggagattcgccccggggtattcaatcctatacttcatggaaagcgactttttcagcagttcgcggtcgacacgtacataaagattgagaactctcgtttagattacatacgcaagaatcaggatcggttaagggcagacctgtaccagggcttggtggatagcatgctagatggagatattagaggagagaaggttggcaagcgaactgtgctgtcgacgtcgtttattggcggtcctcgtgacatgagacgtcggtatatggatgctatggctctggtgcggaagtttggtaaaccagacatatttcttaccatgacatgtaaccctaactgggatgagataaggagggagcttctccctgggcagacaccgcaagatcgtgcggatcttgtagtgtgtgtctttcatgcgaagctacaagagttaaagcatcggctgactaaacaggatattcttggtaaggtccgagcctacgtctatgtcgtggagtttcagaagcggggtttgccgcatgcccattttctacttataatgcagaggaagtacaagctcacatgtcctgagcagtacgaccttttgatctcagccgagatcccaagcaacaagtaccctgaactacgaaagatggttatcaagcatatgatgcatggcccgtgtgggtcgctaaaccctaactgcccatgcactaagggtcgtaaatcatgcaagaatcattaccctcggcctttcagtgacacaaccttgcaagggaaggattcgtaccctatttatagacgtcgtgacgatgaccgtaaagaaaaggtccgagggtgcgaactggacaatagatgggttgtcccttataacccatacctccttcgtctcttcaactgccacatcaatgtcgaggcatgtgggagcatcaaggctgttaaatacctgttcaaatacatatacaaaggccatgatcgtgcgtctgttgttatgagagatgcgagcaaggcagatgatgatgttgatgagatcaagcagtatagagatgcaaggtgggtgactcctccggaagccttgtggaggatatacggctttgagcttagtcagatatctccacctgttatgcagcttcaactccatcttccaaacatgcacatggtggcgtttcacgagcggcaaatggtcgagcgagtcgtcaaccgtccaggtgttgataggtcgatgctcacatcatattttgaggcgaataggtttaataaggaggctcgtggcatcctatatcgtgacttccctgagtggtacacttggcagagtggtaagggaaaagtatggcaacggaggaaacgagatacaggtggacaagtcggtaggatagtctctgctcatccggctgagggggagcgctactatcttcgtgttctcctaaaccacgtgactggcgccgcctcctatgtggatctaaggacagttgatggtgtcaccctaccgacttttcatgaggcagcagagagaaggggactacttgagtcggacaacacactagatgagtgtctcactgaacgtgcgcttttccagatgccatcgtcgctgcgacggctttttgccacaatactggtttactgtgagccaagcgatgtggctgtactctggcagaaacacaaagattctatgtcagaggactatcaacacaagagtcagaacaaaactcatgttgagcagatggtattgattgacattaggaacatgctgcagtcaatgggaaaggacataaagacattccctctacctcctatgatcgacgcgtatgacgatgctattggtactgctcgagaggtttacgaggaggaaagtatccaaccgacagtggaagatgtggctcttaaagactctcttaacgaggaacagagggccgcctatgataagattatgtctgccgttgacaccgatcagggcggattattctttgtggatggacctggtggcaccgggaagacttatctatacagagtactgctcgcgacgctacgcaaccagggcaagattgcagtggcaacagctacatctggcgttgcggcttccataatgcctggaggaagaaccgcccattcacgcttcaagataccactcactattgacgatggcgctgtatgtagcttcacgaagcagagtggaacaacagagttgctacggaaagcatctctcattatctgggatgaggcttctatgactaagagacaagccgtggaggcactggacaatagcatgcgcgatataatgggtcgccccgcactaccatttggtggtaaaaccattgtcttcggtggagatttcagacaggtcttgcctgttgttcgtaaagggtcaagggctcaagtggtcgcgtcttcgctacgaatgtcttacctatgggagtccatgtcccacttaaagcttgttagcaacatgagagcaaaaaacgacccttggtttgcggagtttttgctgcgcgtaggcggtggaactgaggaaacaaatagtgacggcgacattcgtcttcctgatgatgtgtgtgtgccttacagtgggagtgacaacgatcttgacaacctaatagactttgctttcccaaatctcaacgaaaatatgtctgattctacctacatcacttcaagggcgatactgtcaacacggaacgactgggttgatatgataaatgttaagatgattgatcgttttcaaggggagcatatggtgtatcatagtttcgatagcgccgtggatgatccccacaactactacccacccgagttcctaaacacattgacgcctaatgggctaccacctcatgttttgaagctcaagattggatgtcctgttatattgctacggaatatagaccctgcaaatggactttgcaatggcaccaggctggtcgttcgtggcttccaaagaaatagcattgacgcagagattgtactgggtcaacacgttggaaaacggattttcctaccgcgtataccgttgtgtccctccgatgaagagatgttccctttccagttcaaaagaaagcagtttcctgtacggcttagctttgcaatgacggttaacaaagcacagggtcagactattcccaatgttggtgtatacttgcctgaaccagtgttctctcatggccaactatatgttgctctatctagagcgacggcccgatcgaacataaagattcttgtcatcccagctgtcgatgggaggaaaaagttaaggaagggtgtaaagaaaacccccaccgtagattgtgggacatataccaagaacatcgtctacaaagaggaaatcccttgtgaaccaagggtagaagtcgttcttattgatgatgcctttgttgaaaggaagtggatggagtgtttatttcagccgagcgcatatttaggtgacgaggttatagactgttacataaatttgataaaagctcaaaagcatctaaagtgccgatctggaggtcgcgtttacatagaaaatgctttccagttcaatttcctgaagcgagatggtgatcttgaaattaaaacagaggagctatatccaattaaagacatgacacacatatgtagcgctgaacgaagggtgttactttacctagaccatgacatggtgtttattccgataaacatccgagagacgcattggtatcttgctgtgatccatgcaagaaatatggagatacaagtgctcgattcacttggtacttcacaagaccgcaaagacctcactgactctattaaaggactgcaaagacaaatagatatgatatctcaacgtaaggagttaaaagaccacaggtggccagacctccaagttgcttcttggccgctcagagaaatagacatgggatatgcaaagcagacagatagctcttcatgtggcctctttcttttgaactatatcgaatactggacaggggatgaactgtctgacagttttacccaggatggcatgtcacactttaggaaaaaaatggctgctatattactatcttcagacctgaataagagaagggggtgtctgttatacaaaaatgaaaaagaagttgactctggaagcccatctgatgttgagatattagaaaacccaacagattctaataagaggaaactactccacgtgcttgatgatagcgaagtagtgtttgaagatgaggaaggccctattactcaagcagacttgcaaaggtggtttgttgatgattgggataaaagagctcctgtaaaagtctctaacgatggttgcaccaatgactttttaatggttggtctttccacaaaggacatgccagtgaccaaagccgattcaatagatgttttatgtgattatatcatggcaatagaagacgatacgacactagagagaacatgggtgcgaagtttcaatccttttaagatagaaatatctgtcaaagacctgcaaaacatattaacgacaactcaagatatgattctaagatgttttgatatggctgttcggctgcttgccaataaagagtcacgtaaaccgaaagaagaaatcataaataatagaaagcattatatggacatgcgtttttggagaatggttggttttggtaaaataccaaagtaccatcaggatcctacaacagaagagttggccaaaacactagattgttggccatcaatgaattattatatcacgggttgtagatatgttctcatgccatggaaattcaatggatgtcacgcccttttcgtaatagatcatgttaaaaagcatgtgacttttatcgattttacaccgactcaagattggtgtaaacacatgccatacaagaggttcgcggaagcgattatcatggcctcaaaaaaatataagattgcttacagcaagaaacgttctggatggacggaggatatctttaagtgggaacatacaattcagactggtgttccaattgacttaagagggtttaataccagctacctcgttctacaagctatggccatgtgggggaatgacagacgactgaaatttgttggggatgcaaaaactcttcgaagaaactttgtgattgatcttttaagttatgaggacaattcgtgccgatatgccatccctgcaaacatacaacaaagacttgtcgatatcgctagaaaggattag

SEQ ID NO: 36864 - DNA, 288 bp, Zea mays
  Peptide Sequence Number=SeqID_78643
atggcgaggcactccgtccccacacatatcaaccgtccccatcgattccccgtcagcagatcagggctcaccgccttggcgtacaatgcctcactgaccccaactggccgtcgtgcagtgaccgcacttgtacccaccataaccggaatgggagacctcgtctcaggtcgcgtgaggggatatgtccactgccaggttcactcaggctcaataacattatgcaaaaagaaaactaagttaagaaataacttagggtttctgggtcatacggggcttttagtgggttag

SEQ ID NO: 36865 - DNA, 288 bp, Zea mays
  Peptide Sequence Number=SeqID_78644
atggcgaggcactccgtccccacacatatcaaccgtccccatcgattccccgtcagcagatcagggctcaccgccttggcgtacaatgcctcactgaccccgactggccgtcgtgcagtgaccgcacttgtacccaccataaccggaatgggagacctcgtctcaggtcgcgtgaggggatatgtccactgccaggttcacttaggctcaataacattatgcaaaaagaaaactaagttaagaaataacttagggtttctgggtcatacggggcttttagtgggttag

SEQ ID NO: 36866 - DNA, 288 bp, Zea mays
  Peptide Sequence Number=SeqID_78645
atggcgaggcactccgtccccacacatatcaaccgtccccatcgattccccgtcagcagatcagggctcaccgccttggcgtacaatgcctcactgaccccaactggccgtcgtgcagtgaccgcacttgtacccaccataaccggaatgggagacctcgtctcaggtcgcgtgaggggatatgtccactgccaggttcactcaggcttaataacattatgcaaaaagaaaactaagttaagaaataacttagggtttctgggtcatacggggcttttagtgggttag

SEQ ID NO: 36867 - DNA, 288 bp, Zea mays
  Peptide Sequence Number=SeqID_78646
atggcgaggcactccgtccccacacatatcaaccgtccccatcggttccccgtcagcagatcagggctcaccgccttggcgtacaatgcctcactgaccccgactggccgtcgtgcagtgaccgcacttgtacccaccataaccggaatgggagacctcgtcttaggtcgcgtgaggggatatgtccactgccaggttcactcaggattaataacattatgcaaaaagaaaactaagttaaggaataacttagggtttctgggtcatacggggcttttagtgggttag

SEQ ID NO: 36868 - DNA, 288 bp, Zea mays
  Peptide Sequence Number=SeqID_78647
atggcgaggcacttcgtccccacacatatcaaccgtccccatcgattccccgtcagtagatcagggctcaccgccttggcgtacaatgcctcactgaccccgactggccgtcgtgcagtgaccgcacttgtacccaccataaccggaatgggagacctcgtctcaggtcgcatgaggggatatgtccactgccaggttcactcaggattaataacattatgcaaaaagaaaactaagttaaggaataacttagggtttctgggtcatacggggcttttagtgggttag

SEQ ID NO: 36869 - DNA, 1257 bp, Zea mays
  Peptide Sequence Number=SeqID_78648
atgcagtctgtggctgagatggcttctaatgcctatcgcaaacccagtgtcagtccatcagctacgatgctgaaagctctgcctatgcggttcctcgcctcgccggagcccggtgggtggagccggcgactaccacgacgatcgctgcggtcggtttcggcagcgctcatgaccaaccccgcttacttcgaggtgggaagattcttgggtggctatggcttcatgaacatcacaagttactcatcatctcaatttggagagccttcaaatgttgccggtattcaagaccttggtcttggatattcaccagaagagatcgaacggttgagggtccaagatattggagaaggagaagtgacaattagactttatgagggaagagttgttcaaggtccattcaggggcacacgggctgtatttaaggtataccctggagcccgtgctgatgcttctgaagctgatttgatggcactgaatgagttaaggactcatgcgtttcttcagagtgatgctagtgacatatgcgagaacatccagtttcttttaggggccttcgagacagcaactggagaacagtggctcgccttccgtgatgacgggagatatagtgctgcagactatgcaaatgtaactagtgcaaggcaattgaaggaaaaatctggagggacgccattctggaaccctttcgatcgagcatacaaattggagttaaggagatactttgttcttaagttgctgaacggtgctatgagtggccttgttcacatgcacaatcatgatagactgcatcaaagccttggaccttcttctgtaattctcaagtactcatctattggggctggagtgctgtcggacggactatggcgtcgagcctctgctgctggggcttccactcctttggagaagcgagcctttggaatagctgatgacatgcaaatgatcagtcatgatattcagacacacatgcttatcaactttcaaatctcgtataggtattgtctggcagatgaccagctgtcggaagcagcaatgcttaatccggattaccgcaagcgaccaattgcagaggctgtactgaaccacagattttggatcatgatatcattaatcattacgatacttattgattatgagaagaacaagtatattggagatgaaacccgcaggcaatcacctgaagggaaatatctgtatcattttgaactggaggcgttaatgcctgtcagaaatgacttcggagccagcaaggacctataa

SEQ ID NO: 36870 - DNA, 204 bp, Zea mays
  Peptide Sequence Number=SeqID_78649
atgaggaatctccaccagcccacgacgtcttctgtcggtttgaggctgaagcaactccctaacatgcacgcgaaggtcccagatagagatggcaatgggtacccgaaacccgaaacccgattttggatcatgatatcattaatcattacgatacttattgattatgagaagaacaagtatattggagatgaaacccgcgggtaa

SEQ ID NO: 36871 - DNA, 1260 bp, Zea mays
  Peptide Sequence Number=SeqID_78650
atgatctcattaatcattacgatacttattgattatgagaagaacaagtatattggagatgaaacccacgggtttgggacggcaaaacccagcgggtttatacccgttgccatctctatcagtgacacatcactgctagatcgcagtcgcaaggctgaggagcagcagggggagatggcgccgccctacgtgctgtcgctgctgctgctgctggtgctgtccgtcccggccgtcttcctcgtcgcgccgcgcctcatcccgccccgcgcgctcccggccatcccggacgccgacgagacggaggacctcgcgctgttccgccgcgccgtgctcctctccgccgcgccctcctccaaggccggcgctggccccgcctccccctcgcgtttcttcggcgctgcccaccgccgacagaggaagcagaaggtggcctttctcttcctcaccaactccgacctcgtcttcgccccgctctgggagaggttcttcgcgggccaccacggcctcctcaacgtctacgtccacgccgacccggctgcggcgttcgccctcccgcccacgccctccttccgcggccgcgtaatccgggggaaggccacccagcgcgcctccgccacgctcatctccgccgcgcgccgcctcctcgccaccgcgctgctcgacgacccggccaaccacttcttcgcgatgctctcccagtcctgcgtcccgctgcggcccttcccggccctctaccgcacgctcaccgctgacactgccggcccgcgcggccgccaccgcagcttcatcgagatcctcgacgccgagcccactctgcacgaccgctactacgcgcgcggcgacgacgccatgctcccggaggtgccctacgagagcttccgcgtcggctcccagttcttcgtgctcaccaggaggcacgctgtcatggtggtcagggacaggaggctttggaacaagttcaagctgccgtgtctcgtcaagaggaagcactcgtgctacccggaggagcactacttcccgacgctgctggacatgcaggaccccgcaggatgcaccaagttcacgctcaccagggtgaactggaccgactcctttgacggccacccgcacacgtaccagccggaggaggtgtccccggagctcatcagggacctcaggaagtccaatggcacatactcccacatgtttgcgcgcaaattcgcgcctggatgccttgcgccgctcatggagattgccgactctgtcattctccgtgactag

SEQ ID NO: 36872 - DNA, 1152 bp, Zea mays
  Peptide Sequence Number=SeqID_78651
atgggtaaacagagccaatatttccacaaatggtattttgttatgaccacaccaacatctcgaagaaaaagtgccacacacttcatggtacgatacgaagaacatgattttcttgaaaaatctggggtctatgcagtagaattcagtgatgtatttcacatctacaacgatcttgcccttgacatatccttacatcggagttggatgttatgcatgaggaagatagacaaatacagaggcatagttggctttttagatccagagatgatcattttaaacagaatcaatgaagaggctgatgaagtcgaagcatacattgtgaaagcattgcttgctcagcaggacaaggagtgcatatttgttgtttgccaggaaggggcttttggtgcttatgtcgacaaaaaaggtcgccataacaagaattttggtcgcacagttatatggaaacattttcagggtcgtgctggttttgcaacctgtccattattgcctgatgagatagaaaatgtccgagaacggttgctcgacttcttcatgaatgaggtgatagacattggtggatcatgcagggttgacggtaccaatgtcaagatagctgccattccttcaagcgtcgtggttctgacttcagagacctttgactcaattgtccttgatgaaaccaaagatgtccttgttgagttttatgccccatggtgtggtcactacaagcatcttgctccgatttatgagaagctggcttcagttttcaagcaggacgacggtattgtgattgccaatcttgatgctgacaagcacactgacttggctgaaaaatatggtgtttctggtttccctacattgaagttctatcctaagggaaacaaagccggtgaagattatgatggtggccgggacttggatgactttgtcaagttcattaatgagaagtgtggcaccagctgggatacaaagggccacctgacttcagaggctgggcttgtgccaagcttgaatcctcttgtgaaggagtttctcaatgctgctgatgacaagcggaaggaagtcctctctaaaatagaagaggatgttgctaagctcagcggttctgcagccaagtactttcttccaccttcccctacactatgtttgcaagctactcgattgatttaa

SEQ ID NO: 36873 - DNA, 243 bp, Zea mays
  Peptide Sequence Number=SeqID_78652
atggctgcctcggtcgtgactgcgcccttcgccgtcgtcctcatccacctccacggtctagggtttgagcaggaacagatgaaggagcacgctctgcatttgcttgtactctcccacgtcttctcggtgccgtctctgaagacgcttgccaggctgtgtgacgcgccccgcctcgcgctcgcccgtgtccggatggtcatcggggatttcaagaccatctctctgacggatgggggaaagtga

SEQ ID NO: 36874 - DNA, 865 bp, Zea mays
  Peptide Sequence Number=SeqID_78653
tcctatcaagtgctacctgttgaagaatcggctgttgtcaactgatgcacattggttcaggtgtggtcactacaagcatcttgctccgatttatgagaagctggcttcagttttcaagcaggacgacggtattgtgattgccaatcttgatgctgacaagcacactgacttggctgaaaaatatggtgtttctggtttccctacattgaagttctatcctaagggaaacaaagccggtgaagattatgatggtggccgggacttggatgactttgtcaagttcattaatgagaagtgtggcaccagctgggatacaaagggccacctgacttcagaggctgggcttgtgccaagcttgaatcctcttgtgaaggagtttctcaatgctgctgatgacaagcggaaggaagtcctctctaaaatagaagaggatgttgctaagctcagcggttctgcagccaagtttgagcaggaacagatgaaggagcacgctctgcatttgcttgtactctcccacgtcttctcggtgccgtctctgaagacggtctgcgtcgaccaactcgagaggggcttcctcgctcctgacaacgtggtagacatgctgcagcttgccaggctgtgtgacgcgccccgccttgcgctcgcctgtgtccggatggtcatcggggatttcaagaccatctctctgacggatgggtggaaagtgatgagacgggccaatccaagtatggaacaggagctgctcgagtctcttgtcgaagctgatacggttacgcctaatctttacggcaatttggtggctaacacgactgcatgtattgttggagggatgggcatcatgcctggaggtagggattgcagctaa

SEQ ID NO: 36875 - DNA, 387 bp, Zea mays
  Peptide Sequence Number=SeqID_78654
atgaaggagcacgctctgcatttgcttgtactctcccacgtcttctcggtgccgtctctgaagacggtctgcgtcgaccaactcgagaggggcttcctcgctcctgacaacgtggtagacatgctgcagcttgccaggctgtgtgacgcgccccgccttgcgctcgcctgtgtccggatggtcatcggggatttcaagaccatctctctgacggatgggtggaaagtgatgagacgggccaatccaagtatggaacaggagctgctcgagtctcttgtcgaagctgatacggttacgcctaatctttacggcaatttggtggctaacacgactgcatgtattgttggagggatgggcatcatgcctggaggtagggattgcagctaa

SEQ ID NO: 36876 - DNA, 654 bp, Zea mays
  Peptide Sequence Number=SeqID_78655
atgcgcctcatcctgcggtacctgttcttgacctgtggggggaggtggtaccctttacccacaagtcatgttacccatctaccaagggatcgcgacttcccatacacctctaccgaggaggcgaggcaggggttcttgcctgaccgccatcgcagcaaaatcaaccaaggacctccctacactgaccactcccctactgcccttgcccctttcgggtaccaggatgatctgcaggtgacacgtgttctcgctgctaaacgtagcaatacagacaaacatgtcgcgctctcctgctgctacctaaagattcgccagcgcgtcgccctgcaccgtagagaggccctgctgcatgctgcacggagccgtgggcagcggacggaagcttcagctgcacttgtcctgtccgcgatcccggcgtttgcgtacaagcagcggacggaagcttcagcggatatcgtgtttcttgtgccaggtccaaggggcggtgctcgaggactcgccgatggcgtcttgcttcctgaccgccttgtccaccgtcagcctgacggcggtcgcgcccccggctggccctgggacggtctggttggacctcggccttgtgccagcagagagcagatcaacgctgaacaaaagagaggcagagagcagatctaa

SEQ ID NO: 36877 - DNA, 354 bp, Zea mays
  Peptide Sequence Number=SeqID_78656
atggccgagagggcccagaacgaagttaccggactaccggagaaaagaaggaaaggacggcgcaagcgcaatgggcagcgcgatctcgccctgtgccctgctctctcagtgccgccgctctgggtggaggccgacgaggctatgcagttgaagacccaagatttgaacgacgctattgtcacaccgaaagtgtgttcgatgaaatgcctccaacattcggaggtttctatttgtgaaagtttgcaggctaagacaaatgatagctattcaaggagcaagaggctgctcaacataaagcatcaacagcaacctctggaacagctgaaaatgctctactggaagctaagtcagtga

SEQ ID NO: 36878 - DNA, 393 bp, Zea mays
  Peptide Sequence Number=SeqID_78657
atggttgcccgcgctccattgtggcaagcttctgttgctggcttggcgggtcgctggagcacgacctggagctcctcctcgacgatgtactccgtgatgcgggatgctaagatgcagttgaagacccaagatttgaacgacactattgtcacaccgaaagtgtgttcgatgaaatgcctccaacatccggaggtttctatttgtgaaagtttgcaggctaagctattcaaggagctagaggctgctcaacataaagcatcaacagcaacctctggaacagctgaaaatgctctactggaagctaagtcagtgactgatcttaaatctaaagatttggagaagaagaaaagtgagctttgttcactgatacaagaagttggagtgcttttgtga

SEQ ID NO: 36879 - DNA, 462 bp, Zea mays
  Peptide Sequence Number=SeqID_78658
atgaaggaagatttggtaggtcttcaacacttcaactacaaacttgctcaaagggaaccgaagtctagctttgaagaagcttcgatgcagttgaagacccaagatttgaacgacgctattgtcacaccgaaagtgtgttcgatgaaatgcctccaacatccggaggtttctatttgtgaaagtttgcaggctaagacgaactgctttacaatgaaccctgcctctaactctgggatgatttcttctgcagatgcaggcgataaactgaagctgcgggtactctgttttctaaaattggaggcagggggcctaaaccagacaacatctcatgaatctatagcttttaataatcatctatgtcaagacaggcaattgaaaaagagaattgatcttttttatgggcgaagtgttgaagatggctttggcgaaggaaatatcttgttagtgcatcaagttttgtga

SEQ ID NO: 36880 - DNA, 396 bp, Zea mays
  Peptide Sequence Number=SeqID_78659
atgaagcagtcgtggtgttgcgggcggggtaagtcgcaattcctcgccggtgttgtaactccgccgcagatccgcgccgtgccgtggccaagacttttagctgcgcggggtcaccggcagggtgttgcgggggatcctctgaagcacgctgtgacggtctcgggtctcgccggggaaggccgttggccaggccacggggaattcctcgccggacttcgacctgggttgcgaatctgctgtccgccgtgggcactcatcggtgggtcacctcccgctctgttattttgttattctatttatgttcatgtcaagatcattaatgttaattggaacatagagcttaacttgagaaacacgtgccaccacaagggtttatggacgcccttggctgattaa

SEQ ID NO: 36881 - DNA, 195 bp, Zea mays
  Peptide Sequence Number=SeqID_78660
atggcgtgcccgggattgctcgccggagctctggggcatggcgccgccgtgaggaagctccgccctgcgtgtgctcggttattttgttattctatttatgttcatgtcaagatcattaatgttaattggaacatagagcttaacttgagaaacacgtgccaccacaagggtttatggacgcccttggctgattaa

SEQ ID NO: 36882 - DNA, 222 bp, Zea mays
  Peptide Sequence Number=SeqID_78661
atggagtctcgctccgcggcggccggtgtatctgcgctccaaatctcggtgaggcctcgctcgcgccttcctgtggccatcgcgacgtttttctcgaggattcgcttggaacaaacaccagagccttttcatgtcaagatcattaatgttaagtggaacatagagcttaacttgagaaacacgtgccaccacaagggtttatggacgcccttggctgattaa

SEQ ID NO: 36883 - DNA, 1502 bp, Zea mays
  Peptide Sequence Number=SeqID_78662
tcggagtggcgcaggtggcgctgtccttctgtcagactggccagtggagcggtggagtgacggcggtcacctcggctctgccgggggcgcgtgtcaggatagagctttatgctgatgggggttaccagctgagaattaggcgtcttgaggcccccgagcctctgcacagggcgagaggacgatcagggacagactcggctttttacatacgcccctacgtcgcctttccgcaaggaggagggggggagtgcgccatgttaccctcgatgggcaccgaacatggtgtctccggtgagctgcaagcggcaactggcgtgccggttgctcgacgcgtgggcctgggttccaagctggcgtgtcagaagtcggagaagcgcgtccatctggcgcggttgcatgccgcctgcatggctgcccgccccttctgcccgttggtctgggcggaaatggggggtcgcctcgtcgggtcttcccgtcttccaagcccccgggatggggggtatccgccgcctttccgcctcctcgttggaggaacgcaactccatgggagttggtacctctcagccatcgttcggcttcaaggattttcatcaggcagcctggttgctcccttccgccagtggccacccaagacggtgacctccagctcctggatggggagagacagaccaggctgcggtcccgccctcagcgtcgggtgcgttcgtcatcctcgctggggcgggggccgaggcgagccggggctctacctcgcgtgcgggtcggcgaaccacctcctcttccagcttctggtggtggcaatcgtcctcccgcgctacgacggagtcgtcctccagtcatgccggggaaggcgaactgttgctgtccagctaggacgcaacattctgtcttccccctcgcgttcggggcgaggacggcagcgaggatctaccggagcgcttggaggcggcccgctctttggctttgatggcttgttcgcatcccttgagtgggaccgcgaacaagagccttccggtgactgcgttcacccggggccatggctgccgctgcagaggtcgtcgccccgcaggcccgaggtcgctcataccctcggggacggaaccggagtcccgggtaaccggttgagccgcctgctcgggccggattcctggaggagcccctggacctcggcgccgcccgaggcctggtcgggctttgctgtagacgtcgtcgatgccgagggtgctacggctcccttcggcgtgaagacccgagcctgcaggatcagatcatcttgtagcgtgcgctttctgcggccgccgaggccagaagaacacgccctcgtcgcgcttgcgaagctgcgtcttttttcctcctgcttcgagcatctggactctgtcggtaacagggacaaagggacgagtgaggtatccgtatcccggaggcgtaggagtccctcggctcggtcagccttggctgcttacgtgtacctcgtcgtttccaggatccgctttccgaagtag

SEQ ID NO: 36884 - DNA, 570 bp, Zea mays
  Peptide Sequence Number=SeqID_78663
atgaggaaaaaacacggctccgtgccaaaatcacatacgcgttcaggcctcgacagccacaatggacaaaaacactggcatccaaggtgccatcacaaacgggactccggttccgtccccgagggtatgagcgacctcgggcctgcggggcgacgacctctgcagcggcagccatggccccgggtgaacgcagtcaccggaaggctcttgttcgcggtcccactcaagggatgcgaacaagccatcaaagccaaagagcgggccgcctccaagcgctccgggaccggggaagggggataccccgaaagggatccttctccacgaaggaaccgggctccaagccccccattactgatcaggggttcgaaggctggccccccgagggttcaacagccgcctcagatcgcgtgggcccgacacccactactggtcaggggttcgaaggccaaccccccgaagggctccatggccgcctcaggctactcgggctccgcgcccattactgatcaggggttcgaaggctggcccccgaagggttcacagtcgcctcagacaccgagcgagggatga

SEQ ID NO: 36885 - DNA, 225 bp, Zea mays
  Peptide Sequence Number=SeqID_78664
atgaaggtatgtgctgaaggatgcttcggccaaaatgtaacaaagatcaaatcagagaagaagctgaaggggggcatgcacaaaggggaagcttcttgtagaagggatgatgagtactgtgcgccgcttggcgcgggcgcactgttcgccaacagactggtcaggcgcgccgtctgctgggtgaccctgacgccgtctgttggcggattggacaggacgcattaa

SEQ ID NO: 36886 - DNA, 381 bp, Zea mays
  Peptide Sequence Number=SeqID_78665
atggagctcggagggtgtcacaacaactccctggctgccgacaacgcccctggtgatgccctcgatggagtccgggacgcttgcgcagccgtgtgctgccgtgcggcgtgcacatcagcagtgcctggcactgggcgattgggaactgcgactggtcaggcgcgccgtctgctgggtgaccctgatgtcgtctgccggcggattggacagaacacattaaatgctgagagggcgcgtcgcccgtcagcatggtggcaggcggcgtgtccttcccgcaataaatgcaaagactgcacaaccatatgggccttacgtcaggtttggcccgttggcttacgttacgggccacaagccatgcggtcgcggcgggtttccgcctga

SEQ ID NO: 36887 - DNA, 756 bp, Zea mays
  Peptide Sequence Number=SeqID_78666
atgggcaggcctaagggcaccacgtggcgaggaaggatgatacgtcctaggaagcaccgttgggtccggacctccgcagaggaacatcggacccctgtaagtacgagcccggagctccccgtggagacatgccgggtccccctgagtgaggtccgagccttggcagggtcccgggacggagaggaccccgacacaagcaagggcggcgtcagggtcacccagcagacggcgcgcctgaccagtctgttggcaaacagtgcgcccgtgccaagcgacgcacagtacccatcaccccttccacaagaagcttcccccacctacagactcacatcctcctctgaggcgggcccgggggccactgtcggtaccctgaatcaggggtaccctctcctacagtatgaaggcgctgcacccgtacgacacctcctggtcacacggagagcggcatccgacccccaccacatgggcaggcctaagggcaccacgtggcgaggaaggatgatacgtcctaggaagcaccgttgggtccggacctccgcagaggaacatcggacccctgtaagtacgagcccggagctccccgtggagacatgccgggtccccctgagtgaggtccgagccttggcagggtcccgggacggagaggaccccgacacaagcaagggtccggtgccgacacgtgtccaggccttgccctacgctccccgctcaggcagaaacccgccgcgaccgcgtggcttgtggcccgtaacgtaa

SEQ ID NO: 36888 - DNA, 225 bp, Zea mays
  Peptide Sequence Number=SeqID_78667
atggagagattccaagaattgcggatggaagagaaagtaaagctccattctatactcatcagttgtctgaccgaagacttcaatcgaagactgtcgccgttctcgcaaatattgaatgaagttaataacggtacgttaattagtcgcgtgatgcggaagatgactcaagtcgaccccaagcgtgggctactccgcatggtgatgctgatgaacgaacctgcctga

SEQ ID NO: 36889 - DNA, 291 bp, Zea mays
  Peptide Sequence Number=SeqID_78668
atggtggctgtgcatgcctcctggccgtggacggttctggcccaggccaccgtcgtgcccagggaaatgcacgcgttcatggtcgcgtcggccaagttcgccaacgttctattaccagttcgactatcgtcgctgttgcgtgcgctcgcgctcgctatcccctgctcgacctcgtcgttgttcttcgctcagcaaggtgcgataattaatcacgtgatgcggaagatgactcaagtcgaccccaagcgcgggctactccgcatggtgatgctgatgaacgaacctgcctga

SEQ ID NO: 36890 - DNA, 198 bp, Zea mays
  Peptide Sequence Number=SeqID_78669
atggcgctccgccgagtggctcccctgcgcgtctctttctgctcgctcgcgcacagctcacggagcttttcctcgtcggccccagctcagtcgggtctccctggtacgttaattagtcgcgtgatgcggaagatgactcaagtcgaccccaagcatgggctactccgcatggtgatgctgatgaacgaacctgcctga

SEQ ID NO: 36891 - DNA, 1055 bp, Zea mays
  Peptide Sequence Number=SeqID_78670
atggcaatttcaggacccaacgtctctgcgagagaccttgggttcccttatccgaaggcaggcaccgctaagcctacagacgtggtggtgaagttctacgtcctctacgagaagtggcggaggggcgagctcctgggttcttcgtcagttgcgcggtacttgaaaagcatcactcattcgaacggtacgattattcatccttctggatcggagcgttctcttcatgcgtctgttgacgctctaagttcttgctacgtggacaaacagggcaacaagaatttccgggtgtgggtggacagactggtcacatcgccgatcggtacaagcaactggttggtgaggtttgataactgggagatggaagtgcccgctctctctcgcgcccccgctctctgcgcccccgaccctgcccgcatcgccatccccgcgcgcaatccccgctcggctgctccaaggaaggaagggcgtcgtgtggagatcgccatccccgctggggcgttcctccccaccgccgccgcaatggaagggcgtctgtaccattcgcttccccggcagcccttccttcctcgacagcctgcccccgccagctccgcgcaccccgccagccgtcacagtgatgccgcccttccttccctggtagcccgccacctccgcgcccccaccaaaccggaaggcgagatccgctgccagctccgcgctccgcgcgccccgccagccgtcacaatgatgtcgcgcaagtcggggaaggaaggccgcgcgagtcgcctccgggaaacctgccaggcatcactgtgcccgccgccgagatacccgcgtccgccgccgcggattggaggcaaggatggaggcgtcggcgggggtggtgaggatgaaggcgactatgatgaggcggaacccgggcgacatgatggaggcgagccggtgccggaaggtatgccagcatcatcccaccccacccctccattgtcccttcgttatgaatatgcatcccctcacctccacaatgccacagcgatgcccaccttggaagaattttgggatgaggagcctagcgg

SEQ ID NO: 36892 - DNA, 471 bp, Zea mays
  Peptide Sequence Number=SeqID_78671
atgcctccctccaaagtcgtccacctccccctccagcatcgcacagcacacacacacacccttgcgccaacgccatttccatgcctggatagatcaagactacgaggtagcatcagatggctctatagagattggaggcaaggatggaggtgtcggcggggtggtgaggatgaaggcgactatgatgaggcggaacccggacgacatgatggaggcgagccggtgccggacatagctgatgccggaggaggaggcgctccggctctgcaccggttgcgtccacttctagacttccttgcctcgcttgtcacctgcaggaagcgatgcccagcttggaagaatttggggatgaggagcccacgtcgcaacgttctagatagcgaacaaacgagggcaaaagagaggaaaatacatgttctgcaaggtctgggctacaccacgtcttcacctgcggtcacacctcgtgcctaa

SEQ ID NO: 36893 - DNA, 1209 bp, Zea mays
  Peptide Sequence Number=SeqID_78672
atggcaatttcaggacccaacgtctctgcgagagaccttgggttcccttatccgaaggcaggcaccgctaagcctacagacgtggtggtgaagttctacgtcctctacgagaagtggcggaggggcgagctcctgggttcttcgtcagttgcgcggtacttgaaaagcatcactcattcgaacggtacgattattcatccttctggatcggagcgttctcttcatgcgtctgttgacgctctaagttcttgctacgtggacaaacagggcaacaagaatttccgggtgtgggtggacagactggtcacatcgccgatcggtacaagcaactggttggtgaggtttgataactgggagatggaagtgcccgctctctctcgcgcccccgctctctgcgcccccgaccctgcccgcatcgccatccccgcgcgcaatccccgctcggctgctccaaggaaggaagggcgtcgtgtggagatcgccatccccgctggggcgttcctccccaccgccgccgcaatggaagggcgtctgtaccattcgcttccccggcagcccttccttcctcgacagcctgcccccgccagctccgcgcaccccgccagccgtcacagtgatgccgcccttccttccctggtagcccgccacctccgcgcccccaccaaaccggaaggcgagatccgctgccagctccgcgctccgcgcgccccgccagccgtcacaatgatgtcgcgcaagtcggggaaggaaggccgcgcgagtcgcctccgggaaacctgccaggcatcactgtgcccgccgccgagatacccgcgtccgccgccgcggattggaggcaaggatggaggcgtcggcgggggtggtgaggatgaaggcgactatgatgaggcggaacccgggcgacatgatggaggcgagccggtgccggaaggtatgccagcatcatcccaccccacccctccattgtcccttcgttatgaatatgcatcccctcacctccacaatgccacagcgatgcccaccttggaagaattttgggatgaggagcctagcggagtccatgtcatgcttcccagcaggatcaaggtcgttgtcgtctccaggtccatcaaatgcgacaaggtcgagcgcacgcaattcagctccgaagtcatctcctttcaacagaaagatgcaagtaacaccaagtcacttgcctttgatggttga

SEQ ID NO: 36894 - DNA, 420 bp, Zea mays
  Peptide Sequence Number=SeqID_78673
atgaaggtgattttagcagaaccattgggtcactctatggtgaggcagcagagcaggcaagtactgcagaagagttgtctcaggtcacgttgttggagatgctcttactcgacaggagacatttcaagcaacgcagaaaggggcgaagctgggaccgaagaagaggctgaccaaaatcaatcttcagcgttgttttctgtatctgtggatgatgactcaatcgacaggaaacttgatgagtaccgtggtaaaataagtgcactagcaccgcatcattatattaatttgtatagagtccatgtcatgcttcccagcaggatcaaggtcgttgccgtctccaggtccatcaaatgcgacaaggtcgagcgcacacaattctgctccgaagtcatctcctttcaacagttgattttgatctga

SEQ ID NO: 36895 - DNA, 606 bp, Zea mays
  Peptide Sequence Number=SeqID_78674
gggagccgggttctagtccatgtcatgcttcccagcaggatcaaggtcgttgccgtctccaggtccatcaaatgcgacaaggatttgttttctgtctctccagcatatatatttggagccattctgcctgcttttatggtcgctggactttacttctttgatcacaacgtagattcacagttggcacaacaaaaagagtataatttgaagaagccttctgcctaccactataacattttggtccttggattcgtggtcctgctctgcggtttgcttggtatccctccatctaatggagtgcttcctcagtctcccatgcacacaaaaagtcttgctgtcattaagaggcagtttctaagcaaaaagatggttgatactgccaaggagagcataggaggaagtgctaccagtttggaaatatatggcaagatggaagaagttttcatcaaaatggatagcgaagagaatactgattctgttgaaagggagttgaagaacttcaaggatgttgttctgcaagaaggcaacgaagaagggagattggctagagaatttgaccctcgcaaacatatagaagcccacttgcctgttcgagtgaacgaatag

SEQ ID NO: 36896 - DNA, 591 bp, Zea mays
  Peptide Sequence Number=SeqID_78675
atgaggattcgtaaccccgaggttgctgaggaggctgtgatcgaagacttctatcggggatccaacgacccggccattgtccgggtcatacttcaaaaagcacctgccacctctgaacaactgttcagggaggaggacgtctacattttgacgaaacctcccaagactagggaggcaaaacaccctcccgcacaaaagtctattgatttcaaagtgggaggccaacatcctcccgctaccaacttcactgctggggttattccttgggtaccacatttgaacagaaacaacaaaactttgttgtttcctcacctacaacaacatgggttcgaaaaccctgagtatggagtgtactttcgcaagtcttacccaacaaaagaaaaagactctcaaggatatgctggcttgagggagacaaggtgtaataaaataggaattttctatcaatttcctaagcctagaaggaaaaaaaggaggaacagtactgggctcaatctaacccaatctggcccatctccaggcaaacacgcccgcgtgcgcctgcactggcaaaattgcacagaggaccccgactatttgaaaaaccgttaa

SEQ ID NO: 36897 - DNA, 216 bp, Zea mays
  Peptide Sequence Number=SeqID_78676
atgggtttgaaaaccctcagtatggagtgtactttcgcaagtcttacccatcaaaggaaaaagactctcaaggatatgctggcctttggggatcaaggtttctcaagaccagaatgggttcacaccaatcgagagcacagatactccatcggccagcctcttgccacggagggtacatgctactctcaccatctctccactcccattgcatggtag

SEQ ID NO: 36898 - DNA, 237 bp, Zea mays
  Peptide Sequence Number=SeqID_78677
atggcgagagtagcatgtaccctccgtggcaagaggctggacggtggtgtatctgtgctctcggttcgtgtgaacctgatctggatccactttagtaagcatttctgcaaaacagagtctttgattattgaaaagccttaccttgactcccatataaccagcatacccttgagagtcttttctttagtcggatattatgagacatcttcaaaaggattttctaaaagtcttacctag

SEQ ID NO: 36899 - DNA, 351 bp, Zea mays
  Peptide Sequence Number=SeqID_78678
atgaacgtatgtgagctcactcttgctgtctcacaccccccacaggtcaagaacagatgttgtgtgggtgaggctaaagatcctgaagacaatgatgctcaggactacaggacctcacttctgtgtcttggtgactacagagcagcgacgactccagtgcaaacgtcaagagtctcgaggaagaaacggcggcgaagatcgagcaactcaccagcaggccgcaagcatctccctgaccgccatggtgggtccccagcgaggcgaggcaacccgagcgaaccccggatccgaatatgcggggacgacatgggtgggggaaggggcaccgaggacctgcgtggaggagggtaa

SEQ ID NO: 36900 - DNA, 972 bp, Zea mays
  Peptide Sequence Number=SeqID_78679
atgatgtatggcacccggaattccagcaaggtgaggagaaagcttgaggactccgtgtgcaagaggaaggatgacttcacaacccgtgcaccatggttctgcctccgacaccctctcgcccgtgctccgttgatcccgcggtcctcgcccagcctcagtaaaccactctcgcatgtggccgcgcgttgcctgcctccctcgctctctatcgatggaaggacgcaattcagggaagcctccgcagccgccctgccattctcgccctcgcccaacactccatcgatggaagggcatggttccagggattgcctccccagcagatcccaccatcctcgccccgcctgcactccgccatcctcgctgccaccatccacaaggcaacaccatgcccccgctcctctaccatccacgccatcctcgccccacgcccgcccacacacctcgccatccttctcctcctccgcgcaggtcctcgatgccccttcccccacccctgtcgtccccgcatattcggatccggggttcgctcgggttgcctcctcgccggggacccaccatggcggtcagggagcatggtgggtgggggagatggggaggagcggaggaagcacgacgtcctctaggaagaagcacagccgcagccgcccgcaggctatggacgatgacatcgacagctcctgctccaccccgttcgccagcgcgccgtccagccccggacgtccccacgccatcagcggcggaagcggaggcggaggctacttcttcagcgcgccggccagccccatccaccacctcctcctctcgacctcgtgctcggcctccgcgactcccagcaccggtgggcgtgggtgcgtgggcgacgtggagttcgagttcggcgggcctggcgggcccatgatctccgccgacgagctcttccacaacggccagatccggccgctcaccctgcccccgctcagaatagagcgatga

SEQ ID NO: 36901 - DNA, 2018 bp, Zea mays
  Peptide Sequence Number=SeqID_78680
ccccggatgtccccacgcccatcggcggcggaagcggaggcggaggctacttcttcagcgcgccggcccagccccatccaccacctcctcctctcgacctcgtgctcggcctccgcgactcccagcaccggtgggcgtgggtgcgtgggcgacgcggagttcgagttcggcgggcctggcgggcccatgatctccgccgacgagctcttccacaacggctagatccggccgctcaccctgcccccgtcccggatctcgaccccgggagcgatgacgacgaggactgcgaccgcgcgccgacgcgcggccgcgacctcacgccccgaagcgcgtccgtgcaccgccgcgcgcggtccatgtctccgctccgcagcgcgtcgccgcggctcaagctgatcaatgcgctcgtcccggcgccggatctcggccccgccctcgacgcgaccggggaggctgcgccgccgatcaccgcctcgccccgctcagaatcaaggggagaggctcgtgattttgccagggtccggaatacctgctttgagcagtacagttctagcactaaacaatcatctgggaacaagtttcaaagcatcagcagcggaagagttgccccatggcttgagactggtgatgcagtggaatcaaggggagaggctcgtgattttgccagggtccggaatacctgctttgagcaggctagacaggcttacttggttggcaacaaggctcttgcgaaggagctcagcatgaaggggcaggcctacaatgtgcaaatgaaagcggctcatgagaaagctagagaagctatttaccgacaaaggaatcctatttcttcccaacgtgggggtgaccacctgattgatttacatggcctgcatgtgaacgaagcaatccacatcctgaaggatgatatccagatgggcaagcgtgaggagactcgtgattttgctagagtactttctggctataatgacatcattatggctagggtctttgctcaccaagatattctggacttggcaaaatatgcatatgtacatgtcataaatggtctcactgacaataaccatccatgtcagataatggctgatgcactttctatgcttgagcagattggtcgtattgaaaacacaaaggttgtctatgttggagatgggaacaacattgtgcactcatggctgctattggctgttgtgcttccttttcactttgtatgtgcttgtcccaagggatttgagcctgatgcacacacagtggagatggccaggggtgctggaatcagtaagattgaaataacaaacagtcccagggaagcagttaagggagcagacgttgtgtacatagatgtttgggccagtatgggacaaaaggaagaagttgattatagaaaacagaagttccagggattcacggtagatgaaacactgatggagattgctggcccacaagcctaccttatgcactgtttgcctgcagagagaggagtggaggtgattgatggcgccattgaggctcccaactcaatcgtgtttccccaggctgagaacagaaggctgagaacagaatgcacgctcagaacgccatcatgcttcacgcgtacacaatctattggtgcacggttctgtcgatacgccatcaacgcgcacgcgcccgtcaaggttgtcgcgccgcggatcccccatcctcctccccctctgctccccgccatcaacacacacgcgtcgcgtcgagccgcggatcccccaccctactccccctctgcacaccgccagtggctggaccacttcagctttccaggggtcggggacgaggacgaggaggcagcgttcttcgagcagcggtacctggtgggccgcgacgatggatgggctggacccggcggccccatcttcttctactgcggcaacgagggcgacatcgcctggttcgccgccaactctggcctcgtctgggaggccgccccacgcttcgccgcccgaggcaaacatgctcttttgattttcttcccagcttgtttataa

SEQ ID NO: 36902 - DNA, 651 bp, Zea mays
  Peptide Sequence Number=SeqID_78681
atgcaggaggcgtgcaaccgcaccacagttgtgcaccctttcggcttcatcgcatccggtgggtcagcgggaaggcccgggcccgcatgtcatgcaaccagcgcaacggttactgcgtgcaaagaaaccgcaccgccgctcgcgccaatgccacgtcttctcgtctgcggaaccagtgtcgtgactcaaggcagccctacgcatgacccaacagtgccaatcgagcacaacgatcatgggtcagtcagccgcggggggaggcgcgacggtcgatatggccaaaagtgggccgatagtaattgcagcagcagacgagcagaagcaacggtcaaatcgcctgcaagctcgcgtcccctcctgaagcggcaggagagccctctcccacggcatgaagacgacgcgcccgtgttccgttcctcgaacgactcaatcacgtgcaacagccgccccgcgaatcgcccgtcccatcgcattaactcctcgggcagggcgggcgacacctttggcaggcgaagcgggcgttgtttcacctccgccctgatgaccacgtcaaaaaagggaccgggaaaggggatatttcgaaaaggatcctttctcagcgaaggaaatgggcccccgagccctcctactgatcaggggttcgaaggctag

SEQ ID NO: 36903 - DNA, 336 bp, Zea mays
  Peptide Sequence Number=SeqID_78682
atggctatcgcccgggggatcgatccctttttcaaggcggctctccccactcgcatcctcaagcgtcacgggcaaagtcttcatcgacgtgctccggggtcctccccctacgacacgggggctgggtcccacacgtcatgcaagctgactagaaatgaaagaagccaaaccactgcgcgcgaagcaggtaaccaccccgcggttataagcattcccccattctcgctgaaaccagcaggcgaaagggcggacccccatgcaggaggcgtgcaaccgcaccacggttatgcaccctttcggcttcatcgcatccggtgggtcagcgtgaaggcctag

SEQ ID NO: 36904 - DNA, 1023 bp, Zea mays
  Peptide Sequence Number=SeqID_78683
atgaagactttgcccgtgacgcttgaggatgcgagtggggagagccgccttgaaaaagggatcgatcccccgggcgatagccatgcctttgcactcccctcatgcatcgcgcccttccaccttctgagcctccggatggagggcacgcgcgttgccctcgtcttgctgctgttggaggagcgcgacttcgcgggggatgatgaccaccagttcggtggtggggagaagcaagcgggctgcggcctctgccccgccctcagcttcaaggatcttcatcatccttgctgtggcggagggcgagctgagccggggttctacctcccgcatgggccggcaggccacctcttccttcagcattcaggggagagggcgctcaccggccttgcggagggggcgaacttcgacaacgcgggaccgaccggccgcaagcgtcatcagctccagcgtgcctggctcagctggctctgtcgcggcctccgacgctgcctcttgccgcctgatctgagcgtggccgtccgtccaccgcgcgggcgactatcgcgccgcgcgcaggtcgggcatgtcagcggccctccccgcatcgccgactgcaccaggggatcgtccaagacgtcgcacgccgctagggcggcgttcgtgttcttggattgtcttgtcctcactccagcacgacgcctccgcgcggaggtggccgctgtcgtcggtgccgaggtggtggcagctagagaaggtttctccgccgacgagaccgtcggcgccacctgccggtcggacccctggctctctggcttggacgggccctctggtgtggaggttgttcatacccgcgggagtggaaccggagtcccatttgtaatgaaccttcggccgctctgcgatgagctggggccggaggcagcggcgtcggcgtggacagaggcggagtcggctcgaaaagaggcttcgtcggcccgggagcacgtggcttccctagccgaggaggtgcggcagcggcgactggagcttgtccaggtcgtccgctag

SEQ ID NO: 36905 - DNA, 261 bp, Zea mays
  Peptide Sequence Number=SeqID_78684
atggtgtcatgtggctatatggagaagatcaagagatatggcttggcttcgatggaccaagtggctagtgtgaagggcaagtcaaaggctaatgagcttgatgatgatggtggaggaacttcatgctatggacaaatggtaaaaggttgccgcctcctagacggcttggtggtggttccccgtgagctcttcaaaggagattgtgaagaggccgcggtggtgattgtgagaggcgttgtgcttgcctcgccggagcggtga

SEQ ID NO: 36906 - DNA, 186 bp, Zea mays
  Peptide Sequence Number=SeqID_78685
atggccttgacagccatgccaaagtcatcctcaaagtcctccagggcactagcggtcgcatctctgacaggttgccgcctcctagacggcttggtggtggttccccgtgagctcttcaaaggagactgtgaagaggccgcggtggtgattgtgagaggcgttgtgcttgcctcgccggagcggtga

SEQ ID NO: 36907 - DNA, 294 bp, Zea mays
  Peptide Sequence Number=SeqID_78686
atggtaaaaggtatcatggttggctacacttatggatgcccattgttcatcatgaggaggagaagaagaaaaaggatgcggagaaggctcgggcccgcaggcggaggagggctcgagacgccctggagaaacgccgtcgtcagcaggaaggagatggaattgaatgctcaaggcaaaggttgccgcctcctagacggcttggtggtggttccccgtgagctcttcaaaggagattgtgaagaggccgcggtggtgattgtgagaggcattgtgcttgcctcgccggagcggtga

SEQ ID NO: 36908 - DNA, 153 bp, Zea mays
  Peptide Sequence Number=SeqID_78687
atgtctccgtcaggatggcgaggtggtcgcggagataaggtgaagggtagcgccgctagagatataattgtggacattactccacaactaatcacgctcaatcaaagatccaaatcagacaagtatcataagaacaaacattcaatttcatag

SEQ ID NO: 36909 - DNA, 222 bp, Zea mays
  Peptide Sequence Number=SeqID_78688
atgggggtgtacggcgacggggctctccagagcacggctagatggggtaggttagaatctattgctaggtttaaaatcgaggggttatgcaactatcggatggttaaggtagttgcatatggccaagttgatgtaattgtggatcttactccacaactaatcacactcaatcaaagatccaaatcagacaagtatcataagaacaaacattcaagtgcatag

SEQ ID NO: 36910 - DNA, 150 bp, Zea mays
  Peptide Sequence Number=SeqID_78689
atggcggcatctcctgcttctctctacgctccctcatctccctctcggttcggcgatgatataattgtggacattactccacaactaatcacactcaatcaaagatccaaatcagacaagtatcataagaacaaacattcaagttcatag

SEQ ID NO: 36911 - DNA, 357 bp, Zea mays
  Peptide Sequence Number=SeqID_78690
atgggggtttggccgaaatcgcgcggagtctacggcggcggatttgccgcggttctgttgggatccgaaggggggacgctgaagctgacaaggtggggtccatgcgtcggtgtcagagccgtccggttgtgcggaggagcggaggtcccagatgtaattgtggacattactccacaactaatcacactcaatcgaagatccaaatcaaacaagtatcataagaacaaacatttcaagttcatagatatctatataaaagaaaataattttgtttttgttcctaagagtaggtcccctattcctaacggtcactttaagctcatgattccaaagtgtgaaatccacttttgtctttag

SEQ ID NO: 36912 - DNA, 255 bp, Zea mays
  Peptide Sequence Number=SeqID_78691
atgagcaagaacccaaaagacacaagatttatcccgaggttcggtcacaccaccaaggtgccctacttcctcgttgaggcgcccaccaagagctgggtctctttcaaccctaatcccccctttgctgaccacaaagactcttcgaggagatggaacttcaacaaaatctggcctttcaagagcatccggttgctgattgcaaacgctgattctggctactcaaagatcatcttcgggcttctaggttttgcttag

SEQ ID NO: 36913 - DNA, 249 bp, Zea mays
  Peptide Sequence Number=SeqID_78692
atgaagaagattccagcaccctcccttaaggtcaaagaagaagctgcaagcaccccgccagcaccactgccctttgaggagctacaagagccagttccgtttgaagaagagttcgaccccgtcctgccacctcagtcgccgctagaagaaccagaatcagcgtttgcaatcggcaaccggatgctcctcaaagaccagattttgtggaagctccatctcctcgaagagtctgcaagtgaagatatgtag

SEQ ID NO: 36914 - DNA, 288 bp, Zea mays
  Peptide Sequence Number=SeqID_78693
atgaagaagattccaacaccctcccttgaggtcaaggaagaagctgcaagcaccccaccagcaccaccgccctatgaggagctacaagagccagtcccgcttgaagaagagttcgaccccgtcctgccatctcagtcaccaccagaagaacaccagaagaccaatcaaggaaggaatccatgtgggagttcacaagaggaagaatcagcgtttgcaatcagcaaccggatgctcctcaaaggccagattttgttgaaggtccatctcctcgaagagtctgcaaagtga

SEQ ID NO: 36915 - DNA, 339 bp, Zea mays
  Peptide Sequence Number=SeqID_78694
atgggccggcgtagggtggacagggaggccgagaaggctattaatgatgacacaaagtggagagggctgtcacaaaaccttccaaggaaggtttctcaagaccagaatgggttcacgccaaccgagagcacaaatacaccaccgtctagcctcttgccacagagggtacacgccactctcgccatctctccactccttgcatatgtcaactcgcaccaaggtttctcaagaccagaatgggttcacgccaaccgagagcacagatacaccaccgtccagcctcttgccacagagggtacacgctactctcgccatctctccactcccattgcgtggtag

SEQ ID NO: 36916 - DNA, 378 bp, Zea mays
  Peptide Sequence Number=SeqID_78695
atgggtttgaaaaccctgagtacggagtgtactttcgcaagtcttacccgtcaaaggaaaaagacttatcaaggatatgctggcttgtgggattcaaggcacttagcctacactagccatcttttagcaccccttgagttcactggattgctacgtgtttctcaagaccagaatgggttcacgccaaccgagagcacagatacaccaccgtctagcctcttgccacagagggtacacgctactctcgtcatctctccactcccattgtgtggtggcctttctggtattggtccgaccgaggcaaagcttacccatgatgaggcatgtggccagttaaaaggtcctcgatcatcaagcctacatcgacatggtccttaa

SEQ ID NO: 36917 - DNA, 702 bp, Zea mays
  Peptide Sequence Number=SeqID_78696
atggaagtacttaaatcgagacttgggctacgaacatgtgatgttctatccaggttgattaaggattatagtgaatgtaggtttgatgatcgaggaccctttaactggccacatgcctcatcatgggtaagctttgcctcggtcggaccaataccagaaaggccaccacgcaatgggagtggagagatgacgagagtagcgtgtaccctctgtggcaataggctggatggtggtgtatctgtgctctcggttggcgtgaacccggtctgcatatccttgagagtctttttccttagtcgggtaagacttgctaaagtacacttcgtactcagggttttcgaacccatgttgttgcagtggtttatctcgggtccttgggacactcggacggatcctgttaagttatccggtgcacatgctagccatctgaggtctttgagacaaggacaggtgcatgtgggcccaataacttgggaggttctgccacatcgtcggtcgctacacaacgcgtggacaaaggtgctttccagggagtgtctcataccggtgttgtatgatgaggacatcactatgagtacgactacaccagcagcacctccacatcaagcgccacttccttcattagctgcgccaatcacttgggctcgtgccagagatcttaactttgtcatgctactgaagaatgagggcccagaagaatag

SEQ ID NO: 36918 - DNA, 531 bp, Zea mays
  Peptide Sequence Number=SeqID_78697
atggcactggtactaatgggacggagtgcatttctgcagggcctgactgctcttcgtttggaatcggagcctttccaggagataggcccgttccacgtggacacgacggcaagaccctctgcaatttcaaatacgcctggaacacagattgtggattctgtgattgcactgttccgtgttgatttcagtggcaggggtgaactagcagagcgccaggctacgagaagtgcaaatttgaccttctgtgaggagggatgccggtacatttacatgattggggcttcagatgttaaactggacataaggaacggagccaacgtgaaggggtactttgtctggtcgttcctggacgtgtttgagttgttggtgggctactactcgcgatacaccatctaccatgtcgatttccaggacccagagctgccgaggatgccaaaactctctgcgctgtgttttcatgcgctgctacgagcagagtacaattcacatttttccctgtgccgtggtcgcgggggcaccacggtcatgtga

SEQ ID NO: 36919 - DNA, 672 bp, Zea mays
  Peptide Sequence Number=SeqID_78698
atgacaagcgtggactcttataagttctgctccattatcaacaaggtggagagcctccagcagcttgcaattcagaggcccagggagcaaatagttgatgagaacgctgttgccgaagccacttgtttggtgacatcagtagatggcactggtactaatgggacggagtgcatttctgcagggcctgactgctcttcgtttggaatcggagccttccaggagataggcccgttccacgtggacacgacggcaagaccctctgcaatttcaaatacgcctggaacacagattgtggattctgtgattgcactgttccgtgttgatttcagtggcaggggtgaactagcagagcgccaggctacgagaagtgcaaatttgaccttctgtgaggagggatgccggtacatttacatgattggggcttcagatgttaaactggacataaggaacggagccaacgtgaaggggtactttgtctggtcgttcctggacgtgtttgagttgttggtgggctactactcgcgatacaccatctaccatgtcgatttccaggacccagagctgccgaggatgccaaaactctctgcgctgtgttttcatgcgctgctacgagcagagtacaattcacatttttccctgtgccgtggtcgcgggggcaccacggtcatgtga

SEQ ID NO: 36920 - DNA, 630 bp, Zea mays
  Peptide Sequence Number=SeqID_78699
atgacaagcgtggactcttataagttctgctccattatcaacaaggtggagagcctccagcagcttgcaattcagaggcccagggagcaaatagttgatgagaacgctgttggaccttaccacttgtttggtaccatcaggcctgactgctcttcgtttggaatcggagccttccaggagataggcccgttccacgtggacacgacggcaagaccctctgcaatttcaaatacgcctggaacacagattgtggattctgtgattgcactgttccgtgttgatttcagtggcaggggtgaactagcagagcgccaggctacgagaagtgcaaatttgaccttctgtgaggagggatgccggtacatttacatgattggggcttcagatgttaaactggacataaggaacggagccaacgtgaaggggtactttgtctggtcgttcctggacgtgtttgagttgttggtgggctactactcgcgatacaccatctaccatgtcgatttccaggacccagagctgccgaggatgccaaaactctctgcgctgtgttttcatgcgctgctacgagcagagtacaattcacatttttccctgtgccgtggtcgcgggggcaccacggtcatgtga

SEQ ID NO: 36921 - DNA, 603 bp, Zea mays
  Peptide Sequence Number=SeqID_78700
atggagcgtgcggagcgcacctcgctggcgcctgttgttgtgcccaagaccgggttctacatcctggtgtggtacacgttcagcacctacctcatgccatactcgcaactgctctcatctgttcccgctcagtttttgctgtcaagtggaaaaaattgcaggatgttctttttgtttcctgtttgttgtgttttgcatcttttgtcaagtggagttgacactttgataatgggcttttcatctatggttgcctgcacccatcctcggagggtcgcaacattcttagtctttaggcatgtggcagaagagatggatgttactcttggggaagaaacagatggtatgcttctaagagaagcaatggtagacccacttttagagaagtacaaggtgattgttcttgatgagactcatgagaggactttcaattcaattcagaggcccagggagcaaatagttgatgagaacgctgttggaccttaccacttgtttggtaccatcaggcctggctgctcttcgtttggaatcggagccttccgggagataggcccgttccgcgtggacacggacggcaagaccctctgcaatttcaaatacgcctag

SEQ ID NO: 36922 - DNA, 219 bp, Zea mays
  Peptide Sequence Number=SeqID_78701
atggaacctgcggggatgtgccatctcgggcgggaggcttcagcccaggagtctaccaccaagcttgagtcgatggagcgtgcagagtgcacctcgctggcgcctgttgttgtgcccaagactgggttctacatcctggtgtggtacacgttcagcacctacctcatgccatactcgcaactgctctcatctgttcccactcagagaacagggatctga

SEQ ID NO: 36923 - DNA, 450 bp, Zea mays
  Peptide Sequence Number=SeqID_78702
atggcgtatgttccgattatcgcgagacgcctcctcgctgaatctgcccgccacctcctcgtcgagccgcggggcgacaaggtgcccctgccgcgcatcggtgactcggctcagcgctcgccactaatgactgcacgtttgcctcgctgcgacaccaacgctgctcgctatcgagcctcatcgcgcaacccgctgaacaacccgagagtcgtcgacgttggcgacaaccatgaggcccccctgcttaacgatggacagcgcggtgcagctgctctggaccgcgtccaaacggcggcttcgcgggagcttgtcgtacacagcggcgcatgcgaccacgtaagactacttttagaggtcgaactgacagtctccaagcttcttctcgtcatcgatgagcgacgacaatgcgaatgcctcctgctcatggagtttgttcggggtttgaagtag

SEQ ID NO: 36924 - DNA, 216 bp, Zea mays
  Peptide Sequence Number=SeqID_78703
atgaacgtatgtgagctcactcttgctgtctcacaccccccacaggtcaagaacagatgcagtgtccagaacaacccgagagtcatcgatgttggcgacaaccatgaggccccactacttaacgatggacagcgcggtacagctgctctggaccgcgtccaagcggcggcttcgcgggagcttgtcgtacacagcggcgcatgcgaccatgtatga

SEQ ID NO: 36925 - DNA, 354 bp, Zea mays
  Peptide Sequence Number=SeqID_78704
atgacgagaagaagcttggagactgtcagttcgacctctaaaagcagtctttacgtggtcgcatgcgccgctgtgtacgacaagctcccgcgaagccgccgcttggacgcggtccagagcagctgcaccgcgctgtccatcgttaagcaggggggcctcatggttgtcgccaacgtcgacgactctcgggggtactacctcgctgatgagcccggggtgcacttcgtttggcagcccaaccaagagtcatcggtactcgtcatgtcgcgtgcgttcgacgacttctatatcgaggattgtggcgtcatcttggcgccggaggtgacacagaggaggatcgacaacagtgactag

SEQ ID NO: 36926 - DNA, 447 bp, Zea mays
  Peptide Sequence Number=SeqID_78705
atggcgcgcggtcgggcctccgcacctctctgtccccctcctctcccgcggcgacagcttcctcgaggagatgagcacgcccgcccccgcgcgcaccaccaccaccacgcgtccacgcccctcgtgcaccttctcgcccgaggactacagccagtagcgaccgtcgcaagagcttgtggccaaggatttgcacggaaccgagtggaggttccaccacatatatcgaggtgccaaaggttcatctacaaacatactaaatcgactgtccggaataccgtagattattccggacaggagaagctttttggaaaaacaggccaagcgcggaccgtccgggcccttgcgacggaccgtccgcaccaccaggatgaccctcagacagaaccaatgcaaaaatctgagtctgcactatggaccgtccggaggagaagagcggaccgtctgtga

SEQ ID NO: 36927 - DNA, 912 bp, Zea mays
  Peptide Sequence Number=SeqID_78706
atggcgactaggttcatcgacagcggcaagcagctcgtgttcgaccacgcgacacagttcttcaccgcgagcattcgcaccgctgcagaggcagtcgtgaacaactatatatgcgcaagattgagcctaaggtataggcatctgatggaggacgtgttgtctctactcccgcatgtgaagaaggacaaccaggacaaggtcgagtccaagcagagcaaggggaacacgttgaacaagctgcttgagctcaggagctgcttcagttgcctttcttcgaggagggaggtcaagaagcctaagaagcccaaggtgaagaagcccaaggtgaagcaacgattctcgcggatgctgcacatgttctgtaagacgctcacggcctccgacaccagcacgcatgtcggcttctccgtgccgcaccgcgccgccgaggactgcttcccgcctctggactacagccagcagcgaccgtcgcaggagcttgtggccaaggatttgcacggaaccgagtggaggttccgccacatttatcgagccttgtgcgctatgctcagcatttctcatgtcattgggcagccccgcagacaccttttaaccactggatggagtgcctttgtcaacaagaagaagcttgtctcaagggacgccgtactatttttgaggggtgataatggggagctaagacttggagtgcgccgtgcagctcagcttaaaaatggatctgcttttccagctctttataaccagtgctcaaatcttggttcactacctaatgttgcacatgttgtggccaccaaaagtgtgttccacatctactacaaccccaggtctggtggtaatgcttatgtgattggtgattctgcaaagcttgagcagaagtggcacgcctactatgccactactgagcacccttga

SEQ ID NO: 36928 - DNA, 675 bp, Zea mays
  Peptide Sequence Number=SeqID_78707
atgggcacctgcagtggtgcggatgctcgcggtgaagaaccgtgtcgcgtggtcgaacacgagctgcttgccaccgtcgatgaacctagtcgccatcctccccctaggccatgcaccccctgcatcgacagtgagcatgtgcttggggagacaaaaggggggggcggtaggaaccatgtcgaagacgatggagcagacgcgtatgagataccggaagcgccgccggggccgtccgccgtcagggcgcagccttggccgtcaggggcgctgacatggttcctaccgctcccacaggcgccgaggtgggatctggccaccgacgcgcaacggcgggatctggttcccacaggcatcgaggccgtccgccgtcagggcgcagtcgtgggccgagtacccttgaggaccattgcaggatcgctggatctcaaggaggcggcactcctcctcagagtcgacgtaggtcgcgggtgccttcgcgtcgaccgccacacaagcgcgtgccgtggcgtctcctcatgcggcggacagaagctgggcaggcatcacgccgaggccaaggggagggggcgtctgggagacgctgctatcacgatggggaaggcgggggctgggtcactgcgctggtgtcggcgagatccgtgggcggcgatttggggtgtggagagagaagattag

SEQ ID NO: 36929 - DNA, 483 bp, Zea mays
  Peptide Sequence Number=SeqID_78708
atggcggacaatccaggagggtactcaccggcggtggagatgacgacaggccaggccacgatgaagggcggaattgcggtggttcctccacttcggcgagaaattgccgcgcgaccgcccaagttccgggggggtaaggtcaagacaccattgggacacctctacgaccctcacaagccatctattgaggacggagcgaccctggacttcagatgcacagatcaaaattccagcatggaatacaactttgtttatattatttattttattcatctattggagcaaatgtttcagatttccaaagttctattgaaaaagaaaagggaaaatcgtgaacagtattgggccggaagcagcccagacggcccaagtccaggaaaaatgcgcacacgcccgcgcccgtgtaggcagttttacacagagatccctacggttttgaataacttgaaccaagttctctgcactattgcaatgagtcgctga

SEQ ID NO: 36930 - DNA, 444 bp, Zea mays
  Peptide Sequence Number=SeqID_78709
atggtgaaacaagggggtctggcgcaagatttccacagacttagggcagtcacaggaacggactgcgggtttaatacagtatttcttagggtctcatacgcaaacgttcacttgcgaaggggtaagttcatatctcaaccacacgatccacaatgggtggcccagattagactgcacccacaccgaaacggagggtactcaccggcggtggagatgacgacagggcaggccacgatgaagggcggaattgcggtggttcctccacttcggcgagaaattccgcagccaccgcggaccttccgatcctcccgatgccgcggctacttccgccacgcgctgatgatatctcctgaccaccgcaatcgaccgagcagcgacgagacgtggttttggcttggcgcacggggtttaagcgcggcggcgaattggatttcgggcctatga

SEQ ID NO: 36931 - DNA, 546 bp, Zea mays
  Peptide Sequence Number=SeqID_78710
atggtgaaacaagggggtctggcgcaagatttccacagacttagggcagtcacaggaacggactgcgggtttaatacagtatttcttagggtctcatacgcaaacgttcacttgcgaaggggtaagttcatatctcaaccacacgatccacaatgggtggcccagattagactgcacccacaccgaaacggagggtactcaccggcggtggagatgacgacagggcaggccacgatgaagggcggaattgcggtggttcctccacttcggcgagaaattccgcagccaccgcggaccttccgatcctcccgatgccgcggctacttccgccacgcgctgatgatatctcctgaccaccgcaatcgaccgagcagcgacgagacgtggttttggcttggcgcacggggtttaagcgcggcggcgaattggatttcggggcctatgacggcgcaaaagggggtggatgagggaagaaaaggagccggggacgatcctacttatctccccgaggactcggttccacgcagtggttgcaacggcgcctga

SEQ ID NO: 36932 - DNA, 1710 bp, Zea mays
  Peptide Sequence Number=SeqID_78711
atggcgcgggcggcgcttcgattgggcgtgcgcgcgctcgcgctcctcgtcttcgtatcagtggctctgcttccacttgtcagttccgacgatgggtacagacactgcgagggtgtcgtcaggggctgggcggatgcctcgtctgggcgcgtgaaggacggggacaaactgagcctcaaggatttgctcttcttcctccacattcctaggactggaggccgcacctactttcactgcttcctcaaaaagctgtatacgaacgcgcaggaatgcccgcgttcttacgacaaactacggttcgatccaagccatcctgattgcaagctggttgttagtcatgatgactatagcttaacttccaagctgccaagggagagaacttctgttgtaacgatactaagaaacccagttgatcgtgtatttagcacatatgagttctcagttgaagttgcagctagattccttgtgcatccaaacttaacttctgcaaagttaatgactacccgtgtgttaacaaagtctcgtgctgtcagtactttggacatctggccttggaagtacttggttccatggatgagggaagatctgtttgcaaggagagatgccaggggtgtttacaaagttcatagtagtaagaaggttaatgcatatgatgtggacgatatggttatgccattacatcggtacatcaatgatccagttgcccatgaaatcattcataatggggctacctttcagattactgggttaacgaacaactcatattttgatggagcacatgaggttcgacattgtgtcaggaagcatccagatcttggtcgtattgtgcttgaagttgctaagaataggctggaccagatgctatatgtaggacttacggaggatcatgaagaatcagcgaggttgtttgctcatatggtaggagcacaggtgctttcacaatctgggacattgactttagatctcaaggaagatctgcccattgagactgattctcacccatccatggagcctgaggacgaagaaacaaacggacatctgatgactgttggtaaactgatggaagcttatgaaacttgcattgccaaactgtggaaatctcaatctggccgacgtaaaatatccctaaagaaagttcaggaagcgaacttttcaaaagaggcacggaagctggtatctgaggcaattctgaaccaaatcatctcattgaacagacttgatatggaactttatgaccatgctaagaaaatttttactcaggaacatctgatgctaaaagctcagcaatccatggtggggcagcacagacagtttggagaacaaaagggttggatcggcgtaatgtgcagcgtcgggatttgccctccttggatggtggtcttggttgttctagggatctccacgatcatagttttggtcacgttagctgtaacgacgagaaaaagaacgtctaaacttaaggatcagctgggtcgacgaggtcagcagatcacgagcagtcgcgtgaagacgcttcccaaaaaccttattcgccctctcccggtgcaggatctagaagacgaagggttccggagacctgctctcctgatcgtatatgcacctctgcggtcgggacgaagggaactaaaaggcggctcagctatgaagagaggcgaaagcgaactgggatctgggatgatttggaggctggctgtcgggctccttttatag

SEQ ID NO: 36933 - DNA, 669 bp, Zea mays
  Peptide Sequence Number=SeqID_78712
atgactgttggtaaactgatggaagcttatgaaacttgcattgccaaactgtggaaatctcaatctggccgacgtaaaatatccctaaagaaagttcaggaagcgaacttttcaaaagaggcacggaagctggtatctgaggcaattctgaaccaaatcatctcattgaacagacttgatatggaactttatgaccatgctaagaaaatttttactcaggaacatctgatgctaaaagctcagcaatccatggtggggcagcacagacagtttggagaacaaaagggttggatcggcgtaatgtgcagcgtcgggatttgccctccttggatggtggtcttggttgttctagggatctccacgatcatagttttggtcacgttagctgtaacgacgagaaaaagaacgtctaaacttaaggatcagctgggtcgacgaggtcagcagatcacgagcagtcgcgtgaagacgcttcccaaaaaccttattcgccctctcccggtgcaggatctagaagacgaagggttccggagacctgctctcctgatcgtatatgcacctctgcggtcgggacgaagggaactaaaaggcggctcagctatgaagagaggcgaaagcgaactgggatctgggatgatttggaggctggctgtcgggctccttttatag

SEQ ID NO: 36934 - DNA, 435 bp, Zea mays
  Peptide Sequence Number=SeqID_78713
atgggtggcgcgacggggcagggctcgaccgtgggcgcctattctctcagctgctgcgcgcgatgggcgaggtggggaaggggcaagtgggagtacggaccggcgtcatgggctagtgggcataaaagaaattttatacccccaaattcagggtgttacaaatctaacccccttaacagaatctcgccctcgagattcgagaagagtctagaaagaacgacaagatgcttgagaccgatcaatgcaattcttggggatctcttggacctgtgggttaggacccacacacgcttccgctgcgccactctgatcttgttggttgatgttgatcgcattgtcttcattgagatggtggtctttacttacaaaggggaaactactccaaggccatcgaaaggcaaggggaataataagacatgcaggataggggcatga

SEQ ID NO: 36935 - DNA, 414 bp, Zea mays
  Peptide Sequence Number=SeqID_78714
atggggaggagggcatcgggcctgtttgagaggaactacggcgtgctatggatcctcccgattttgagggcggcgtgggggaataggcgattgaggaagggagctccgcgtggggcatactcgagaccaattgatgcaattcttgaggacctcttggacctgtgggttaggacccacacacgcttccgctgcgccactccgatcttgttggttgatgttgatcgcattatcttcattgggatgatgctaactctgatcttgactgatttggaggagttggaggttgccaaatggacaggtgcaagaggaaagaatagagagaaaaggctttcacgtgataaagaagaggatattgccaagggtaggataagtaaaacacggctctcaaattggataggagattggagattttag

SEQ ID NO: 36936 - DNA, 420 bp, Zea mays
  Peptide Sequence Number=SeqID_78715
atggccgccgcaggagggagcaccggctcgctgccaggctactcgcctagggagaaggagggagaagcgctggttgccggaggggaaggagtagaggcgatgggcggcttcttgcgcgtggggcagggaaatgggagcggcatgggcggtttgggaaagactaggcgacatgggggagagacagttgggggagatgaacaggagagagggcgtcctggtaggtgggaccctcatgtaggcgttggtggtgttcccacacgcagcgcgcggctaggcaagcggatcatattcacgaccactgatgcaattcttgaggatctcttggacctgtgggttaggacccacacacgctttcactgcggcacttcgatcttgttggttgatgttgatcgcattgtcttcattggggttagcggctaa

SEQ ID NO: 36937 - DNA, 573 bp, Zea mays
  Peptide Sequence Number=SeqID_78716
atgcagtacaaggaatcaagcagtctcattagctgcgagaagcagacgattcgaatcgagtttttaaaccttgcaagtagccgcggcgaagaaaagggcggaggggcttaccggcggcgagactgttccggtgaagtggccgagggtgaaggggaggtcgcggggatcacaacgggaggtccacgggatgccagagaagatatgagcgaaaggaatcgggcggagactcactggatagctcggtccacgcgcggcggcggaagaccgaagtccggtgagggtgatctcgggcctccggtgaagtccggtcgggtccgagggcttggcgagcttcacgggctactggcggagctagccgaagcactggttgggctggagggtggctggagtgagctggccacggcggccgaagctctggcggcaatggcgggcggaaaaacgctcgccggagctaaggaacggtggctggccggtgagggtgagtgcggggcgaagagagagatatggagccaggaaatctggtctgtctccctgcccaaacccgaggcaaatcccaagttttgtcgtgtctag

SEQ ID NO: 36938 - DNA, 150 bp, Zea mays
  Peptide Sequence Number=SeqID_78717
atggcgggcggaaatacgctcgccggagctaaggaacggtggctggccgatgagggtgagtgcggggcgaagagagagatatggagccaggaaatctggtctgtctccctgcccaaacccgaggcaaatcccaagttttgtcgtgtctag

SEQ ID NO: 36939 - DNA, 198 bp, Zea mays
  Peptide Sequence Number=SeqID_78718
atggcgggcggaaatacgctcgccggagctaaggaacggtggctggccgatgagggtgagtgcggggcgaagagagagatatggagccaggaaatctggtctgtctccctgccccaaacccggaggcaaatcccaagttttgtcgtgtctagggctcgcgtcccaatgccatcttctggcacacgacagaggggttag

SEQ ID NO: 36940 - DNA, 306 bp, Zea mays
  Peptide Sequence Number=SeqID_78719
atggagccatatttcatgataactggtaggaaaacaaagcgcactgctagggggtttcttaatgcggctagcaggatactccctggtgcacgttcccttttccaagggagttcttctagccagaggagacaggaggcgttgctgagacacgcctggccagaactacgtgatacacatatcgctctacaacagagtaccgatgaagaggaggacgaggaggaggaggtgcaacaccatgaggaggaggacgagcaggcccatgaggaggaggaggtgcaggcccatgaggaggaggaggaggtgtag

SEQ ID NO: 36941 - DNA, 345 bp, Zea mays
  Peptide Sequence Number=SeqID_78720
atggagccatatttcatcactaatgggattagacaaagtcaatatggcataactgaagaagaggaggacgacgaggaggtgcaacaccatgaggaggaggacgagcaggcccatgaggaggaggaggtgcacgcccatgaggaggaggaggaggtgggcatagatgctgaggcggatgacgataccaccgaggctcctgtcgttcgacgaaggggcactcggaagggccactttgtcctacctctgtcagcgcctgcacaatctgaagctcgagtactgatcatcccggttggtgatagccaatgggaagacacgtcatttgacggtcgaggtcatcatagacag

SEQ ID NO: 36942 - DNA, 645 bp, Zea mays
  Peptide Sequence Number=SeqID_78721
atggagccatatttcatgatgagtggtaggaaaacaaagcgcactgctagggggtttcttaatgcggctagcaggatactccctgaggaggacgaggaggaggaggtgcaacaccatgaggaggaggacgagcaggcccatgaggaggaggaggtgcaggcccatgaggaggaggaggtgggcatagatgctgaggcggatgacgataccaccgaggctcctgtcgttcgacgaaggggcactcggaagggccactttgtcctacctccgtcagcgcctgcacaatctgaagctcgagtactgatcatcccggttggtgatagccaatgggaagatacgtcatttgacggtcaaggaattgtcaccgacccaaaaggtgtggtggttccttgcactagctggtcgcacttcgcactagctccacatgctacatatggaacagctcaaggtgccgtcaagcacgacttttggagacgctaccgtgtgaaacctgaggctcaagagcatgcagaccgagtattagagaaaaatgcgaagaaggttgtgaacgcgtacatgaagcgccgaggtcattctatcaacaactttcgacaatattcggatgtctacttgactgtagaccagtacatggaggtaaaaatctaa

SEQ ID NO: 36943 - DNA, 1143 bp, Zea mays
  Peptide Sequence Number=SeqID_78722
atgggccttgagattgcacagacgacacctgcatttgttgctctaggtattccatctgttatgttcctgggcccacatgtcggggctcagcaaccttttgggtacgggacgtacttcggcaagaggctggatccggagccggggccggcgcacggacggaaagaagtggcggtgctccagcgaggccgccccggactccactgcgagcgccacatgcaccgcggccgcaagcgttcaagaaagcctgtggaaacgcagcccgcgccccagtcccaaccgcccgccgccggcgccgccgccgccgccaacggcagcagctttcggaaccactccctctacccggccattgccggtggtggaggtggcggggccagcagtatctctgctcccccgttctcgtccatagagagtcgtctcagctgcacatggacagtgctgctgccagccgcagctcttgggggtggaggccgccaagatggcccgccgccatgcgcgttgctgggattccgcgcccgcctccagcacaggtcggatgcctccacggacggaatggtggccatcaccggcgaatccatggagttgcccggacgcgcctgcgatgtggcctcgcccagcagcgccgttacctcgactcgccgcgccgacggatcctacaggcgcgctgtggcctcgcccgtctacgtcgttgcgtcgactcgccgcgccgatggaagagcccagggatccttcaggcgcgccatggccgagtgcgggtgcgggcgcgctttggcctcgcccggctgcgccgtggccgccagttgctgcgccggctcctacggccgcgatttggccttgcccgtctgcgccgttgcgtcgactcgccgcgcccatggatgcgcccaggtatccttcaggcgcgccatggccgagtgcgggtgcgggcccgctttggcctcgcccggctgcgccgtggccgccagttgctgcgtcggctcctaccgccgcgatttggccttgcccgtctgcgccgttgcgtcgactctccgcgcccaggtatccttcaggcgcgccatggccgagtgcgggtgcgggcccgctttggcctcgcccggctgcgccgtggccgccagttgctgcgccggcgatcccttgccggggtcgtaa

SEQ ID NO: 36944 - DNA, 582 bp, Zea mays
  Peptide Sequence Number=SeqID_78723
atgggtgggtctgaagccgccacatgtccagagaaggcggcacactccaaagcatcaacagtgagtccagacccccacgggagagcgccggacccccggatgtacagtccaaacccccaaggatggtcccggacccccgaatatacagtccggacccccaagggtaaaaaggagcctatttatatagttgggtacgggacgtacttcggcaagaggctggatccggagccggggccggcgcacggacggaaagaagtggcggtgctccagcgaggccgccccggactccactgcgagcgccacatgcaccgcggccgcaagcgttcaagaaagcctgtggaaacgcagcccgcgccccagtcccaaccgcccgccgccggcgccgccgccgccgccaacggcagcagctttcggaaccactccctctacccggccattgccggtggtggaggtggcggggccagcagtatctctgctcccccgttctcgtccatagagagtcgtctcagctgcacatggacagtgctgctgccagccgcagctcttgggggtggaggtggcggagcccaaggcgtcaaatag

SEQ ID NO: 36945 - DNA, 459 bp, Zea mays
  Peptide Sequence Number=SeqID_78724
atggtgaggtcgcatttcgcaagcactacgtcacagctgctcggctggtcgccatttctgtccgttgggtacgggacgtacttcggcaagaggctggatccggagccggggccggcgcacggacggaaagaagtggcggtgctccagcgaggccgccccggactccactgcgagcgccacatgcaccgcggccgcaagcgttcaagaaagcctgtggaaacgcagcccgcgccccagtcccaaccgcccgccgccggcgccgccgccgccgccaacggcagcagctttcggaaccactccctctacccggccattgccggtggtggaggtggcggggccagcagtatctctgctcccccgttctcgtccatagagagtcgtctcagctgcacatggacagtgctgctgccagccgcagctcttgggggtggaggtggcggagcccaaggcgtcaaatag

SEQ ID NO: 36946 - DNA, 450 bp, Zea mays
  Peptide Sequence Number=SeqID_78725
atggcggcgacatttacgcccgccactgcgaaggggaaggacgcgccaacgtgcggaacccgctccccagtgcacggcacgcgcgagatactcggtcaccgacccggcggcatcccgtgggaggttgttagcgcggtcttacaaatcctaccccccttaacagaaatctcgtcctcgagatttgtaagaaaaaggatgcagaagctgagcatggtgacgcatcaaggccggcggcgaatccgcgatagcacttggcgataccccagtcccagcgcccctatcaccgtacggagtcgccgaccacagaggggaaaacatgtaacacgctacgaagagcatctcaccgagagtggaggcagtgggtcgagtttcacccgcggtgagcagcggaaatgcaagtccggcgacaaaatctcggtcacagtttgggtaactacgaattcggcttga

SEQ ID NO: 36947 - DNA, 150 bp, Zea mays
  Peptide Sequence Number=SeqID_78726
atggcggcgacatttacgcccgccactgcgaaggggaaggacgcgccaacgtgcggaacccgctccccagtgcacggcacgcgcgagatactcggtcaccgacccggcggcatcccgtgggaggttgttagcgcgaaggaagaatcctaa

SEQ ID NO: 36948 - DNA, 315 bp, Zea mays
  Peptide Sequence Number=SeqID_78727
atgaccaagaacttaccagcacggaagacacgtcgggtttggtccacggcgcggagcggaattgcggcggcggcgaagttcggcgaggaattccggttgcgtcgaggattggttttctggtccgagcgcacagtggaaaagatcttccgcgtcccggccatggcggcgacatttacgcccgccactgcgaaggggaaggacgagccaacgtgcggaacccgctccccagtgcacggcacgcgcgagatactcggtcaccgacccggcggcatcccgtgggaggttgttagcgcggtccgagattcgcgccagtag

SEQ ID NO: 36949 - DNA, 1002 bp, Zea mays
  Peptide Sequence Number=SeqID_78728
atggcgccctgcacgctctatgacgacggcgactcccagcccccttacggaagcaagaggactcgcccgctctctgtgcccctgacgcccccgctctctccgaccccgcccgcagcgccatccccgcgcgccatccccgctcggctgcttcaaggaaggaatggtgtcgtgccccgcgcatggaaggtcgccatccccgtgcgccatccttgctcggctgctccaaggaaggaagggcgtcgtgtggaggacccgccctcgctctctgcgcccccgacgccccgccatcacattctccgcgcggtctgctacaagaaaaggtccgcgtgtggagatggaaggtccgaccccgccatccccgccctcgctctcctctctcggctctcctctctctgctggatctatggccgccagctccgcgcccaccagccgcaaattgcccgccatctcctcgatttgcattatccaataacgagtgatccaaacaaatcggcgttcgtcctcgccaagacagtgttccgcgcttccgttcgctccgccgctcattcctttcctccaccgacccccgggggctcacaagattctgaggctgtgtttcttgagctgccgtgcatttgtcaggacacaatgaaagctagagaacccaagaaggcaaggggccatgtcaaatggaatgaggagaatttaaatgacattgagtcaaacaaaccagaaagagagaagatcactgagcctaagacaccttaccaccctatgctcgatgaagatgaagggcctgtttcaccattacatctcagtgaaagttcagtggataaatctgctcatgctgatgccataaagaccgctctagctgaagctgtttcaagtgggaagatttttgacagaaatagttgggatatgtgtgacagtgaagaagccataaaacaagggaaaggttatcaatttgacatcttcgattatattctattatgcatttcaaagctcaagttggagtactcatag

SEQ ID NO: 36950 - DNA, 432 bp, Zea mays
  Peptide Sequence Number=SeqID_78729
atgaaagctagagaacccaagaagccaaggggccatgtcaaatggaatgaggagaatttaaatgacattgagttaaacaaaccagaaagagagaagatcactgagcctaagacaccttaccaccctatgctcgatgaagatgaagggcctgtttcaccattacatctcagtgaaagttcagtggataaatctgctcatgctgatgccataaagaccgctctagctaaagctgtttcaagtgggaagatttttgacagaaatagttgggatacgtgtgacagtgaagaagccataaaacaagggaaagcttttgaggaacaatggaaggttcactatgatgaataccataagatgaaggaactacttgagaagggaaccatgaatgatgactccgatgaagatgagggtgacctagggaacaagaagggttga

SEQ ID NO: 36951 - DNA, 504 bp, Zea mays
  Peptide Sequence Number=SeqID_78730
atgaaagctagagaacccaagaaggcaaggggccatgtcaaatggaatgaggagaatttaaatgacattgagtcaaacaaaccagaaagagagaagatcactgagcctaagacaccttacggtgctatgctcgatgaagatgaagggcctgtttcaccattacatctcagtgaaagttcagtggataaatctgctcatgctgatgccataaagaccgctctagctgaagctgtttcaagtgggaagatttttgatagaaatagttgggatacgtgtgacagtgaagaagccataaaacaagggaaaggtgacaataatcccggggatgaccgagtcctgtacgcacatgggcagctttggctgcagcgacagcacatcattggacgggctgttggctatctgccttatgctgggtggcttacaatcatcatgacggagaaaccagtcctcaagtatctgctaattggtgcactggggctgctggtggtagcatccaaggagtga

SEQ ID NO: 36952 - DNA, 291 bp, Zea mays
  Peptide Sequence Number=SeqID_78731
atggtgaatcagaaggcggatggaggcttaaccccacttcatatggcagcattaaacgggcatgtagagtgcgtgcaattgttgctggacttaggggcatctgtttctgaggtcactattgaggatggaacaactatagacttaataggtatcacttttgcctttttggtcgcatactcttgttgggccggtagcaccccacttcactatgctgcttgtggtggaaatgctgtctgttgtcagatggacccctttaatggtggctcgttcctggcaaagaaattcagttga

SEQ ID NO: 36953 - DNA, 291 bp, Zea mays
  Peptide Sequence Number=SeqID_78732
atggtgaatcagaaggcggatggaggcttaaccccacttcatatggcagcattaaacgggcatgtagagtgcgtgcaattgttgctggacttaggggcatctgtttctgaggtcactattgaggatggaacaactatagacttaataggtatcacttttgcctttttggtcgcatactcttgttgggccggtagcaccccacttcactatgctgcttgtggtggaaatgctgtctgttgtcagatggacccctttaatggtggctcgttcctggcaaagaaattcaggtga

SEQ ID NO: 36954 - DNA, 246 bp, Zea mays
  Peptide Sequence Number=SeqID_78733
atgtttgcttcgctgtttgagaagtacctgggcttcaatgtggcaggagctggtagcaccccacttcactatgctgcttgtggtggaaatgctgtctgttgtcaagtatgtgccgcgatcagtgcgagaggtgagaggcctgaagattgggttccaccagaagatgtttctgctgtacattacgccaaatgtgatggcattgacgagacactccctatggtgctgacgggaacgatgggattgtag

SEQ ID NO: 36955 - DNA, 549 bp, Zea mays
  Peptide Sequence Number=SeqID_78734
atggtgaaaatttttggcagcgaaacagtgcaaatagcaatgaatgttgtggtaacttcacacccacctgtttgtttatatagtgctgcaggtaggaaggcgaagcggtggaactgttacaccaggcgcgcagtaactcatacccgctgtgcagtggaccgcaaagaccaaacagtaactctgcaaagtgggcttggcacgcgctcggaagtcggatcgtttctccgcaacgagctcagggaaggtgttttttggaccttcggcttcccgaagctgaagaggttttttttcacgggccaagctcgttacgaagaacgatctagcaccgcgaaaggggctactgttggggtcgtgcttcggcgtagggctggaaaaaaagctcgagctcgacgagctggctcgggctcgcagcagctcggctcggctcgacgctcagaacgagcccgagccgagcctgtttttgtggctcgtgaaaagagcgagtcagctcggctcggtgcagctcacgagctggctcgtggctcgacccaacaacaatttgttacataa

SEQ ID NO: 36956 - DNA, 744 bp, Zea mays
  Peptide Sequence Number=SeqID_78735
atggtgaaaaattttggcagcgaaacagtgcaaatagcaatgaatgctgtggtaacttcacacccacctgtttgtttatatagtgctgcaggtaggaaggcgaagcggtggaactgttacatcaggcgcgcagtaactcatacccgctgtgcagtggaccgcaaagaccaaacagtaactctacaaagtgggcttggcacgcgctcggaagtcggatcgtttctccgcaacgagctcagggaaggtgttttttggaccttcggcttcccgaagctgaagaggttttttttcacgggccaagctcgttacgaagaacgatctagcaccgcgaaaggggctactgttggggtcgtgcttcgtttcgccctattcaccccccctctaggcgactatcagcttccaacggcaccaacgcccaaggccgatgaggacgggttggtgaggcaggaagacgcccaccgctgcgccttggaacgcccagcgggggagaacggacaagccgcgggagacaaagtcgccacacgggagggggagggggaagtggtcgccggagtcggggtgagcgccggcgaggggctaggtggtgcggggagggtggggcgggcgccgttaccggagcgatgggcgggggaggcggaagggcatgcagggaaggcgggagggcggggagccgaacggtccgccgaaatgaccgccgaacggtccgccgaaatgaccgccatcacactagcctgtttttattaa

SEQ ID NO: 36957 - DNA, 627 bp, Zea mays
  Peptide Sequence Number=SeqID_78736
atggtgaaaaattttggcagcgaaacagtgcaaatagcaatgaatgctgtggtaacttcacacccacctgtttgtttatatagtgctgcaggtaggaaggcgaagcggtggaactgttacaccaggcgcgcagtaactcatacccgctgtgcagtggaccgcaaagaccaaacagtaactctacaaagtgggcttggcacgcgctcggaagtcggatcgtttctccgcaacgagctcagggaaggtgttttttggaccttcggcttcccgaagctgaagaggttttttttcacgggccaagctcgttacgaagaacgatctagcaccgcgaaaggggctactgttggggtcgtgcttcgccttcacatcgcacttgtattctcgccttcctcaagaccgaagcatttgagaacaagtccccaacagcaggaatcccttgcaggaccgccatcacagcaaaatcctcccgagggcctccccaggaatcccttgcaggaccgccatcacagcaaaatcctcccgagggccttcccaggaatcccttgcaggaccgccatcacagcaaaatcctcccgagggcctccctacactgaccactcccctactgcccttgcccctttcgggtaa

SEQ ID NO: 36958 - DNA, 375 bp, Zea mays
  Peptide Sequence Number=SeqID_78737
atgcaggaatcccttgcaggaccgccatcacagcaaaatcctcccgagggcctccccaggaatcccttgcaggaccgccatcacagcaaaatcctcccgagggccttcccaggaatcccttgcaggaccgccatcacagcaaaatcctcccgagggcctccctacactgaccactcccctactgcccttgcccctttcgggtaccaacttgctcttcagatgacacgtgtcctcaccgctaaacgtagcaatacagacatacatgaggaactcggggtttgctttgtaaagatcctcaagactcagctacaccctacgaaaggatcgcgggttgattcacaaaaagagcaggggctcataagaattcaagcatga

SEQ ID NO: 36959 - DNA, 288 bp, Zea mays
  Peptide Sequence Number=SeqID_78738
ggcaagttcaaccggggtccagagaggttcaaccggggtccagggcaagttcaaccggggtccagagaggttcaaccggtgtccagggaaagttcagccgggtctgacttgcagtctgccagtctgactggcagactgtctgtcagcctaccccaggcggttgaaccggtcttaggggcagttcaaccggtcttggtcaacttgaccagtctgcagatgtgggactaccgcatgggcaccctcctcaaccgcttcgaggagcacgacgggcccgtcaggggcatctag

SEQ ID NO: 36960 - DNA, 231 bp, Zea mays
  Peptide Sequence Number=SeqID_78739
atggatgatcaatatgatgtgactcaagaatggcttgatagggtgaagatagcaaggaaagggcttcgaggaactaagcgaagggcaagttcaaccggggtccagagaggttcaaccggggtccatggcaagttcaaccggggtccagagaggttcaaccggtgtccagggaaagttcagccgggtctgacctgcagtctgactggcagactgtctgtcagcctgccctag

SEQ ID NO: 36961 - DNA, 185 bp, Zea mays
  Peptide Sequence Number=SeqID_78740
atggatgctcaaaatgatgtgactcaagaatggcttgatagggtgaagacagcaaggaaagggcttcgaggaactaagcgaagggcaagttcaaccggggtccagagaggttcaaccggggtccagggcaagttcaaccggggtccaaagaggttcaaccggtgtccagggaaagttcagccggg

SEQ ID NO: 36962 - DNA, 258 bp, Zea mays
  Peptide Sequence Number=SeqID_78741
atggtcaacggggagccatatcctctggacatcagaggagaactagatgacacaacagccttcaaaaacttcaagaagtggggaggtatagaattccctctaccttttggaagagtactcagtcctacagaaagtttcatccatgaactagatgagaagattgagataatattgggaaagagtgacaaattcgacgagttgatggttgctgccgccgacgagaggggagaagttgaagatggtgaagagcaggcttga

SEQ ID NO: 36963 - DNA, 495 bp, Zea mays
  Peptide Sequence Number=SeqID_78742
atggctctcaacttggatttcgatcaagtcaaggagtttatcaaggagcggttggggattgagagaggttgggcaacattatcagcttctcagagtgttggagggattgaaatagaggagaactgggacaaggttaagactatttttcttcctactgagaagccaacgacgtctgattcatgtgctcctttgattgcaacccatccattggaggcacacagaaaatttggtgacttcattaaaggagtatttgctgtcttccacggatttgggaaatatttctcatttcttgagatgaatccgttcgccatggtcaacggggagccatatcctctggacatcagaggagaactagatgacacaacagccttcaaaaacttcaagaagtggggaggtatagaattccctctaccttttggaagagtactcagccctacagaaagtttcatccatgaactagatgagaagggagttttccatagcgccgacatgtga

SEQ ID NO: 36964 - DNA, 588 bp, Zea mays
  Peptide Sequence Number=SeqID_78743
atgcggaggctgttgggactggcgctctgtgcatcggccgccacgcaatctaggcctgatatgctgttcgggaagcctgggaagagtggtctcatggctctcaacttggatttcgatcaagtcaaggagtttatcaaggagcggttggggattgagagaggttgggcaacattatcagcttctcagagtgttggagggattgaaataaaggagaactgggacaaggttaagactatttttcttcctactgagaagccaacgacgtctgattcatgtgctcctttgattgcaacccatccattggaggcacacagaaaatttggtgacttcattaaaggagtatttgctgtcttccacggatttgggaaatatttctcatttcttgagatgaatccgttcgccatggtcaacggggagccatatcctctggacatcagaggagaactagatgacacaacagccttcaaaaacttcaagaagtggggaggtatagaattccctctaccttttggaagagtactcagccctacagaaagtttcatccatgaactagatgagaagggagttttccatagcgccgacatgtga

SEQ ID NO: 36965 - DNA, 534 bp, Zea mays
  Peptide Sequence Number=SeqID_78744
atgtggcaaccattgatccatgcccaaaatgtgcctgccactggtgttcctgtcccaacactcgatcaacatgcaatatggtctacacatgagccagttcacataaacccttcagacccaagcaggtaccagcagaatggcacgccagctaaagaaaggagtcaatgcactgtacaggggaaatacgacagcatcatcgtggaggtgaagagctactacatgtcgatgagcaggtacagggatgataaaaaaagaaagggtgagattatgaaggtttatgccaatgatcaaataaaaacatgtgttgagtttccagagtgttttgtatatgaacaatcttctacatgcaaatttctgttatgcgcgcttgtggtcattggcaggaagactcatgtggtcggaagagggctgatgagcacgatcaccatggatgtggacaccacggcaagggtggacgagttcttggttaccacctttgtaggcccattggtggaggaagacttgacgagaggaccaatgaatactctcttttaa

SEQ ID NO: 36966 - DNA, 339 bp, Zea mays
  Peptide Sequence Number=SeqID_78745
atgagctgttcggggagcacccaggacccatcacgacgagctcctcctcttcttcccaaaagatctcaggtgagctgtgtacaggcacacactgttattgaaatgacttatactgaacaacaacttacaacagcaattgtttctcaagcatcgccactggcggagtacgaactgaaaaaatatgagaggagcaatatccttgacactgcaacagcaatttgccctaccatgtggcaaccattgatccatgcccaaaatgtacctgccactggtgttcctgtgccaacactcgatcaacaattcaacatgcaagtagaaatgaagcctagagccaaatga

SEQ ID NO: 36967 - DNA, 465 bp, Zea mays
  Peptide Sequence Number=SeqID_78746
atggcggtggaggtggatgcgaggtgggagcccatgggggcgcaggagtactactactactggcgggccatgtacaacgcccgcggaaacagtttgaattttatttttatggtcctatttgtgcagtgctcgcatcttatgtgccttgcctggatgcttttggcgagatgtgtgcttggaaaacttcaggtgcatcgtctggtgaagcatgtgtgtccaaaagtgaatattcaaaaagataatggggtgcagatgaagattattggtactcatgtcgatgctacagaaattgtctacgatgaggactcctacaataaggcccagaacatctgcaatttattttttgataagtcctccaagatttgccctaccatgtggcaaccattgatccatgcccaaaatttgcctgccactggtgttcttatcccaacactcgatcaacatgcaagtagaaatgaagcctag

SEQ ID NO: 36968 - DNA, 2064 bp, Zea mays
  Peptide Sequence Number=SeqID_78747
atggggcacaccgccgccgctgcggccgcggccgccgaacccgctctcggactcaccaagcccaacgtcaccttttttgcgaaagacatcgaattctccgagtggaagggcgatattctcgctatcaccgtcacggagaaggatctgtccaaagacgcttactccaaatttgagaatgccgtcttgaagaagctggacggccagctcggtggcctcttgtcggaggctggggtggaggaagatttcactgggaagacggggcagtcggtggtcctccgcctcgcggggcagggcttcaagagggtgggcctgatcggtcttggtcagagcgcctcgtccaccgccgccgctagccgaggcctccgaaccgtgctggggttgtatgaggacagcagatacaagtctgaatcaaaaaaggtgcacctgaaacatgttgatattattggagtgggttctggtgcgaaggtggatcagaaacttaagtatgctaatgatctttcgtcgggtgtgatattcggaagagagcttgtgaactcgcctgcaaatgtccttacccctgatttgttgccagtatacttatcgcagtcatcctttgttctttcagctgtgcttgcggaggaggcgtcaaagatcgcttctactttcagtgatgtgttcactgccacagtactggatgtagagaaatgcaaagaactaaagatgggttcctacttgggagttgctgcagcttctgctaaccctcctcacttcatccatttgtgctacaaacccactgatgggaacgtcaagagaaagctggctattgttgggaagggtttaacttttgacagtggtggctacaacattaagaccgggccaggctacagcatcgagctgatgaaatttgacatgggaggctctacagctgtatttggtgcagctaaagctttgggacaaataaagcctcctggagtagaggttcactttataatcgctgcctgtgaaaatatgatcagtggcacaggcatgagaactggtgacattgtaactgcttccaatgggaagacaattgagggatcatctggtcaatatgtctgtgctactctaccttatattcgtgcgaacattcccattatcattgtatttcgagcattaggatttgttgctgacaagggtatactggagcatatatgttatgacttttctgatacacaaatgatggaattgctacgcccatccctggaggaagcttttgtcattcaaaatcaacaggttgctctagactacattggaaaacatggcgcaacagttggtgtcactcgagaaaagagaattaaatatgcaaaagaaatacttcaaaaggaaatgttacgtgttggggaattatgtgaaactaagaagacatactattttgggtatattattcaccgcctactgatgtgtgctcttagtcgaagagctgaggatgaccgagatcattatggaaacaaaagactagatcttgctggtccactgcttggagggctgtttagaatgtgtgtagataatggaaaggaagttaattttcaatttgctatcaaagcaaaaactgttaccagtggcttgaagtactcacttgctactggaaaccgaggacaggctaaccaagctggaaccagagcaggggtttctcagtcaaatgagaagttacaaggtttaagggaagaattgaatgcgattgtcccatacttggaggagatgagaaagaagaaagttgaaagatgggaccaatttgttgatgtcatagagcaaattaagaaggttgcatctgaaatcaggcctgcagattttgtaccctttagaattcctgtggatcagtctgatctgtctttaagaaagttggaggagctaacgaaagagctgcaatcccttcagaaggagaagagtgatcggctgaagcaagtcatggaacatcttaacactttgcattcgttatgcgaggtgcttggtgtagacttcaaacaaacagtaaatgaggtgctaatgtggtggagctacgaacaacaatctgatgtcctgatcgagagcgacggagctaatgtttga

SEQ ID NO: 36969 - DNA, 411 bp, Zea mays
  Peptide Sequence Number=SeqID_78748
gctgttgaactcatgcttgtcgatgcactcattgaggctaatgactacttggggatatcattgcatgcacacgacccagaagatttttggaagttggatgacacaatcatcaaaaccattgagactgctcccaacaatgaactgaaaaaagcaaaagaaatcattcaacgtattcgccgaagagaacttaacaagttttgcaacccagtattctgttcaccaaaggacaaactggagcatttcaaaaatattactgcacaggacatagtttgttcgcagaaatcttctgaggtgctgctgaaggaagaggatgttgcagtaagcaatgttaagatagatcttactcgtggaaaagataacccccttgaaaggtttttgatatttgaatggattccggctctcatcaagtga

SEQ ID NO: 36970 - DNA, 1389 bp, Zea mays
  Peptide Sequence Number=SeqID_78749
atgagaaagaagaaagttgaaagatgggaccaatttgttgatgtcatagagcaaattaagaaggttgcatctgaaatcaggcctgcagattttgtaccctttagaattcatgtggatcagtctgatcagtctttaagaaagctggaggagctaacgaaagagctgcaatcccttcagaaggagaagagtgatcggctgaagcaagtcatggaacatcttaacactttgcattcgttatgcgaggtgcttggtgtagacttcaaacaaacagtaaatgaggtgcaccctagcctgggtgaggctgatgaatcaaagaacctaagcaactgtacaattgaaagccctgcatcagctacaagcagactgcgtgaattgaaagtccagaggatgcaaaagcttcaagatttggcctctagcatgcttgaactttggaatctcatggatacaccacttgaagaacagcagatgttccagaatgtaacgtgcaatattgctgcttctgaacatgaaataactgagcctaacaccctctctattgacttcctcagctacgtggaatctgaagttttaagactcgagcaacttaaagcgagcaagatgaaagaccttgttataaaaaagaagacagaactggaagagcataggagacgtgctcatttgtttggcgaggaaggctatgcagctgaatttcgcgatgaggctattgaggcagccataattttccagcctatcttacatcccctaaaattacagttggatgacacaatcatcaaaaccattgagactgctcccaacaatgaactgaaaaaagcaaaagaaatcattcaacgtattcgccgaagagaactttacaaggctggaaaaaagttgcttctcattactaattcagatttccattatacaaacaaaatgatgaatcatgcattcaatcgctttcttcctaatgatgtgggatggagagatctgtttgaaatggttatagtctctacaaggaagccagaatttctccagctttcacatccattgtatgaggttgtaacagatgatggactgatgcatccctgttttaaattttgcaaccagtattctgttccaaaggacaaactagagcatttcaaaaatattactgcacaggacatagtttgttcgcagaaatcttctgaggtgctgctgaaggaagaggatgttgcagtaagcaatgttaagatagatcttactcgtggaaaagataacccccttgaaaggtttttgatatttgaatgggttaagaacgtgggtacccatgttcttaaggttaagaacgtgggcaccgtcgaacttattgtgcagtcctcgcagacccacgcaggacacataagttcgacggccatgtggccccgtcgaacttaa

SEQ ID NO: 36971 - DNA, 432 bp, Zea mays
  Peptide Sequence Number=SeqID_78750
atggcggcgcaaggggcaggaagggtggtttcctcttctctggctaagtctctcgggttgcgaaaacctaagagggagacagaaagcggagcaaagaaccgtcaccagaccctctcccggggaccgggaaagggggataccccgaaaaggatccttccccgtgaaggaaccaggctccgagcctccctactgatcagaggttcgaaggctggcccgccgaagggttcgacagccgcctcagatctcgtgggccctacacccactactggtcagaggttcgaaggccggccccccgaagggttccacggccgcctcaggctactcgggctccgcgcccattacagatcaggggttcgaaggctggcccccgaagggttcacagccgcctcagacgccgagcgagggatgaccatgggtacgttcgatacataa

SEQ ID NO: 36972 - DNA, 273 bp, Zea mays
  Peptide Sequence Number=SeqID_78751
atggcggcgcaaggggcaggaagggcggtttcctcttctctggctaagtctctcgggttgcgaaaacctaagagggaggcaggaagcggagcaaagaaccgtcaccagaccctctcccggggaccgggaaagggggataccccgaaaaggatccttccccgtgaaggaaccaggctccgagcctccctactgatcagaggttcgaaggttggccccccgaagggttcgacagccgcctcagatcgcgtgggccctacacccactactggttag

SEQ ID NO: 36973 - DNA, 303 bp, Zea mays
  Peptide Sequence Number=SeqID_78752
atggcggcgcaaggggcaggaagggcggtttcttcttctctggctaagtctctcgggttgcgaaaacctaagagggagggaccgggaaagggggataccccgagaaggatccttccccgtgaaggaaccaggctccgagcctcccgactgatcagaggttcgaaggctggccccccgaagggttcgacaaccgcctcagatcgcgtgggccctacacccactactggtcagaggttcgaaggccggccccccgaagggttccacggccgcctcaggctactcgggctccgcgcccattactga

SEQ ID NO: 36974 - DNA, 792 bp, Zea mays
  Peptide Sequence Number=SeqID_78753
atgactaaccggccagagtcctcgccgccgacgagctcgtccgcctgcacgcgtcgaccgacctactccgaccatcactggagacgatccgcatatcggcgtgactgtcaagacattccctacaccctctaccacctcaccagagcaatctcgccgccgaatcctagtccagaacagatccaagattgcaacctcgctgatggagagtacgtgctcatccctgagaaaggagctatccacgaggaagatcaggagcctgctcccgagcctgccatcgaggatctccccgcagccctagcaattgaaggcaagccccgctatggtgggtacaagtgcggtcactgcacggcggcagccggggtcagtggagcattgtatgccaaggcagtacgcttcaggatatggttgatgccgggttggcgttctcttgactccgatactgttggattcagggcggacgacaccaccgaggcagcagctatgaagaccttgacgactttctatggctaccatcccctggagatggtgatgcaccccttaggcctcttccctgtcgagaagagggatgaccccatgtggtgcaaccgtgtgagccatgtgaaggacgtatgggccatgtatcctgacttggtcgggaggattactgttcagtgcatgagtgcactgtaccgccttcaggccctgcagagcgacgctatggcacatcttgctaacctcgctcagaccaccaaactcaccctcgacagccgagaggacttcgtggtcgacttgtcctcagagttggtggtctaa

SEQ ID NO: 36975 - DNA, 396 bp, Zea mays
  Peptide Sequence Number=SeqID_78754
atggtggtcggagtaggtcggtccacgcgtgcaggcgggggagctcatcggctgcgaggaatctggcctaaccagggcggtacagttcaattgaatgggtcagggaacttcaccagagatcaaggaagttatgcgcgcgaggaatttgggaatggctcaccggattgctcggtctacgcgtggccgtgggctaccgaagttcgacttgtgggtttcgctgactggatcaagagatatggaggggtgaagttgggtttgtctcacagccgaacactgagagaagatctcgggtttgacgtgtctagggcacgcgtcccaatgccatcttcaggtataagccttcatggcgaggtcactcgtgtgtcacggatgataaccaatggagcactggcgtag

SEQ ID NO: 36976 - DNA, 354 bp, Zea mays
  Peptide Sequence Number=SeqID_78755
atgggtcaaggaggttcaccagagatcaaggaaggtatgcgcgcgaggaatttgagaatggctcaccggattgctcggtctacacgcaaccgtgggcgaccaaagtctggcaagggcgatcctgggtctccggtgaagttccgttgggtccgaggacttggaaagcttcacgggccactggcaaagctacccgagcgagtggctcagcttggaagtggctggagggaggtggccgcggtggctgaggctcgggcggtgatggagggcgggggagagctcaccggagttggagttcttgctcgggtcatgaggcggagtgaagggcagaccgtagcgcacctagggtacttatag

SEQ ID NO: 36977 - DNA, 186 bp, Zea mays
  Peptide Sequence Number=SeqID_78756
atgacagaaaccaaacgaggcgtccagaaactgccgagagagtttcgttctccattagaaatcctttctattcctctatttaagcaactagcagccaccaaagaacttgggtttttgtttgatgttcaaggctgttcttggcacggcaagagcagcaacaataggagccggtgtaactatcgctaa

SEQ ID NO: 36978 - DNA, 312 bp, Zea mays
  Peptide Sequence Number=SeqID_78757
atgaacatcaatcatgatgcaacacagaggacagtttgctgtcaagaagaggagaatgatgagaacataacctgctcagatatgaccatgtcaatggctcctgctgcgaaggtgcctcaagaatcaatgacagaaaccaaacgaggcgtccagaaactgccgagagagtttcgttctccattagaactcctttctattcctctatttaagcaactagcagccaccaaagaacttgggtttttgtttgatgttcaaggctgttcttggcacggcaagagcagcaactacaggagccggtgtaactatcgctaa

SEQ ID NO: 36979 - DNA, 324 bp, Zea mays
  Peptide Sequence Number=SeqID_78758
atgtcgtcttcttcctcatctgctgcgaatgcgccgtcggccaaagataccttgagcgatttggcggcggtggagttacagccgggccacacggtggagttcggcgtttcgaggatatcctcggtgcctcaagaatcaatgacagaaaccaaacgaggcgtccagaaactgccgagagagtttcgttctccattagaactcctttctattcctctatttaagcaactagcagccaccaaagaacttgggtttttgtttgatgttcaaggctgttcttggcacggcaagagcagcaacaacaggagccggtgtaactatcgctaa

SEQ ID NO: 36980 - DNA, 480 bp, Zea mays
  Peptide Sequence Number=SeqID_78759
atgagcagcgggcgcgatttggttgaggaattcatcggttatggagtgtggccgctggcgcatggctgggtgcttggcgaagtatgccctcgccagatgcctaccttgggcaagcagttggtgcgaagtacggccttcactttggatctgcgcgaccgagacctagccgcattcatgcgtgaagtggaggatggggctgtaaggattgtagggcggtatgcgctgaggacggagactctacagagttgggatattcatggatccaatgttcgcttgaatcgtgtcttcgagttaaaccgtttgccatatggcggctaccctagagatgacactgctgcggctgtcgattgccgcgggaaaaagccagcgggtgtggctgaggaaggcccttcgcgggaggctgccccggccattaagaagagaaaactaggtactgcagctgaggggttgggggtctctgatcattttgctgtggattga

SEQ ID NO: 36981 - DNA, 384 bp, Zea mays
  Peptide Sequence Number=SeqID_78760
atggattctggcacacatatgatggttcgcactctccaaaccactcgcgtcaacaccaactacgcccctcagccccggcagatcccggtctacccagtggtagtcgaggaagctccagcgaatctccctcccgtccgagtggagaacgtgatcaacctggaggacagctcggaggagcagctgccgacccccaccccgttggccgagtccctggccttcgcagctgggtcatcaacgtcagcatcgtcggcaccagccttccaagcacctgcacctggaggcgatgaccccgatgactccggagacggcgatgacgaggatgacgacgacgacgatgatggagaggacgaacacgtccacgaggaagctgactacgcccagtag

SEQ ID NO: 36982 - DNA, 306 bp, Zea mays
  Peptide Sequence Number=SeqID_78761
atgaagagtatatgtgatcttgacaagacccctggacctggccgtcaggtgaagtacggcaatttggagtttaggaatgctgctgaaactgcgtatgctggtgagccttcagctgcgctatctgaagctatatcttgccttgatcatgagccaagcaaggttgcagcaatgacagctttgaaatcatttctgattttgagtattcagattcaggtgaagtactcgcactcgcaggagacggggagccctaccaagtgtaagatcaaaataaaggacatgctgctgaggaatagaaagaagcaatag

SEQ ID NO: 36983 - DNA, 126 bp, Zea mays
  Peptide Sequence Number=SeqID_78762
atgaagattatatgtgatcttgacaagacccctggacgtggccgtcaggtgaagtacggcaatttggagtttaggaatgctgctgaaactgcgtatgctggtgagccttcagtctgcgttatctga

SEQ ID NO: 36984 - DNA, 897 bp, Zea mays
  Peptide Sequence Number=SeqID_78763
atggcatcatctggagaccaatcacattctgcgttctctcctttgaaggagcagcagcaggagtttgtagatgtgtcaagctccgagagatttgatatacatgcatttgattctccacctgctcggcgctctttgaggaaaagagcagccccatctccaccacagccttacacagatgaaaatcgaaggccagccaagcgccggcaggtatctaagaagggcaaggagaaggtggaggatgatgaggtgtctgaagctcttccatcaaatattaaagatcgcatcatcgagctcggatttggttgtgtgttagatcttaacattgacagacttgatgtcagagtttttggaagttttctgatggcatctgtcaagaacgatgacaatgggccaagactagttgttggtaacaaatctttgccaatcacaccggaagttgttcagattgtgaccggtctcccccacgacgagaaacaattccccgattggacttatcatgagatcaggactgcaagaaacacattcaggaagctatgtgatgaccagaacatgaaagacatgtttgctcacagcaagtgtttggctgcatataagaagctttcatcgtatgaggtctcacggtgggttgttgaaaggatggacaatgttgagtgccctgtcactcgactggttggcacaccccgctggaagttttttacttccaaaatcatgaagagtatatgtgatcttgacaagacccctagacctggccgtcaggtgaagtacggcaatttggagtttaggaatgctgctgaaactgcgtatgctgagatttaccacaagggacaagatctgccaaggccccctgttttttgcgcagcccgctgtggtgtggtcatcccaccaaaaggcatctaa

SEQ ID NO: 36985 - DNA, 363 bp, Zea mays
  Peptide Sequence Number=SeqID_78764
atgcggaggtggagcagaggacaacggcgacgacagctcgtccggccatggtggcagcagcaacagcaacctagggctcgtgtcgtccaacaagtccaatgttccattgcaatcgtgcctcttcccggccaaacccaagaagacgtctctgttggctcttgtcacgcagcggctcctgaccccgaagcagcctgtggacatgatgaggtttctggtcaagctgccaaggtagcgagcatgctattgctctatgaatacatctttgccttgatggaggtatgtgataagactaatttgatgttctggatggtttcacgtttccaagaaaaaagctttacaaatggaagaggtcagctggcttaa

SEQ ID NO: 36986 - DNA, 465 bp, Zea mays
  Peptide Sequence Number=SeqID_78765
atgaagggagaatctgggtattattacgattatgtgtggaggaagataaagaagctggctgaaaagctaagcgtttggcagtctgcagtagcttttggtggccagaagctgccagaagccgaaacaaacagggacgaagacgggctggaccacatcaagggtctccatgtggaggtggagcagaggacaacgacgatgacagctcgtctgcccatggtggcagcagaccacatcaaggcggctcctgatcccgaagcagcctgtggacatgatgaggtttttggccaagctgccaaggtagcgagcatgctattgctctgtgaatacatctttgccttgatgtccagaatgaatggcaactacaccgctcaggaggttttcatattccaccctctggaatccggcttcctgaatcatctgagcaaacttttcctgccaaggttcaaggttcacaggcctggttag

SEQ ID NO: 36987 - DNA, 606 bp, Zea mays
  Peptide Sequence Number=SeqID_78766
atggggagggaagcaggggcgccatggaggttgctgccgctgcttggtgttttgaagggtgggctgttgttcttccctgcgcttgagggtggagaagagggggcgttgggcagaggaagaagaagggcttgggcgccatggctgaggagcttcagcgcgccgaggaaggagggggcgcggtggagagagcctgcagagctgcgaccgagcagaggcattggggcctgggcgagctcggccatggagctcctgcgcgccgggaagaaaaagcaccctgctgccgacgtcgtggataagggggcgctcccatgggtgccctgctcccgcgatggcgtgctgctgcatcctagggagccgagggggaagaatggtgctgttgctgggtggccatggttggagcagagagacccgcgcccatggagcagggagggcgtcgctggtggctgttgctgctgtgaagaagaagaggcagggaagaaagaaggtggcggctgggaaaaatggaggggtgggagtgcaaaattgccaagggcaagggaaggggtccatatttatagagaaaccctagggttagggttccctagtgggccaaatgggccgagttag

SEQ ID NO: 36988 - DNA, 384 bp, Zea mays
  Peptide Sequence Number=SeqID_78767
atggggagggaagcaggggcgccatggaggttgctgccgctgcttggtgttttgaagggtgggctgttgttcttccctgcgcttgaggggtttcctgcgcacgagcagagagggagggagtggagaagagggggcgttgggcagaggaagaagaagggcttgggcgccatggctgaggagcttcagcgcgccgaggaaggaggggggcgcggtggagagagcctgcagagctgcgaccgagcagaggcattggggcctggggcgagctcggccatggagctcctgcgcgccgggaagaaaaagcaccctgctgccgacgtcgtggataagggggcgctccccatgggtgccctgctcccgcgatggcgtgctgctgcatcctag

SEQ ID NO: 36989 - DNA, 372 bp, Zea mays
  Peptide Sequence Number=SeqID_78768
atggctgccaccgagggcgtcggccaagggaactgctccctgcgcgcaggggagaaaaggctccctgctcttaacgccatggagaagagggggcgttgggcagaggaagaagaagggcttgggcgccatggaaaggggagcagaggtgctgcacgtgaggagaagggcttcctgttgccgtgcctgaagggggcgccaatgggagagaagggggcgccatggaaaggagctcggctgctcgagcttcgccggcgccatgggagtcgcagggaggtgagctcggccacgccatggaggagaggagctcggctccaagggaagaagacacgcgcgagggagaagaagctactggtggcggctgaaaaaggatag

SEQ ID NO: 36990 - DNA, 762 bp, Zea mays
  Peptide Sequence Number=SeqID_78769
atgtggggttcagggaacatgtgttcaccttcatcgcaaagcagtgtcatctttggttgcttacagcctacaacagcttttttcacagctcaaagcccactacaacttttttcacagccacaacccaaccaaacagaccctaagcttctcttcccctattttcagtctgagatttcccgattagaagatgatataaatcggttgcatgaccagctaagaaaggctggagttgatctggatgataatccagtagtaagcaacaagaattccagaaaagatcttgtagtagaaattgatcctgtcaataatgaaagacgggaaaaagttaaagaggcaatgctccatgcttggagttcttatgttaagtatgcctggggaatggacgagcttcagaatggtatcaacagctttggtggtcttggagcaacccttgttgactcacttgataccctatacataatgggcctgaaagatgaatttcagaaagctagagaggttgttggaggcctgcttagttcatacgatctatctggtgataaagtatttcttgataaggctaaagatattatagatcgactcttacctgcttgggatacaacatctggcatcccttataatagaataaacctagctcatggacgagccctaaatcctggatggactaacttcacaaggcaattgctgagatcaattagtatggaagatccaaaggtgaagacggttatgaatattttgagaaggaaggcaatcgagctattgtaa

SEQ ID NO: 36991 - DNA, 256 bp, Zea mays
  Peptide Sequence Number=SeqID_78770
ggttgttggaggtctgcttagttcatacgatctatctggtgataaagtatttcttgataaggctaaagatattacagatcgactcttacctgcttgggatacaacatctggcatcccttataatagaataaacctagctcatggacgagcccataatcctggatggactaacgcaattgctgagatcaattggtatggaagatccaaaggtgaagacggttatgaatattttgagaaggcaatcgagctattgtaa

SEQ ID NO: 36992 - DNA, 534 bp, Zea mays
  Peptide Sequence Number=SeqID_78771
atggacgagcttcagccacaatcgaagaatggtatcaacagctttggtggtcttggagcaacccttgttgactcacttgataccctatacataatgggcctgaaagatgaatttcagaaagctagagaggttgttggaggtctgcttagttcatacgatctatctggtgataaagtatttcttgataaggctaaagatattacagatcgactcttacctgcttgggatacaacatctggcatcccttataatagaataaacctagctcatggacgagcccataatcctggatggactaacggtgatagtatccttgcagattctggtacggagcaacttgaattcatagctctgtcacagaggactggagatcccaaataccagcagaaggcggagaacgtcattaaacagcttcaaaagatatatccaagtgatggtttactgcctatttacataaatcctcattctgggacagcatcatactcaactatcacatttggtgctatgggagacagggctagtttggaaacttaa

SEQ ID NO: 36993 - DNA, 201 bp, Zea mays
  Peptide Sequence Number=SeqID_78772
atggcgggcggaaaggagctcgccggagctaaggaggggtgtctggccggcgatggatttgagttagggatcaaggtgaacacgcttgatctttggctcaaggtacctacaggctcggatcagaaccacagtgtgaagaagcacaaagaatacgaaggttgccgcagagccgaagctatgcgcaggggagcttcgtcgtga

SEQ ID NO: 36994 - DNA, 180 bp, Zea mays
  Peptide Sequence Number=SeqID_78773
atggcgggcggaaaagagctcgccgaagctaaggaggggtggctggccggtgatggatttgagttagggatcaaggtgaacacgcttgatctttggctcaaggaagttgtcgacaacaaactcaggaaccacagactgctcgtctacgcaagcgatcacgcattcaacacatttggataa

SEQ ID NO: 36995 - DNA, 273 bp, Zea mays
  Peptide Sequence Number=SeqID_78774
atggcgaagctaaccgagcggcttgcgcggcttgggagtgactggagcgggctggccacagtggccgaggctctggcagcaatggcgggcggaaaggagctcgccagagctaaggaggggtgtctggccggcgatggatttgagttagggatcaaggtgaacacgcttgatctttggctcaagggctcaattagggtttttgttggggttgcacattttgcctttttgaaaaacccatttgttttgaacatgatactttcaaatataagctag

SEQ ID NO: 36996 - DNA, 309 bp, Zea mays
  Peptide Sequence Number=SeqID_78775
atgaatagtgacgacagaaaagctgatgaacaggaggatggttggctatgcttctatgagattcttgcaaatcattttgttagagtgtctgaaagtggcatgcttatacttgagttgatagtgcaactctggagcaagtccttcgcgaccaacatatttgcacttctttttcacaaatggttgtttgaagccctcttgacgaaaaagaaatatcgctacgatatagctctcctcttgttcaaggtgctacaaatgtattttgttgctactactgtccctgcttgtgtgctgagaatgtttgggatttga

SEQ ID NO: 36997 - DNA, 321 bp, Zea mays
  Peptide Sequence Number=SeqID_78776
atgatgttgcccatcaaccttcgccttctagatagacgcagcggcatcagggagcagagcacagagacgcacgccagcccttggcaattgtttgaagcccctcttgacgaaaaagaaatattgttacgatatagctctgctcttgttcaagccgacccccttccatcctcagtgccctcctaccatcggcggcacgagatctcggtgatggaagggcaggggcagcacaggatctactgcatttttgacgacgcagtggcggacattggagacgggttcgtgtgggatgccgactcccggctctactaccatgccaggtag

SEQ ID NO: 36998 - DNA, 1662 bp, Zea mays
  Peptide Sequence Number=SeqID_78777
atggcgacactgtcgtcgtcactttgctccagcttcgcctccctgcggaccgcctccatcggccaccctcgcgtcatcacgtcatctacgcccagaattccagattatgtcactatcgaagctcgagatcttcgtgtcatgtctggtatgttttttctgaacatgctggacagttgtttgaagcccctcttgacgaaaaagaaatatcgctacgatatagctctgctcttggataaggtgctacaaatgtatagctctgctcttgttcaaggtgcaccaaatccacgtatgcatcaaaaaattgaaccaactcggatgaacttgatcccatcatctgcccgaatgtcggtcagtagtttgcttattgcactggatgaatggtgcctgactgaccgatttgatcccaacaacgctaagcatttgaccgccaaggctgagattgagcttggcgatggcctgcctgacatccgtaccactcgccagtgtgtccaagctatgaaagatgcgggattcgaggtcgtttttgcaaaggatcttgctcaagcgttttccttgcccatggatcctacacttgctgttgttgcttatagacgtgggcagtgtgacgatgaacttattaacgtcactaacaagaattcgttattcaagctgcaagctaggtatgtggttgagagaatggatggtgatctgtgggataaagttcttcagcccgagaatgaatatagaaggcaactcattgaccaagtggtttcgactgcattacctgagagcaagagccccgagcaagtgcaaaacctgctcatcttgactgccaaagcccagttacgtgaaggtctggtcagtgaagcaattgagtccttcattcgtgtagatgatgctgcacacttccttgatgttatccgtgcagccaaggaagctaatgtgtacaatgatttagtgaagtaccttctgatggtaaggcaaaaggcacgggaacccaaagtcgatggagaactcatttttgcatatgctaagattgacatgcttagtgatattgaggaattcattcttatgccaaatgttgccaaccttcaaaatgttggtgaccgtctgtatgatgaagaactatatgaagctgcaaaaatcatctatgctttcatctcaaactgggctaaactggctgttaccctggttaagctgaagctgtttcaaggtgctgtggaagctgctcgcaaggctaacagtgccaaaacatggaaggaggtctgctttgcttgtgttgacgccgaggagttccgtcttgcacaaatttgtggtctcaatattattattcaggttgatgacttggaagaagtcagtgagtactaccaaaatagaggatgcttcaatgaactcattgctctcatggagagtggtcttggactagaacgtgcacacatgggcatcttcacagaattgggagttctatatgctagataccgctctgagaagcttatggaacacatcaaacttttctccacacgtctcaatattcctaagcttattcgagcttgtgatgaacagcagcactggaaagaacttacctacctgtacatacagtatgatgaatttgacaatgctgccaccactattatgaaccactctccagatgcatgggatcatatgcagttcaaggatagatga

SEQ ID NO: 36999 - DNA, 225 bp, Zea mays
  Peptide Sequence Number=SeqID_78778
atggcgtccgtcgacacgcgcttggtggggattgcctcctccatccgcatcatcctcgacttcccaagccaggacatcacgacactgcggctggaccccaaggtgtttcatgacaccatcgaactcttcagtgagcggtataaggaccaaggtgaggtgatctctgaagaaaattctctagaatttggcactgataagatagaaatgcatgttggggctctatag

SEQ ID NO: 37000 - DNA, 345 bp, Zea mays
  Peptide Sequence Number=SeqID_78779
atggaaggcgagatccgtgcactcctcccattcaatacttggcagactgctatcccattccatacttggcggactgctattaaaatgatgtacagaggcgaggcctccaacccatccccactcctcggattcaccgattcaccgcagttctgttcaccgattcgccgcagttctgctcatctcaaaggtgaggtgatctctgaagaaaattctctggaatttggcactgataagatagaaatgcatgttggggctgtacaggccaacgatcgagctcttgtagtcgatgatcttattgccaccagtgtgcagctgtcaaacttatcagctaccacagttatctaa

SEQ ID NO: 37001 - DNA, 486 bp, Zea mays
  Peptide Sequence Number=SeqID_78780
atggacagaggcgaggcctccaacccatccccactcctcggattcactgattcaccgccgttctgttcaccgattcgccgcagttctgctcatctcaaaggtgaggtgatctctgaagaaaattctctggaatttggcactgataagatagaaatgcatgttggggctgtacaggccaacgatcgagctcttgtagtcgatgatcttattgccacccgtgtgcagctgtcaaacttatcggagatggacgatgaagcgttggatcaaggagatggaggttggatcaaggagatggaggaggtggccgccacggccaccacttccaggtcgattatgccctttagggccatccagaagggcaagccgttgtcggtgtccttggcatcgagaagaagtccacccctaagctctagaactccaggtgctcgccgtggccacaagcgtgtagtcccccgacgcagagaagaggaagggcatgtggcgtag

SEQ ID NO: 37002 - DNA, 780 bp, Zea mays
  Peptide Sequence Number=SeqID_78781
atggggtactggagatccggacggagtagcattcttgctgaaaattctctggaatttggcactgataagatagaaatgcatgttggggctgtacaggccaacgatcgagctcttgtagtcgatgatcttattgccacccgtgtgcagctgtcaaacttatcggagatggacgatgaagcgttggatcaaggagatggaggttggatcaaggagatggaggaggtggccgccacgggccaccacttccaggttggtctgagactaatcttcttcgatgagtaccttgatgtgtatacatgccatttctttgatcagtatgtgaatgaggatgctatgtttctgtctcagaattcaaacttaattgttgcggtagatgcaactgaagagggtcttcaagacagtttcggaaccttattgttgttcttcaggtactactctagggaggatgctgaagatgctgtcaaatacattagtggaacaatgcttgacgatcgtccaatccgtgttgatttcgatcggggctttgaagaaggcagacagtggggccgtggacgaagtgatgcagacaagactgaattagttcctacttctccccatcaattagaaatggggactatagaagatgtccgaacagagcctgatgtctcacaggaacaaacaactaaagaaaatggaagccagacaacctttagctatgaacgattgatatcaaagtccactgaccctgttagtgggatagacaacaagcacagagaggtttgtgactccaatgcacattga

SEQ ID NO: 37003 - DNA, 180 bp, Zea mays
  Peptide Sequence Number=SeqID_78782
atggggactatagaagatgtccgaacagagcctgatgtctcacaggaacaaacaactaaagaaaatggaagccagacaacctttagctatgaacgattgatatcaaagtccactgaccctgttagtgggatagacaacaagcacagagaggcaaaattattcacaataaagagtaaatag

SEQ ID NO: 37004 - DNA, 474 bp, Zea mays
  Peptide Sequence Number=SeqID_78783
atgactcggaaggagaagaggctggccaagaaggaggtgcacttggaccagagggaggaggtcatctcggagctccagggcaagctgaatgcccttaacaaaatcatagaggagcagcaggctgatcaggccgtggctgtggagagcctgcaaaggctgcagcgagagctcgatagcaaggcccgtgacaccgcccttgccgaggagaagctcaaggcaaaagcggacctcaccaggcgggtgaaggatctcgccttcaagaaggaaatgcttgaaaggcgggagaaggcactggccgagcatgagctcgaggcgaaagagaaggagcggacgctggaggagcgggtccgccagttcgaggtggtgcaggcggcacaggcagcaccgggcccccaggcggtggaggtgatgaagaagacgctcgaagatctccaggtggagcagcgcgccggggtccagcgcatcgccgcatag

SEQ ID NO: 37005 - DNA, 369 bp, Zea mays
  Peptide Sequence Number=SeqID_78784
atggaggtgatgcagaagacacttgaagatctccaggtggagcagcgcgtcggggtccagcgcatcgccgcatgggccgagccgccgacgtccatctccgacgcgctcccggtgctagatttcgtcgccgaccgcctccgtcgcctggaccagatccttggcgcccgcctggaggacgagggcggtaggctctgccgggcggtgatcgagtacatcctgacgtgcttctggagccatgacccgaccatctccttggagccggtgatcgccggtccggtggccgacaccgaagacgtcgcccgggagggcgtacaagatactatggaggtggtggccgagcgcttccagcgggatcctgccgatgattag

SEQ ID NO: 37006 - DNA, 807 bp, Zea mays
  Peptide Sequence Number=SeqID_78785
tttcgccctattcacccccctctaggcgactatcaacgaccgaggccctccgcaccgctacgacgtccaagctcgacccttgtgtgcaagtacctccaagccggcgtcctggtgcgctcgtgggagcggcgccacgacttgacccccacggtagacaggttcatggcatctgaagaagggaccgagatccggcgaagggtcacagcgctcggtgaggccgtttgcggtgccgtggccgagggcggtttgtccaggcaggacctacaggagctcgttgccgaagatggaggaggacctcttgccgctcctagatcccatcgcgcccagaagggggaatgggtgatcccatcgcggggtcgtggagcggggttgtgcaggggcatgatgacgtggcgaagatcatcatcgcggccaccgaacgggggagaggccacagaggcgcgggttggggacgccatgggccgcgcttcgacgtcgagaaaggagctcctccgccgtcatccctcccgcttggacccaagtgtcgtccctcccgctcaaacccacggcatgccctcctgcgcaaccaaacccgccacgaccccctcaccgcccgctcctagatctgggctcctcgctctcggcccccattgcgccaccgtctaccgctgtcagggagacgcctggcgggtggtttccccacttgatctgctaggcgaggccccgacggtcgtcggtgttgcgcgggatggaggagggagcagaggcggcggtcacagcgccaaggctgcgcggccgagtgggcaggggattgtgcggaggcgctga

SEQ ID NO: 37007 - DNA, 426 bp, Zea mays
  Peptide Sequence Number=SeqID_78786
atggcgtccccaacccgcgcctctgtggcctctcccccgttcggtggccgcgatgatgatcttcgccacgtcatcatgcccctgcacaaccccgctccacgaccccgcgatgggatcacccattcccccttctgggcgcgatgggatctaggagcggcaagaggtcctcctccatcttcggcaacgagctcctgtaggtcctgcctggacaaaccgccctcggccacggcaccgcaaacggcctcaccgagcgctgtgacccttcgccggatctcggtcccttcttcagatgccatgaacctgtctaccgtgggggtcaagtcgtggcgccgctcccacgagcgcaccaggacgccggcttggaggtacttgcacacaagggtcgagcttggacgtcgtagcggtgcggagggcctcggtcgttga

SEQ ID NO: 37008 - DNA, 570 bp, Zea mays
  Peptide Sequence Number=SeqID_78787
atggaggaagaggattgctccttgtgcttgtgggcggactccctcgagtgtgttctccccgagcttgtggacttgtcgccgtcggtcccgatctccctcatggtggatgctcctgacatcacttcgagcggttcggttcttgcaaacctactcgccgttgaggtggtcacaaagaccgggtccctttcaagtaatggctcaccaggagaggtgcccaatcataccagacaccttggtgaagtactggccgaggtgcaccaggatgaggtcgaagaacagcatgaacccgagcaggaggagaggatgaggacgactttgaagacgggccactcgatgtgggtgctgcgggacaccgactgcgcaggcatgcgcggcggggcagggcatgctacgaccgaggccctccgcaccgctacgacgcccaagctcgacccttttgtgcaagtacctccaagtcggcgtcctggtgcgctcgtgggagcggcgccacgacttgacccccacggtagacaggttcatggcatcgaaagaagggaccgagatccggcgaagggtcacagcgctcggtga

SEQ ID NO: 37009 - DNA, 159 bp, Zea mays
  Peptide Sequence Number=SeqID_78788
atgaagtccctattgagaagtaatgtaaaggtccacaatgtgacgattgagacctcgctggacgctccactcactgatggcatagttccaggaccaatgatgttcccacatgtggctcaactggtggtgaatcagatgcagacacatacggctgattga

SEQ ID NO: 37010 - DNA, 438 bp, Zea mays
  Peptide Sequence Number=SeqID_78789
atgtggctacttatttcttgcattgaaaatgtggagctaaaggacgccatagttacttgggtaagaaagaagacttgtgtgccaatcattaggcttcagtctaaggattcagctgaggagttcctcaaaaaggacatgacctttgttattggtctattcaagaattttgagggagcagaccatgaagaatttgtgaaggcagcaaccacagacaacgagatcttcacctttgcagaggcttatgattttgaagatatggaatctatggttgaagaaataggcagacattcaagacaaagtaatgtaaaggtccacaatgtgacgattgagaccttgctggacgctccactcactgatggcatagttccaggaccaatgatgttcccacatgtggctcaactggtggtgaatcagatgcagacacatacggctgattga

SEQ ID NO: 37011 - DNA, 612 bp, Zea mays
  Peptide Sequence Number=SeqID_78790
atggagatatttttgttcctttcaactcagctacgtcctgttgactgtgatgttaacgccatgaaccgagtagcagtttatgcccatgtgtcagtgttggattcaaatacctttttttttaaaaaaatagaggttagcattccactagaatatatggtcacatgtggctacctatttcctgcattcaaaataaacgttggtgttgttgtgcttcttttgctaaagcactaccttttacgggacgccatagttacttgggtaagaaagaagactggcgtgccaatcattaggcttcagtctaaggattcagctgaggagttcctcaaaaaggacatgacctttgttattggtctattcaagaattttgagggagcagaccatgaagaatttgtgaaggcagcaaccacagacaacgagatcttcacctttgcagaggcttatgattttgaagatcttgaatctatggttgaagaaataggcagacattcaagacaaagtaatgtaaaggtccacaatgtgacgattgagacctcgctggacgctccactcactgatggcatagttccaggaccaatgatgttcccacatgtggctcaactggtggtgaattag

SEQ ID NO: 37012 - DNA, 369 bp, Zea mays
  Peptide Sequence Number=SeqID_78791
atggacgggggtcggagagcggtcgcgggtccaatcgccgccgtcgtcgaggtcgtcatcgaggtcttcatacggctgatgctcaggggagggttcccgttcgtcgaggttcacgatcggctcgccttcgtcatcgtagctgggagagtagatcgaggaggggagcgggaggggagtggaggaggtggtggaagtggtcgcgacgcgcacggcccgcgctcgcttgcggagcaggagggaaccgcgctcgcttgcggagcaggggggaacgagggatgtgccgtgggactgtggggagccgggagagaggagcagttgcgatcgatggatggaggaggctcgaagcagaggcgacgggacaaacggtga

SEQ ID NO: 37013 - DNA, 1047 bp, Zea mays
  Peptide Sequence Number=SeqID_78792
atgagccaatggcaataccgcgctccagtctccaactcaatgacggccaatctgcaccgtccatctatatgcgtcaaatcatcaccgtttgtcccgtcgcctctgcttcgagcctcctccatccatcgatcgcaactgctcctctctcccggctccccacagtcccacggcacatccctcgttcccccctgctccgcaagcgagcgcggttccctcctgctccgcaagcgagcgcgggccgtgcgcgtcgcgaccacttccaccacctcctccactcccctcccgctcccctcctcgatctactctcccagctacgatgacgaaggcgagccgatcgtgaacctcgacgaacgggaaccctcccctgagcatcagccgtatgaagacctcgatgacgacctcgacgacggcggcgattggacccgcgaccgctctccgacccccgtccatggcgacgacggcggggcaaggtcctcctccaagccccgaaagcacattctcaagaagagcggtggtgttctgcctcccccaccctctcccccgcgctccgtcaatcacgcaaaccatcgcccgaccgcccatccgcagcacccccaccccgtccgccagatccgaatcccgcccccatcggcgcctcctcccccgcccgcccgagacctgtatcccgtcgctaatctcgccgccaccacgctgctcacgctcccgtcctcgctaatctcaacggttctgccctcgcccttccccctcatcgtccctccccaccgcgcctgcgcccccaccctcgccgcacccgcccccagtcctggatccgccgtcccatactgcagtttattgcgctcgtgctcccacctcctctccctctgccacaatgctgactgccaccaccttcgtcaagcctccaccaccgcgacatcggactccggcggctggggcaacttattcgtggttgtggcgggctccaatttcgcggtcgacatcggtgctgcgctcctcatccacgccgatttcgcggtcgacatcgaggagagccaggtcgtgtgtatctag

SEQ ID NO: 37014 - DNA, 1047 bp, Zea mays
  Peptide Sequence Number=SeqID_78793
atgagccaatggcaataccgcgctccagtctccaactcaatgacggccaatctgcaccgtccatctatatgcgtcaaatcatcaccgtttgtcccgtcgcctctgcttcgagcctcctccatccatcgatcgcaactgctcctctctcccggctccccacagtcccacggcacatccctcgttcccccctgctccgcaagcgagcgcggttccctcctgctccgcaagcgagcgcgggccgtgcgcgtcgcgaccacttccaccacctcctccactcccctcccgctcccctcctcgatctactctcccagctacgatgacgaaggcgagccgatcgtgaacctcgacgaacgggaaccctcccctgagcatcagccgtatgaagacctcgatgacgacctcgacgacggcggcgattggacccgcgaccgctctccgacccccgtccatggcgacgacggcggggcaaggtcctcctccaagccccgaaagcacattctcaagaagagcggtggtgttctgcctcccccaccctctcccccgcgctccgtcaatcacgcaaaccatcgcccgaccgcccatccgcagcacccccaccccgtccgccagatccgaatcccgcccccatcggcgcctcctcccccgcccgcccgagacctggatcccgtcgctaatctcgccgccaccacgctgctcacgctcccgtcctcgctaatctcaacggttctgccctcgcccttccccctcatcgtccctccccaccgcgcctgcgcccccaccctcgccgcacccgcccccagtcctggatccgccgtcccatactgcagtttattgcgctcgtgctcccacctcctctccctctgccacaatgctgactgccaccaccttcgtcaagcctccaccaccgcgacatcggactccggcggctggggcaacttattcgtggttgtggcgggctccaatttcgcggtcgacatcggtgctgcgctcctcatccacgccgatttcgcggtcgacatcgaggagagccaggtcgtgtgtatctag

SEQ ID NO: 37015 - DNA, 261 bp, Zea mays
  Peptide Sequence Number=SeqID_78794
atggcgagctcgccggtgctcgccatctcccccatccccctcccttccccgagcgcctataaaaggacccgctcgagccccttcttcgccacacaactccagccacccccactgccctcctccctgagccattcaagcaagcaccgccgtgctcccttcaccgctccggggaccataattaggggtaccctcaaggctcctaattctcagctggtaacccccatcaacataaagctgcaaaggcctgatgggtgcgattaa

SEQ ID NO: 37016 - DNA, 441 bp, Zea mays
  Peptide Sequence Number=SeqID_78795
atggaggggggagaggctcgaccggggccggtcggcggcgaactacgcggcggttctccgccgtcggtccagttctctggcggggaagtggtggcgaagcacgggcgggtgaagtgggtcacgagggtggggcgaatttggcctgcgggggcctatggcggccggtccacggcgcagtcgcgggtgcccgcggcggcgaagccgccggtgaggtttctggccacgatagggggggcaaagtggtgccttgtgattgtgagcgtgtggcggagcttcggccatagcttaattgaacagagaaaagctagagagggggaggggagctcaccggagcaaagcagagagcacggcggcgcttgcttgaacggctcggggaggagggcagtggggatggctggagttgtgtggcgaagatggggctcgggcgggtcctttttatag

SEQ ID NO: 37017 - DNA, 312 bp, Zea mays
  Peptide Sequence Number=SeqID_78796
atggaggggggagaggctcgaccggggccggtcggcggcgaactacgcggcggttctccgccgtcggtccagttctctggcggggaagtggtggcgaagcacgggcgggtgaagtgggtcacgagggtggggcgaatttggcctgcgggggcctatggcggccggtccacggcgcagtcgcgggtgcccgcggcggcgaagccgccggcgctcgggggagggagggggatgggggagacgacgagcaccggcgagctcgccatgagtgcgggaatggtgctaacgccgattgggacggctcaggcaggctga

SEQ ID NO: 37018 - DNA, 792 bp, Zea mays
  Peptide Sequence Number=SeqID_78797
atgttgttcacgcctattgcagaattggatcctaaaagtacaaatgctgcaataagagtgtgtatcattagaaaatgggaattccgaggcgcaacaaatgatgggcctttgcgccatgtcaacctcatcttagctgatgaacagggcacagccatccacgctgagattcaagccgccctagtagatgacaaaggctcactaatccaaattgacaaagtctatgagctcaaacgctttcgtgttactccatccagaaactattacaaacctgttgacaacagtatgatgatacaattcactctttacactcaagcaaaggtagtcgaagatccgccacccacctttccaagatacgcctacaaactcacatctttcgaaaatataggcaacaatgttgacaataaaacatacttgattgatgttctaggaatcttgacagaaattggctctctacaccatgttggttacaacaactcaaacatcatcagagacatatttctcaaggacataaacaatacctctacaaaagtgacgctttggagacaccaagcatctagcttctctgtcgacaacatctgcgatgacaatgacaacaaacctgttgtcgtactatttgttggatgccttgctaagcgattcaaaggtagtgtactaaacacttctaaattacagttacactatctacatttacagacacaatacaagtatgttactcccaatgtaggagaagcatatctaagtgccacggcagcatgtacatggtacttcaacccagacattcctgaagcctag

SEQ ID NO: 37019 - DNA, 4110 bp, Zea mays
  Peptide Sequence Number=SeqID_78798
atgacattactcaaaaaatatcaggcccacatcaatgtagaatggtgtaacaaaagcatattcattaagtaccttttcaaatatgttacaaagggtccagatcgcagcaagttgtatttgaaacagattatagatggtcaggacactcctattgatgaggagacaaatacaaggaatgaggtcaaggaatatttagatgctagatttatatgtccatatgattcatgttggaggatttttggttttgaaatccatcggcattttcctcccgtggagagattgccagttcacttacctaatgaaaattacattacataccatgctaatgccaacatgtcgcaaatcctatcacaagaattcttacgtcgaaccatgttgactgagtggtttgttgctaatcaaagacatgagaacgctagatccctaacttaccctgacttcccatccgagtggagatgggatgaaaagaaaagattatgggagcacaggcaacgccatggtaaaataggccgcatacattttgtgcatccatctgcaggagaaagatattatgtcagaatgcttctaatggttgtaaagggagctcagagctatgaatcattacgaacatacaatcatattttacatccaacattcaaagaagcttgtagagcacatggactcctagaagatgaccaggaatggtacaacgccttcgatgaggccgcgtcttgggccacatcaaatcagcttcgccaactttttgtcacgatgcttcttttctgtgaagtaggtgatgaattgtctttctttgagaaagtttggagattattagctgacgatattcaatataacactcgacaaacgcttaatcacccagagtaccagatgcctgatgaaacacttaaaaatcagctcatagaggaacttgaaactttatttagcaaaagaggaagtcgaattcaggatttcaacttaccatctagaacaaattcttcttttcaagtgcctacaaatcgcctaattgatgatgaacttatatatgatattaatgctatgcaatctgaatcagaaatgcttatctcaaggctaaacaatgatcagctacatgctttcaaaactattacagaaactgttctaacaaagagactaggcttctactttgtctctggttacagtggtacaagcaaaacgtatctatggaactccatcataacatttttacgcagccgcaaacacatagtgttatctgtcgcttcttcaggtgtggcttctttactcctaccaggtggtcgaacagcacattctcgtttcaaaataccatgtgaattagatgaaggaacaatatgtgacatcaaacgtggcataatgttgtgtgaactaattcaatctacatctttaataatatgggatgaagctttgatgacacataaatttgcatttgaagcattagacagatctttacgagatatcttatcatcttcatctcctatggctaccaatttaccctttggtggaaaggttgttgttcttggaggagatttacggcaaattttgccagtaattgaagggggtaatcgttcacagattgtaaattcagcaataatcaactcttctctttggtctcatgttcatatcctacgtcttacccataatatgaggctttcgtcaacatcattgtcacaagaagatcaagaagaattgtctcaatttagtaaatggatgctcaacattggagaggggaagatacatgctacatcacgagaaggcgaagatgagccaacatggatacaaatacccgaagaatttcttctaatgcctcaaggtgacaaaactgcatgtattgttgaaaaggtctatgaagacctgcaaactaattacatggaccttcaatatctaaaagctcgtgccatattaacacccacaaatgatgttgttgattccataaatgattatattgtttcccttatccctgagcaaacaaaggagtacttaagctgcgacaaagtaatcaaagcacctaatacacatgactcttatgatcttttgtaccccgtagaatttttgaatacattgaatggaaataattttccacaacatcggatagtcttgaaaaagggtacaccagtaatgctacttcgaaatctgaaccaatctgaaggcctttgtaatggaacaagattgcttctaacttctttaggtgacaaggttattgaaggccagataatgacaggcactcacaagtcaaaaaatgtgctcattcctcgtgtatcattgacattgaaaaatacaaaatggccatttgtccttcaaagacgccaatacccgataaaagtgtgctatgcaatgacaatcaacaagagccaaggacaaacactttcaaaggttggcatatatctcaaaaaaccaatttttacacatggtcagctctacgttgccatatcaagagttacatcaaaaaagggtctttctattctcattgaagatgaatcaggcaattgcagttctataacccgaaacatagtatacaaagaggtttttgaacaattggatcctaaaagtacaaatgctgcaataagagtgcgtatcattagaaaatgggaattccgaggcgcaacaaatgatgggcctttgcgccatgtcaacctcatcttagctgatgaacagggcacagccatccacgctgagattcaagccgccctagtagatgacaaaggctcactaatccaaattgacaaagtctatgagctcaaacgctttcgtgttactccatccagaaactattacaaacctgttgacaacagtatgatgatacaattcactctttacactcaagcaaaggtagtcgaagatccgccacccacctttccaagatacgcctacaaactcacatctttcgaaaatataggcaacaatgttgacaataaaacatacttgattgatgttctaggaatcttgacagaaattggctctctacaccatgttggttacaacaactcaaacatcattagagacatatttctcaaggacataaacaatacctctacaaaagtgacgctttggggacaccaagcatctagcttctctgtcgacaacatctacgatgacaatgacaacaaacctgttgtcgtactatttgttggatgccttgctaagcgattcaaaggagaagcatatctaagtgccacggcagcatgtacatggtacttcaacccagacattcctgaagcccaggtgtattacagcaatttccacaccattgctcctcgtataaaaaattattggtacgccaagaccttgaacacggtttcaaatgcaccgtcactatatcacgcctcgtacaagatggtagatggtggttcccatcctgtatcaagtgcaacaagtcttcatcccagacatctactgggtaccaatgcacatcgtgcaatgggacagaaactgggttcagctcacagatataaactcaacttcattgccactgatggaacatccgaagcagaattcttttgctttgatagtatagctaaacgaatagtaggaaaatcttgtcaaaccctttttagcacatcagatgtttctcgtggtcctcctccagacctagctgccattatctccctcaaattcacatttgttgttaccatcaacatgtctgcattctctgtcacaaatcgagtcttttctatcctttctgtcctaacaagtcatggaagacaagcatcgataccatgtgccacacaaaacctttcccaacaacagatgttaacacaagacaacataattgatgtcacaaccacacaagaatctccagcaacatcgattgccaaactatccacatctaccaaacaagaaagtgtgccacgacgcagacttacgtattctgagatgctacaggacacaaattctccccatgttctatcatgctctccagaattgttgcagctcaacaaataccttgatcttggccatgtaacaaataggcagacgactgggccgctgaaagccccagtccgtcacccccctcagcgaatgccacgaaatgaggttgcaagcgcgatagttgatgaacaggtttcagctgagctcaatgaagacagcctcgcatcacctcctaagaagtatcaatcctga

SEQ ID NO: 37020 - DNA, 1608 bp, Zea mays
  Peptide Sequence Number=SeqID_78799
atgttgttcacgcctattgcagaattggatcctaaaagtacaaatgctgcaataagagtgcgtatcattagaaaatgggaattccgaggcgcaacaaatgatgggcctttgcgccatgtcaacctcatcttagctgatgaacagggcacagccatccacgctgagattcaagccgccctagtagatgacaaaggctcactaatccaaattgacaaagtctatgagctcaaacgctttcgtgttactccatccagaaactattacaaacctgttgacaacagtatgatgatacaattcactctttacactcaagcaaaggtagtcgaagatccgccacccacctttccaagatacgcctacaaactcacatctttcgaaaatataggcaacaatgttgacaataaaacatacttgattgatgttctaggaatcttgacagaaattggctctctacaccatgttggttacaacaactcaaacatcattagagacatatttctcaaggacataaacaatacctctacaaaagtgacgctttggggacaccaagcatctagcttctctgtcgacaacatctacgatgacaatgacaacaaacctgttgtcgtactatttgttggatgccttgctaagcgattcaaaggagaagcatatctaagtgccacggcagcatgtacatggtacttcaacccagacattcctgaagcccaggtgtattacagcaatttccacaccattgctcctcgtataaaaaattattggtacgccaagaccttgaacacggtttcaaatgcaccgtcactatatcacgcctcgtacaagatggtagatggtggttcccatcctgtatcaagtgcaacaagtcttcatcccagacatctactgggtaccaatgcacatcgtgcaatgggacagaaactgggttcagctcacagatataaactcaacttcattgccactgatggaacatccgaagcagaattcttttgctttgatagtatagctaaacgaatagtaggaaaatcttgtcaaaccctttttagcacatcagatgtttctcgtggtcctcctccagacctagctgccattatctccctcaaattcacatttgttgttaccatcaacatgtctgcattctctgtcacaaatcgagtcttttctatcctttctgtcctaacaagtcatggaagacaagcatcgataccatgtgccacacaaaacctttcccaacaacagatgttaacacaagacaacataattgatgtcacaaccacacaagaatctccagcaacatcgattgccaaactatccacatctaccaaacaagaaagtgtgccacgacgcagacttacgtattctgagatgctacaggacacaaattctccccatgttctatcatgctctccagaattgttgcagctcaacaaataccttgatcttggccatgtaacaaataggcagacgactgggccgctgaaagccccagtccgtcacccccctcagcgaatgccacgaaatgaggttgcaagcgcgatagttgatgaacaggtttcagctgagctcaatgaagacagcctcgcatcacctcctaagaagtatcaatcctga

SEQ ID NO: 37021 - DNA, 543 bp, Zea mays
  Peptide Sequence Number=SeqID_78800
atgtcgggtgacgttgggattcctttcctgcgattattgaggttagagccctgctcgggcgaggcggaagtcttccccgaggcgatggttgagccttccctgacgtgtgctacagttggcggagtggccacctgcaggattcactgtggggcaggcccacgaaagaatgaccttacgatttactgggcccttgggcctttcgtgaggtcttttactcttttagtggacccgggggatatctatcccccacaagcccccgatctttgggtttatttagagttgagggctggccttttaatcttgtcccacgccttagaagtcggcactgtcttggcttggaatgataatccatggggtgcaccggagaaattggcacgaagctattcgcattatgctttggaggtcagcattatgtcatcaatattttgcttcagagatgtgaccgttttgaaaaatatactgataattcctgggcgtctccccccaatgggtgtgggcaagggacggcttggtacgctgagtgttttagccggctgcttctga

SEQ ID NO: 37022 - DNA, 222 bp, Zea mays
  Peptide Sequence Number=SeqID_78801
atggggtgcaccggaggtgcacccaatgggtgtagcccccgaccttcaaatggattttttaaggataatccattcgaagaaattggcatgaagctatttgcattacgctttggagatgtgaccgttttgaaaaatatactgataattcctgggcgtccccccccaatgggtgtgggcaaggggcggcttggtacgctgagtgttttatccggctgcttctga

SEQ ID NO: 37023 - DNA, 336 bp, Zea mays
  Peptide Sequence Number=SeqID_78802
atgtcgctctactttgctggttgtctttccccaggcccacgaaagaatgaccttacgatttattggccccctgggccttttgtgaggtcttttactcttttagtggacccgggggatacctatcccccacaagcccccgatctttgggttaattttagagaaattggcatgaagctattcgcattatgctttggaggtcaggattatgtcatcaatattttgcttcagagatgtgaccgttttgaaaaatatactgataattcctgggcgtcccccccaatgggtgtgggcaagggatggcttggtacgctgagtgttttagccggctgcttctga

SEQ ID NO: 37024 - DNA, 978 bp, Zea mays
  Peptide Sequence Number=SeqID_78803
gattgggctgacatgttactaaggatgtatgtaagatggggagagaagcagcgttataagacacgagtagttgagaaatcacctggtgaacaggccggtataaaatcagcaactgttgaactagaggggagatatgcttatggctatctctctggcgagaaagggacacacaggattgttcgtcaatcaccatttaatgctaaagggcttcggcagacaagctttgctggtgttgaggttatgcctcttctaccagaggaatccatggctgtggacatacctgaagaggacctggagataagcttcacaagagctggaggtaaaggaggccagaacgtgaacaaggtggaaacggctgttcgcatggttcatattccaactggaattgcagttcgctgctcagaggagaggagccagctggccaacaaaataaaggccctcagccggctcaaagcgaagctgctggtgatcgccctggagcagcgtgcatcagaaatcaagcagatccgtggagacattgtgaaggcagagtgggggcagcagatacgcaactacgtcttccacccctacaagctcgtcaaggatgtcaggacaggccgtctgatgcgtccgatgcgcgcactctcacccccacgcatcgccccgcccccatcgtccaaccgtgcgagcaccccatcgtcccgccgcctcctgcccccccccctcctccgcacgagccgcagccggcccccgcagatcgtgattacctccctgcaccctcgccgttgtcgtggcgtcgacctcagccgcacccccgcgatctccatcccggcaccctcccctctccctcatgcttgctcttcggatctcgggagtcgggactcgcccctcgcgcggcccccgctcgtctgcctcgtccccgacttctccgaccgcgtcgttaaggcgctcaacctctccatcatcgtccgcgactgcctacgaacttctccgaactaa

SEQ ID NO: 37025 - DNA, 936 bp, Zea mays
  Peptide Sequence Number=SeqID_78804
atggctcagctatcaagaagctccaggtcaatccctgttttgttcccatgcttgaaattgatggtcttcattttgttggttgtgacaaaagtcaaaaccggatggaggtgtttagttgtggagcagattgcgggttttgaatttcttttccaaatgtcgtcttcacgcccaccgcggaggggtggtgaccgaagagatagtggcaaaggcgtcccttgtgggctctgctcctatctcgcggattgggctgacatgttactaaggatgtatgtaagatggggagagaagcagcgttataagacacgagtagttgagaaatcacctggtgaacaggccggtataaaatcagcaactgttgaactagaggggagatatgcttatggctatctctctggcgagaaagggacacacaggattgttcgtcaatcaccatttaatgctaaagggcttcggcagacaagctttgctggtgttgaggttatgcctcttctaccagaggaatccatggctgtggacatacctgaagaggacctggagataagcttcacaagagctggaggtaaaggaggccagaacgtgaacaaggtggaaacggctgttcgcatggttcatattccaactggaattgcagttcgctgctcagaggagaggagccagctggccaacaaaataaaggccctcagccggctcaaagcgaagctgctggtgatcgccctggagcagcgtgcatcagaaatcaagcagatccgtggagacattgtgaaggcagagtgggggcagcagatacgcaactacgtcttccacccctacaagctcgtcaaggatgtcaggacagggtgtgagacgtcggacatcactggcgtaatggatggagagctagatccctttatcagagcataccttaagtacaagctaactgcggcagctaccagctga

SEQ ID NO: 37026 - DNA, 1680 bp, Zea mays
  Peptide Sequence Number=SeqID_78805
atggcgcttcctgttgacgtggctggcctgcgccctaggttgggcgacgtggaggttcctccgaagccgaggtcgagtctgtcttccatggccgaggccgagtccgagcccctgggtcgggcgaggcggagaacgttcggcagaggccagggcggagtccgagccctggggtcgggcgaagcggaggcctggctgcctgtcagtcttattctgtcaaggggcactgcagtcagagtggcgcaggcggcgctgtccttctgtcaggccggtcagtggagcggtgaagtgacggcggtcacttcggctctgccggggggcggcctcgggcaagccggagatgtgtccgccgttggaggggggcctcgggcgagacggaaatcctccgggctttatgctgatgggtgttaccagctgagaattaggagtcttgaggccacctccgccgctggtggagctacgtttctgacttgggtcaacacagtgcgatcctcgtcctctggggccggaagccagtcaagcgttgcggatgaaccagaggctgcagaatgggccttgcaggatttctacattttgcggaaggatgttgagttggctcttgagcgtgtcaatgaagtcaggcagtctgccggtttgcaacagctcgaggaggatatcgcttcgcttgagaacaagtccagtgatagttccttatgggatgatccttccaaggcacaggggatacttgtttctctgacagaggtcaaagacaaagtgaagcttctcaacgatttcaagttacagattgaagaagcagagactattgtgaagcttacagaagaattagattctatagatactggtcttcttgaggaggcctcaaagattataaaggcattaaataaggcattagacaactttgagatgacacagcttctttctggaccatatgataaggaaggtgctgtaattaatatttctgctggcgctggtggcactgacgctcaggattgggctgacatgttactaaggatgtatgtaagatggggagagaagcagcgttataagacacgagtagttgagaaatcacctggtgaagaggccggtataaaatcagcaactgttgaactagagggaagatatgcttatggctatctctctggcgagaaagggacacacaggattgtccgtcaatcaccatttaatgctaaagggcttcggcagacaagctttgctggtgttgaggttatgcctcttctaccagaggaatccatggctgtggacatacctgaagaggacctggagataagcttcacaagagctggaggtaaaggaggccagaacgtgaacaaggtggaaacggctgttcgcatggttcatattccaactggaattgcagttcgttgctcagaggagaggagccagctggccaacaaaataaaggccctcagccggctcaaagcgaagctgctggtgatcgccctggagcagcgtgcatcagaaatcaagcagatccgtggagacattgtgaaggcagagtgggggcagcagatacgcaactacgtcttccacccctacaagctcgtcaaggatgtcaggacagggtgtgagacgtcggacatcactggcgtaatggatggagagctagatccctttatcagagcataccttaagtacaagctaactgcggcagctaccagctga

SEQ ID NO: 37027 - DNA, 1194 bp, Zea mays
  Peptide Sequence Number=SeqID_78806
atggcggaggagcagatcgaagaggcgtccatggccgcggcggcggccacgccgttccagctccagttcgacaagcccatcccgttccagataaaaatggcagaatggaatccagagaaggatctgcttgctatggttactgatgactccaaggttctcctccatcgcttcaattggcaaaggctttggacaatctctccagggaagtgcatcacatcaatttgttggagccctgatggtaaaataatagcacttggcacagaagatggtttgattcttttgcatgatgtggagaatgggaagatgctaagaactacaaaatcccacgatgttgccattgtatctttgaattgggcagaagacgatccactgtcaaagtctgacaaggatgagtttttatcctatgaagaccgcaccacacgtttctttcctcctcctcctgtgatgcctaggataggtggactacgttctggagatactggtcttgcggatgagaacgaagaagctattccagaattttctagtgcttcctgtcagcgttttaacattctgtgcagtggtggcaaagatggttgtgtttgcttcagcgtttttggaatatttcctgttggaaagataaacataactaaaatcccaatcaatgttggatcctctagaaagagttaccaactccaggatgcttcagtcagcaaggtctctttatcaagaaacctccagaaatttgttattctgtgctttggaaagttggttgataccgacaacctctctgacagctgcgaaaattctggattacattgtctctacctagatacttctatcttcttcaaccgaaaaaatgagctgcatcaggtgtcccaacaagcatcaagtattcaagatatggttgaagttgtccgtgcttctgtatctttaatatccaaacaatggtcaaacgccatgagtttattccatgagaaatttagtgccttgcccaatctgatatctacacatggagtggaatctagttctgaggatgagtttcttagccttttgtttgggacacgaacaagtccagcccttcaccattttttagctagttcacttggtgaagcgggtctcaagaggatagccaaggctgttgacagtgctggaagagatattcgtggcattatcactgagcatcttcaggtcagctatgacttattgatcctctga

SEQ ID NO: 37028 - DNA, 471 bp, Zea mays
  Peptide Sequence Number=SeqID_78807
atggctggttcacgtgctggatccctgggttgctgccgccgagcgttgcgtgcgtccggcgtccctgctattgttttgttcaaattcctacgaggattaagttggatcctactgtcgctgtgcagagctgacagggatgctgttgggttcagtgggaacttgttgataaaaatggcagaatggaatccagagaaggatctgcttgctatggttactgatgactccaaggttctcctccatcgcttcaattggcaaaggctttggacaatctctccagggaagtgcatcacatcaatttgttggagccctgatggtaaaataatagcacttggcacagaagatggtttgattcttttgcatgatgtggagacaggaccacttgatcacatacaggtggggatcttgcagccactgcttgaacatctgtgcagattctcaagacctcactcttccatgataaacttctcataa

SEQ ID NO: 37029 - DNA, 435 bp, Zea mays
  Peptide Sequence Number=SeqID_78808
atgcctaaaacgatatatgatcatgattcagcttgttttagaaggaatgtatggctaggtgatctcaactataggatcaacttaccatatgagaagacacacgaactcatatccaagcaggattggaacgaattgtttgggaaagaccagctgaaagtagagctgaagaagggcatctgtttgaaggatggaccgaaggggtcatcaactttcctccaacgtgaaatcctggaaagcttcagagacccagaattctgtattgggctgtctacctttttgtatgctggtgctgcagtgacgggatacaaaatgtttggtgaagccacagagtcccaattcacactcaacttaccagataattctgtcatttctaagattgctgtttggacaacggtggcaaatccaataaccaaatatccttggtgtgccaattga

SEQ ID NO: 37030 - DNA, 762 bp, Zea mays
  Peptide Sequence Number=SeqID_78809
atggctgcgctcgttcagttcatattctatcatttaatacacttattgtcttctcaggatatggagaaagaaatcaggaaacaagtagatgacgccattgctaaagcaaagttagatgaggcgtccagggctctcctgatgaaggtactagaagatgccacccaggacgctgtgcagaggcaggcaaagctgaaagtagagctgaagaaggggcatctgtttgaaggatggactgaaggggtcatcaacttttgttcagcttgttttagaaggaatgtatggctaggtgatctcaactataggatcaacttaccatatgagaagacacacgaactcatatccaagcaggattggaacgaattgtttgggaaagaccagctgaaagtagagctgaagaagggcatctgtttgaaggatggaccgaaggggtcatcaactttcctccaacgtgtacatgtgcacaatttggtgattgagcaaagtctggtgagccgatcaactgaatttgaagctgctattcagaatggcgacaaaagttcgctacgtgctctttctgacgaggagagagaaacctggggcttcttaagggttatgtttgaggacggggattttgcaaggacaaaattgcttgctcatcttggcttcgaaccacctcaggcaccgcctgcaagttcaactgatgaattgagccaaatattggcagatacacttaatattgatcatgatgcagtaaccgataatgcggatgcccagtttttttga

SEQ ID NO: 37031 - DNA, 729 bp, Zea mays
  Peptide Sequence Number=SeqID_78810
atggcgacaaaagttcgctacgtgctctgtgtgaaaaaaaatcacaagaatctttgtagatctgacgaggagagagaaacctggggcttcttaagggttatgtttgaggacggggattttgcaaggacaaaattgcttgctcatcttggcttcgaaccacctcaggcaccgcctgcaagttcaactgatgaattgagccaaatattggcagatacacttaatattgatcatgctgcagtaaccgataatgcggatgcccagtttcttattgataatggggatgattttttcaacaatcctcaacctttagaggctagcttggctgaagaattagtttctacaaatggtcaacatatagaacaggaagtttctggagatgcggtgccatcagatccatcaattgacaaaagcattcaacatgcgttggtggttggagactacaaaggggcagttaaccagtgtcttgcttctaatcgtatggctgatgctttggttatagcccatgccggtggttctgctctctgggaaagcacaagaaatcattatctcaagaacagtatctcaccctacttaaaggttgtctctgctatggtggacaatgatttaatgagttttgtgagtacctggccactaagttcatggaaagaaactcacgcccacctatggacctaccccctcgcctcacagcatggccgctggcttggtgtcgcccccgaccaaggttattaa

SEQ ID NO: 37032 - DNA, 789 bp, Zea mays
  Peptide Sequence Number=SeqID_78811
atgtctacttccccgtcgtctcacaagcgtggccgcgagcgcgacgtcgacgctgtgccgtcggcactgtgggtccggatggacaaggagttcctcgccaaccaaggccttcttaagagagccaagctcttgccccgtctccgttccgctgccccctccgccgccgacaagaagaactgcgcgcctgcgctagcgtcacgacgatcaggggctcctgcagttgtgccgtcgacagcaccaaagagggagacgtcgtcgcaacccaaggcagcaacggagactgcggatcggactcggatcgccgcaccagcagcgaatacgaagcagcagcagagcgcaggcgcagccgccaagaacccgatccctccggcagttcgtcctagcaagaacctgccaccggccgaggcaccagcaacagcgaattcgaagcagcagcagcagcgcgcaggcacagccgccaaaaacccgatccctccggcagttcgtcctagcaagaacctgccaccggccgaggcaccagcagcagcgaagcagcagcacccggcggtccagcatgcagttgctgccgagacagagaagtcggcgctgcctgatgagatggagaagtcaaggaaggagttccgccggatgctggaggagatggagaagttggcgctgcctgatcagacgatatacccagaggacctagaggagctcggcctcacgccagtcgaacatgtcgtgacgaggacgaggaagcaggcaaggttggaagaccacgccaagcgcttcagatcacttcgtagctag

SEQ ID NO: 37033 - DNA, 789 bp, Zea mays
  Peptide Sequence Number=SeqID_78812
atgtctacttccccgtcgtctcacaagcgtggccgcgagcgcgacgtcgactctgtgccgtcggcactgtgggtccggatgggcaaggagttcctctccaaccaaggccttcttaagagagccaagctcttgccccgtctccgttccgctggcccctccgccgccgacaagaagaactgcgcgcctgcgctagcgtcacgacgatcaggggctcctgcagttgtgccgtcgacagcaccaaagagggagacgtcgtcgcaacccaaggcagcaacggagactgcggatcggactcggatcgccgcaccagcagcgaatacgaagcagcagcagagcgcaggcgcagccgccaagaacccgatccctccggcagttcgtcctagcaagaacctgccaccggccgaggcaccagcaacagcgaattcgaagcagcagcagcagcgcgcaggcacagccgccaaaaacccgatccctccggcagttcgtcctagcaagaacctgccaccggccgaggcaccagcagcagcgaagcagcagcacccggcggtccagcatgcagttgctgccgagacagagaagtcggcgctgcctgatgagatggagaagtcaaggaaggagttccgccggatgctggaggagatggagaagttggcgctgcctgatcagacgatatacccagaggacctagaggagctcggcctcacgccagtcgaacatgtcgtgacgaggacgaggaagcaggcaaggttggaagaccacgccaagcgcttcagatcacttcgtagctag

SEQ ID NO: 37034 - DNA, 786 bp, Zea mays
  Peptide Sequence Number=SeqID_78813
atgtctacttccccgtcgtctcacaagcgtggccgcgagcgcgacgtcgacgctgtgccgtcggcactgtgggtccggatggacaaggagttcctcgccaaccaaggccttcttaagagagccaagctcttgccccgtctccgttccgctgccccctccgccgccgacaagaagaactgcgcgcctgcgctagcgtcacgacgatcaggggctcctgcagttgtgccgtcgacagcaccaaagagggagacgtcgtcgcaacccaaggcagcaacggagactgcggatcggactcggatcgccgcaccagcagcgaatacgaagcagcagcagagcgcaggcgcagccgccaagaacccgatccctccggcagttcgtcctagcaagaacctgccaccggccgaggcaccagcaacagcgaattcgaagcagcagcagcgcgcaggcacagccgccaaaaacccgatccctccggcagttcgtcctagcaagaacctgccaccggccgaggcaccagcagcagcgaagcagcagcacccggcggtccagcatgcagttgctgccgagacagagaagtcggcgctgcctgatgagatggagaagtcaaggaaggagttccgccggatgctggaggagatggagaagttggcgctgcctgatcagacgatatacccagaggacctagaggagctcggcctcacgccagtcgaacatgtcgtgacgaggacgaggaagcaggcaaggttggaagaccacgccaagcgcttcagatcacttcgtagctag

SEQ ID NO: 37035 - DNA, 786 bp, Zea mays
  Peptide Sequence Number=SeqID_78814
atgtctacttccccgtcgtctcacaagcgtggccgcgagcgcgacgtcgacgctgtgccgtcggcactgtgggtccggatggacaaggagttcctcgccaaccaaggccttcttaagagagccaagctcttgccccgtctccgttccgctgccccctccgccgccgacaagaagaactgcgcgcctgcgctagcgtcacgacgatcaggggctcctgcagttgtgccgtcgacagcaccaaagagggagacgtcgtcgcaacccaaggcagcaacggagactgcggatcggactcggatcgccgcaccagcagcgaatacgaagcagcagcagagcgcaggcgcagccgccaagaacccgatccctccggcagttcgtcctagcaagaacctgccaccggccgaggcaccagcaacagcgaattcgaagcagcagcagcgcgcaggcacagccgccaaaaacccgatccctccggcagttcgtcctagcaagaacctgccaccggccgaggcaccagcagcagcgaagcagcagcacccggcggtccagcatgcagttgctgccgagacagagaagtcggtgctgcctgatgagatggagaagtcaaggaaggagttccgccggatgctggaggagatggagaagttggcgctgcctgatcagacgatatacccagaggacctagaggagctcggcctcacgccagtcgaacatgtcgtgacgaggacgaggaagcaggcaaggttggaagaccacgccaagcgcttcagatcacttcgtagctag

SEQ ID NO: 37036 - DNA, 579 bp, Zea mays
  Peptide Sequence Number=SeqID_78815
gggctctctgcagttgtgccgtcgacagcaccagagagggagacgtcgtcgcaacccaaggcagcacgggagactgcggatcggactcggatcgccgcaccagcagcgaatacgaagcagcagcagagcgcaggcgcagccgccaagaacccgatccctccggcagttcgtcctagcaagaacctgccaccggccgaggcaccagcaacagcgaattcgaagcagcagcagcgcgcaggcacagccgccaaaaacccgatccctccggcagttcgtcctagcaagaacctgccaccggccgaggcaccagcagcagcgaagcagcagcacccggcggtccagcatgcagttgctgccgagacagagaagtcggtgctgcctgatgagatggagaagtcaaggaaggagttccgccggatgctggaggagatggagaagttggcgctgcctgatcagacgatatacccagaggacctagaggagctcggcctcacgccagtcgaacatgtcgtgacgaggacgaggaagcaggcaaggttggaagaccacgccaagcgcttcagatcacttcgtagctag

SEQ ID NO: 37037 - DNA, 496 bp, Zea mays
  Peptide Sequence Number=SeqID_78816
tgcaactgttcaagatgctgatcgagctattcaacaaaagaatggatctcctgtttctgtgcaagtgaaggactctgatgcaaaggatgaagcagacgaaatttctcctgctgaaaagcataaggtatttttcaatactgatgcaatatgttatgtggaaccagagcaactgcatttgttgtcaaatgatgctaaggtggttgaggttaatgttaaggtggaaagtgcaggcacatgtaacgtgcacaataatgatttctatgctaaagagaagttgctcaaatcaatgcgtgattgtgatccttcgtctgtgcgccactggattttgtggcaatggaagttccaggccccgttgcagcactacactacgctaatggaccttcaggacagaaatgagaagctattttacaagctcctgattgacaatgtcgaagagttgcttcctataatgtatacaccaacagcggggggaagccttttgtttccagccctttaa

SEQ ID NO: 37038 - DNA, 603 bp, Zea mays
  Peptide Sequence Number=SeqID_78817
atgacaaaaggatcagagaagagtcgaggcttcaggttcgtgcaatttgcaactgttcaagatgttgatcgagctattcaacaaaagaatggatctcctgtttctgtgcaagtgaaggactctgatgcaaaggatgaagcagacgaaatttctcctgctgaaaagcataaggtatttttcaatactgatgcaatatgttatgtggaaccagagcaactgcatttgttgtcaaatgatgctaaggtggttgaggttaatgttaaggtggaaagtgcaggcacatgtaacgtgcacaataatgatttctatgctaaagagaagttgctcaaatcaatgcgtgattgtgatccttcgtctgtgcgccactggattttgtggcaatggaagttccaggccccgttgcagcactacactacgctaatggaccttcaggacagaaatgagaagctattttacaagctcctgattgacaatgtcgaagagctgcttcctataatgtatacaccaacagcgggggaagccttttgtttccagccctttaaatcagagtattttacaagagctgcttcctataatgtatacacatccttactgaatcactag

SEQ ID NO: 37039 - DNA, 228 bp, Zea mays
  Peptide Sequence Number=SeqID_78818
atgctcgaggcggtgtttagcgaggtcgacccagtgtggcgctgctttatggtcgtggagaaaggatcggagaagagtcaaggcttcgagttcgtgcaatttgcaactgttcaagatgttggtcgagctattcaacaaaagaatggatctcctgtttttggtaggaaaatcttagttaagctagcaatgaatcgtgctccactaggaacgtttgcaaaaggggaatag

SEQ ID NO: 37040 - DNA, 441 bp, Zea mays
  Peptide Sequence Number=SeqID_78819
atgaaggagacgaccctctttggccgtgcaggggggctgcatacccagatctctacttctgcagggggttcaaaaagtatagacgagacctggtggttgggcgcgcaggctgcgagttggtgcagcgatgagctaatcagcaagtgcagcttccgcaccgcccgcctaacaaggaagccgcgcactgcggcttgcaggcgcaccacagcctgctcatgtgatgacggcatggggtggccctggaggccacagcaagttgttgagggcgggtgggagggagttgcggcggcagatggcgcggcggctggtggtggtgaggataacctggagctgataccaggtgtcatggaccttcggtccatggggatagctatcttctccggcgaggttatacccctctgccgcaggcttggttctagggtagcagccctaggcgcttga

SEQ ID NO: 37041 - DNA, 918 bp, Zea mays
  Peptide Sequence Number=SeqID_78820
atggtgcgcctgcaagccacagtgcgcggcttccttgttaggcgggcggtgcggaagctgcacttgctgatcagctcctcgctgcaccaactcgcagcctgcgcacccaaccaccaggtctcgtctatactttttgaaccccctgcagaagtcgagatctgggtatgcagccccccctgcacggccaaagagggtcgtctccttcatttgggcacctgccttggtgttgacagacccaacataagaacgggttggttcctcctccacctttcatccaacgtgaaggccgcagttcagctctttccttgggatccagaaggacatgaggacatagctgcagttcaaatttatattttagttccacaattattttgtatttttgtcttaaataataaagaagtttgtggcaagaaacggaagttacaaagctttagagatgaggagtactacataagttcagtacctcaaaaccatcatttggaagctgggctgtcggtgagggacaatgaaggatttgttgaaaataggttggatgctgctgttcttgatttagttgatgatgaagcttctggtatgcaagcgcagaaaactcgatatcactggatgaaggtgatcagtcaagccatgtttggtagtgaagggcgacgtccagagagtaagaacaaggtgacacagtatggactcgatatgactgagcaacaatatcttgagcattcgattccatggatagctgccaatgatgctgcttggcgtgcgttatgtcattattgggcttcacctccacctatacctacatctccatctaccgaacatcagacccctccagctaccttgccgacgcatgaacaagaggacgggttagactttgtcgaaaccctcttcaatagtggaggtattgaccatcactcttcactgtaa

SEQ ID NO: 37042 - DNA, 561 bp, Zea mays
  Peptide Sequence Number=SeqID_78821
gttgaagaggtggttgacatttcaaattgggagaaaaaagaagtttgtggcaagaaacggaagttacaaagctttagagatgaggagtactacataagttcagtacctcaaaaccatcatttggaagctgggctgtcggtgagggacaatgaaggatttgttgaaaataggttggatgctgctgttcttgatttagttgatgatgaagcttctggtatgcaagcgcagaaaactcgatatcactggatgaaggtgatcagtcaagccatgtttggtagtgaagggcgacgtccagagagtaagaacaaggtgacacagtatggactcgatatgactgagcaacaatatcttgagcattcgattccatggatagctgccaatgatgctgcttggcgtgcgttatgtcattattgggcttcacctccacctatacctacatctccatctaccgaacatcagacccctccagctaccttgccgacgcatgaacaagaggacgggttagactttgtcgaaaccctcttcaatagtggaggtattgaccatcactcttcactgtaa

SEQ ID NO: 37043 - DNA, 621 bp, Zea mays
  Peptide Sequence Number=SeqID_78822
atgaggagggcagcgacgccaaggtggaagggacaggtagcgctcgcggttgctgtgaaatctctgagcagggaggcaatcaccgtggtgggtccatcggtgttggtgcgggagcgcgtgccagggtcggagggcgtcctggatcggctctttcgtcggaaggttgcaggcggtgatgcgcacattcatggagcgggtctgcgtcaagaaccgaaggccttcgccgaggagggtgtggttgccggcagctacaagagttgtaatgactgttgtacacagaagtttggcagtcacacaaggtctcagttgttccctaagatggagtgcttttcagatttggatgttaatgttcacttagttgaagtctatgctggactcctgaggtttttgcctaagggcatgtggatctgttatttcacctgctacaagaaagaatggttacaaggttcaccgatattattagtgctagatggttctgacttccctactgctcttttccttctttttcagttcccgtctggggctaagtcattctgcatggacctgctcgagctcttcacgccccatggcaccgtcctctccgtcgaggtatatgctatgctagagcccgacgtaggataa

SEQ ID NO: 37044 - DNA, 429 bp, Zea mays
  Peptide Sequence Number=SeqID_78823
atgaggagggcagcgacgccaaggtggaagggacaggtagcgcttgcggttgctgtgaaatctctgagcagggaggcaatcaccgtggtgggtccatcggtgttggtgcgggagcgcgtgtcagggtcggagggcgtcctggatcggctctttcgttggaaggttgcaggaggtgatgcacacattcatggagcgggtctgcgtcaagaaccgaaggccttcgccgaggagggtgtggttgccggcagctacaagagttgtaatgactgttgtacacagaagtttggcagtcacacaaggtctcagttgttccctaagatggagtgcttttcagatttggatgttaaatattcaggatatgctggcctaataatgttgctctccctcgtgtatgcgaaaatcagatatgttgaagacaagaaaggttga

SEQ ID NO: 37045 - DNA, 1800 bp, Zea mays
  Peptide Sequence Number=SeqID_78824
atgtgcgcgtcgccgcctgcaaccttccgacgaaagagccgatctaggacgccatccgaccctggcacgcgctcccgcaccaacaccgatggacccgcagcagtccacaccacctcgcccaagccggactacccaccgcggcgactgcctccccactcagagatttcacagcaaccgcgagcgctgcctgtcccttccaccttggcgtcgctgccctccttgtcctcctcgggctcaacacgggcggggagcgagggtggcacggaggtggattggagccgcgaaggccatcgtcacgcgggcctcatcgacgtcctcgtcatcgggcttagcgtgggtgggaagcgggggcggcgcggaggcggatcggagccgtggagggttggggacttgcgggggagaaagaggaggcgtcgacgtgctagcagttgggagcattgggaggatggaattagggatgacaattggactggtgggtatggatacccatggggtttcgtaccccgtggacatggatacgggttggaaaactcacccgtggatcctatcgggtcgggtacccgaaatacgtcgggtaggttccctaaccggctaaccctaatttcacggccgcccacccgccagcgccctgcgcccagccggcaccctaagttcccacttcccagttcccacccgccagccgccaaccgcccagcccgctgccccgctcccgccccgagctgcgcggctgcgcccccaagctgcgcgcctgcgccgtccccgaggcccgagctgtgcctgcgtcgtccgtcgtggcccgagctgcgcctgcgccgtccccgaggcccgagctgcgcggctgcgcccccgagctgcgccgtccgtcggcccccactcgtcgttcctcccgtcgcgcggcgcagcgctcacgcaaggccctcggaccagcagatcgacggcttcaccgcggatcgaccagcagatcaacgccgcccttcagaccctcaggtactcagtagtcagtacttagttagaagcccaatgtcaactccacaagacagtagcagtcgtcgcagtggcataggagcagctcctgctgatgctggtagctctagagatcccactccatctgatgcagcaacccaagggacaaggaatgatgttgttgaaatagatgatgctgcacaggttgggtataaaaatgagcagaatgacacaactgcagtaaactatgaggaggcagcacttgtatcatcatctagtgattacaggatgcctttggtgtggatagacttggaaatgaccggtttggatataacaaaagatcggattttggagattgcttgtatcataacggatggcaaacttacaaaacaaatagagggtcctgacttagttataagccagagcaaagattgtttagataatatggatgaatggtgcaaaactcatcatgcagctagtggtttgacggaaagagtactgcagagtgaactttctgagcatgatgcagaggcaaaagttttagactttgttaggaagcacataaattcaggcactccattattagctgggaattctgtttatgtggattttctatttctgaagaagtacatgccacagcttgcagccgtcttctctcatgtaattgtcgatgtgagcagtataatggctttatgcatacgatggtaccccaaagaaaggaaacaaactccaagaaagcaaaaaacccacagggcaatggatgatattaaagaaagcatcgccgaactgaagtattacaagcacaacattttcaaaccacagaaatcaaagcggtag

SEQ ID NO: 37046 - DNA, 207 bp, Zea mays
  Peptide Sequence Number=SeqID_78825
atggggctgtttcctgttgctgccatggggaaacaggaaaggaggaacaatgggtgtcggccatgggagatgactggaaaaatctgggcgccattgttgggcttggcagccaagggagatgagaaggcagagaggggcttcggcttccatggggaagaagggggcgagctcacttgttgctgcattggagagggacgagcgggatag

SEQ ID NO: 37047 - DNA, 210 bp, Zea mays
  Peptide Sequence Number=SeqID_78826
atgcagggaggggcgtcacccatggggttgtttcctgttgctgccatggggaaacaggaaaggaggaacagtgggtgtcggccatgggagatgactggaaaaatctgggcgccattgttgggcttggcagccaagggagatgagaaggcagtgaggggcttcggcttccatggggaagaaggggggcgaccacggggcatcctgggatag

SEQ ID NO: 37048 - DNA, 243 bp, Zea mays
  Peptide Sequence Number=SeqID_78827
atggaagggatcgagtggggaaaaaagggggagatgcagggaggggcgtcacccatggggctgtttcctgttgctgccatggggaaacaggaaaggaggaacagtgggtgtcggccatgggagatgactggaaaaatctgggcgccattgttgggcttggcagccaagggagatgagaaggcagtgaggggcttcggcttccatggggaagaaggggggcgaccacagggcatcctgggatag

SEQ ID NO: 37049 - DNA, 306 bp, Zea mays
  Peptide Sequence Number=SeqID_78828
atgagtgcgacgaggcgaacctcgcagctgcgctacttcatccatggaagggatcaagtgggggaaaaacagggggagatgcagggaggggcgtcacccatggggctgtttcctgttgctgccatgaggaaacagaaaaggaggaacaatgggtgtcggccatgggagatgactggaaaaatctgggcgccattgttgggcttggcagccaagggagatgagaaggcagagaggggcttcggcttccatggggaagaagggggcgagctcacttgctgctgcattggagagggacgagcgggatag

SEQ ID NO: 37050 - DNA, 537 bp, Zea mays
  Peptide Sequence Number=SeqID_78829
atggggctgtttcctgttgctgccatggggaaacaggaaaggaggaacagtgggtgtcggccatgggagatgactggaaaaatctgggcgccattgttgggctgggcagccaaggaagatgagaaagcagagaggggcttcggcttccatggggaagaagggggcgaccacagggcaccatgggacagagagccgagcgccatggggcgagctctgcgcatcctgctgcaagggcgccgcgccatggccactgggagcggctggaaaaaatttatgggcgccatgaacagagaggaagcgctacgtgtgtgtgggagaggaaggggcgagctgctcgtggccatgggggggggaagaaagggcgccgtcgagggagcttcaacagtggagcgctcggctgctgggctgctcgccgtggacagcagatgcaggtgccatggtgatttgatgctgcgccatggagcaaggaggagagagcatgtagggaggtggaggcgccatgggagcttggagcttagctccttgctgctggcgtga

SEQ ID NO: 37051 - DNA, 495 bp, Zea mays
  Peptide Sequence Number=SeqID_78830
atggagctcgctgcacacgactatggagacaaggcgaatggcccggctatagaaaatgaactaggtcgtcgatgggagcggccatcgccggacctgggcgaggccataggcaactgggggagcgacggcctggagaacagcttgaaagagagggaagagcagtgggaggcggctggagctatgccggcgccatggagggaagcagagaggggcgccgagcacaggggacagaggtccggccaagaggagatcagggagggcgctcggctcgaggaaggggcgagctgctcgtggccatggggggagaagaaagggcgtcgtcgagggagcttcaacagtggagcgctcggctgctgggctgctcgccgtggacagcagagggaggcgccatggttggagcagaggtacccgcgcccatggagaagcctctgcgtgcaggggaacaacaggggaaaaaaagaagctcgaccatggatgctggaggtgctcggctag

SEQ ID NO: 37052 - DNA, 447 bp, Zea mays
  Peptide Sequence Number=SeqID_78831
atgcccccgtccctatctaccgcgcgcctccgcctcccaggaatctcgcgtcgtgcctcctccattttcgtcgttgtgcccgcgacaccacctcccaaggatcctcgcgctcgcgcctccacccacgacatcgtgcccccgctcctatcaatcacgcaagctccaccgtcgatgtcgcccccacccccatgcgccctagacccggatctcaccctcgtcctcagcacctccttccccgctcgctcgagatctagattttcgccgccggtagggactacatcttcggccccgacccctcatctcagcggtgctccacgctcgactgcaaccgtcgcgtacgcgcccgccactccacctcgcgatacccatccggctaggtcgtcgagctcgacggcaccacctaccggaagattgatccagcacaatgtcgaggagactagagactaa

SEQ ID NO: 37053 - DNA, 2445 bp, Zea mays
  Peptide Sequence Number=SeqID_78832
atggaagcagcagctgatgcctttccctgggcagcgcagtgcgcgggcatggccctcctcgcctcctcgctctgcgtggtggcgctggccctggtgcttctgctcctccgccgctggccgtggtgcagctgccacgtctgccgggcgtacctgacggggtcgtgggcgcgggacttcaccaacttgggcgactggtacgcgcacctcctccgcgagtcggccacgggcaccgtccacgtccacgtgctaggctgcaccgtcacggccaacccggccaacgtggagtacatgctcaagaccaacttcgacaacttccccaagggcaagaccttcgcggcgctcctcggggacctcctcggacgcggcatcttcaacgtggacggccacgcctggcgccaccagcgcaagatggccagcctggagctcggcagcgtcaccgtgcgctcctacgcgttcgggatcatcgcgcaggaggtggaggcccggctcctgccgttggtcgctagcgccgccgacgccggcgcggtggtcgacctgcaggacgtgttccgccgcttcgccttcgacaccatctgcaagatctccttcggcctcgacccgggctgcctggagccggagatgcccatgtccgagctcgccgacgcgctcgacaccgctacgcgcctcagcgccacgcgcggcgccgccgcggcgccgctgctgtggagggccaagcgcctgctcaacgtcggctcggagagggagctcagggcggctatcaaactcgtcgacgagctcgcggccgccgtcatccgggagcgccgcaagctgggcgtcgccgccagtggccacgacctcctgtcccgcttcatggcctcagccggggccgacgacgacgacaggtacctgcgcgacatcgtcgtcagcttcctcctcgcggggcgcgacaccgtgtcctccgcgctcacgacgctcttcatgctcctgtccgagaacccgggcgtggcggccgccatgcgcgccgaggccggcgacggtggcccggcgccgccgctcacctacgagcacctcaagcgcatgcactacacccacgcggtgctgtacgagaacatgcggctgttcccgccggtgcagttcgactccaagttctgcgtggggccagacgtgctccccgacggcacctacgtgccgggcggcacgcgcgtgacctaccacccctacgccatgggccgcatgccgcgcatctggggcgccgaccacggcgccttccgcccgggccgctggctcaccggcgccggcggctcgttcgtccccgagagcctgtacaagtacccggtgttccaggcgggccttcgcgtgtgcctcggcaaggagctcgccgtcaccgagatgaaggcggtcgcggtggccgtcgtgagggcgttcgacgtccacgtcgtcggggacagtggcagcgccgcctgcaagccgaagttcgtgtcggggctcaccgcgtccatcagcggcggggctcccgtttcaaccattcgatctcgcccgccagccgcccgatcccaccccgatcctgcccggaccccaaattcatcgcgaccctctttcttccttccccgatttcactgccgccagccgcccgatcccgccgcccaggccctgctcctgccccggaggttggaggcgcgagggcgatggtgctcctgcagcaccagctgcttcaacagcaacggcggcagctcgaggaggaggatgaggttcggcggggtggcggcgttcccggcagcgatgggccacggccaacaggtggactacggggaggacgccggcgggctcggggacagcgacgcgggcgggtcggagcccgaaccaccgctagagcggacgcgcggggggtccggcggcggcagcaagcggagccgcgctgctgaggtgcacaacccgcactccctctgctcccagccgctagaacgcccgcccgaaatccggattctctccgccgccactgccgccgctatggacgcctccttcaccttatcctactcccaccactgccccaacctcctatccgcgctcgatctgcccagcggtgaagcggggaccacatcttcggccctgacccgtcatcccagcggtgctccacgctcggctgcaaccgtcgcgcacgcgcccgccactccccgtctctgcgccgctcccccgtctccaccgttccccgtctccccctccaagcaagcacccgctccagatctccaactcgtgtgtcgattcccagtgagcgagacccctcgcgtgtgcaactgcaggagatggacgatgaagcgttggatcaaggagatggaggaggatggccgccacggccgccacttccaggttagcactgcacctccccctcccttccttccaccagattctatatctcttgatcccgacaccagttttcttggatctattagcgagttcatcgactcatga

SEQ ID NO: 37054 - DNA, 264 bp, Zea mays
  Peptide Sequence Number=SeqID_78833
atgcagattattgaaagaaagtgcgaggctcaaaagggtgctgggataaggaaaaaaacactcgataaactcaccgatcaacctggaaatctgataccaattgatgtagctgaggtgcccgatctttcggcgagtagagataattccgatttggcggaagttgacccttgcgatccgactacgacgagcaagcccgaggcgccaatgcaatcgctgaaccaactccctgtggttaccgaccttgctgatgcgagatcagcctga

SEQ ID NO: 37055 - DNA, 267 bp, Zea mays
  Peptide Sequence Number=SeqID_78834
atgcagattattgaaagaaagtgcgaggctcaaaagggtgctgggataaggacaaaaaaaacactcgataaactcaccgatcaacctggaaatctgataccaattgatgtagctgaggtgcccgatctttcggcgagtagagataattccgatttggcagaagatgacccttgcgatccgactacgacgagcaagcccgaggcgccaatgcaatcgctgaaccaactccctgtggttaccgaccttgctgatgcgagatcggcctga

SEQ ID NO: 37056 - DNA, 267 bp, Zea mays
  Peptide Sequence Number=SeqID_78835
atgcagattattgaaagaaggtgcgaggctcaaaagggtgctggtataaggagaaaaaaaacactcgataaactcaccgatcaacctggaaatctgataccaattgatgtagctgaggtgcccgatctttcggcgagtagagataattccgatttggcggaagatgacccttgcgatccgactacgacgagcaagcccgaggcgccaatgcaatcgctgaaccaactccctgtggttaccgaccttgctgatgcgagatcggcctga

SEQ ID NO: 37057 - DNA, 267 bp, Zea mays
  Peptide Sequence Number=SeqID_78836
atgcagattattgaaagaaggtgcgaggctcaaaagggtgctggtataaggagaaaaaaaacactcgataaactcaccgatcaacctggaaatctgataccaattgatgtagctgaggtgcccgatctttcggcgagtagagataattccgatttggcggaagatgacccttgcgatccgactacgacgagcaagcccaaggcgccaatgcaatcgctgaaccaactccctgtggttactgaccttgctgatgcgagatcggcctga

SEQ ID NO: 37058 - DNA, 264 bp, Zea mays
  Peptide Sequence Number=SeqID_78837
atgcagattattgaaagaaagtgcgaggctcaaaagggtactgggataaggaaaaaaacactcgataaactcaccgatcaacctggagctctgataccaattgatgtagctgaggtgcccgatctttcggcgagtagagataattccgatttggcggaagttgacccttgcgatccgactacgacgagcaagcccgaggcgccaatgcaatcgctgaaccaactccctgtggttaccgaccttgctgatgcgagatcggcctga

SEQ ID NO: 37059 - DNA, 264 bp, Zea mays
  Peptide Sequence Number=SeqID_78838
atgcagattattgaaagaaagtgcgaggctcaaaagggtgttgggataaggaaaaaaacactcgataaactcaccgatcaacctggaaatctgataccaattgatgtagctgaggtgcccgatatttcggcgagtagagataattccgatttggcggaagatgacccttgcaatccgactacgacgagcaagcccgaggcgccaatgcaatcgctgaaccaactccctgtggttaccgaccttgctgatgcgagatcggcctga

SEQ ID NO: 37060 - DNA, 264 bp, Zea mays
  Peptide Sequence Number=SeqID_78839
atgcagattattgaaagaaagtgcgaggctcaaaagggtgttgggataaggaaaaaaacactcgataaactcaccgatcaacctggaaatctgataccaattgatgtagctgaggtgcccgatctttcggcgagtagagataattccgatttggcggaagttgacccttgcgatccgactacgacgagcaagctcgaggcgccaatgcaatcgctgaaccaactccctgtggttaccgaccttgctgatgcgagatcggcctga

SEQ ID NO: 37061 - DNA, 264 bp, Zea mays
  Peptide Sequence Number=SeqID_78840
atgcagattattgaaagaaagtgcgaggctcaaaagggtgttgggataaggaaaaaaacactcgataaactcaccgatcaacctggaaatctgataccaattgatgtagctgaggtgcccgatctttcggcgagtagagataattccgatttggcggaagatgacccttgcgatccgactacgacgagcaagcccgaggcgccaatgcaatcgctgaaccaactccctgtggttaccgaccttgctgatgcgagatcggcctga

SEQ ID NO: 37062 - DNA, 264 bp, Zea mays
  Peptide Sequence Number=SeqID_78841
atgcagattattgaaagaaagtgcgaggctcaaaagggtgctgggataaggaaaaaaaaactcgataaactcaccgatcaacctggaaatctgataccaattgatgtagctgaggtgcccgatctttcggcgagtagagataattccgatttggcggaagatgacccttgcgatccgactacgacgagcaagcccgaggcgccaatgcaatcgctgaaccaactccctgtggttaccgaccttgctgatgcgagatcggcctga

SEQ ID NO: 37063 - DNA, 264 bp, Zea mays
  Peptide Sequence Number=SeqID_78842
atgcagattattgaaagaaagtgcgaggctcaaaagggtgctgggataaggaaaaaaacactcgataaactcaccgatcaacctggaaatctgataccaattgatgtagctgaggtgcccgatctttcggcgagtagagataattccgatttggcggaagttgacccttgcgatccgactacgacgagcaagcccgaggcgccaatgcaatcgctgaaccaactccctgtggttaccgaccttgctgatgcgagatcggcctga

SEQ ID NO: 37064 - DNA, 264 bp, Zea mays
  Peptide Sequence Number=SeqID_78843
atgcagattattgaaagaaagtgcgaggctcaaaagggtgctgggataaggaaaaaaacactcgataaactcaccgatcaacctggaaatctgataccaattgatgtagctgaggtgcccgatctttcggcgagtagagataattccgatttggcggaagttgacccttgcgatccgactacgacgagcaagcccgaggccccaatgcaatcgttgaaccaactccctgtggttaccgaccttgctgatgcgagatcggcctga

SEQ ID NO: 37065 - DNA, 549 bp, Zea mays
  Peptide Sequence Number=SeqID_78844
atgcccggaagcgaggggacgctcgtggcggtgatgccgcggtccccgtccccgacgccggcggggacctcggcgactgagacgcccgtgctgatattcctttacttccacaaggcgatccgcgcggagctcgaggcgctgcacggcgccgtcatgctcctggccaccgagcgcaccggcgatgtcgcggcgctcgctgagcgctgccgctttttcttcagcatctacaaacaccactgcgatgtcgaggacgcgttcctgtcgccgccaccccagcaggcacagccgaggaggagcaggacccaacaagcccgccgggctggaggggcgctagggttggacggaatcgacgaggacggaggcagcagatttggctgctgttcgtcggacgtcaaggaccccagcagggtgtcacaactgttggacgccgacatcgacgcggaggaggatgcagacgcggacgatagcggcgtcgataaggacgtcgagcatgggtgcgagagcctgataacctcccatgccgccgtaggtggctgtttattcctgtag

SEQ ID NO: 37066 - DNA, 630 bp, Zea mays
  Peptide Sequence Number=SeqID_78845
atgccgcggtccccgtccccgacgccggcggggacctcggcgactgagacgcccgtgctgatattcctttacttccacaaggcgatccgcgcggagctcgaggcgctgcacggcgccgtcatgctcctggccaccgagcgcaccggcgatgtcgcggcgctcgccgagcgctgccgctttttcttcagcatctacaaacaccactgcgatgccgaggacgcggaaacatgtacgaccaaggtgctgataccctatcttccgtaccatgtgcgtgcttgctcacttgtgaagtatcttggtcaggaggacttaggagcacgctttttcccttcaacatcacttgtgctcatgtcaacagtattttacgagcaacaacatatttactgccaccggtgtctgccaagcatgatgcccttggctcactcaggcgtggccgctggccaggcgcagagggagatgggcggtgctctctgcctccgtcgccacttcgccacgcccccaacaatatgggagtcagagctagggtttcggctaggaggccgcggcgggggccgagctccctggggaagtcgtgaggcgagaaacggatgcaaacagagatcaaagggtgaaggtttagggtttgattga

SEQ ID NO: 37067 - DNA, 759 bp, Zea mays
  Peptide Sequence Number=SeqID_78846
atgtcgtggagctcctcccccgtccgatgcgcactctctccagtcctccaccgacgcccaccctcccacgatccccgcatcgctctccccctcgcccaccagccattcccgtcctcgatgcgctctgcaacttccaccctcctcgccgcgacgagctcggccggccgagctccgcgccaacctccaccgactgactgccacgggctcaagctgtgcaccgtccgacttccacgggctcaagctgtgcagcgcgtcctccacggaaccgccctcgccaccgctcctctccctctcctctttatcaccgcacctaatgtctcctcccccggtgcacctcgtgcctgctccctcgagcacgcctcccaatgcaccggcgtgccgtggctgcagaggtgggcgccctccaacccctcccgtcccgccccagctccaaccccgtgggccaacctatcgacgcactggcgcgcaatcgcgcggccccagcgccgacgtgttgtgtctgcagaggtgagcatctcccgccccatcccttccccaaccacatccatcaatcaaaccctaaaccttcaccctttgatctctgtttgcatccgtttctcgccacacgacttccccagggagctcggccccccgccgcggcctcctagccgaaaccctagctctgactcccatattgttgggggcgtggcgaagtggcgacggaggcagagagcaccgcccatctccctctgcgcctggccagcggccacgcctgagtga

SEQ ID NO: 37068 - DNA, 480 bp, Zea mays
  Peptide Sequence Number=SeqID_78847
atggctgccagcggccatgagcagagagaaaaggggaaaaagaatggagcagggaggggcaccgaaatggacatccccagagacaagggccggccagggaacacctgcgcgtccaccatggagctcgacgaccatgggaggtccctgcgcacaagcctgaagggggcgcgcccatgggaggttggagctgctgctgggcgccggccaggagaagcttctgcgcagcgtccaaagcaggcgaggtggagctcgcgcccatggaaggagaagggcaggggcgccggctgccctgcgcgcgacgaagaagaaaccggcagagagcttcgcggcaagcagcagctaggggaaatggaggtccgagtgggggggattgctggcgagcccctagcagggaggtgggctcggccaggggagatggcgcccatgccttggctggagatgcagccgccgtgggaagaaccagagaggaggactgcgtag

SEQ ID NO: 37069 - DNA, 231 bp, Zea mays
  Peptide Sequence Number=SeqID_78848
atggagcaggggccagcgccatggctgccagcggccatgagcagagagaaaaggggaaaaagaatggagcagggaggggcgccaaaatggacatccccagagacgagggccggccagggaacacctgcgcgcccaccatggttggggaaggagtttagggaggcgctggagggaagggacgccatggacaggagctcgacggccatgggaggtccctgcgcacaagcctga

SEQ ID NO: 37070 - DNA, 258 bp, Zea mays
  Peptide Sequence Number=SeqID_78849
cgcgcggcttgctgcgcatttgtcgaacagccggcgggcaccacggagaaccgcgaggaggggttcaactcgaccaccacaccggctgccatgggtgagcagaggcaaggggctagcgccatggctgccagcggccatgagcagagagaaaaggggaaaaagaatggagcagggaggggcaccgaaatggacatccccagagacgagggccggccagggaacacctgcgcgtccaccatggttggggaaggagtttag

SEQ ID NO: 37071 - DNA, 375 bp, Zea mays
  Peptide Sequence Number=SeqID_78850
atggcagccggtgtggtggtcgagttgaacccctcctcgcggttctccgtggtgcccgccggctgttcggcaaatgtgcagcaagctgcgcgctgcagcagcagccatgagatcccgtccgtgtcgccagcgtcgacccgatctgcgcagcggtgccggtccaccgcagcagccccatgctgcgccgttgatctgcgcagttcgactgtctccgcgtctcgcttcgccgaatctgcgcagcgccgacgtgccaacgtgggaacccgtggttctttggaggacatggttgccggagtgacttggccgtccatcttgccactgggtgggactatcgagtgggaccccgcctcggctgagaaggagcatgaggagtga

SEQ ID NO: 37072 - DNA, 321 bp, Zea mays
  Peptide Sequence Number=SeqID_78851
atggcacgtcggcactgcgcagattcggcgaagcgagacgcggagacagtcgaactgcgcagatcaacggcgcagcatggggctgctgcggtggaccggcaccgctgcgcagatcgggtcgacgctggcgacacggacgggatctcatggctgctgctgcagcgcgcagcttgctgcgcatttgccgaacagccggcgggcaccacggagaaccgcgaggaggggttcaactcgaccaccacaccggctgccatgggtgagcagaggcaaggtacggacttagggctgctgctgcgcagtagggagaagatctgggcgtag

SEQ ID NO: 37073 - DNA, 321 bp, Zea mays
  Peptide Sequence Number=SeqID_78852
atgtcgaagcggcagggtcgacgacatcggcggcaagagaagaacacgagcagtcgcgtgaagacgcttccgaaaaaccttattcgccctctcccggtacaggatctcaaaggcgatgggttccggagacctgctctcctggtcacagacgcacttaaggctgaccagcagtccagcagagggcgcattagaccgcacatgctcattttgaaagtccgcgtccaactatttatctttcaatcgagcatggatgaggtagctgctagtaatagcctaaggactatactagttcaggcaacacatacgccctgtgtaaaatga

SEQ ID NO: 37074 - DNA, 348 bp, Zea mays
  Peptide Sequence Number=SeqID_78853
atggcgcgggccagaattagcagggtcgacgacgtcgaagcagcggggttgatgatcagcggaatcagcgagcagtcgcgtgaggacgcttcccaaaaaccttattcgccctctcccggtacaggatctcgaaggcgaagggttccggagacctgctctcccgatcgcaaatccacgtcgacgatcgggatgaagagaactgaaggcggctcagatgtgaagagaggcgaaagcgaaaactgggatgatttggatgctgactgccaggcgccttttataggaccgagtccgcggacagatagctatcttcgatctgatccgcccgcgaaaatctcgcgatcagtttag

SEQ ID NO: 37075 - DNA, 339 bp, Zea mays
  Peptide Sequence Number=SeqID_78854
atggcgaaggctagaatcaacagggtcggtgatgtcgaagcagcggggttgatgatcagcggaatcagcgagcagtcacatggccagagtacgctcgactgcgaggagggggccattgaagaaggtgcacctgctgttgaagctgaacaagctgatgttgaggaagaaaatgctgatgaagaagaagaagattatagcattctgatcccatcaaaacccagccacttggatttcgaaaaatctactgtgtatgaagctgatatggccatgatgataaaactgggctacttcagagaagctgagaaccggggaagaaaccactccaacaccgaaggatga

SEQ ID NO: 37076 - DNA, 377 bp, Zea mays
  Peptide Sequence Number=SeqID_78855
atgaggaaactcgagctcgagccatggggaagggaagggagctcgctggggcatctcctgcgccatgggaggaagcaggacgccatggctgggggggcgcgtggagcagggagcctgctgctcgcctacagcaagggcgccgagttgggctggaagcagccgaggagggagctcgcccgcgccgtgaaggagagctcggcggcatgggtgcctggaggaaggagctcgccgcagggaaggctggcgccatgggagcagctcggcagagagcttctctgcgccatgaacaggagagaagatggctgtgcgtgtgggagaggaggaagaagagagtggcggctggaaatttttgaggggtgggagtggaaaatttccaa

SEQ ID NO: 37077 - DNA, 1004 bp, Zea mays
  Peptide Sequence Number=SeqID_78856
atgatgttggggctgcgcaaaaaaaacagcaaacactcgacgagcgtcgatggcgtgctgttcactgcgcaaaaacagcaaacacccgacgagcgtcgatggcgtgctgttcactgcgcagcaaaaagcagcgagccacgcggagacgttggggctgctgcgcattttgtcgagcgcctagcaaggatcaatggcgcaggcgcagcagcacacacacaggaaggaaaccgagtcacaaggcatgggagggaatgctccgcggcatctgctgcagcgcgccatgggagagggctgcgcctgcgaggagaggcggggcgagctgctgctgtgtcccgccatgagggggagatggagctcagctccctgtttgctgcacgccgtggacagcagggggaggaagaagacccggctgctgttgcgcgagggagaacgagtaagggaaaagaaggggcgtcggcatgggggatttttctgggcgtccatgggagggagctgctgcgtcgccatggacagggaggcagcgccatgaggaaactcgagctcgagccatgggaaagggaagggagctcgctggggcatctcctgcgccatgggaggaagcaggacgccatggctgggggggcgcgtggagcagggagcctgctgctcgccttcagcaagggcgccgagttgggctggaagcagccgaggagggagctcgcccgcgccgtgaaggagagctcggcggcaagggtgcctggaggaaggagctcgccgcagggaaggctggcgccatgggagcagctcggcagagagcttctctgcgccatgagcaggagagaagagggaaccggctgggagaaatggcgccgtggaggaacgcaggcagggcgtcggggcctgggcgtccatggctgcaagccttgctccctgcttgctgccgtgggagccagggaggaagaaggcaaggggatgcgtgcgttggctgggaggaggagagggagaaatgttgtggcggctagggg

SEQ ID NO: 37078 - DNA, 788 bp, Zea mays
  Peptide Sequence Number=SeqID_78857
gaaggaaaccgagtcacaaggcatggagggaatgctccgcggcatctgctgcagcgcgccatgggagagggctgcgcctgcgaggagaggcggggcgagctgctgctgtgtcccgccatgagggggagatggagctcagctccctgtttgctgcacgccgtggacagcagggggaggaagaagacccggctgctgttgcgcgagggagaacgagtaagggaaaagaaggggcgtcggcatgggggatttttctgggcgtccatgggagggagctgctgcgtcgccatggacagggaggcagcgccatgaggaaactcgagctcgagccatgggaaagggaagggagctcgctggggcatctcctgcgccatgggaggaagcaggacgccatggctgggggggcgcgtggagcagagagcctgctgctcgccttcagcaagggcgccgagttgggctggaagcagccgaggagggagctcgcccgcgccgtgaaggagagctcggcggcaagggtgcctggaggaaggagctcgccgcagggaaggctggcgccatgggagcagctcggcagagagcttctctgcgccatgagcaggagagaagagggaaccggctgggagaaatggcgccgtggaggaacgcaggcagggcgtcggggcctgggcgtccatggctgcaagccttgctccctgcttgctgccgtgggagccagggaggaagaaggcagggggatgcgtgcgttggctgggaggaggagagggagaaatgttgtggcggctagggggtag

SEQ ID NO: 37079 - DNA, 264 bp, Zea mays
  Peptide Sequence Number=SeqID_78858
atggccacacaacccccatttttgtcgaaaattgccatgaatgaccattttcaaaaataccaaaggctaacacattcggatttttgcccaagaaatggtctccaccagaaatccaagaatgtgatctatggcaaggaaacaaatgctaacacctacgagttttttgaccaagaaatggtcttcaccttatttttcaagaatgtgatctatggcaaggaaacctatgtgggggtgaggtttatgagccctctagcccatgaataa

SEQ ID NO: 37080 - DNA, 243 bp, Zea mays
  Peptide Sequence Number=SeqID_78859
atgggtctccaccagaaatcaaagaatgtgatctatgggcaaggaaacatatgtgggggtgaggtgtacgagcctctggtcgatgataaatggccacacaacccccattttaccgaaaatagccatgaacgaccattttcaaataataccggaaaggctaacaccaatagatttttgaccaagaaatggtctccactagaaatccaagaatgtgaactatggcaagaaaacatatgtgggtga

SEQ ID NO: 37081 - DNA, 579 bp, Zea mays
  Peptide Sequence Number=SeqID_78860
atggcggggcgcggccttcgaagctcaacgaggtgggcacgccttccattattcgagcacggacgtgggggcgaggattgcggtgcgtcgcgggggaggatggcggtcgccggcggggatcacggtcggggggcgaggaaaggggatcacggaggcaggggtgggcgtgaagggcagaaccgtgcgccgtggtggaggttgcgcggccaaggagaggcgctggcaatagatactgggccgcacgttgaagaggaggggcgctgggctgctgggccgcacgtcgaattgctgggctgcacaaacgctacacataggcgctgggtagagagctctttaagggttactagttgggtgcccgtgctttgctacggaattttgaacgtgttctcgtcgttagccacttgctatagattctggaacaaaaacaagacgaggagacaaaagtttcaaaaatgtgatattgtgggcgatgagttttttttggattttagtggaaacttccaccagtgtacaaaggatgatattaagtgcccgtttaggagggcttctgagtggctccggctctggcttcttgcctga

SEQ ID NO: 37082 - DNA, 945 bp, Zea mays
  Peptide Sequence Number=SeqID_78861
atggcccctagtggcttgctcttcgcctccttgactctagatccattgctacctctactctacggcaacgatgggactcgagctatcgagcacgacctcctcaagaaatttctggaagcaccactccgacaggcaccagttcatcatgtccgtcgcgtcccccctcctactccacctagtgactggtgcagcaacatcatcggcaaccgctggttgaggagtttggtttggtggaagcggagaaaaagtggaagggaatatgagaataagagaaggtcgcatagaggtgcctcacggcgacgtagacctcagtgcacggcgcggtgcctgagctcgcgcgcgttgaccttggcagccgtggcagtccgtgctgtcgtgaagaggcagtcaccatcggggacggttgcgcacggggaggctgacgcacggagtgaacgcgggggcagctcgcgtgggggatgtggggaggcagcggatgcagacggacaagcgagatctaggttcctcagaagacgatgtcgtggagctgtctgtggatctgcggtgcacgcgggggtggggacggttgaggtcgccgaccggtggggtggtggagtccgccggtgggggaggaggaggccgttgtggttgtgccgcgcgttgaagagagggggagttgcaggtcgctggagttggaggatgttgttctgccgtggtggaggttgcgcggccgaggcaatggatactgggccgcacgttgaagaggaggggcgctgggctgctgggccgcacgtcgaaattgctgggctgcactggtatgggatttgtttgattagtaccataccggtcattgaaaagagacggaacgtggcttataagcgttgttgtggatcatctgttgctcattctaacacctccggctctagtgccacactgaggtacgtctttttgcgcggggctgcttag

SEQ ID NO: 37083 - DNA, 324 bp, Zea mays
  Peptide Sequence Number=SeqID_78862
atggcccctagtggcttgctcttcgcctccttgactctagatccattgctacctctactctacggcaacgatgggactcgagctatcgagcacgacctcctcaagaaatttctggaagcaccactccgacaggcaccagttcatcatgtccgtcgcgtcccccctcctactccacctagtgactggtgcagcaacatcatcggcaaccgctggttgagggtgcggtggggcctagcaggggttggggatctcctccacggaaaagacgcgctccatgccaaaacgagtcggatcaccatgatgctgggcagaattctcctgtga

SEQ ID NO: 37084 - DNA, 270 bp, Zea mays
  Peptide Sequence Number=SeqID_78863
atgagcaagaacacaagagacacaagatttatcccgaggttcggtcacaccaccaaggtgccctacttcctcgttgaggcgcccacaaagagccgggtctctttcaaccctaatcctccctttgccgaccacaaaggtcaagcccacacaataatctttgctcaaaccgagcgggtcaggcagactgtctgccagtctgactgtcagactgactggcagactgacctgcagactggtcaagttgaccaagaccggttgaaccgcccctaa

SEQ ID NO: 37085 - DNA, 303 bp, Zea mays
  Peptide Sequence Number=SeqID_78864
atggtgagagaacgaagaacacaaacaaacacaatgagcaagaacacaagagacacaagatttatcccgaggttcggtcacaccaccaaggtgccctacttcctcgttgaggcgcccacaaagagccgggtctctttcaaccctaatcctccctttgccaaccacagaggtcaagcccacacaataatctttgctcaaacgagcggtctcgaagatggattgaaagggaaaaaggtggacttggaccatgaaagacttccactgcactccgatgagaggattttagtgaggcaatggggttaa

SEQ ID NO: 37086 - DNA, 534 bp, Zea mays
  Peptide Sequence Number=SeqID_78865
atgggccgtgggccacgtggaagcatcgggtctccgcctgagcggggagcagaagcatacacggtatggtccggacacgtgtcggctccggacccctgcctggccttgactaaggcctcggaattatttgtcccacaatcccgggaccctgccgtgagtggcccagaccccacacagaggggtccgagacccgtcccaagggttcagtttgtacccgtggaggctctggaccttgcccggaggtccgggttcgaagtagtagatctgagaagagcacttctcaaaatccacacaccaaaaagatataaacaaatcttccacgcaatggtgagagaacgaagaacacaaacaaacacaatgagcaagaacacaagagacacaagatttatcccgaggttcggtcacaccaccaaggtgccctacttcctcgttgaggcgcccacaaagagccgggtctctttcaaccctaatcctccctttgccggccacagaggtcaagcccacacaataatctttgctcaaacgagcgggtaa

SEQ ID NO: 37087 - DNA, 1371 bp, Zea mays
  Peptide Sequence Number=SeqID_78866
atggatcgtttccaccagatggactggtgccagcttattttcaatgatttatgccaagctgccaagaagtggcatactaggagcgttacgaacgtttctacaaccatctatggatgttccatcgttattcttctgtattatttggatcatcttcatgactcagcggcaccccagaacaaacgtggaacaccacgaatcaaatactttgataggaatattattcaagccctgacaagagctgacaagggcaagatacgcaaaggagaagaagcatttggacattgttcgcataagaccaggaccaacacttttgatgtacctcgtcctgatccatctggacagcactcaattcacatcgaactcccgctcatcagagatttgatatcaagcaagctgaatcagcttccatcctgccaccgtctgggtttcatagagaagctgtcacattttgattcggaggttggtaaggcgtgttcagttattaaacagactcttcaacagattgttgagaaacaatacaatctatctgatgtttttggcgagttaattgatgaggtccttcgtgctgaggcgggggacaacgaagatgcttatgatgtgcagaaaacaacttcaaaatcagatgatattcttccccagacagctgaaaattgccccgatgaagctgatattgatccactggttcatacaaatataacgaaacagaacaaaacacctacaacctcagtgggtaaacatggtgacggtggcaagaacatgccgaccaatacaaacgtcactcctaaagcaacaccacatatggatcctgacgcgccgatatttgatgcgactccgcaaatcaagtctactggcggcgtacaacaagcggcagaaacagacttgcccgacagtggtccatgctttgatcagactccatctgaacatgtttctgttgaaaccgatccagctacaaacactccacaggttggccaggcttctcttgattcggagatgcaaactgtgttagctctacgcgaatatttgtgtggtctgcaatctgacaccggcaggaccataatagattatggtgaatattcagcgacatgttctgatatatatgaatcttttgctgatgggaagtgtctcgacaatgtattcatgcagtgtttcatccaatgtgttattgatgatgcaaaaaatcaacagacttccatgagttcgaacagtttgattcttgatgttaatgttgggtcactactcaactttgaggaacaggaaccacacagtcgcaaccctcaaccttttgatgaatctgtattccacacacttctaaacaattcattgtctgagacagatgaattggaccaatgcaaagcgatcatggtccccatg

SEQ ID NO: 37088 - DNA, 1020 bp, Zea mays
  Peptide Sequence Number=SeqID_78867
atgaagtggacggttggagtggtatttatagccctcaaccacccatatagccgttggggcgtatctgccagaaattgcactggcggacggtccgcggctagggcccggacgttcctggtcgaagtcaactcggtgtcgcggactgtccgccgcaagggcccggacggtccgcgcatagtctgtttttccaaaaagcttctcctgtccggaataatctacggaacatcatacatgaagaacgtagaacgacctccatctaatctaaaacggattataattcagtctactcaagagtgctttagtgttgacataccccgtgttccagcggaatctgttagacacgaaacaaggcaggctgctgatgaggacgatgattttatgccattatcgaagaagcgtaacttcgatgacagtcctccaaaagtcttgaagaagatagttacaaagcggaggaaacagaggcttaatgtgagatgcaacccccaagacgtattagtaagcatccagatattaaatgatagacaacgccaagctattgcacggagaggattttccagtattcttgatatgagacttgacgcactcggcagtagatcacatctagcttggctgatggaaaagcttgaccataatgacatgacaattcgagccggcccagggaaggagctcaaaattacaaaggatacggtgcaccttattttggggttaccaaatgctagtggaggaacgacattgggcatcgatgaagctgttgctgccaacaatttaagggctgaacttggtttatcgaaagaagattttggggttgcagctcttcaagatcgtctgagaaaagggtctgacgatgatctaagcatcagatcctttttcctgatactgttcaataggttgttgttccctactgccagctggggaataaccaaccatgtggttcttttaactgaggagatggatcgtttccaccagatggactggtgccagcttattttcaatgatttatgccaagctgccaagaagtga

SEQ ID NO: 37089 - DNA, 354 bp, Zea mays
  Peptide Sequence Number=SeqID_78868
atgtggcgcgagctcgagcacccccgcaccgacgccgcccaccccttcgaccgcgagccttacccggacaacgccgaccgtgaccgcgagcgcgtgcgccagatcaaggggatgacagagaaggggatgacgggggcgcgggcagtagcacggtgtcgcccatgtgcacgacgagggggtacactggtatcgcggctgtcgtggcggggatggcggcgggcgggcgggcagttcacggagatggagccgcggcgggtgattcgcgggtggaggcgcagcatgcgatttgcgggtggaggcgggttccgcggtgggggaggcacgggattcgtggcgggggaggcgcgggcgtga

SEQ ID NO: 37090 - DNA, 2283 bp, Zea mays
  Peptide Sequence Number=SeqID_78869
atggacgagtaccaccaccaccaccagcgcatgggcgccgccgccgacttccgccgcgacctcgaggacctcgtctgcgaccacctcggcggctgcttctccccggccccgtcctcctcctcctcctgctccgccgcggcgggcggaggcgccgcggaccatgagcccgacggcgaggccgagtcgtcggcggtgcgcaggcggaggcgggagtcgcgcctcctcagccgctgggtcgcgcgccaggctgaggaggtgctctcctccatggagcgcgaggtcgagcgccgcaaccgcgaggccgagctcctcgcgctcgcgcgcctccacccggtctccaccctcgacccctcctccttcctcctctcctcgaccgccgcgccgccgccgccgcgcccgcaggcgccctccctcaacgcgccctcctcgctcctgcagatgtggcgcgagctcgagcacccccgcgccgacgccgcccaccccttcgaccgcgagccttccccggacaacgccgaccgtgaccgcgagcgcgtgcgccagatcgcgcgacgcctcacggacaccgccgccgccgctgccaccgccaccgccggtggggagtggctcggcgagacggagcggcagagggtcaggctcgtaagggagtgggtacagatggcgagccagccgcgcgactcccgtgcgggcacgcgcagggacgagcctgcagccgggaccgacagggacaggcgaggggagctggagcctcctcggctacgaggccggcaggcgcgattggatgtcatcagccgtatggccagggagcgtcagcgcgagctgcagggcatatcagggtaccatgtggtgtcggagtttcctcgccgcagccgcaaccgcatccagggactgcttaggggaaggttcttaaggaatggggcgcttgaagaggagcgaccaccatctgtggcagcgagggagcttgggcagttgaggcagagccatcgtatgcccgccttgagaccagagagtattgcaagtagtcaagatgttagccaatctgatgcttctgtggttgagagtgttagattactagataacgatgaatctcagcaaggggctgaggtggcttttactgatagtgaggataccacccaaactgtgctggagaatgtggatttacaagaaatgggtgcagatggtgctgaggcacactcaccaagtatacctatggatgacatggttatgatgcaagagtctctaactcaaggtgacaacatgcagcaagatgggacagaagatgacacgggattctggcagacatctttggatgccagtcttaataggtggcccagtgagattggtggaggtgccgacagaacttgggaagataatgcagaagacttacacagtgaaaccatggaggaggatgacagggagcatggtcatctacaagaagagcatgatggatggcatgataacgagtctcatggtaccatggagaactggcaagatgattaccaagattccgcacttgatacaggccccattcctaggaacgaaaataggtttatcccacctgacgatgacaatgtgtacagcatggaacttagagaattacttagcaggcgaagtgtgtccaatcttcttagtaatggttttggtgaaagtttggagcgattaataaggtcatatgttcaacagcgtggtcatggtcccctcaactggaatcttgatgcagccatgcacccttcaaatggaccaaatgcaaatcaggaacaagaacggaaccctgaaactcagcaattccaggctcctgtcaatagacctgcccttgttatccctcctccacctttgccaccacgacaaccattatggcacagagaactgcgtcataacaactggaacagcagacacagggaatgggatgctattaatgatttaagagctgacatgggtagacttcagcaagggatgagcagcatgcagaggatgctggaagcgtgcatggacatgcagctggaattgcagcgttctgtgagacaagaagtgtcagctgccttgaatcggtttgcaggacctgaaggattgtcgatggatctgtgtgacgatggatcaaaatggaatcaggtgaggacaggaacctgctgcgtatgctgtgattcacagattgattctctactgtacaggtgtgggcacatgtgtacttgctcgaaatgtgcaaatgagctggtgcgcagcggcggcaagtgcccgctctgccgggctcccatcgtggaggtggtccgcgcatactcggtaatgtaa

SEQ ID NO: 37091 - DNA, 2202 bp, Zea mays
  Peptide Sequence Number=SeqID_78870
atggacgagtaccaccaccaccaccagcgcatgggcgccgccgccgacttccgccgcgacctcgaggacctcgtctgcgaccacctcggcggctgcttctccccggccccgtcctcctcctcctcctgctccgccgcggcgggcggaggcgccgcggaccatgagcccgacggcgaggccgagtcgtcggcggtgcgcaggcggaggcgggagtcgcgcctcctcagccgctgggtcgcgcgccaggctgaggagatgtggcgcgagctcgagcacccccgcgccgacgccgcccaccccttcgaccgcgagccttccccggacaacgccgaccgtgaccgcgagcgcgtgcgccagatcgcgcgacgcctcacggacaccgccgccgccgctgccaccgccaccgccggtggggagtggctcggcgagacggagcggcagagggtcaggctcgtaagggagtgggtacagatggcgagccagccgcgcgactcccgtgcgggcacgcgcagggacgagcctgcagccgggaccgacagggacaggcgaggggagctggagcctcctcggctacgaggccggcaggcgcgattggatgtcatcagccgtatggccagggagcgtcagcgcgagctgcagggcatatcagggtaccatgtggtgtcggagtttcctcgccgcagccgcaaccgcatccagggactgcttaggggaaggttcttaaggaatggggcgcttgaagaggagcgaccaccatctgtggcagcgagggagcttgggcagttgaggcagagccatcgtatgcccgccttgagaccagagagtattgcaagtagtcaagatgttagccaatctgatgcttctgtggttgagagtgttagattactagataacgatgaatctcagcaaggggctgaggtggcttttactgatagtgaggataccacccaaactgtgctggagaatgtggatttacaagaaatgggtgcagatggtgctgaggcacactcaccaagtatacctatggatgacatggttatgatgcaagagtctctaactcaaggtgacaacatgcagcaagatgggacagaagatgacacgggattctggcagacatctttggatgccagtcttaataggtggcccagtgagattggtggaggtgccgacagaacttgggaagataatgcagaagacttacacagtgaaaccatggaggaggatgacagggagcatggtcatctacaagaagagcatgatggatggcatgataacgagtctcatggtaccatggagaactggcaagatgattaccaagattccgcacttgatacaggccccattcctaggaacgaaaataggtttatcccacctgacgatgacaatgtgtacagcatggaacttagagaattacttagcaggcgaagtgtgtccaatcttcttagtaatggttttggtgaaagtttggagcgattaataaggtcatatgttcaacagcgtggtcatggtcccctcaactggaatcttgatgcagccatgcacccttcaaatggaccaaatgcaaatcaggaacaagaacggaaccctgaaactcagcaattccaggctcctgtcaatagacctgcccttgttatccctcctccacctttgccaccacgacaaccattatggcacagagaactgcgtcataacaactggaacagcagacacagggaatgggatgctattaatgatttaagagctgacatgggtagacttcagcaagggatgagcagcatgcagaggatgctggaagcgtgcatggacatgcagctggaattgcagcgttctgtgagacaagaagtgtcagctgccttgaatcggtttgcaggacctgaaggattgtcgatggatctgtgtgacgatggatcaaaatggaatcaggtgaggacaggaacctgctgcgtatgctgtgattcacagattgattctctactgtacaggtgtgggcacatgtgtacttgctcgaaatgtgcaaatgagctggtgcgcagcggcggcaagtgcccgctctgccgggctcccatcgtggaggtggtccgcgcatactcggtaatgagcaacaggcatggtctgcaagatgacgtgcgacgcgtttgcaatcgcaaccatgctggggctgggccaaacagacgacaaccccataaacaggaataccagtga

SEQ ID NO: 37092 - DNA, 390 bp, Zea mays
  Peptide Sequence Number=SeqID_78871
atgtcatcccttaagcctggtccatattctagaaaaactcccaaaatactcttgtcctatattctgcctataactctcatgttcatactaagtcagacgattcattcgtcactattctcaccaacagtgaacttcactgtgctacaccacatacacccagctaccctctccctctccacacacactcaacaccctcagccaaggaaaacaccccacccactcagttactccgctctgccggctacacgcatagtgtcgcttcgcctccagtccaccctcctgttatcggagagttcgtgtcgtctcgtggaggccagatctgcaagtctacgccaggcggtggagccagaagccagttccgcgagctctccttcccccttcgtcggataa

SEQ ID NO: 37093 - DNA, 177 bp, Zea mays
  Peptide Sequence Number=SeqID_78872
atgtcgaaaccagacaaaacatttcccctccttatcctcccggtgctccccaaccttcataaccctgagggggaaggagagctcgtggaactagcttctggctccaccgcctggcgtagacttgcagatctggcctccgcaagacgacacgaacgctctgataactatgcaacatga

SEQ ID NO: 37094 - DNA, 1179 bp, Zea mays
  Peptide Sequence Number=SeqID_78873
atgaacagacaccagcactcaaggtgccattacaaatggaactccagttccacccccgcaggtacgaacaaccccccacattggagggcctgcggggcaacgaaaccccaggtggctcaccgccgcctgaagagcagcagcgacaacgacctccgctccgagcggccgaacaatagcagcgatgacctcagggcggatgttgctgccaaaaggccctcgcccacgtccccactcgaggggcgaggacaagcagaaggctgtagagttggaggtcagtccgcgggcggcaccgactatctcgtcggtggagaaagctcttccggctgccccagcaggagcccggctcgcttctccccaccatcgaactggtggtcaccgtcttgggtgaccaccagcgaggggatgcagccgggctgcttgatgaaaatccttgaagccgaacgatggctgaaagccgtcgcggaccgagtcttctccaacacgctccaaggtcctccccctacgacatgggggctgggccccacgcgtcatgcaagctggcccaaggctgaagaagccaaaccgccgcgtgcggtgcacataactgcccagcggttacaagcgcttctcctctttcgccgagaccagcgggtgaaagagcggaccgccatgcaggcggcatgcaaccgcaccaagggggcgcaccctttcgacttcgacgcgtccagcatggaggcccaggcccacacgtcatgtaaccggcgcgccggttactccgtgcgagaaactgcaccgccactcgcaccagtaccacgccttctcgactgcggaatcggtgccgcgactcgaggcgaccctgcgcatggcccgatagtgccaaccgagcacatcggccatgggtcagtcagccgcgggagaaggcgcgacggtcgatacggccagaaatgggccggcagtaatggcggtggcaggcgggcggaagaagcagtcaagtcgtcagcaagctcacgtcccctcctgggacagcgagagagccctttcccacggcgtgaagacgacgcgcccgtgttccgttcctcgaacggctcgcgcacgcgcaacggctgccccgcgaaccactcgtcccatcgcattaactctacggcaggacaggcggcacctttggcaggcgaagcaggcgacgcttcacctatgccataa

SEQ ID NO: 37095 - DNA, 1179 bp, Zea mays
  Peptide Sequence Number=SeqID_78874
atgaacagacaccagcactcaaggtgccattacaaatggaactccagttccacccccgcaggtacgaacaaccccccacattggagggcctgcggggcaacgaaaccccaggtggctcaccgccgcctgaagagcagcagcgacaacgacctccgctccgagcggccgaacaatagcagcgatgacctcagggcggatgttgctgccaaaaggccctcgcccacgtccccactcgaggggcgaggacaagcagaaggctgtagagttggaggtcagtccgcgggcggcaccgactatctcgtcggtggagaaagctcttccggctgccccagcaggagcccggctcgcttctccccaccatcgaactggtggtcaccgtcttgggtgaccaccagcgaggggatgcagccgggctgcttgatgaaaatccttgaagccgaacgatggctgaaagccgtcgcggaccgagtcttctccaacacgctccaaggtcctccccctacgacatgggggctgggccccacgcgtcatgcaagctggcccaaggcggaagaagccaaaccgccgcgtgcggtgcacataactgcccagcggttacaagcgcttctcctctttcgccgagaccagcgggtgaaagagcggaccgccatgcaggcggcatgcaaccgcaccaagggggcgcaccctttcgacttcgacgcgtccagcatggaggcccaggcccacacgtcatgtaaccggcgcgccggttactccgtgcgagaaactgcaccgccactcgcaccagtaccacgccttctcgactgcggaatcggtgccgcgactcgaggcgaccctgcgcatggcccgatagtgccaaccgagcacatcggccatgggtcagtcagccgcgggagaaggcgcgacggtcgatacggccagaaatgggccggcagtaatggcggtggcaggcgggcggaagaagcagtcaagtcgtcagcaagctcacgtcccctcctgggacagcgagagagccctttcccacggcgtgaagacgacgcgcccgtgttccgttcctcgaacggctcgcgcacgcgcaacggctgccccgcgaaccactcgtcccatcgcattaactctacggcaggacaggcggcacctttggcaggcgaagcaggcgacgcttcacctatgccataa

SEQ ID NO: 37096 - DNA, 732 bp, Zea mays
  Peptide Sequence Number=SeqID_78875
atggcggtggcaggcgggcggaagcagcagtcaagtcgtcagcaagctcacgtcccctcctgggacagcgagagaaccctctcccacggtgacaggcggcacctttggcaggcgaagcaggtgacgcttcacctccgccatgatgaccgcgtcaaaaaagggaccgggaaaggggataccccgaaagggatccttctccgcgaaggaaatgggccccgagctcccctactgatcagaggttcgaaggctggcccctcggaagggttcaacagccgcctcagagcactcgggctccgcgcccactactggtcagaggttcgaaggctggcccctcggaagggttcaacggccgcctcaggccactcgggcttcgcgcccactactgatcaggggttcgtaggctggcccccgaagggttctgacagcctcctcagagcacgcagagcgagggatgaccctgggtacgttcgatacataaccaaggctcgggctacgctcccgaggctcgggggctgctctcgcaaacccggcttcggccaaaccgttgacagcgtcaacataccagcccgagaacttgggactcgactgtcaaggctcagtccactcaagggacacgatctcgcctcgcccgagcccagcctcgggcaatggcagccgacctcggaggattcacgtctcgcccgagggccccctcaaagcgacggacacaccttcggctcgcccgaggcctag

SEQ ID NO: 37097 - DNA, 357 bp, Zea mays
  Peptide Sequence Number=SeqID_78876
atggcggcggcgctctgcgtgcgcgcagcgagggggagagagagtctactgggcgcaaatgggggagagggtgagggcgagtggggttcggggctcaagtggccaggggcgaggtggggcgagttccacgcgcgacgtgggcgcgaggaaggcgggcgcgagcagctcggcggcggttacgcgaggaagacggggctgacagcccgggcccgcgagcagagagagagcgagggagcgagcgcgcgcggggaaagcgggcgccgacaggtggggccgggcgaacagagagagaaaggggcgggtatgaaatgggccacctttgttaagcggtccacgaccacccagatggaatcataa

SEQ ID NO: 37098 - DNA, 549 bp, Zea mays
  Peptide Sequence Number=SeqID_78877
atggcggtggcgctctgcgtgcgcgcagcgagggggagagagagagtctactgggcgcaaatggggggagagggtgagggcgagtggggttcggggctcaagtggctaggggcgaggtggggcgagttccacgcgcgacgtgggcgcggggaaggcgggcgcgagcagctcggcggcggttacgcgaggaagacggggctgacagcccgggcccgcgagcagagagagagcgagggagcgagcgcgcgcggggaaagcgggcgccgacaggtggggccgggcgaacagagagagaaaggggcggcccagatgggttggcgcgagatggaacacaaggggggagaaccgcggctcgtgttatcctgcgccaggggggatgcgcttgcagtaggggttacaagcgttcgcgagggagagagagagagagtgagcctgttcgtcagcccgtcctcccgcgcgaccaccccttcgcatgagggccctggaccttccttttatagatgcaaggagagggtccaggtgtacaatgggggtgtagctatacactaa

SEQ ID NO: 37099 - DNA, 1027 bp, Zea mays
  Peptide Sequence Number=SeqID_78878
gattgggcttggccaaattaaaacgaggccgcccgatctgggatggacggtggggatcgggtggccggcctgggcttcccctacggctagctggggcggcggcgctcgtccccgcggcggagggctcgccggagacgaggggcacgggcgactggcggggccctggggtcatccgagtggtcggggaggtcggggagggcgcggggagttctccggtagggtctgggtcggggcagaggcaccggaggggggcgattcacggcggggcggctcggcggcggggtttctctactccggcgagcaatcacacgcaacagagagcaagacaaagggcaataggggcgggagaggtccgttacctcaaggcgggctccggggactcctcggcggcgacggggacgcgacggagacccgggtcgacggtggcggctgcacggcgaacgacggcgagggggagagagagtctactggggcgcaaatggggggagagggtgagggcgagtggggttcggggctcaagtggccaggggcgaggtggggcgagttccacgcgcgacgtgggcgcggggaaggcgggcgcgagcagctcggcggcggttacgcgaggaagacggggctgacagcccgggcccgcgagcagagagagagcgagggagcgagcgcgcgcggggaaagcgggcgccgacaggtggggccgggcgaacagagagagaaaggggcggggttcctatatgactgggatggagcacgggccgatgtggctgcctgctttaccggatctgctcacctatgtgactatgtgagcatgcaggtgtgggttgagccgtcggcgaccaaggacatgatggacaaggtggagcaggtacgacaacggaggaaggccgagaagtccctgctcagcttgcaacgaaggttggctacgacaagcgcagaagaattggagaatagtggctgtcagaagacatatgcgagccctcgaaaaagtggtgaggcatcatttgctaatgcatccatgatggatatgtag

SEQ ID NO: 37100 - DNA, 216 bp, Zea mays
  Peptide Sequence Number=SeqID_78879
atggacaaggtggagcaggtacgacaacggaggaaggccgagaagtccctgctcagcttgcaacgaaggttggctacgacaagcgcagaagaattggagaatagtggctgtcagaagacatatgcgagccctggaaaaagtggtgaggcatcatttgctaatgcatccatgatggatatgcagaagttaaagttagctgataatcgtgtcctctag

SEQ ID NO: 37101 - DNA, 507 bp, Zea mays
  Peptide Sequence Number=SeqID_78880
atgcagattattgaaagaaagtgcgaggctcaaaagggtgctgggataaggtctaacctgaatttttatgtggttttgtggactgtaggaaaaaaaacactcgataaactcaccgatcaacctggaaatctgataccaattgatgtagctgaggtgcccgatctttcggcgagtagagataattccgatttggcggaagatgacccttgcgatccgactacgacgagcaagcccaaggcgccaatgcaatcgctgaaccaactccctgtgttcaattctcttgcacgggcccgagtcactggcccaggtggaaggggtggcgcctggactggggaagatggtgcctgggctggagaaggtgctgctggtgtagatgtgctcgtgttggtgttgatgtcctcatcagattgggcatgttcgttgcgaaaaacgaagaaatggttcccggtgacaataactcgtgctttgtatgcaccccgacacccgttttcggaatgggtgacgtga

SEQ ID NO: 37102 - DNA, 465 bp, Zea mays
  Peptide Sequence Number=SeqID_78881
atgcagattattgaaagaaagtgcgaggctcaaaagggtgctgggataaggtctaacctgaatttttatgtggttttgtggactgtaggaaaaaaaacactcgataaactcaccgatcaacctagaaatctgttaccaattgatgtagctgaggtgcccgatctttcggcgagtagagataattccgatttggcggaagttgacccttgcgatccgactacgacgagcaagcccgaggcgccaatgcaatcgctgaaccaactccctgtgttcaattctcttgcacgggcccgagttactggcccaggtggaaggggtggcgcctggactggggaagatggtgcctgggctggagaaggtgctgctggtgtagatgtgctcgtgttggtgttgatgtcctcatcagttccggtggcgaaaactggtgctttggatgcacccgacaaccattttaggaatgggtga

SEQ ID NO: 37103 - DNA, 429 bp, Zea mays
  Peptide Sequence Number=SeqID_78882
atgcagattattgaaagaaagtgcgaggctcaaaagtgtgctgggataaggtctaacctgaatttttatgtggttttgtggactgtaggaaaaaaaacactcgataaactcaccgatcaacctggaaatctgataccaattgatgtagctgaggtgcccgatctttcggcgagtagagataattccgatttggcggaagttgacccttgcgatccgactacgacgagcaagcccgaggcgccaatgcaatcgctgaaccaactccctgtgttcaattctcttgcacgggcccgagtcactggcccaggtggaaggggtggcgcctggactggggaagatggtgccagggctggagaaggtgctgctggtgtagatgtgctcgtgttggtgttgatgtcctcatcaaatgggacgcccttggctgactaa

SEQ ID NO: 37104 - DNA, 216 bp, Zea mays
  Peptide Sequence Number=SeqID_78883
atggcggtggtgggtgcgctgcaaaggggaagtggggcggtggtgctagtgcgcatggaggcgggcacgcgtgcgggggcacgggtgagtgctggggtcgatgaccctgatgtttgtggtctccggttccaagaatctttgcctctctgtatgcttgttccaggcttcaagggtaagcttcccggtatcttcttgggtaaggcacttttctcttga

SEQ ID NO: 37105 - DNA, 201 bp, Zea mays
  Peptide Sequence Number=SeqID_78884
atggaggcggccacgcttgcggggggggggggcacgggtgagtgggggtcgatgaccctgatgtttgtggtctctggttccaagaatttttgcctctctgtatgcttgttccaggcttcaagggtaagcttcccggtatcttcttggggctctagccaaagtgaagaaaaacttcactacccaatgcatgcagaggactag

SEQ ID NO: 37106 - DNA, 273 bp, Zea mays
  Peptide Sequence Number=SeqID_78885
atgaccttgatgtttgtggtctctggttccaagaatctttgcctctgtgtatgcttgttccaggcttcaagggtaagcttcccggtatcttcttggggctctagccaaagcgaagaaaacttcactacccaatgcatgcagaggactgggcatactaacttcagaccaggcaacttctcttctggcaaggcttgcacacaacttcaatctgagacatctcctggatgggttaagagggagctgatgttgatgacttcttctggcggcgactga

SEQ ID NO: 37107 - DNA, 450 bp, Zea mays
  Peptide Sequence Number=SeqID_78886
atgggttcgaaaaccctgagtacggagtgtactttcgcaagtcttatccgtctaaggaaaaagactctcaaggatatgctggcttttgggaatctaggtaaagcttttcaagaatcaaagactctgtttgcagaaaagcttactatgagtggatctgagagcacagatacaccaccgtccagcctcttgccacggagggtacacgctactcttgccatctctccactcccattgcgtggtggcctttctggtattggtccgaccgaggcaaagcttacccatgacgaggcacatggccagttaaaaggtcctcggaccaggtccccgaccaaggacgacggagcaactacaccgccgaacttgtaccggccgttataccctataatccctgctcgaatttgttctatacataattccacccttggcgctccactggggatcaacaattaa

SEQ ID NO: 37108 - DNA, 339 bp, Zea mays
  Peptide Sequence Number=SeqID_78887
atgatgaagtacctgcaacaacatgggttcgaaaaccctgagtacgaagtgtactttctcaagtcttacccgtcaaaagaaaatactctcaaggatatgctggcttttgggaatcaaggtttctcaagaccagaatgggttcacgccaaccgagagcacagatacaccaccgtccagcctcttgccacggagggtacacgctacttcgccatctctccactcccattgcgtggtggcctttctggtattggtctgaccgaggcaaagcttacccatgacgaggcatatggccagttaaaaggtcctcgatcagcaagcctacatcagctcggtccttaa

SEQ ID NO: 37109 - DNA, 603 bp, Zea mays
  Peptide Sequence Number=SeqID_78888
atggagagtcgtatagaacgtatagagaggggagagaggaagagtcctaccggatattaccgagtttgtttcccccttccacccggatgggacccaaaggatttgcagaacatattgtctaagttgtgtgatcagtaccaatattgcctttattgtggatgcaaagtgttgtttcatctttcatccatctcatgtacatatgttcaagatggcgtcattggttcctcggcagaatgggatgcaaaggttcgaggcattagtgataacccctctgctattatgttactgtccaatgtcctttggaaaataccagatcgcgccatttcccatgacacatcacctttgactatatatgctaccagttcaataagttattgtgaaagatgcacatactggcttactgctatgacagactcgatattgtttgaaagaggaggcctcccggctccaggatggattctgggctttggtggctccactgtgtcattgtttgcccaggtggaaatcatgatgtcctgcttagaaatccacaatgctctattgtccattgactatggtgcagtaatctcttccaataggtccactgtgtgcagagtgcagtga

SEQ ID NO: 37110 - DNA, 270 bp, Zea mays
  Peptide Sequence Number=SeqID_78889
atggcgccattggttcctcggcagaatgggatgcaaagctattgtgaaagatgcacatattggcttactgctatgacagacccgatattgtttgaaagaggaggcctcccgactccaggatggattctgggctttggtggctccactgtgtcattgtttgcccaggtggaaatcatgatgtcctgcttagaaatccacagtgctctactgtccattgactatggtgcagtaatctcttccaataggtccactctgtgcagagtgcagtga

SEQ ID NO: 37111 - DNA, 270 bp, Zea mays
  Peptide Sequence Number=SeqID_78890
atggcgccattggttcctcggcagaatgggatgcaaagctattgcgaaagatgcacatattggcttactgctatgacagacccgatattgtttgaaagaggaggcctcccggctccaggatggattttgggctttggtggctccactgtgtcattttttgcccaggtggaaatcatgatgtcctgcttagaaatccacaatgctctactgtccattgactatggtgcagtaatctcttccaataggtccactgtgtgcagagtgcagtga

SEQ ID NO: 37112 - DNA, 270 bp, Zea mays
  Peptide Sequence Number=SeqID_78891
atggcgccattggttcctcggcagaatgggatgcaaagctattgtgaaagatgcacatactggcttactgctatgacagacctgatattgtttgaaagaggaggcctcccggctccaggatggattatgggctttggtggctccactgtgtcattgtttgcccaggtggaaatcatgatgtcctgcttagaaatccacaatgctctactgtccattgactatggtgcagtaatctcttccaataggtccactctgtgcagagtgcagtga

SEQ ID NO: 37113 - DNA, 684 bp, Zea mays
  Peptide Sequence Number=SeqID_78892
atgtgggaagatcacgtatctgatgggctgcggtctgcgattcccctttgtgatgagttgtttgattacttactcatcctgatccctgttcttatgcttaatgcctcgctcggatccattccctactggtttagttatctgagaaagcacaaggaggaagaggatgtgatcactgaagaggatttgcagaacatattgtctaagttgtgtgatcagtaccaatattgcctttattgtggatgcaaagtgttgtttcatctttcatccatctcatgtacatatgttcaagatggcgtcattggttcctcggcagaatgggatgcaaaggttcgaggcattagtgataacccctctgctattatgttactgtccaatgtcctttggaaaataccagatcgcgccatttcccatgacacatcacctttgactatatatgctaccagttcaataagttattgtgaaagatgcacatactggcttactgctatgacagactcgatattgtttgaaagaggaggcctcccggctccaggatggattctgggctttggtggctccactgtgtcattgtttgcccaggtggaaatcatgatgtcctgcttagaaatccacaatgctctattgtccattgactatggtgcagtaatctcttccaataggtccactgtgtgcagagtgcagtga

SEQ ID NO: 37114 - DNA, 150 bp, Zea mays
  Peptide Sequence Number=SeqID_78893
atggcacacgcgagaacacgggatgatcaagtaagaactgaacagaatgcactaatacaaaaggatggcttgcgttcgcttccttgctccacaggaagcatagctgatatacaaatcgagaacactgtgggtaaacattggtatatgtag

SEQ ID NO: 37115 - DNA, 147 bp, Zea mays
  Peptide Sequence Number=SeqID_78894
atggcacacgcgagaacacgggatgatcaagtaagaactgaacagaatgcactaatacaaaaggatggtttgcgttcgcttccttgctccacaggaagcatagctgatatacaaatcgagaacactgttccatccgaaagccactaa

SEQ ID NO: 37116 - DNA, 255 bp, Zea mays
  Peptide Sequence Number=SeqID_78895
atggccggaaggagatgccccagggtttccttttatatgccgttggtgcccaatctcaacgatccagacggatatggcgtgtgcatggtcagggatcggttatggagctccgcgagcaccgcgcctgattgcccaagtccatggaggaagacggtaggtgcccgtgcgatgccacggaacataaatctcgatttgtatatcagctatgcttcctgtggagcaaggaagcgaacacaagccaaccttttgtattag

SEQ ID NO: 37117 - DNA, 309 bp, Zea mays
  Peptide Sequence Number=SeqID_78896
atgactcaccggattgctcagtctacgcgcgcaggcgggcggccgaagtctggcgaggacgatcttggttttccggtgaagttctgccgggttcgagagcttgggaagcttcacaagctcttggtgaagctatccgagcggctggcgcggcttggaagtgaccggggtgggctggccacgatggccgaggctcgggtggcaatggtgggcggaagagagctcgccggagctaaggaggtgcgtttggccggcgaaggaattgagctagggatcaaggtgaacacgctcggtctttggcttaagggctga

SEQ ID NO: 37118 - DNA, 201 bp, Zea mays
  Peptide Sequence Number=SeqID_78897
atggccagcccactccagtcgcttccaagccgcgccagccgctcggtcggactcctcgccgtcgacgagctcccctgcctacgcacatggaccgaccgactccgaccatccccgacggcggccgcacatcgccgtgaccctcaggacctcccctacaccctcggccacctcaccggagcagtctcgccgccgagaacttag

SEQ ID NO: 37119 - DNA, 1284 bp, Zea mays
  Peptide Sequence Number=SeqID_78898
atggccataatctcaaagatttggagccaatccgcgcttgaactcgacctctctctgagctgcctcgtgctcgacgccatgccaggtgccagagcgcgcactagcgttcgcccgcgcatgccccgagcacgtgtcaaagccctgccctcggccgtgctcgcccgcgcctataaagcctccctgggcgcgcctcacctcgccccgtgctcaccttcgctggccagacgcccctccttagctccgcttgtgaagcttcccaagctctcggacccggcagaacttcaccggagaaccaagatcgtcctcgccggacttcggccgcccgcctgcgcgcgtagaccgagcaatccggtcggactcctcgccgtcgacgagctcccctgcctacgcacatggaccgaccgactccgaccatccccgacggcggccgcacatcgccgtgaccctcaggacctcccctacaccctcggccacctcaccggagcagtctcgccgccgatgaattcacccacccccgccagtggaggagacactcgttccagctctgacttcctttctcacgatggctttccttccatcttgtgggaagtgcttaactccgccggttaccctacgccccctttgtacatggtgcagttgtatgaggagcatcgggtaccttgttgccgagtctggctaactttggaggctcatcctcttcagccgggttggcgttctcttgactccgagacggttggattcaggacggacgacaccactgaagcagcagccatgaagactctgacaactttctgtggctaccatcccctggaaatggtgatgcaccacttgggactcttccctgctgagaagaaggatgaccccatgtggtgtaaccgtgctctgcagagcaacgctatggcacaccttgctaacatcgctcaaatcaccaagctcaccctcgacagccgagaagattttgtggtcgacttatcctccgagttggtggagaaggatttgcaggtggaaaggctgagccagcgtattaccaccttggagcagcaggtggagattcgagacaacactattgatgtcttggagaaccagctccacgatgtgcagcgggaactcaaagaagcaaatgaccacctggacatgcaccacttggaaatggaggccaatgaggccggaagcgagggagaagaggctcccgaggagttaggaccagcccctggtgccaatgggactacctccgcaatacccccttcacctgcatccagtgtcgcttccaccactcagggttga

SEQ ID NO: 37120 - DNA, 144 bp, Zea mays
  Peptide Sequence Number=SeqID_78899
atgggggacaacctggggtttgggtattttaaagcaagggacataatgggtcagaggacgcttgccttcaccagggtgctgctcagggatgtctcctgcaagacactcgggaaccatggactgcttgttgtctatgcaaagtaa

SEQ ID NO: 37121 - DNA, 312 bp, Zea mays
  Peptide Sequence Number=SeqID_78900
atggagcgaccacccaggaaaacagtgctaccacaagggtggtatgggacgcccttggctgactatttaggaaagctagtggatgactaccttacccgaaagggcaagggcagtaggggagtgcgttacacttcacatgaactcccacctttgatgagcactgattgcaatggggacaacctggggtttgggtattttaaagcaagggacataatgggtcagaggacacttgccttcaccagggtgctgctcagggatgtctcctgcaagacactcgggaaccatggactgcttgttgtctatgcaaagtaa

SEQ ID NO: 37122 - DNA, 823 bp, Zea mays
  Peptide Sequence Number=SeqID_78901
ccgtcggtgggccgagtcttctccaacacgctccaaggtcctcccctacggcgcgggggctgggtccacgcgtcatgcaagctggcccagagcagaagaagccaaaccgccgcgcgcggtgcatgcaaccgcccagcggttacgagcattcctccactttcgcccagaccagcgggcgaaaggccgggcagccatgcaggcggcatgcaaccgcgcccctccgacttccaacgcacccagcatgggggcccacgcccacgcgtcatgcaaccggcgcgccggtcgctacgtgcaagcaactgcaccgccactcgcaccactaccacgcctcctcgactgcggaaccagtaccgcgactcgaggcgaccctgcgtacgacccatcagtgccagccaggcgcgacggtcaatacggccaaaaatgggccggcagtaatggcggtggcggcgcctctggcaggggaagcgagcgacgcttcgccttcgccataatgaccgcgtcaaaaaagggaccgggaaagggggataccccgaaaaggatccttctccgtgaaggaaacaggctccgagcctccctactaatcagaggttcaaaggctggcccctcagaggggtttaacatccgcctcagagcgcgtgggctccacacccactactggtcagaggttcgaaggccggcccctcggaagggttcaacggtcgcctcaggccactcgggctccgcgcccactactgatcaggggttcgtaggctggccctcgaagggttcacagcgaccacccggtaaaacagtgctaccacaagggtggtatgggacgccctag

SEQ ID NO: 37123 - DNA, 285 bp, Zea mays
  Peptide Sequence Number=SeqID_78902
atgtggttgaggcgagtagcggctagggcgtcccgcagcgagctcgcgcggccaaagctgagcagcgagaacacctggacgcggtgggggcttgctgttttggtgggaaagataggaggagcaggtccatttgccgcggccgcacgcagggaaatagcaggttcggcagagctcgagcagagcgctcatgaagagcacggccgccggaaggaaggatcccagcgccatggggaagaaggccgtgggaagggaggagggcagggcatcggcaaggggcttcaatag

SEQ ID NO: 37124 - DNA, 339 bp, Zea mays
  Peptide Sequence Number=SeqID_78903
atggggaagaaggccgtgggaagggaggagggcagggcatcggcaaggggcttcaataggggagcgccatgggagcatttcacgcaacgtccactgcaggggggtggaggctcacgccatggaaaggggagcagaggtgctgcacgtggggaggagggcttcctgctgccgtgcctgaagggggcaccaaggggagagaagggggcgccatgggaaggggctcgacggccatggagcttctgcgctggctgctgcgtgaggaagaagaaggcagggaaaaggaagtggcggctaggaaaaatggaggggtgggagtgcaaaaatgtcaaatgcaagtga

SEQ ID NO: 37125 - DNA, 423 bp, Zea mays
  Peptide Sequence Number=SeqID_78904
atggggaagaaggccgtgggaagggaggagggcagggcatcggcaaggggcttcaataggggagcgccatgggagcatttcacgcaacgtccactgcaggggggtggaggctcacgccatggaaaggggagcagaggtgctgcacgtggggaggagggcttcctgctgccgtgcctgaaggggcacaagggagagaaggggcgcccatgggaaggggctcgacggcccatggagcttctgcgctggctgctgcgtgaggaagaagaaggcagggaaaaggaagtggcggctaggaaaaatggaggggtgggagtgcaaaaatgtcaaatgcaagtgaagggcacttctatttatagacatgggctagggttagggtttcttagtgggcctattgggcttggttgggctggcccaaaatgctaa

SEQ ID NO: 37126 - DNA, 201 bp, Zea mays
  Peptide Sequence Number=SeqID_78905
atggcgcacttcctctctctgctgtccatggcgccaatcagcagccgtgtcctccttgcagcgcccctgctccattttttctccctctgctccctgtgcgacccgctcgcgacgtcgtcgaccctcgccaccgtcaaagtcgcgcttcgtgccttgcagttcgacgaaatgctgagccacgtggacagtccatgcggctaa

SEQ ID NO: 37127 - DNA, 263 bp, Zea mays
  Peptide Sequence Number=SeqID_78906
atggacctgctcctcctatctttcccaccaaaacagcaagcccccaccgcgtccagggtgttcgacttaatgcctgcgaaggagatgtgttgttgcagccccgtcgacgctcaccgggtgtttgctgtttttggcccagacccgctcgcgacgtcgtcgaccctcgccaccgtcaaagtcgcgctccgcgccttgcagttcgacgaaatgccgagccatgtggaccatgcggctaaatcccgactcgttcaggttgaatccat

SEQ ID NO: 37128 - DNA, 273 bp, Zea mays
  Peptide Sequence Number=SeqID_78907
atggtcgagctcactccttcgctgctgcagccccttcccttgctcctttttgttgtgcgcagggtgttcgacttaatgcctgcgaaggagatgtgttgttgcagccccgtcgacgctcaccgggtgtttgctgtttttggcccagacccgctcgcgacgtcgtcgaccctcgccaccgtcaaagtcgcgctccgcgccttgcagttcgacgaaatgccgagccatgtggaccatgcggctaaatcccgactcgttcaggttgaatccatgtga

SEQ ID NO: 37129 - DNA, 201 bp, Zea mays
  Peptide Sequence Number=SeqID_78908
atggggtcggggcgtagtgctagctctgctaaggtggggtgcagaggttcattcgatttggttttgttagtcacccaactttgggaggctggaaagggatcacgactcatgggtaaagtgtgcgacctctgcagaggattagaaactgatatatcagccgtgctcacggttaagagcaaccttgggatcctctttgattag

SEQ ID NO: 37130 - DNA, 216 bp, Zea mays
  Peptide Sequence Number=SeqID_78909
atggagattggctctttctgggtagaatgggaatcacaacttgtgggtaaagtgtgcgacctctccagattgttagaaactgatatatcagccgtgctcaaggatgactctcaagacctacgcgctcttgctttatatttcctcacatttcatcgcaacaacaaggcactgccgctcccagtagacattcaaagatttaagtttgcacacaagtag

SEQ ID NO: 37131 - DNA, 237 bp, Zea mays
  Peptide Sequence Number=SeqID_78910
atggatttcaaaattacaaagggtacctcggtcctggagagaaggatcccaaggtcgctcataaccgtgagcacggctgatatatcagtttctaacactctgcagaggtcgcacactttacccacaaactgtgattcccattctacccggaaagagccaatctccattgaccactacctaggtggtctggcacggtatcactacgtagcctttacaaagatttcccagaggtcatag

SEQ ID NO: 37132 - DNA, 375 bp, Zea mays
  Peptide Sequence Number=SeqID_78911
atggcgcgggcgagcgtgaagcctgccgcccccggcgccagcatgcctccacctgccgcgcccacacatgagcgaaggcctccctcgccaccgcgcgctgctgaggcagcggtggcgggcgcagaagtctccatggatattttcgtggatcactaccttgtgggcggggtcgcaatgttcgacgcccacacgggactggatcctgctggcccccctgaccctgccttgtttcgatcccgctttgggtctgggggtgctatccgtgcaagttttgtctgtccgccattctcatgcggggtgagcccccgagcccctgctcgatgcagagtttcactctcccccgcgcatccccttcatgggaatgaggggaggtga

SEQ ID NO: 37133 - DNA, 1356 bp, Zea mays
  Peptide Sequence Number=SeqID_78912
atggatatatccgtggatgactaccttgtgggcggggtcccaatgttcgacgcccaaacgggactgggtcctgctagagcggagtccgagcaactggctgttgtcccggtggcggtggcggctggtccggtggccgtggcaaccctggtgaaggggtcctcgcaggacccgtggtccaagttctgcgccggtggcgaaattgcctctgccgccgctgcgaaggacgtggccacctcagttgcgcagcacctgaaacattctttatgccaggcggttgccttcgccgagtgcattgcgtcgagggtgctgacctcggagttttctgccgaaaggcggcgacttgaggggaggattgagcgcctccgaatgcaacatacggaggctattcaggacaagtcggcagcagaaagcaggagccgtaacctgcttgaaaagctaacagcgacggaggcggataaggaagacctcaaccgttggcttgcggcggaaagggaagacgcggaaaaggcccgcgccgaggcccaagctacccgcaccgaggccagtcttgccctcaagtgtgccaccaacgcggagttggggctaagaagtctgcacggctacgtagacagggtggaggccttcacccgcactggggtcgaccgagcgcacgcgttgctcgtggacgcgtaccgtcagcttggtgcgcgaaccgccccctttgacaaatccggcgaagaggtgggcctccgcttcctcgagtggctacaggaggagttggagtttctcttgtccatcgtgactggtctcatgtccttcgcctcgctcattacctgtgaggggctgcgaatgccttgccccatgttgaacgaggaagaagtcgaggacttcggtggcctggaaagctcggtgacccgggcagaagatgagaggacaggggctgaggagcaatcggtgccacaagccgaccctagaggagaccctgcagcggcggctacactagctggcgaagaccccgcaacggtggctgctccttcacaggttccgacgtccgggcctgcgcaagcaacccctactgatgttgatattaattttgtggtggctgcgaatgcagtgcctgttaatggaaattcgtctggttctgaaactgagtcttggtcatcagagggtgtaacacctcaggtgttaccatggctagagcacaccttggtactaaggactgtgatcacatgtgactgtaaccttgctgacgaagagtacgtcctcgtgccggagcaaggagctgctcaggaggtagccccagatccagcaccagagcctgcaccagaggacctgcctgtcactgctttggaaggcaagccccggttttatgcataa

SEQ ID NO: 37134 - DNA, 525 bp, Zea mays
  Peptide Sequence Number=SeqID_78913
atggagcgcataggcgaggcaagggaacgcgatgcaacggcgctctggggaacgacgagggcggtttctggcttcctgcttgcaagggaggaaggggagagacgacacaccaccttttttggcgacgtgggggccaggtcgagtgggggaggtggttttggaggcatcggcgcggctcacaggcagttgcttggagaagatgaacaggaggcctcactggtggggcccaaagccagggagatggctggacgggctctccacgcttccgctgcgtgctcgcgtagcaaccagccagcagggcgattgggccaggacggtgttacagatctaacccccttaacaggaatctcaccctcgagattcaaggagaggctagcaagaacgacaagatacttgaaaccgattgatgcaattcttgaggatctctcggacctgtgggttaggacccacacatgcttcttccgcgccactttgatcttgttggttgatgttgatcacattgtcttcattggggttaccggctaa

SEQ ID NO: 37135 - DNA, 339 bp, Zea mays
  Peptide Sequence Number=SeqID_78914
atggagcgcataggcgaggcaagggaacgcgatgcagcggcgctctggggaacgacgagggcggtttctggcttcctgcttgcaagggaggaaggggagagacgacacaccaccttttttggcgacgtgggggccaggtcgagtgggggaggtggttttggaggcatcggcgcggctcacaggcagttgcttggagaagatgaacaggaggcctcactggtggggcccaaagccagggagatggctggacgggctctccacgcttccgctgcatgctcgcgtagcaaccagccagcagggcgattgggccaggacgtgcgcgcggggctgcgtgcgtga

SEQ ID NO: 37136 - DNA, 378 bp, Zea mays
  Peptide Sequence Number=SeqID_78915
atggagcgcataggcgaggcaagggaacgcgatgcagcggcgctctggggaacgacgagggcggtttctggcttcctgcttgcaagggaggaaggggagagacgacacaccaccttttttggcgacgtgggggccaggtcgagtgggggaggtggttttggaggcatcggcgcggctcacaggcagttgcttggagaagatgaacaggaggcctcactggtggggcccaaagccagggagatggctggacaggctctccacgcttccgctgcgtgctcgcgtagcaaccagccagcagggcgattgggccaggacgtgcgctcgcactgcgtgcgtgacgcgcggggggaagagcgcggctggaacgaatcaagctga

SEQ ID NO: 37137 - DNA, 768 bp, Zea mays
  Peptide Sequence Number=SeqID_78916
atggcccgcgcccgcgcctataaaaccctcccagacttcgactgcactcttccgcgcaccctcaaacctcaccggagtctagctcgccgccgtttgcccgtgcgcagcgtgtccgcggccgcccaatccctctgtcaccgtagaccggccaatagagccattcccaaccccgtccagccctcggagaagactgtgcacacctccgtgaagctccccgagcgaggaatcggagtttgcttcgccggagaggccagtccacgctcgtcggagctctcaaccccgccagagtacgtggaccgggtaatccactcaaccatccttcgattcattgtgcacacggtccctacgttaccctatgaagctcaccgtgcccttggattgaaccagttcgccgtggtttggccggtacactcgccgccgacgagaacacccgcctgcgcgcgtggaccgggcgattccggccatccccgatatcaagccgtacctcgacgtgaccgccagagtctccccgagccaaccccacccttcgccggacctccctcgccgccgattaaggaaaatagaaaaaggggtataaataatgaaccagagagtacccctatttttgttaggatacttattcaagactgtaaccttgctgacggagagtacatcctcgtgccggagcaaggagctgctcaggaggtagccccggatccagcacccgagcctgcaccagaggacctgtctgccactgctttggaaggcaagccccggttttatgcataa

SEQ ID NO: 37138 - DNA, 507 bp, Zea mays
  Peptide Sequence Number=SeqID_78917
atggcccgcgcccgcgcctataaagccctgccaggcttcgactgcactcttccgcgcaccctcaaacctcaccggagtttagctcgctgccgtttgcccgtgcgcagcgtgtccgcggccgcccaatccctctgtcaccgtagaccggccaatagagccattcccaactccgtccagccctcggagaagactgtgcacacctccgtgaagctccccgagcgaggaatcggagtttgcttcgccggagaggccagtccacgctcgccggagctctcaaccccgccggagattaaggaaaatagaaaaaggggtataaataatgaaccagaaagtacccctatttttgttaggatacttattcaagactgtaaccttgctgacggagagtacatcgtcgtgccggagcaaggagctgctcaggaggtagccccggatccagcccccgagcctgcaccagaggacctgtctgccactgctttggaaggcaagccccagttttatgcataa

SEQ ID NO: 37139 - DNA, 513 bp, Zea mays
  Peptide Sequence Number=SeqID_78918
atggcccgcgcccgcgcctataaagccctcccaggcttcgactgcactcttccgcgcaccctcaaacctcaccggagtttagctcgccgccgtttgcccgtgcgcagcgtgtccacggccgcccaatccctttgtcaccgtagaccggctaatagagccattcccaactccgtccagccctcggagaagactgtgcacaccttcgtgaagctccccgagattaaggaaaatagaaaaaggggtataaataatgaaccagaaagtacccctatttttgttaggatacttattcaagactgtaaccttgctgacggagagtacatcctcgtgccggagcaaggagctgctcaggaggtagccccggatccagcccccgagcctgcaccagaggacctgtctgccactgctttggaaggcaagccccggttttatgcatatcctgttatttatgctattttacttcacttaatgattgtaggattgattgtgcacttaggtgtaggaattgtttga

SEQ ID NO: 37140 - DNA, 204 bp, Zea mays
  Peptide Sequence Number=SeqID_78919
atggccccacaagccagtggcgccccgcgcgtggtgtggctggcccgtgggcccaccatgtcggcgcaataccacggcgaacaggggcgtgcacaagttgggccgtgcgggtatgtaattgtggacattactccacaactaatcacactcaatcaaagatccaaatcaaacaagtaccataagaacaagcattcatgtgcatag

SEQ ID NO: 37141 - DNA, 531 bp, Zea mays
  Peptide Sequence Number=SeqID_78920
atggcgcacggcggttctggctcaactgaagtgctccggcgagcaattagaccgcccctggaggatatcctcgcccggaaggaccatggggacatgcgggagcccgcgtggttgcgtagcaggcggatgaggtggttgcaacagctcaatccgagatcttggggaggatttgttaagatcccatggatctcgcgggtgtcgattcacggacgcgttcaccgcggagaggaagtgcctgacgacacgggcccggacgtcagtgggaatggggcgcgcacagggttcctggccgggcgggcccacacggcggtgaagcaaactcgggtgggcggctggagggggtttgggctgcgcgcgtgtgggaagaggaaagaggagtgggccgaggaagaggtttctggcccaccaggtaggttaaaatctcttgctaggttaaaattgtggggttatgcaactattggatggtcaagatgtgtttgtggacattactccacaactaatcacactcaatcaaagatccaagtatcataa

SEQ ID NO: 37142 - DNA, 429 bp, Zea mays
  Peptide Sequence Number=SeqID_78921
atggcgcacggcggttctggctcaactgaagtgctccggcgagcaattagaccgcccctggaggatatcctcgcctggaaggaccatggggacatgcgggagcccacgtggttgcgtagcaggcggatgaggtggttgcaacagctcaatccgagatcttggggaggatttgttaagatcccatggatctcgcgggtgtcgattcacggacgcgttcaccgcggagaggaagtgcctgacgacacgggcccggacgtcagtgggaatggggcgcgcacagggttcctggccgggcgggcccgcacggcggtgaagcaaactcgggtgggcggctggagggggtttgggctgcgcgcgtgtgggaagaggaaagaggagtgggccgaggaagaggtttctggcccaccagttttagaaatccaattataa

SEQ ID NO: 37143 - DNA, 177 bp, Zea mays
  Peptide Sequence Number=SeqID_78922
atggatgtattcttaccggcattaagggggaaagggtctgcgcaagcctctgaccggacccaaagttccggcaacggcgagggagcagctacggcggaaactgagcttcacggccctccatcctcaatgcgctctctcaactctctctcggttcggcgatggtggcccagcccttga

SEQ ID NO: 37144 - DNA, 1026 bp, Zea mays
  Peptide Sequence Number=SeqID_78923
atggtggcccagcccttgattcttatacccaggttggggggggtcggacccggcagatctgggttcccgtggaccggtatgcacccagagccgttggatcccagatccgcggtccacgatttaaaacggcatgaccctaacgctgtccgtccgatctcatctcaacggctccgatccaaacgcgcgaaggggtatccttacgatctaatctcgaccgtcgatgatcagatcaacggtgaccgtgcgtcttcctcttcccaccaaccgagcagggtgcttcgccgtcgtcgtgcggtggagatgaacggctgtgaccccaatcggccacccccgagcaccattgtcaaattaaacgaagctacacggtgtgcgcggcatcacggtcacaatggatgtattcttaccggcattaaggtatggatgaagctcggccacggcgcggtgcggatccacggtggtgatgaactacgacgagcaattgccgcccactggccatcgaatccgacccgggatcggttcctacacctgcggcggaaccctccaatgctctcggtacgcaccgccgcggccaaggaatcgacagcagcagcgtcgacggcggcggcgcgtagagtttctggtggcggcgatttttgttcagggggaaagggtctgcgcaagcctctgaccggacccaaagttccggcaacggcgagggagcagctacggcggaaactgagcttcacggccctccatcctcaatgcgctctctcaactctctctcggttcggcgatggtggcccagcccttgattcttatacccaggttggggggggtcggacccggcaggtacggcgagttgttgcacggaccccgagggaagcggcggcagattcggctggagagggcgagggcgagattcgcgcgatggtgacggtgttcgtcgcggcaacagacatcgcacggcgcgcgtggagttcggaaggaagacggagacgacccgacagatgggccccgcaacgtcagcgagagagggggagtacgtag

SEQ ID NO: 37145 - DNA, 1257 bp, Zea mays
  Peptide Sequence Number=SeqID_78924
atgcaggaatcccttgcaggaccgccatcgcagcaaaatcctcccgagggcctccctacactgaccactcccctactgcccttgcccctttcgggaaagtgcagggggttctggcgcaagaatcccgagacacagggaacagggtccctggacggcgggtttatttcaaataagtggaggggctctttaacaaaagcgccagcgcgaaggggtatcggatgggctgagccgtccgatcagaaacggagggctcagattagatctgggttcccgtggaccggtatgcacccagagccgttggatcccagatccgcggtccacgatttaaaacggcatgaccctaacgctgtccgtccgatctcatctcaacggctccgatccaaacgcgcgaaggggtatccttacgatctaatctcgaccgtcgatgatcagatcaacggtgaccgtgcgtcttcctcttcccaccaaccgagcagggtgcttcgccgtcgtcgtgcggtggagatgaacggctgtgaccccaatcggccacccccgagcaccattgtcaaattaaacgaagctacacggtgtgcgcggcatcacggtcacaatggatgtattcttaccggcattaaggtatggatgaagctcggccacggcgcggtgcggatccacggtggtgatgaactacgacgagcaattgccgcccactggccatcgaatccgacccgggatcggttcctacacctgcggcggaaccctccaatgctctcggtacgcaccgccgcggccaaggaatcgacagcagcagcgtcgacggcggcggcgcgtagagtttctggtggcggcgatttttgttcagggggaaagggtctgcgcaagcctctgaccggacccaaagttccggcaacggcgagggagcagctacggcggaaactgagcttcacggccctccatcctcaatgcgctctctcaactctctctcggttcggcgatggtggcccagcccttgattcttatacccaggttgggggggggtcggacccggcaggtacggcgagttgttgcacggaccccgagggaagcggcggcagattcggctggagagggcgagggcgagattcgcgcgatggtgacggtgttcgtcgcggcaacagacatcgcacggcgcggctgagccaccgatggctcaggcccacttgtcggcgtggagagcaaagcgcagatagcgagcgggccgcgcgtaaggaaaggaggtgggccgcgaccaggtga

SEQ ID NO: 37146 - DNA, 960 bp, Zea mays
  Peptide Sequence Number=SeqID_78925
atgaccctaacgctgtccgtccgatctcatctcaacggctccgatccaaacgcgcgaagggggtatccttacgatctaatctcgaccgtcgatgatcagatcaacggtgaccgtgcgtcttcctcttcccaccaaccgagcagggtgcttcgccgtcgtcgtgcggtggagatgaacggctgtgaccccaatcggccacccccgagcaccattgtcaaattaaacgaagctacacggtgtgcgcggcatcacggtcacaatggatgtattcttaccggcattaaggtatggatgaagctcggccacggcgcggtgcggatccacggtggtgatgaactacgacgagcaattgccgcccactggccatcgaatccgacccgggatcggttcctacacctgcggcggaaccctccaatgctctcggtacgcaccgtcgcggccaaggaatcgacagcagcagcgtcgacggcggcggcgcgtagagtttctggtggcggcgatttttgttcagggggaaagggtctgcgcaagcctctgaccggacccaaagttccggcaacggcgagggagcagctacggcggaaactgagcttcacggccctccatcctcaatgcgctctctcaactctctctcggttcggcgatggtggcccagcccttgattcttatacccaggttgggggggggtcggacccggcaggtacggcgagttgttgcacggaccccgagggaagcggcggcagattcggctggagagggcgagggcgagattcgcgcgatggtgacggtgttcgtcgcggcaacagacatcgcacggcgcgcgtggagttcggaaggaagacggagacgacccgacagatgggccccgcaacgtcagcgagagagggggagtacgtaggcgcggctgagccaccgatggctcaggcccacttgtcggcgtggagagcaaagcgcagatag

SEQ ID NO: 37147 - DNA, 1627 bp, Zea mays
  Peptide Sequence Number=SeqID_78926
atggggaagaaggaggagctccctgctcagccgaacagagaagggaagggagtgagcgactttgggcgcccattttcgtcgttttccccttggaatcggatcaagcccccgcgccgtgccaaccccgcgtccacgctcgcgccccgcgtctataaaagccactccggcctcgaccgtacacccccgcgcgtcactggcccaacacgagctcaaggtcgtcgggagttttgcccccgtgagcgagcatcctccaagcgcctcatcctgtggtacctgctcttgacctgtgaggttgcgcatctttacccacaagccgtgttacccatctgccaaggggtcatgaatcccatacacctctaccaaggaagcgaggcagggatcgccatcgcagcaaaatcctcccgagggcctccctacactgaccactcccctactgcccttgcccctttcgggtaccaggatgattcttcagatcctcgtgacctcactgctagtcgtagcaatacaaacatacatggaaagtgcagggggttctggcgcaagaatcccgagacacagggaacagggtccctggacggcgggtttatttcaaataagtggaggggctctttaacaaaagcgccagcgcgaaggggtatcggatgggctgagccgtccgatcagaaacggagggctcagattagatctgggttcccgtggaccggtatgcacccagagccgttggatcccagatccgcggtccacgatttaaaacggcatgaccctaacgctgtccgtccgatctcatctcaacggctccgatccaaacgcgcgaaggggtatccttacgatctaatctcgaccgtcgatgatcagatcaacggtgaccgtgcgtcttcctcttcccaccaaccgagcagggtgcttcgccgtcgtcgtgcggtggagatgaacggctgtgaccccaatcggccacccccgagcaccattgtcaaattaaacgaagctacacggtgtgcgcggcatcacggtcacaatggatgtattcttaccggcattaaggtatggatgaagctcggccacggcgcggtgcggatccacggtggtgatgaactacgacgagtaattgccgcccactggccatcgaatccgacccgggatcggttcctacacctgcggcggaaccctccaatgctctcggtacgcaccgccgcggccaaggaatcgacagcagcagcgtcgacggcggtggcgcgtagagtttctggtggcggcgatttttgttcagggggaaagggtctgcgcaagcctctgaccggacccaaagttccggcaacggcgagggagcagctacggcggaaactgagcttcacggccctccatcctcaatgcgctctctcaactctctctcggttcggcgatggtggcccagcccttgattcttatacccaggttggggggggtcggacccggcaggtacggcgagttgttgcacggaccccgagggaagcggcggcagattcggctggagagggcgagggcgagattcgcgcgatggtgacggtgttcgtcgcggcaacagacatcgcacggcgcgcatggagttcggaaggaagacggagacgacccgacagatgggccccgcaac

SEQ ID NO: 37148 - DNA, 186 bp, Zea mays
  Peptide Sequence Number=SeqID_78927
atgtcgcgtctggttggcgcgctcatcacgttcaagccgctctactcggtattgaagctcgcctcccgcgaggtcatcatcagttcttcacttgttctccttggggatggcagagatgtcgactatctcaacccgtttcatgcctatgacaaagggaatctatcatggctgctcaacttttcgtaa

SEQ ID NO: 37149 - DNA, 822 bp, Zea mays
  Peptide Sequence Number=SeqID_78928
atgggcggaagttcgacggtggcggcaaattgggcgcacaccggtcaccctctgagcccacaattgccacccaaccggtccaggggcttgggcgaagctcactgtccgcgcgcgaggccacaatttggcttcgagcacgaccgacgacgagggagcaatctcacagcggaaacggcgatgggggcactggaacggtcggcgtggtccggtgaggccacgctgtcgcgtctggttggcgcgctcatcgcgttcaagccgctctactcggtattgaagctcgcctcccgcgaggtcatcatcaggacggcggagaagtcgaacatcccgtggagggagatgacgaaggaggtgctggagtcagacgtgtacgaggtgttcgagagaatccaagacccaaacctcgtgtaccctgactgtaacctggacattggctgctctgttggagtaagcaccagatacctcgccaagaagttcccatcagctcaagctgttgggcttgacctatcaccatactttcttgctgtggcggcacaaaaggaagaaaaactgtcacggccaaagcctattcgctgggttcatgccaatggtgaagcgaccggcctgtcttcagattcatttgaccttgtctcccttgcttatgtggaacaagagggtgaggctatagtcgaggaaacaaagaagagtaaccatgtgcagaggaagattgagaagcgccagcaggatcgtgcactcgacactcatattgaagagcaatttggcagtgggagattgttggcctacatttctgctcgtcctgggcagtgtggccgagctgatgggtaa

SEQ ID NO: 37150 - DNA, 582 bp, Zea mays
  Peptide Sequence Number=SeqID_78929
atggaggttactctggaagcaatctgcagtttccttgacgcgcgcactactgagcttgagacgaatgcttacccagctttggatgaattgacatccaggtttagtgcaatatttgttgttgttagcgtgaacgaggtcgaggcattgtacaggttgttcaagaagattggcagcaccttcattggcaatgggttgattaacaaggtgccacatgttgtatttgaagagcaatttggcagtgggagattgttggcctacatttctgctcgtcctgggcagtgtggccgagctgatggctacatcctcgaggctaactacagtggcatttccttttattggcccgctacatccttgagggctatattgaactttgaggagcacgagcaacataataatggtacccatgctacgctctggacattggacattcactacgactacatggttggagctatgaatgcagtcattgatccggataattcagaggacattcgctctcttgtactgcagtacctaatattacatcgactaaacagaaacaactccatggtttcccatctagatagattcaagttctcttag

SEQ ID NO: 37151 - DNA, 333 bp, Zea mays
  Peptide Sequence Number=SeqID_78930
atgagaacaaacaacccatcagttccggtgactgcttccttcgtctaccctagcgtctcctactccaaggccgggcactaccgctacgtgctcctctcccgcgtctgcctctccatgttcgacgggttcgactcctaccagttcggcgccacagccgacaccacagagcttggaggaacccagctgacagcctgcaggaacgagtcactgcagcaattcatcgagcactcagatgcagatcccgcctctagattctttccgaattgctctgtctatcctgtgccgttggagacctcgctgccctcgcacttgtctcgcgccacaggtctttag

SEQ ID NO: 37152 - DNA, 447 bp, Zea mays
  Peptide Sequence Number=SeqID_78931
atgtgggtccattttgacgctgtgttcggcggacccgccgcagggcgtcgtgcaagggaaccacggtggagccagtttagggccttgccatcagttccggtgactgcttccttcgtctaccctggcgtctcctactccaaggccgggcactaccgctacgcgctcctctcccgcgtctgcctctccatgttcgacgggttcgactcctaccagttcggcgccacagccgacaccacagagcttggaggaacccagctgacagcccgcaggaacgagtcactgcagcaattcatcgagcactcagatgcagatcccgcctctggattctttccgaattgctctgtctatcctgtgccgttggagacctcgccgccctcgcacttgtctcgcgccacaggtccatccgttcagggcaaaggagatacagaagtatcagtgccaaattga

SEQ ID NO: 37153 - DNA, 426 bp, Zea mays
  Peptide Sequence Number=SeqID_78932
atgagtaaagacataaagcagtttgttggattcacgcattcccatggtgggagattaacaccatcagttccggtgactgcttccttcgtctaccttggcgtctcctactccaaggccgggcactaccgctacgcgctcctctcccgcgtctgcctctccatgttcgacgggttcgactcctaccagttcggcgccacagccgacaccacggagcttggaggaacccagctgacagcccgcaggaacgagtcactgcagcaattcatcgagcactcagatgcagatcccgcctctggattctttccgaattgctctgtctatcctgtgccgttggagacctcgccgccctcgcacttgtctcacgccacaggtccatccgttcagggcaaggagatacggaagtatcagtgccaaattgaacgctga

SEQ ID NO: 37154 - DNA, 309 bp, Zea mays
  Peptide Sequence Number=SeqID_78933
atgaactggatgctgccgcgccaatggaggaaggggtactggagccgcattgatggaggatggggtgtcgggaagtcggtcgaagatgcctcgtcgtcccagatgagctggccgatgtcgcgccgatggaggaaagggtgttggggaagtccttcggctctagatcgagaccacacatctcaccatgggttcgcaggaggcacggtggcgttgagcgcccgttgctgtccgccattgccgcatcgggatcttgagcgagggtggcgtcgggaagtgggctcaggagctgggcgacttgtcatcgagcag

SEQ ID NO: 37155 - DNA, 960 bp, Zea mays
  Peptide Sequence Number=SeqID_78934
atggtgtttgctgctggaggcacatcccgattcgtcggcggtggcgagccgcgcgagatctctcgcgtcctcccggttctcagggaccacgacgtccgtgccgacgcgcacctctacaacgcgctgatgaaggcgaacgtcgcagcggacgaccccggggccgtcctcagggagttccggcaggtttcagttactggtacattcttggtgaataaagaacatgtggaaagtcgcaggtggtcatttatgtttggggatgttgaagtaccagctgaggttttgaccgatggcacgctacgctgctatgcaccagcacaccaatcaggaagagttccattttatgtgacctgttcaaacatggtggcttgtagtgaagtgcgagaatttgagtatcgtgattctgaagctcattacatggagacttctcgttcccaagccaatggtgtaaatgaaatgcatctacacattcgtcttgagaagctactcactttggggccagatgaccatcaaatgcttgctataaattccttaatgcttgatgggaaatggtcaaatcaagaatcttctgtcaaggaagtagtttccactgctagggtccaaagtttaaagaaactggtgaaagagaagttgcatcaatggctcatctgcaaagtaaacgatgatggaaagggtcccaatgttctgtgcaaggaaggacagggtgtgattcatttagtagcagcactgggttatgactgggctataagaccgataataattgtcggtgtcaatgtgaacttccgggatgctcatggatggactgcactccactgggctgcgtctttgggaagagagcggacagttagtgttctcatagcaaatggacacaagatcccgatgcggcagtggcggacagcaacgggcgctcaacgccatcgtgcctcctgtgaacccatggtgagatgtgtggtctcgatctag

SEQ ID NO: 37156 - DNA, 996 bp, Zea mays
  Peptide Sequence Number=SeqID_78935
atgaagataaggcgaaaggccgatgagatcgacagacgattcgtgccgatcgcacaccgggaccacgacgtccgtgccgacgcgcacctctacaacgcgctgatgaaggcgaacgtcgcagcggacgaccccggggccgtcctcagggagttccggcaggtttcagttactggtacattcttggtgaataaagaacatgtggaaagtcgcaggtggtcatttatgtttggggatgttgaagtaccagctgaggttttgaccgatggcacgctacgctgctatgcaccagcacaccaatcaggaagagttccattttatgtgacctgttcaaacatggtggcttgtagtgaagtgcgagaatttgagtatcgtgattctgaagctcattacatggagacttctcgttcccaagccaatggtgtaaatgaaatgcatctacacattcgtcttgagaagctactcactttggggccagatgaccatcaaatgcttgctataaattccttaatgcttgatgggaaatggtcaaatcaagaatcttctgtcaaggaagtagtttccactgctagggtccaaagtttaaagaaactggtgaaagagaagttgcatcaatggctcatctgcaaagtaaacgatgatggaaagggtcccaatgttctgtgcaaggaaggacagggtgtgattcatttagtagcagcactgggttatgactgggctataagaccgataataattgtcggtgtcaatgtgaacttccgggatgctcatggatggactgcactccactgggctgcgtctttgggaagagtcgaaggacttccccaacaccctttcctccatcggtgcgacatcggccagctcatctgcgacgatgaggcatcttcgaccgacttcccaacaccccatcctccatcaatgcggctccagtaccccttcctccatcggcacgacagcatccagttcatctacgacgaccatttttcctttctgaggtag

SEQ ID NO: 37157 - DNA, 273 bp, Zea mays
  Peptide Sequence Number=SeqID_78936
atgggttttgagatactttgggctcaacttcaaaaggatgaagaggttataataaaggtggcatttttggaccctttgctcggcgccatagcctatggcgccgagctaacacagctcggcgccataggctatggcgccgaggtcgtgttgcgttggcacaacccagacgcgtggcgtcgacgtggaaccgagctcggcgccacagatcttggcgccgagctcggttgtgttattaaaatatttgttgcagacatgagcacaaagcccatctag

SEQ ID NO: 37158 - DNA, 220 bp, Zea mays
  Peptide Sequence Number=SeqID_78937
ttttggacctttgctcggcgccataggctatggcgccgagctaacacagctcggcgccataggctatggcgccgaggtcgtgttgcgttggcacaacccagacgcgtggcgtcgacgtggaaccgagctcggcgccacagatcttggcgccgagctcggttccacgtcgacgccacgcgtctgggttgtgccagagcaaaacagaacttgccctggttga

SEQ ID NO: 37159 - DNA, 267 bp, Zea mays
  Peptide Sequence Number=SeqID_78938
atggcaacatcagatcggccagcaggttttgtcacaggcaaggcaaccacaaccacagttttggaccctttgctcggcgccatagcctatggcgccgagctaacacagctcggcgccataggctatggcgccgaggtcttgttgcgttggcacaacccagacgcgtggcgtcgacgtggaaccgagctcggcgccacagatcttggcgccgagctcggttgtgttattaaaatatttgttgcagacatgagcacaaagcccatctag

SEQ ID NO: 37160 - DNA, 209 bp, Zea mays
  Peptide Sequence Number=SeqID_78939
ttttggaccctttactcggcgccatagcctatggcgccgagctaacacagctcggcgccataggctatggcgccgaggtcgtgttgcgttggcacaacccagacgcgtggcgtcgacgtggaaccgagctcggcgccacagatcttggcgccgagctcggttgtgttattaaaatatttgttgcagacatgagcacaaagcccatctag

SEQ ID NO: 37161 - DNA, 600 bp, Zea mays
  Peptide Sequence Number=SeqID_78940
atggcaacggtggagctgatggaggaggaggacacatcaaggttgagtgagcttatcgctcttgctaaggcaggattacatggggaagaggaggaggacacatcaatgttgagtgagctcatcgcactagctgaggcaggattacgtgctcaagaggaggacgagtttatgtctcaggccgccgaagaggtagaggccacttattacaagcagaagtgcgatgaaactaaggctgaggatcagctattctcccgagctgcagatgaagcagaagccaattattataagagaaacgcggaaaagtgtcatactggacaatgcattaagtggaacgaggttgtcgttgaggattgcacgacgaatgactctgaagatgagttacttatagattttttggaccctttgctcggcgccatagcctatggcgccgagctaacacagctcggcgccataggctatggcgccgaggtcgtgttgcgttggcacaacccagacgcgtggcgtcgacgtggcaccgagctcggcgccacagatcttggcgccgagctcggttgtgttattaacatattcgttgcagacatgagcacaaagcccatctag

SEQ ID NO: 37162 - DNA, 249 bp, Zea mays
  Peptide Sequence Number=SeqID_78941
atggggtggctcaaggtcaacggcgtgacgcgactgctagggatgatgcgagggcacggtggaaggagcggaggttgtaacactgcgaggagggttttataccgcagggaggtgtggtcgcgacgggccctgcgcggtcttgttgccgggtctaccgatgtgattgtggacattcctccacaactcatcacattcaatcaaagatccaaatcaaacaagtatcataagaacaaacagtcaaatgcctag

SEQ ID NO: 37163 - DNA, 576 bp, Zea mays
  Peptide Sequence Number=SeqID_78942
atggcggcggtggcccggcggtcagcggatcgatggatggctggacgcgacggaggaggtgtcgaggaggacgagggcgccaaagcgttcggccagacgataggcgatggcgcagggtcttcggccggctcgggattcttggttacgcggagatctcaacaacctgaacccaacgcaatccctatgagtccggcggtcatgggacctggtccagctgctccccggccgcatcgcctacgtgctgggttgaatttgcatgatgacatcacttcttgcatcagcatgacaagatggtgggttccaaagtataactattcattagggacactttactttgatttctattactattccccaaaatcagatttcgggcgttacaaatcctacccccttaaaaataatctcgtcctcgagatttatgtgattgtggacattactccacaactaatcacattcaatcaaagatccaaatcaaacaagtatcataagaacaaacattcaagcatacaaatacccataaaaatagttttgtttttgttcctaagagtaggtctcctattcctaaagtcactttag

SEQ ID NO: 37164 - DNA, 339 bp, Zea mays
  Peptide Sequence Number=SeqID_78943
atggcgaagaacccccctggcaacccagtggactcgggtgttggcattggcgacaacgtcgtggaggaagttccctggtggccgccactcgccccaccatgcgtgcgcgaattgctacagccgaccacttcgattggctcagtcgaggagatgcgcggcacttggttttataggcacgaggatgtgattgtggacattactccacaactaatcacactcaatcaaagatccaaatcaaacaagtatcataagaacaaacattcaagcatacaaatacctataaaaatagttttgtttttattcctaagagtaggtctcctattcctaaagtcactttag

SEQ ID NO: 37165 - DNA, 696 bp, Zea mays
  Peptide Sequence Number=SeqID_78944
atgcagacaaccagttgcactgtgggatctaatcattcgtgtatggtgccgattttagttcctcattgtcgcttggtttatctgggagggagggcatactatgttggaggtcagcgaaatcttggcaacaattgctttcttaatgtcatcctccaggcacttgccagctgtgatggttttatttcctttctagataatttgcttgcaactgatggcttgctacctgaagaaaaggctgtaagaatacctcttcttcttgctttaagttctctcttggaagacttaagcatagttcgagatgaaaggactgtgttgaatccacatggagtaatgcatgctttgagtttgtatgttggtcgcttcaatctgaccagacagcagctgtcattggacttcgagaatttccactgcttgcctctttcgccagtccttaatgcaaatggagatattaccagtgggtgtagcttggtggattgcctaaagtacttcactgtggtggagcatcttgacaactatcgttgtgaccggtgttggcacatcattgctgccaaatatctttctcttagatcagaagttgatgagttgcagggatatgttccccctggagtcactgccatgttcatcatcttcacgagcaacaaagcagctgattatcagtcagtgcccgaaggtatccaaaatttaagtactcgttga

SEQ ID NO: 37166 - DNA, 879 bp, Zea mays
  Peptide Sequence Number=SeqID_78945
atgaagttaagacttaccggagatgtgctcatggagcctgccatatgcactttcatgcatggttcttatccattaaggggtaaacactaccatgagatgataaatccatttcgtgtacttacagatgtttcttatatccatgtgtttcaggtcaagaagcttatcaaggagaaaaagaatgatgctggaatttttgaatatatcgatataaataaagagcttcaagagggaaagacgacaagtcattttgctgctatgttttcgggatcagggagggcatactatgttggaggtcagcgaaatcttggcaacaattgctttcttaatgtcatcctccaggcacttgccagctgtgatggttttatttcctttctagataatttgcttgcaactgatggcttgctacctgaagaaaaggctgtaagaatacctcttcttcttgctttaagttctctcttggaagacttaagcatagttcgagatgaaaggactgtgttgaatccacatggagtaatgcatgctttgagtttgtatgttggtcgcttcaatctgaccagacagcagctgtcattggacttcgagaatttccactgcttgcctctttcgccagtccttaatgcaaatggagatattaccagtgggtgtagcttggtggattgcctaaagtacttcactgtggtggagcatcttgacaactatcgttgtgaccggtgttggcacatcattgctgccaaatatctttctcttagatcagaagttgatgagttgcagggatatgttccccctggagtcactgccatgttcatcatcttcacgagcaacaaagcagctgattatcagtcagtgcccgaaggtatccaaaatttaagtactcgttga

SEQ ID NO: 37167 - DNA, 528 bp, Zea mays
  Peptide Sequence Number=SeqID_78946
atgccaggtgcggtggtgagggtcagtgatgctgttgcgtgcgtgtctctgcgaggacagaggtggtgcgcgacgcgaccgcgctttgtttatccgcgggtggcggaagagaggagagagcctgtgaaagggattctttgcttattaggtggtcaggagggtgcgtgcggatggggtgtgttttatgttgaggcagatggcaatgaggcacgtggcagctgggtgggacttaccggagatgtgctcatggagcctgccatatgcgctttcatgcatggttcttatccattaaggggtaaacactaccatgagatgataaatccatttcgtgtacttacagatgtttcttatatccatgtgcttcaggtcaagaagcttatcaaggagaaaaagaatgatgctggaatttctgaatatatcgatataaataaagagcttaaagaggtttatggcacgatgattcatctcagagtttctgattcttatgttttgtcacaagggcaagacgacaagtcattttgctgctaa

SEQ ID NO: 37168 - DNA, 351 bp, Zea mays
  Peptide Sequence Number=SeqID_78947
atgggaacaggcgtggcagtcggcgtgaccataggcgggccgacagtaattgcatcaacaagcgcgcaggagcagcaggccaatcgccaatcagactctggccccacctgcaggctcgcatcctcccctgaggcgggcccgggggccactgtcggtaccctgaatcaggggtaccctctactacagtataaagacgctatacacacggcgtcaggggtcatcctgcagacagcatgcctatccagtctattgtcaaacagtgcgcccgtgccatacggcgcactgtgctcaccatcccttatgcaagaagcttcccctgcacgccgaggatacgcagatctcggatgttag

SEQ ID NO: 37169 - DNA, 876 bp, Zea mays
  Peptide Sequence Number=SeqID_78948
atgacctcttcactaaagaccaacagaaagaggggtggattcatcgcctccatcgtcaagggtcacggcggctcgctattccgcgagaagctgatcgagggcgttggtacccacttcatcatcatcgtcgacgcgtccaagctcgtgtcgcgtctcggctgcatgggcatcaaccctgtcgaggtcattccctttggcgtgctccacatgctgggcctcattcatggccacttcgacggcttgcctagattgcacgccaggctgaggtctgttcccaccgccgctgccaaggaggaagaagactcagaacaatcctctgtcactaataatggcagctacatcgtcgagatgttcttcgaggacgacatccacggcgacctacgcgacatcagtgaccgtctgcttcagatcaccagcatcgtagaacaaggcatgttcctgagctacttttcccacgtcgaagaaggtggatatgcgagggagaaggtgcagctgaccgaggacggcgcgcctgtccagtctgttgtcaaacagtgtgcccgtgccatacggtgcactgtgctcaccatcccttatgcaagaagcttcccctgcacgccgaggatacgcagatctcggatgtcaggcatgatggtgcaaatcattgagcaccacgcagagacatccacggacttcctggtggaggaagaagttgttctccacgccacaggtctccgaccgcccagtgccgggcattgctgctgtgcacgctgcacggcagcatacaacagcgtagacatcccggactctgtcaagaacggccccaggagcattgtcagcagcaagggagttgctgcgtcaccctccaagctccacggcctcaccaggggccattaa

SEQ ID NO: 37170 - DNA, 909 bp, Zea mays
  Peptide Sequence Number=SeqID_78949
atggggtttgcagctactaacggtggcgagctcgtcgctggcggacatgatggtggagcaccctgctccgtgactgtcagagtttctgctggacgcgtctcctccccttgggtatcctcaaggggcgggtggtcgccgacttccttttcccctacatccgctgcttcgtggcacggttccggtaggacgagcgccaggcgatctgcaagcgcgccatgcagcaccagctatctcaagcatagaggaggatgtacccttcgacatgcccaccaagtgtttgatgtggtcattaactgtggtgcctactacgcccacaacatgacctcttcactaaagaccaacagaaagaggggtggattcatcgcctccatcgtcaagggtcacggcggctcgctattccgcgagaagctgatcgagggcgttggtacccacttcatcatcatcgtcgacgcgtccaagctcgtgtcgcgtctcggctgcatgggcatcaaccctgtcgaggtcattccctttggcgtgctccacatgctgggcctcattcatggccacttcgacggcttgcctagattgcacgccaggctgaggtctgttcccaccgccgctgccaaggaggaagaagactcagaacaatcctctgtcactaataatggcagctacatcgtcgagatgttcttcgaggacgacatccacggcgacctacgcgacatcagtgaccgtctgcttcagatcaccagcatcgtagaacaaggcatgttcctgagctacttttcccacgtcgaagaaggtggatatgcgagggagaaggtgcagctgaccgagggtgtgagccggcacctctatgtcactcgcacacatttcttgggaatgcattctagtgagttggagagaggtctagtgcattgcatctag

SEQ ID NO: 37171 - DNA, 222 bp, Zea mays
  Peptide Sequence Number=SeqID_78950
gcacgaatgacacaacttcaagatgctcagaaaggtgcagaagtgacttctgaggcaactgaccgggagcttgagcttgaagctcaactggttgaagcaagaagcatcatccaagagcagagtttctatagacagtgtatgaagggcgggcctagtgcagcggtagagcctaccgtctgtaaccggaaggtcccggattcgagccccatattatgcggataa

SEQ ID NO: 37172 - DNA, 798 bp, Zea mays
  Peptide Sequence Number=SeqID_78951
atgggggctccaaaacaaaggtggacttctgaggaagaggctgctcttagagctggaatagcaaggcatggagttggaaaatggcgcacaatattgaaagatccagaatttagttccaccttatgctaccgctcaaatgttgatctcaaggacaagtggcgaaacatgaatgtgattgtcagtacatcgagttctcgtgacaaggcgaagtctgcattgaagagaatacgaactattcccaagaataatgagcacaccatggcaattaccagagttacttctgatattgatgatgagattgttgacgaaaagcctatagtatcattgcctagtgaagcaaagaacacatcaagttcgaagaaatctcacaggctagataatattataatggaggctataaagaacttaaatgagcctacgggatcacacagaactactattgctaattacatagagaagggcgggcctggtgcagcggtagagcctaccgtctgtaaccggaaggtcctgggttcgagccccagcctctgcatattatgcgggagaccccgcacagtgcgggaagcctacggcactgggtacgcccatgcaagaagtggaaccaactttctgttcaccctcttccagctttatgaaaggaagactgctgcattgtctactggcctagtacttgtgtcatttgaaatgatcatgcttgcttattcgacaatgcttgttgaaattatgattgctcttatttgctacatgtggaatcagtttcttacccttgtttgcttaggagcaatattggccacctag

SEQ ID NO: 37173 - DNA, 756 bp, Zea mays
  Peptide Sequence Number=SeqID_78952
atggtgctgaagggcgggcctggtgcagcggtagagcctaccgtctgtaaccagaaggtcccgggttcgagccccagcctctgcatattatgcggagatcagaaagaggccagaggcccaaccctatatccagtgtctcgtgtgttactctgtcgtgcttctgggaagggagacgggttctctacagcttctcgcgcctctactgctgacgggagggaagggagcggatctggtgatccgtgccggccgagcgctcgagcctcctccgtcccgctcccgcccgtccgccgagcgccgacggcccgagcagccagcaccgcccagcaggcgagccgctccgcctccgcgcctctatccgccgtccgctcgtcccgaggccgcgagccgctccgcggctacgaccctccgcccgacggcccaagcagcggagcaggcgagcagctccgcgcctccggccttcgcccgccgtccgctcgggctcggaccgaggcgctccgcccaccgtccgtcgagcgcctgacggcccgagcaggcgagcagctccgcgcctccgcccgccgtccgctcggcccgagcagctcactcgctcagccgcagagccgttgtgccttccgcttccaggttccagccatacctaatttttttttcgtcctccgccactggctgtgtaaaagactgtattatattatagattacactgtttatatagtaaagtttaaattaagagatgaagataagctgctagagacagcttaa

SEQ ID NO: 37174 - DNA, 531 bp, Zea mays
  Peptide Sequence Number=SeqID_78953
atggcgggtgccgccgccactgcccactgctcactcagccgtccgcccagccctatctcttgcacgcaccgcatcttctccatcccctccccatcttcctctagcgccagccaccagggagcgccagccaccagggaggttcgagctcgccccctacgcgccctccctgctcgctgccctccagctcgccagtcgtgctcagctctgctccatcttcctgcgccgcccaagtccagtcaggaacttcctagcgcctccctctttgctcctgcgctcggtgcccatccctgtggtgctcagcgtttctccctctctggtagccgcagccctagctcgtccatggcgtttgggccaaagttccttatccccttcacgccggccgtccttgttcagccatggtcacatggtggtggaacacctaggtccgtccacggtctctcccttcgtcgttggtgctcgacgacctctgctgcttctcctctggtgtccttccggtgtgagtgccctcaccctagcgggcagcagcagtaa

SEQ ID NO: 37175 - DNA, 693 bp, Zea mays
  Peptide Sequence Number=SeqID_78954
atggcgtttgggccaaagttccttatccccttcacgccggccgtccttgttcaaccatggtcacatggtggtggaacacctaggtccgtccacggtcgctcccttcgtcgttggtgctcgacgacctctgctgcttctcctctggtgtccttccggtctgcagatgtgctccagtggagcttaccgctaccactttgtgttggacacttgaactgcaatgcacagtcacgggcacagatagtctcatctcatagtcagatccagcctctccgaatctggccagccttgaccagcctgaacgactggcacacagcacagggaacaacacgccgtgcacgcacgccccgcatgaggggaaagaaccgattcagatcggtcctgaccagattgaagctctgtatcagtatgccaaatttcagtttgagtgtggtaactactcaggggctgctgattacctttaccagtatggtgctttgtgcacaaacagtgagcgaaatgtacttgaatgctataccgacaaatgcacaccatcttattaggtatctagctactgcagttgttgtcaacaaaaggagaaggaatatgcttaaagagttgattaaggtcattcaacaggagcaccatacctacaaggatcccataactgaatttctggaatgcttatatgttaactatgtagttgtgggcttttga

SEQ ID NO: 37176 - DNA, 723 bp, Zea mays
  Peptide Sequence Number=SeqID_78955
atggagccgcctcggcgcccctgccacatccccgacagcccaacaccccatcccaccgctcgtcgacgacgccaccctgaccctcggtcgcggctaacgccgccagtgtcgcaagcaagctttgttgccgccacctgcacacaggctttgaaggaggtggagcgtcgggagcacgagatccatggtagccgccggggtgctggtaacgttgaggtcatctttcctgagtctcatgtggttagtggagcccctgcatcctctgttgctgatagcaccgagcctgcgtcgacatcgttggccgctgcagattcttcggcacttgctaagaaggacattgcagcgctgtctcctgagcttcgtgcacaagcaactgatctgaagagcaggcaaggtcacaggaccctggatggaaagtttgggagattcttccttcagtttgagagtggtaactactcaggggctgttgattacctttaccagtatcgtgctttgtgcacaaacagtgagcgaaatgtgagtgccctctggggaaagctggcaacagaaatcctagagtgtgagcagctttgggcctctctaaggataattccatcttggttggtgtccaagggtgcgaggatagaaccgggcaccgttgtcttcttccgtggcatggcgaaggtggtcgtaaatgagttcaccggaggtgggtgccaatgttggtcacttgttctcaattgctaa

SEQ ID NO: 37177 - DNA, 237 bp, Zea mays
  Peptide Sequence Number=SeqID_78956
atgggcgggccggcagtaattgcatcaacgggcgtgcaggagcagcgagccaatcgccagtcaaactttggccccacctgcaggctcgcatcctcccctaaggcgagcccgagggccactgtcggtaccttgaatcaggggtaccccttactacgttggaccggacctccgcaaggggcaccggaccactgtacgcacaacccggacccccgattacggcccgggacccccaagtaa

SEQ ID NO: 37178 - DNA, 684 bp, Zea mays
  Peptide Sequence Number=SeqID_78957
atggagacgcaacacggctcgcttcccaccccaagatactggggggcgcgtgggatggagccgtggctcagcccgctgcccacctccacgaggctgatttccccgctcgcgccccgaagcgtcacgggcaaggtctcccccgatgcgcaccagggttcccatcctatgacatggggccagacctcacatgtcatacaagctggcccgaagcgcgaagaaggcgaatcgtcgcacaaggagcgtgcaaccgccgtgcgattatacgcccctccatcttcgccacaaccagcggttaaggaggcgaaccgccgcacaaggaacgtgcaaccgccccacgattgtgcgccccctcggtttctctgcaaccggtggtccaacctatggcatgggggcccaggcccacatgtcatgcacccgacgcgccggtttctgggtgcagaaaagtcgcaccgctgctcgcgacaataccgcgcctcctcgagcccgtcgcagaagactgagaagataaatcttcaaaaccaatgcagcgactcgaggcaccctgcgcatggcccatcaaagacattaagtgcggaggtcacgggccagtcagccgcggggacatgcgtgacagtcgacgtgaccatgggcgggccggcagtaattgcatcaaccggcgccgaggagcagcgatccaatcgctaa

SEQ ID NO: 37179 - DNA, 759 bp, Zea mays
  Peptide Sequence Number=SeqID_78958
atggagacgcaacacggctcgcttcccaccccaagatactgggggggcgcgtgggatggagccgtggctcagcccgctgcccacctccacgaggctggtaatcatccttccccccgaatgctggaggaagaagcaggaaagaacgtcgcctccacggacatccccgcggaaatttccccgctcgcgccccgaagcgtcacgggcaaggtctcccccgatgcgcaccagggttcccatcctatgacatggggccagacctcacatgtcatacaagctggcccgaagcgcgaagaaggcgaatcgtcgcacaaggagcgtgcaaccgccgtgcgattatacgcccctccatcttcgccacaaccagcggttaaggaggcgaaccgccgcacaaggaacgtgcaaccgccccacgattgtgcgccccctcggtttctctgcaaccggtggtccaacctatggcatgggggcccaggcccacatgtcatgcacccgacgcgccggtttctgggtgcagaaaagtcgcaccgctgctcgcgacaataccgcgcctcctcgagcccgtcgcagaagactgagaagataaatcttcaaaaccaatgcagcgactcgaggcaccctgcgcatggcccatcaaagacattaagtgcggaggtcacgggccagtcagccgcggggacatgcgtgacagtcgacgtgaccatgggcgggccggcagtaattgcatcaaccggcgccgaggagcagcgatccaatcgctaa

SEQ ID NO: 37180 - DNA, 453 bp, Zea mays
  Peptide Sequence Number=SeqID_78959
atggagaggctggcggccatgggagtccaaggcgcctgctcctgtaggggcgcctgctcctgtagaaaagctgggcgtcgtagggcagagagacgaggagcagggcgtccatggccagagcgccgagcgtcgaggcttaggggaagcccgcgcttgccacggagagggagtagccatggagggcaacttggagatggcgccctggtttctgctggccgtcgagctcgggcatggggaagcaggagcaccctgcgcgcgaacgagagggccgagcggggccctgagcgccatgctatgaggaggccgaacgatgggcgaagcagagcgcaccatggagaagaggaagaggttgacactacagagattccgctggagaatgcggattcggactacgtatttggacgtagaccgactatcgagaaagcggattcggacaccgattggataacataa

SEQ ID NO: 37181 - DNA, 159 bp, Zea mays
  Peptide Sequence Number=SeqID_78960
atggagaagaggaaggcgtgctggcgagctggagcaagaggggctcagcgcgaggttgacactacagagattccgctggagaatgcggattcggactacgtatttggacgtagaccgactatcgagaaagcggattcggacaccgattggataacataa

SEQ ID NO: 37182 - DNA, 141 bp, Zea mays
  Peptide Sequence Number=SeqID_78961
atggaagatgagcttgacgtggggaagaaggctgagagtgcctcaacagagattccgctggagaatgcggattcagactacgtatttggacatagaccgaatatcgagaaagcggattcggacaccgattggataacataa

SEQ ID NO: 37183 - DNA, 141 bp, Zea mays
  Peptide Sequence Number=SeqID_78962
atggaagacgagcttgacgtggggaagaaggctgagattggctcaacagagattccgctggagaatgtggatttagactacgtatttggacatagaccgaatatcgagaaagcggattcggacaccgattggataacataa

SEQ ID NO: 37184 - DNA, 195 bp, Zea mays
  Peptide Sequence Number=SeqID_78963
atgggagaggagctcggctcgacgcggaagggagcagagaggggcgtcggtctgcccttctcgaggaagaagggtgccgctgggacttccctggctgaggttgacactacagagattccgctggagaatgcggattcggactacgtatttggacgtagaccgactatcgagaaagcggattcggacaccgattga

SEQ ID NO: 37185 - DNA, 285 bp, Zea mays
  Peptide Sequence Number=SeqID_78964
atggctagggatccactacgaggcctttacaaagttccactagcttccgaaaacccgctacagtttatgggaagagcacttgcaagaatccctcgtctgaccaccatcgcagcaaaatcaacccaagaacgtccctggatgcaactcccctactgcccttgcccctttcgggtaccttcagacttggacccttcagacttgagtcaaaatcacagtgtgaagaagcacaagggaaatgaaggatggaacagagccgaagctatgcgcaagggagcttcggcatga

SEQ ID NO: 37186 - DNA, 378 bp, Zea mays
  Peptide Sequence Number=SeqID_78965
atgcctcctagactccacctcctgcttaggaaagggggaagagtcctgttgctccctctcctggtgtcggcgctcctgctcctcacgcaggcggcgatgcagtctctccagttactaaatatgttgtaccccgtacccacaagtcatgttacccatctaccaagggatcgcgacttccatacacctctaccaaggaagcgaggcagggcaacactacgaggcctttacaaagttccactagcttccgaaaacccgctacagtttatgggaagagcacttgcaagaatcccccgtctgaccgccatcgcagcaaaatcaacccgagaacgtccttgcatgcaactcccctactgcccttgcccctctcgggtaaggtag

SEQ ID NO: 37187 - DNA, 600 bp, Zea mays
  Peptide Sequence Number=SeqID_78966
atggctagggatccactacgaggcctttacaaagttccactagcttccgaaaacccgctacagtttatgggaagagcacttgcaagaatcccccgtctgaccgccatcgcagcaaatcaacccgagaacctccttgcatgcaactcccctactgcccttgcccctttcggcaatagcaaaaactacccaagtgattcaggggtaaacaagatgacacgtgtcctcgcgctagtcgtagcaatacaaacaaacatgaggacaagccaaacgctaaggacggacttacatgggaaaggggttcgcgaatggggcctgaccacgtcgtggagagtccgcggcggaagcagaatgtccagcgaacaattactggtgcgctgtcaacccatcgagcccgacgacttcacgaaagctccaacgagtcacggcaaagccctaggtcgatgcgccgaggatgattcgccaccatgggtggagatcttcggcggcggcccaggcgagatcttcaggcgtggacgtgccatggtggctgcatcatcacgaacggcgcacggaagaggcggatgtggaggaggggtatgggagtggcacagcgagcagtga

SEQ ID NO: 37188 - DNA, 387 bp, Zea mays
  Peptide Sequence Number=SeqID_78967
atggtctccgtggccagaggcctttgggcagccattggtgaaattgacttaggggaagtgatcgggaatggttcaattccatgcccgctgctcgggagcaccggtcttggcctcctccggccggtctacgtgctcaccggagctcggctgcgctcggcgccgtcggggacctcatcgcgtgaaggaatagaacttcaaggacctctgtgcaaatcgtcagtgactcataagaataaaaacgaagaagaagtcgaagtaaccgaagagaagacaccaccaccttcggaatctcaggcaggaaattgtttctactttgatatctgcggatccgagcctgactcacttatcaacgaaggcaagccccggtgcattcgccaccctccttga

SEQ ID NO: 37189 - DNA, 378 bp, Zea mays
  Peptide Sequence Number=SeqID_78968
atggcgctggacaccaagccattgcgccatgtccctagaccctcctcaagtttgatactagaacccaaaacccccaccctctcctctttgaacttcactaatgactccggaaaccctaagttctcggagttccgtgaaggaaagttgtattcgagacttacatggcattctgatgagcattacatggcattcattcttatatacacacatatatggttctgtttagaaaatgaagaagaagtcgaagtaaccgaagagaagacaccaccaccttcggaatctcaggcaagaaattgtttctactttgatatctgcgggtccgagcctgactcacctatcaacgaaggcaagccccggtgcatgtgccaccctccttga

SEQ ID NO: 37190 - DNA, 387 bp, Zea mays
  Peptide Sequence Number=SeqID_78969
atggaccggttaattcgtagtcccaacgatgaaattgatttgggggaagtgttcgaaaataaagaagaagtcgaagtgaccgaagagaatacaccccaaccttcggaatctcaagcaggaaattgtttctactttgatatctgcggatccgagcctgactcacctatcaacgaaggcaagccccggatccactttagtaagcatttctgcaaaacagagtctttgatttttgagaagccttaccttgactcccttaaccagcatccccttgagagtcttttctttagtcgggtgaggaagcgacaaacttttgttgcttctgttctaaggtggtaccaaaggatgaacgcaaggaatgaagtgcgggaggaaaggatcctccattag

SEQ ID NO: 37191 - DNA, 465 bp, Zea mays
  Peptide Sequence Number=SeqID_78970
atgccccaccgcaccgctacgcaggactgggtgctttgggacgtcgaggtcgtgcagctcctcacgcccgcgccgcggcccgagcgcaccggctccgcgcccgtcgccaagttgtcggactcgcggcccgcgccggacctcggcaagccactacaggcgcatgggccgcaccaccacccatccaagtcctacgcgacgccaccgcccacgctcgagcccgaggcgccgccgccgtcgtccaggttcaataagctcgagcgttccgctgattgggcaccacagacggtctgtggttgtggatgggattatcattttggcagaaagctggttgaagctcgtgatgaactaatgaaaggaaggtaccacaagtacaagagccccagaaggggatctatagacccaagcgatgagtcgttcttcattaagcactgcctctattcgagttctttgccactagcccactag

SEQ ID NO: 37192 - DNA, 201 bp, Zea mays
  Peptide Sequence Number=SeqID_78971
atggaagggcaggggcagcacaggatctactgcatttttgacgacgcagtggcggacattggagacgggttcgtgtgggatgccgactcccggctctactaccatgccagcgttccgcagattgggcaccgcagacggtctgtggttgtggatgggattatcgttttggcagaaagctggttgaagctcgtgatgaactaa

SEQ ID NO: 37193 - DNA, 1521 bp, Zea mays
  Peptide Sequence Number=SeqID_78972
atggcgacaggagctcgacttcgagcgggcctccccagagatgatgctcctccgcagcaggaaatggtagcagcaaacggaacgggccaaccgcagctggtggtggacgaacacaagacgattcttgaagaggtccccagagaagaaaatggcaccctttctgccgccaattatgctgctcaaggtcatgagaatgttgccgctgagtactacaaacaacaggaagaacaggaaaaagttgtcgcgagtgaatcattagccatatggctgtctaatatcgcaaatatggttctctttgctgcaaaagtgtatgcttcaacttgttgtcatgatatatcttgtggtttactgccttttcaatgcaaacgccaaatccctatagaaacccaattggaaaagcgtatgcagccactgaaccagggaatgcaagttgggattgcttggctggtcatacgaggtttgatctgttctgggtttcatgtaggaatcaaggaactagctgaggtctccttccctcaagatgacaaacaaacagaaaaaactaccctcaagcgttccgctgattgggcaccgcagacggtctgtggttgtggatgggattatcgttttggcagaaagctggttgaagctcgtgatgaactaatgaaaggaagcttgccggttctaactcaacggggtgaaccacgtatatattctcgtacactcttcccatatgaactttttgtgaagctctatagcaaggttgagttgcacccttttggtcttcataaccttggtaacaggccaatttatgctgggaatgcactttgtactgtgaaatataccgacgaggatccttgcatgatgagtattagatcaacttcattttcccctactgctgatgctatgtctgaaacaaaggttgcacctatcacccaggttgatctctctttcctcagtgaagggaaatctacatgggtgaatctgacatcccaagacacaaagcggcatgatcttgcaaatgcatgtgtagtagtcacaggaggcagaggtttaagaagtgctgaaaattttaagttgttggagcagcttgcggagaaatttggtgcagcagcgggcgcgactagggctgctgttgaagcaggttatgttccaaatgaccttcagagttgcaggagaaggctgcagcagcttgaatctcagctaatggaagcgaacagaatcaaagaggaaggcaacactggaagagataatgagaaggggggcactgaagaggacgatgaacctgttgtagtagttgccaaaatatgggagaacaacaagtttgttgactatgattcatctaaggagaaggagaatgatggtgactcacaggttgatttggaatcaaacaagggggatgcaggtcttgatagcaacgggttgcactcaactaaggagaacagtggcagggcatcaccaactaaacaacaccagcagtataagaagaagtctctgctgaagagattcggtggtctgctaaaaaagaaaagcgaaaattag

SEQ ID NO: 37194 - DNA, 228 bp, Zea mays
  Peptide Sequence Number=SeqID_78973
atggcatcatcatctgctgcttcaggcactcctgggatggagtgcaaatgcaaccttttcatcaaagataaaaatttgcttcatgtccaagcgaaagcaatcgaaagatgtcgtcaaggcactgaagaaaggattggccacaagaatccaaaagtacaacttcttgcgctaactggcccaagctccatgggttactggactgataaaacccttaaccatttggaatag

SEQ ID NO: 37195 - DNA, 2151 bp, Zea mays
  Peptide Sequence Number=SeqID_78974
atgaggcagcagactggtaagcgtccctcccaacacagggaatatgaaagagaagaaaggaaggaccaacacaagaggtcgtttccccgtgttcaggaaagctctaataatgatgggctggtgctttaccgtatactctgtccaaacagtttgattggtagtgtcataggaaagcatggcaatgtgataaatgctatcaggcatcagacaagtgccaaagtcaaggttgttgacccgtaccccggtgcagacaaaagggttaccttggtatattgctacgtcaagcatagagacattgatgctgagggtgatgacaatgagcctgtttgtgcagctcaagatgcattacttacggcatcaaatgttataggaaaatctggtgttgtcatcaagcatcttcggtcaacatcaagagcattcattaaagtgagcccaaaagatccaagtgaccctacacattcatgtgctatgagttttgatttgttcaggcgtgcacaacccgtggttctgccttcgcactcgcgacaccttgccccccgcacccgcttccgtcaatcacgcagcgctcacaccccgtccgccccagatccagatcccgccaccatcatcggcgcgacctccccgcccgccccaaacccggatcccgtggctcccccgtcaagctctccagtctcccccgcttcagcagcaaaccccgcaggctgctcccgaacgagggagaacgcgcgggcggcggtcgcgtcgttgccgaaccctagcagcttctcccccggtgtcggcggggagagggagaaggcgaccatcgcggcgcacccgctgtacgagcccctcctggaggcgcacgtcccctgcctacgcgtcgccacccccgtcgaccagctcccccgcatcgacgcgcagatcgccgcgcgccccccgccgcttgccacggccgccggggccgcgaccgcgggagggccgtccggcggggaggagctcgacctcttcatggtacgacttgacccccctacaggctccttcctatcccacctgctctgcagctgtgcgctgcagttgaactgctataggtttgcggatttagggtgtggggaatttgggatttgggattcaaggaagggaaaccgtgtgatgctgttccggactgctcttgcaccaatggagttgtatgaagaccagtcaaatgacttgacagatggcgataagaaccaagaagccaattgtagtaatgtggatgatatgtatcatggcctcactatcaactctgactctgagattgattctctgcctgatcctaaggaccaggcggcggcgcttgcggcgctggccggctgggtgtgggcggcctccttctacgacctcacgcaccgggcgcgcgcgctcgtccagccgtgggtcacgcgccaggtgcacgccgagacgccggccatcctcaggttccagaagttggagcacaagatgctggacaatttcttctctgtgttgtcatgtgttgtctccgtgcccttctacacgggattcctccctctcctgttctggagtggacacgacaggctggctgggcagatgaccctcctcatggctttctatgactacctcggcaactctgtcaaggatatggtgtcagcccctcgaccatgctctttgcccattagaagagtgacagctacagaagatgagaaggaaaatgccatggaatatgggctaccgtcatcgcatgctctcaacactgtttgtttgacggggcaatcgaaagatgtcgtcaaggcactgaagaaacggattggccacaagaatccaaaagttcaacttcttgcgctaactgaggacgggtggacaactcgtcctcatccttgcaaacgagtagctccataccgagaggcccttttgcttgccgagaagcatcagaatctggagactgacagtgacaggtcggctgcggtggttgcagatgctcctccgcagcaggaaatggtagcagcaaacagaacgggccaaccgcagctggtggtggacgaacacaagacgattcttgaagaggtccccagagaagaaaatggcaccctttccgccgccaattatgctggtaatggcagcatcaacgacgacgacgctaccttatcggcacaacaagaacgtgatgttcagctttag

SEQ ID NO: 37196 - DNA, 693 bp, Zea mays
  Peptide Sequence Number=SeqID_78975
atgtcttcgcccgagctccgggagtcttcggcgtggatgctggaggttaccaggggtcgatggcccaagaatgttccgatcccccgcgcggctggcgaagacttctttacgtctcacatggctcgtgacttgaaggtgtttccttacggacggaatattgctgttgttgtggtagtgatgaacaaggaccatcaagacgctgcgcagaagcgtcgggcggtcgttaggctcgcagatcctatgcgcgaggcgaagagggcatgggggagcgcaaagactgttgttgcctccggcagtagcaagccggtgccggctacgaaaccggctgtccccggacccagcaaggcttcggcgagcgcaaagactgctgcctctggcggaaccaagcctcccctaggcggacccgcgaaaggacgggagctgccttcaccggggagacgtgttgccgacttcggcacgaatatcagtgtcgaggattattttgttgggtcgggtgaggggcaattagttgttgtcccgccttcagcggcaaccacgtcgccaacggcggtggttggggcgaagggtgccgcgcaagacccgtgggccactttctgcgcgagcggcgagattctgtcagccgttgccgccaaggacgtggcgggctccatgtcccagcggctgagggaggcgtcgcagcagctgttgcagtag

SEQ ID NO: 37197 - DNA, 447 bp, Zea mays
  Peptide Sequence Number=SeqID_78976
atgaatgcattgtcccgcgaggggtgcaggcactacgatgtcttcgaccaatcggacgagaactttgaacgtgaaatcttcaaggccgaagaccctgtagtgaagcagtcagcgggggcactcttcgataggatgtgcagtctgctcggtcgggaggcggtcagggagcggtccgaccgagcgatagagcagctaaagatggcgcgtgctgaggacgtcgaggaccttggaggtctggccggcgcgccacccgaggctacggaggtcaatccggtgccgcccccggatgccggtgaaggctcctcggctgcacccgtgcctactgtggccggtgaagaccctttgtcagcccctgtgccgacgggcaaagatgccttgagggtggtgtctaagccggcggccgaagaccccacgaccgcggccgggccttcgcaggtggctgaatag

SEQ ID NO: 37198 - DNA, 2136 bp, Zea mays
  Peptide Sequence Number=SeqID_78977
atgtcttcgcccgagctccgggagtcttcggcgtggatgctggaggttaccaggggtcgatggcccaagaatgttccgatcccccgcgcggctggcgaagacttctttacgtctcacatggctcgtgacttgaaggtgtttccttacggacggaatattgctgttgttgtggtagtgatgaacaaggaccatcaagacgctgcgcagaagcgtcgggcggtcgttaggctcgcagatcctatgcgcgaggcgaagagggcatgggggagcgcaaagactgttgttgcctccggcagtagcaagccggtgccggctacgaaaccggctgtccccggacccagcaaggcttcggcgagcgcaaagactgctgcctctggcggaaccaagcctcccctaggcggacccgcgaaaggacgggagctgccttcaccggggagacgtgttgccgacttcggcacgaatatcagtgtcgaggattattttgttgggtcgggtgaggggcaattagttgttgtcccgccttcagcggcaaccacgtcgccaacggcggtggttggggcgaagggtgccgcgcaagacccgtgggccactttctgcgcgagcggcgagattctgtcagccgttgccgccaaggacgtggtcgacttcaccgaccgcgtggcgtcgggtgtcctgactgcggacgtggctgccgaactcgagagtcttcaggcgcagcatgcggatgctgtccgggagaagtcggctgcggaaagcaaaaaccgtaggctggcggagaaagtggccgccatggaggccgagaagacggacctccggcgccagctggcagaggagaggagggaggcgaaccaggccatcgctgaagcgcaggctgcgcgagcggaggccaaagtggcgcgggcggagagcagtctcgccagccaacgcgccgaggagctggaggcaaggttcaacgccctgcgcagccgcgtggacaaggccgaggcctcgacgcactcgaaagtcgagcggacgcacgcacagttcgtggatgcgtaccgcgagctgggtgcgcgaactgctgacttcgaagtacccggtcgagaagcaggccttcgcttcctcgaatggttgcaggaggagctgctggtgctcccggccattgtggagggtttcatgtccttcgcctccctcgtcacctgcgaggggaccatgaatgcattgtcccgcgaggggtgcaggcactacgatgtcttcgaccaatcggacgagaactttgaacgtgaaatcttcaaggccgaagaccctgtagtgaagcagtcagcgggggcactcttcgataggatgtgcagtctgctcggtcgggaggcggtcagggagcggtccgaccgagcgatagagcagctaaagatggcgcgtgctgagaacgtcgaggaccttggaggtctggccggcgcgccacccgaggctacggaggtcaatccggtgccgcccccggatgccggtgaaggctcctcggctgcacccgtgcctactgtggccggtgaagaccctttgtcagcccctgtgccgacgggcaaagatgccttgagggtggtgtctaagccggcggccgaagaccccacgaccgcggccgggccttcgcaggttcaggggtttgggcctgcgcacgcaaccgctactgacaatgctaattttgtggcggcttcgactgtggttgctaaagacgattctgatgattctgtgtctaattgttttgagtctgatgattctgggagttcgattgtgtggacagaggagtcttcggatgaggacttggattattttgtggcattggatgtggctgtggtggagacttctccgcgtgtgatgggtgctgaggatcttccgggtgcgagtgctgggcgtaggcggcgaagggcggtggcgaaacggagagtgagtgagttgtcgcgaagtgataggcgtcatcgtggtgagatggagggtggtcgtcttcgtgtggacgggactggcaaacgggaattgttgtcctcgccggctggggcgagtgtaggtgagggggagctgcgaaatctttttgagggtgaggaattgaggataatgttgttcaactacagggagatgggtatcatcccgaaggttgagccaatataa

SEQ ID NO: 37199 - DNA, 369 bp, Zea mays
  Peptide Sequence Number=SeqID_78978
atgaggctgctaggaaaattagttgagaatgaatgtggaaagatagaccgtctgatggagttctacacaaggaaaattgtgctaaaatttcgatgcttggttacgaaagagtaccataccggaagttcaaaggacaaatcaattaacttagataggtggaccattagtgtatctattgagaagttgagaaaaggatggaggactgcccaatcgtgcgcaggcgccgccggccgagctgggccgtggctcgtggaagcattcaccagtaaaacagtagaattcttgttggacttgtgctctggggtcgggagcagacgtgagagcgagtttgggccgtggatctcgatccggcggtggggagcccattag

SEQ ID NO: 37200 - DNA, 165 bp, Zea mays
  Peptide Sequence Number=SeqID_78979
atgaggcttctaggaaaatcagttgagaatgaatgtggaaagatagaccgtctgatggagttctacacaaggaaaattgtgctaaaatttcgatgcttggttacgaaagaggtggatgaggaggcatccatttgcacattgcttgggtggtgcagttgtggttaa

SEQ ID NO: 37201 - DNA, 258 bp, Zea mays
  Peptide Sequence Number=SeqID_78980
atggggccatctgattctgttggagtttatgttgattatggttctgagcagattttaaggctaaaggcagagcttgcgaaatcatcaagtgaccctaaaactttccatttagaggctcttcgttctactgcctattctggttgtattaacaaaggctcaagaaggatgaggctgctaggaaaattagttgagaatgaatgtggaaagttagaccgtctgatggagttctacacaaggaaaattgtgctaaaattttga

SEQ ID NO: 37202 - DNA, 525 bp, Zea mays
  Peptide Sequence Number=SeqID_78981
atgaccacactcccatttgctcatccaccgcattcctcctcagaagccgaacgaaacaggggtacccttcagatttccgcatcaactcgggttattcgtgtgaggttccaagatccacttcagccaagcctaggcagtggacatatggattcagcagactccatagccgacaaggcaattggacggatgcaagagatttcggacaagatattttccgtagcgagggaaacaatccgtcctggacacgggttgacctcatttgatgctaccaaacttcgtgtagctttggaggagatagcttgcatgctggagcaagactctctggtgttgcaagagcatttggacatcgtgaacaactttaacatcccggttgacagcagctatgaaccttctaccttgtcgtcaccacccccatctgacgacgaccttactccacattgggactttgcggagcatttccaaaacttttggggtgttgaatatgactccgatcagatgccttcgtttagtgacaatgatgtttaa

SEQ ID NO: 37203 - DNA, 660 bp, Zea mays
  Peptide Sequence Number=SeqID_78982
atgaatcacggcttgggtctcatatatacaggcgtggactgccacccagtgccaggcatgcgtaacaacccaagcggcagcggcggcttcgcccggtggtttcggcatcagctgcgaccagaggtggatggtggcccgacccgtcggacccatgtggcggtgagcaaacgagatagagcccgcccaggtgacactggcacatgggcccagttggtcggcgcagatttccccatcaactcgggttattcgtctgaggatccaagatcaacttcaggcaagatggattcaacagactccatagccgacaaggcaattggaaggatgcaagagatttcggacaagatattttccgtagcgagggaaacaatccgtcctggacgcgggttgacctcatttgatgctaccaaacttcgtgtagctttggaggagatagcttgcatgctggagcaagactctctggtgttgcaagagcatttggacatcgtgaacaacgtaaacatcccggttgacagcagctatgaaccttctaccttgtcgtcaccacccccatctgacgacgaccttactccacattgggactttgcggagcatttccaaaacttttggggtgttgaatatgactccgatcagatgccttcgtttagtgacaatgatgtttaa

SEQ ID NO: 37204 - DNA, 624 bp, Zea mays
  Peptide Sequence Number=SeqID_78983
atggcgaacttgacttgtaggtcctccgccgtgtcggggtgtgaccgcggctccgcaacctcttcgataaatcccacaggcatcttgaagccgcgactcgtcccgccatctcatctttcgtcttcccagatttccccatcaactcgggttattcgtctgaggatcgaagatcaacttcaggcaagcagccaaggcacaggacatgtgactacgccaaatttttgtagatactacccatgtctgatggattcagcagactccatagccgacaaggcaattggaaggatgcaagagatttcggacaagatattttccgtagcgagggaaacaatccgtcctggacgcgggttgacctcaattgatgctaccaaacttcgtgtagctttggaggagatagcttgcatgctggagcaagactctctggtgttgcaagagcatttggacatcgtgaacaacgtaaacatcccggttgacagcagctatgaaccttctaccttgtcgtcaccacccccatctgacgacgaccttactccacattgggactttgtggagcatttccaaaacttctggggtgttgaatatgactccgatcagatgccttcgtttagtgacaatgatgtttaa

SEQ ID NO: 37205 - DNA, 1737 bp, Zea mays
  Peptide Sequence Number=SeqID_78984
atggctacattatcatggttgatggaatggtcagtggagaatgtttgtgaggcatttttctcctatttcggggaaaatcagcatgtgagattgccatctaccccagtgatccccgttgatgatccgaaggtgccccttcttcatacatgtttgcaccggttcaaggggacccttggtggcagagagaggcatcgcacctgcttttcgccgaggtgcattattgcaagtggtgacgaagatttgattgaccgcttcagaattgacgctactttccatcgactcacagagatccttgggagttggtctcatgggtactatttcaaggaggaagctattggcttgttatttagtcttctcaccgaggttgatttttggatggccgatgaaactggtccttgtgggccatgtattggttttttccatgattgttcggacaacaatgatggtgttgattccgtaaggaacataacgaatgccaagcttgttgagatatgccgtcttgtgtttgttgagttcgatcggcaagcagatggcgtcttggagcctttccaagctaagcatgtcttaacaaggattaatctcgaatgtttagctgccattcttcaaaagaaagaaagccactatgacttagatgtatacgcttatgtaattcgtcaagtctactcgcgtactggtaaaggtttcaaggattacacaggtaaggttggtgctgttgatacaaatggagttgatacgacataccgcctagtcgcagatcacatgagaatgatcgctgttactaatgcacccggttctcaacttgggttgggaaatgaaggtcgcgagtatttcctgaagtgtgctgataaacaggctgtgaagtatggctatcaagtacttaagataaatgaagaggattacgacatagaaataatcgacagaatagtcaaagatgaagtgatgatctacaaaaagactaaagcagagttgtggaatcacgaacagccgtttgatacgaggaaaaagaagaaaaggaacaaaaatgtccctgctgttgtgtggtatccgacaaggattatcgaatttcttggtccgcgcacacccattatcctcaaggaaaaggatacaaggtgctcccttgtagcaatattggcttggctggttacccggaatttgcgctgtttacttacttttacatgcgcgtgtacaaccaaacaagttaatagatcagcattgaatatcatttatagtgtattagccctctcaaaaaaaggtttcaccctcacttcatggagcttattggaaatgcctaggacagagttcattcacttcttgttcctgtgccactgtaggcaacgttctcctgcttggagagaaaaaaaccctcgatttagatatcaagaaagtgtcggagagccatctcatccatcttgtccagaggccccttttgtgtggcaatacacaaatgcaggcatgcaattgtatatatgcaagtgttttgaaaatgaatgtccattaactctaaagctaagctactgtccacttatactgcagttggaacagaacttggaactatcagagttcaataaacaagttcttggtgtattgccgaagcttacatgcagcttatactttgatgtgacattttctagctcttgtggcttagagaagacctttgaaactgcactgtttggttttcttggtgtccctctacgccatggctggttggtagatccccagattctcttccttacataa

SEQ ID NO: 37206 - DNA, 442 bp, Zea mays
  Peptide Sequence Number=SeqID_78985
gggggacatctcttttgaaccacatgaaactgtggtgtcaatggagtatctacttggccttgtcctcgctcttcttggaggaagtgtgaaaatgcaggactattctgatgaaagaaaaagtcagatattgaatgtggtgaagagtctggccggagggtttgatatggatgttatcttcaccagaacggatggttttacaatgactccagagtggttgcttctggattgcttagatctcaaccttcgacatggttggattgctgctaggatccttccatcctccgtccaatctgctcgtctattctttgacttcccaaggccagaaccggacgagggaggttgccgctctgttggacgaaattcggacgccgaagaagccttccagacgagccgaaagtgcggtaaagaagggaaaactatgcgtcttcctcccaggctgtag

SEQ ID NO: 37207 - DNA, 633 bp, Zea mays
  Peptide Sequence Number=SeqID_78986
atggatctgaagaagaaagagaaggatagtaacaaggacaaagatgatgaggataccaaggataaagatgatgggaaagaagaggatagtaacgaggacagagatgatgaggagaccgaggagaaagatgatgggaatgttgcccctcaaacctatttcttgcagggcaggcatatcaacttgaatgttaggcctatcaattttcttggactatctacccatgttatccaccagataaatgatggcccatgcgcccttattgcagcaatgttctattctcagggggacatctcttttgaaccacatgaaactgtggtgtcaatggagtatctacttggccttgtcctcgctcttcttggaggaagtgtgaaaatgcaggactattctgatgaaagaaaaagtcagatattgaatgtggtgaagagtctggccggagggtttgatatggatgttatcttcaccagaacggatggttttacaatgactccagagtggttgcttctggattgcttagatctcaaccttcgacatggttggattgctgctaggatcaatggagtattaaattctctagtcactgattctaattatttagaaactcgtgtagtttggcagacgcttgacgggatgtag

SEQ ID NO: 37208 - DNA, 2442 bp, Zea mays
  Peptide Sequence Number=SeqID_78987
atggctacattatcatggttgatggaatggtcagtggagaatgtttgtgaggcatttttctcctatttcggggaaaatcagcatgtgagattgccatctaccccagtgatccccgttgatgatccgaaggtgccccttcttcatacatgtttgcaccggttcaaggggacccttggtggcagagagaggcatcgcacctgcttttcgccgaggtgcattattgcaagtggtgacgaagatttgattgaccgcttcagaattgacgctactttccatcgactcacagagatccttgggagttggtctcatgggtactatttcaaggaggaagctattggcttgttatttagtcttctcaccgaggttgatttttggatggccgatgaaactggtccttgtgggccatgtattggttttttccatgattgttcggacaacaatgatggtgttgattccgtaaggaacataacgaatgccaagcttgttgagatatgccgtcttgtgtttgttgagttcgatcggcaagcagatggcgtcttggagcctttccaagctaagcatgtcttaacaaggattaatctcgaatgtttagctgccattcttcaaaagaaagaaagccactatgacttagatgtatacgcttatgtaattcgtcaagtctactcgcgtactggtaaaggtttcaaggattacacaggtaaggttggtgctgttgatacaaatggagttgatacgacataccgcctagtcgcagatcacatgagaatgatcgctgttactaatgcacccggttctcaacttgggttgggaaatgaaggtcgcgagtatttcctgaagtgtgctgataaacaggctgtgaagtatggctatcaagtacttaagataaatgaagaggattacgacatagaaataatcgacagaatagtcaaagatgaagtgatgatctacaaaaagactaaagcagagttgtggaatcacgaacagccgtttgatacgaggaaaaagaagaaaaggaacaaaaatgtccctgctgttgtgtggtatccgacaaggattatcgaatttcttggtccgcgcacacccattatcctcaaggaaaaggatacaaggtgctcccttgtagcaatattggcttggctggttacccggaatttgcgctgtttacttacttttacatgcgcgtgtacaaccaaacaagttaatagatcagcattgaatatcatttatagtgtattagccctctcaaaaaaaggtttcaccctcacttcatggagcttattggaaatgcctaggacagagttcattcacttcttgttcctgtgccactgtaggcaacgttctcctgcttggagagaaaaaaaccctcgatttagatatcaagaaagtgtcggagagccatctcatccatcttgtccagaggccccttttgtgtggcaatacacaaatgcaggcatgcaattgtatatatgcaagtgttttgaaaatgaatgtccattaactctaaagctaagctactgtccacttatactgcagttggaacagaacttggaactatcagagttcaataaacaagttcttggtgtattgccgaagcttacatgcagcttatactttgatgtgacattttctagctcttgtggcttagagaagacctttgaaactgcactgtttggttttcttggtgtccctctacgccatggctggttggtagatccccagggccctcagctaacccgatatggattctcttccttacataatgacctcatagcgttacaacctactgtcctgatctggaatgaaaacttaattacaatatctaaggcaaatagtaaacagggggaaactaatacactggttctacatatccgacgctgtcaggcaaatggtgatggagtttttgttgattgtaactttgtgcctacagattctaagattcaatcagtactgggggacatctcttttgaaccacatgaaactgtggtgtcaatggagtatctacttggccttgtccttgctcttcttggaggaagtgtgaaaatgcaggactattctgatgaaagaaaaagtcagatattggatgtggtgaagagtctggccggagggtttgatatggatgttatcttcaccagaacggatggttttacaatgactcaagagtggttgcttctggattgcttagatctcaaccttcgacatggttggattgctgctaggatcaatggagtattaaattctctagtcactgattctaattatttagaaactcgtatagtttggcagacgcttgacggggtgcccaagtcttctagagttggtgtcaaggctcctctctgtcggtgttttgggtccgaccgcacacccggggttgcccctggaggtgtttttaggagtaggacggtgtcgatgactgtagcaaaatggttcgtgccagatgcatga

SEQ ID NO: 37209 - DNA, 570 bp, Zea mays
  Peptide Sequence Number=SeqID_78988
atggagtttttgttgattgtaactttgtgcctacagattctaagattcaatcagtactggcaatgttctattgctcagggggacatctcttttgaaccacatgaaactgtggtgtcaatggagtatctacttggccttgtccttgctcttcttggaggaagtgtgaaaatgcaggactattctgatgaaagaaaaagtcagatattggatgtggtgaagagtctggccggagggtttgatatggatgttatcttcaccagaacggatggttttacaatgactcaagagtggttgcttctggattgcttagatctcaaccttcgacatggttggattgctgctaggatcaatggagtattaaattctctagtcactgattctaattatttagaaactcgtatagtttggcagacgcttgacggggtgcccaagtcttctagagttggtgtcaaggctcctctctgtcggtgttttgggtccgaccgcacacccggggttgcccctggaggtgtttttaggagtaggacggtgtcgatgactgtagcaaaatggttcgtgccagatgcatga

SEQ ID NO: 37210 - DNA, 513 bp, Zea mays
  Peptide Sequence Number=SeqID_78989
atggctcaactcttttaccgtgtcgccgtgaccttctctgaagtctctgtggctcaccggagttactgccacgccgttggccacgaactcacgcggccagtgtttcttcttcccctccgaccgccgcgtggctcggccaaattgagcaccaccgcctgcgggcgctataaattgaccgtacccccagctccgccatgcatccaagcagctattgcacccgctcccaccctcaatcctccaccagcacgcgcgaatttcccattctccccaaatccggtcttccgccaccgtgaaaacaaccgtactgcggccagcacaatcccgaaaacaaatgaacgtgaggaagaaatcgaagttaccgaagaagagacaccaccaccttcggagtctcaggccgggaatcatttctactttgacatctgtggatctgagcctgattcacctatgaacgaaggcaagccccggtgcatgcaacccctttccttgtgttttaaatactttttgcacacttaa

SEQ ID NO: 37211 - DNA, 267 bp, Zea mays
  Peptide Sequence Number=SeqID_78990
atgggcggtggccacgaatttagacgagacacgcggcggtcggaggggaagaagaagcactggccgcgtgagttcgtggccaacggcgtggcagtaactccggtgagccacggagacttcagaggaggtcacggtgacacggtaaaagagttgagccacgcggcgtatggccgggaggcggcggtcaccggcgagcaaaattgtagagctatagatcagctacaggtttgtcacagcagccatgggcagattcttgctggatcatag

SEQ ID NO: 37212 - DNA, 387 bp, Zea mays
  Peptide Sequence Number=SeqID_78991
gatcagatcgaccgccgtagaaaagatctcaccggctggcgacttctttgccgggattggtgccgcggccgtgtgggtgttgctcaccttgaaaagatcttcaccgctcgtgcgctggcgatctctccggtgaccccgtggccctctctcccgctttgcggccgagtggattacctcgccggtgaccgccgcctcccggccatgcgccgcgtggctcaactctttcaccgtgtcgccgtgacctcctctgaagtctccgtggctcaccggagttactgccacgccgttggccacggccctgatgggttcaacatcggaaaagatgtacctctgccaggcctgctgaccgaggaccctttaactggtcacatgcctcgtcatgggtaa

SEQ ID NO: 37213 - DNA, 1425 bp, Zea mays
  Peptide Sequence Number=SeqID_78992
atgagcgacccgcggggccacgccgccggtcccgaccgtgacggggacgacccgctcgccgaggacgccaacagcgaggaagcgtggcagacgcccgagaaagagccggttgctgtgtcgaaagaggcggctgcgcggggtggggacacgaccccggacgccgaaccggagagcgatgacggagagggaggagtgggctccccggatcagatggagcccaatgcggacggggagcgcgcaccgcccgtggccgcggctgaggacccggaggggattgttggcagcgcaaaggtggagacgaacggcgaggacgccatcagccttgacgccgacggggaggaggaggacgacgatgatgacggagacgaggaggaggaggaggaggacgacgacgacgacgactccacccctgatgcgtctccgagggccgaggtgaaggtggagggcgaaagctccacggggatgacccagagtggcgccggccaccgcgtggaggtggaaccggaccccttcctcgacggtgatgactctgggacggaggaggagcaaggtgcgttcatggcggagctggagcgcttccatagggagcacagtctcgagttcaagccgcccaagttctacggcaagggcctcaactgcctcaagttatggaggcaggtcgcccacctgggaggccacgagcaggtttcacttcttttcatgattgcgttgctcagcactttgtatgtgggcattagttcagttgaatatttttgtttattcaggacctgcacgactgtttcttggtcatttcgaattttctatgagaaggcacttcttgaatacgaaaaacacaaggtccggactggtcagcttcagataccaccgcctggtttaccacagcctagtggtgctgaccgtgaggtggttgtaaatcaatcatcttctgccagagttagaagggatgctgcagcgcgtgctatgcagggttggcatgctcaccgccttctcacaaatggcacttatggggataacattttgaaggacaaagatacaatgccacttccaaatcgtgataaaaacctaagctttggggtgctcaagagaaagaaagcatctagtccagaggaagattctatggtcgttgacgttggagaaccagccgactgggtgaagatcaatgtgcggcagactaaagattgctttgaagtttatgcactagttccgggacttctaagagaggaggtgcatgttcaatcagatcctgctggacgtctggttatcacaggggatccagagcagcctgataatccttgggggatcactccgttcaagaaggtggtggtcaacttgccatcaagaatcgatcctcaccaaacatccgctgttgtcacgcttcatggtcagctattcgtgcgtgcaccatttggtcatcctgatatgtag

SEQ ID NO: 37214 - DNA, 342 bp, Zea mays
  Peptide Sequence Number=SeqID_78993
atgaccgttgctccggagtcgcaccggacagtccggtgcacaccggacagtccggtgcatgttcaatcagatcctgctggacttctggttatcataggggatccagagcagcctgataatcctaaggggatcactccgttcaagaaggtggtggtcaacttgccatcaggaatcaatcctcaccaaacatccgctgttgtcacgcttcatggtcagctgtttttcagttttgttgactgtggcgcctcttcaccggtgatattccttgatatcactagggtttatgttagttctattgaggaaataggatttcatttgagcagatacatgatgtcaagctga

SEQ ID NO: 37215 - DNA, 288 bp, Zea mays
  Peptide Sequence Number=SeqID_78994
gtgcatgttcaatcagatcctgctggacttctggttatcataggggatccagagcagcctgataatcctaaggggatcactccgttcaagaaggtggtggtcaacttgccatcaggaatcaatcctcaccaaacatccgctgttgtcacgcttcatggtcagctgtttttcagttttgttgactgtggcgcctcttcaccggtgatattccttgatatcactagggtttatgttagttctattgaggaaataggatttcatttgagcagatacatgatgtcaagctga

SEQ ID NO: 37216 - DNA, 207 bp, Zea mays
  Peptide Sequence Number=SeqID_78995
atggagcttggggaaagggaatcggcgagctcggctagggaggggaagcaggggcacggcccgcgcgagcagaggaagacgggattcgacggcgccgtggggaagagccgctcggcagagaggagcacgccatgggagccgcgtggtgagctgggggcgagctgcagcagggagccacgctatgttccgaacatcacgaaaatttag

SEQ ID NO: 37217 - DNA, 240 bp, Zea mays
  Peptide Sequence Number=SeqID_78996
atggcgcgcgcgtgccccctggtcggctgctgctccctggctcgccgtggctccctgctgcagctcgcccccagctcgccgcgcggctcacatggcgtgctcctctctgccaagcggctcttccccacggcgccgtcgaatcccgtcttcctctgctcgcgcgggccgcgcccctgcttcccctccctagccgagctcgccgcactacccatgtcgttatcgttcgtcttcgtgctgtga

SEQ ID NO: 37218 - DNA, 849 bp, Zea mays
  Peptide Sequence Number=SeqID_78997
atgggagccgcgcggcgagctaggggcgagctgcagcagggagccacggcaagcgcagggagcagcagccgaccagggggcacgcgcgcgccatgggagacagaggagcgcgcgtgggaggagccgctcggctgggcgcggtccgagctgaggcaggaagggagcgccgtggaggttggggaaagcagcgaccggcgcggtggagcacgcaacccagggcacggcggagggagatgggcactcggccagaagatgagcgccgactgcatttttgaagagcccaggggcggcgctgtagaaaaatatcaggggaagaaggatagcgacgatgctgcgcggtggcgagaaaatcaggaggaagataacgacgacttgaaaaaaaaatctgtaccgacctcttcttctgacgagtactggagtggcattcgacgaagcgtgagcgcgagagtgaggatcgcaagtcgtcgacacagtgctgtgatcaagggtgatggtgcggaggctgacagcagggaacttcgcgatgggcagcgaggctcgacggcgtcggggttttgcgacaaggcaaagccgagcacacagggtgaccagcttcggatccggagcaggccgagcgagaagacgtggctgcgcgcagaggaactcggctgtttctttccccgtttgccgcgccagactgggcgagcaccagagagatccaactggcgtagggaaggagctcagtacggccatggggaggagctcaactggtttggaggaacagggagggagcacgcgcgcacaggagatgggcacacggtgcggtcacggaaccgagcagggagcaagccggtgcgcgtggggagctga

SEQ ID NO: 37219 - DNA, 141 bp, Zea mays
  Peptide Sequence Number=SeqID_78998
atggccctgatgggttcaacatcagaaaagatgtacctctaccaggtgaggaagcaaccaacttttgttgcttctgttctaaggtggtaccaaaggaagagcaccaggagtgaagctgcgggaggagaggatcctccataa

SEQ ID NO: 37220 - DNA, 183 bp, Zea mays
  Peptide Sequence Number=SeqID_78999
atggccatgatgggttcaacatcagaaaagatgtacctctgccaggtgaggaagcaaccaacttttgttgcttctgctctaaggtggtaccaaaggaagagcaccaggagtgaagttgcgggaggaaaggatcctccaaactttttgtttgaacttatcgggaggggtttttgcctcccatag

SEQ ID NO: 37221 - DNA, 183 bp, Zea mays
  Peptide Sequence Number=SeqID_79000
atggccatgatgggttcaacatcggaaaagatgtacctctgccaggtgaggaagcaaccaacttttgttgcttctgctctaaggtggtaccaaaggaagagcaccaggagtgaagctgcgggaggaaagtatcctccaaactttttgttcgaacttatcgggaggggtttttgccttccatag

SEQ ID NO: 37222 - DNA, 798 bp, Zea mays
  Peptide Sequence Number=SeqID_79001
atgaccgttcatgatgcattcactcggctcgaagagagttttggccgtctcgaagagaattgggatcaattcgttgtgatgttccaccgctacaaggagaagacagagaaggaactccaagcagcggtgcggcttcaggcggcagcgcgagggttcctggcacgccgccaggtacagtcccttcgtggggagaagcaccttgctgtggcctccagggccaccccatggccgtcatcacatgagcaggccgtggtgcgcctgcaagccgcagtgcgcggcttccttgttaggcgggcggtgcggaagctgcacttgctgatcagctcatcgctgcaccaactcgcagcctgcgcgcccaaccaccaggtctcgtctatactttttgaaccccctgcagaagtcgagatctgggtatgcagcccccctgcacggccagagagggtcgtcttcttcattcgggcaactgccttggtgctggacagacccaacataagaacgggttggttcctccttcacctgtcatccaacgtgaagtccgcagttcagctctttccttgggatccaggaggacaggaggacatagctggagttcaaatttatattttagttccacaattattttgtattttcgtcttaaataataaaggtaagccgagatgtaaaaggcttaaccttaagtcgtgtcaggtaagtctatggcagctcgaggacgagctggtcctcaagggagggggagatgtcatgggcatcatagggagcgagaggcaacagccaggctgggataaggctagagaataa

SEQ ID NO: 37223 - DNA, 537 bp, Zea mays
  Peptide Sequence Number=SeqID_79002
atggagacgaccctctttggccgtgcaggggggctgcatacccagatctcgacttctgcagtgggttcaaaaagtatagacgagacctggtggttgggcgcgcaggctgcgagttggtgcagcgatgagctgatcaacaagtgcagcttccgcaccgcccgcctaacaaggaagccgcgcactgcggcttgcaggcgcaccacggcctgctcatgtgatgacggccatggggtggccctggaggccacagcaagccgagtgaatgcatctagagttggagagggcgggtgggagggcgttgcggcagcagatggtgcggcggctggtggtggtgagggatgggcggctggtggtggtgaggataacctggagctgataccagctgctgaggataacctggagctgataccaggtggtgaggataacctggagctgataccaggtgtcattcggtccatggggatagctgtcttctccggcgaggttatacccctctgccgcaggcttggttctagggtagcagccctaggcgcttga

SEQ ID NO: 37224 - DNA, 303 bp, Zea mays
  Peptide Sequence Number=SeqID_79003
atgtgggcccgggcctccatgctggaccgccagatgcgacgaagccgaaagggtgcacaaccgtggtgcggttgcatgcttcctgcgtggcggtccgccctttcgaccactggtttcagcgaggatgggggaatgcttataaccgcggggcggttacatgcttcgtgtgcggcgatttggcttctttcgttttgggtcagctcgcatgacgtgtgggacccagcccccgcgtcaggggggttcgagacggctcttaacgagtccgtcaagaactgcaaagcgcttgccgaggcggctgagtag

SEQ ID NO: 37225 - DNA, 204 bp, Zea mays
  Peptide Sequence Number=SeqID_79004
atggccggcctgcgcacggcgcgaccgtcgcccgtgcggtggacggacagccacaccccgaccgggcagcagcttcgtcgcatccggcggtccagcatggaggcccgggcccgcatgtcatgtaaccggcgcaccggttactacgtgcaaggaaaccgcaccgccacttgcgccaatgtcgtgtcttctcgactgcagaactag

SEQ ID NO: 37226 - DNA, 678 bp, Zea mays
  Peptide Sequence Number=SeqID_79005
atgcaggaagcatgcaaccgcaccacggttgtgcacccttttggcttcgtcgcatccggcggtccagcatggaggcccgggcccacatgtcatgtaaccagcgcgtcggttactacgtgcaaggaaaccgcaccgccacttgcgccaatgtcgcgtcttctcgactgcagaaccagtgcagcggttcgaggcagccccgcgcgtgacccaacagtgccaattaagtgcaacgatcacggggcaagcgacacctccggcaggcaaaacgggcgccgtttcacctccgtcatgatgaccgcgtcaaaaaagggaccgagaaaggggatatttcgaaaaaggatccttcttagcgaaggaaacgggccccgagccctcctactgatcaggggttcgaaggttgcgccctccggggttcggcaaccgccccagagcactcgggctctgagcccattactgattaggggttcgaaagctgcccccccggaagggttcgacagccgccccagagcatgcagagccagggatgaccctgggtacgtccgttacatggccgaggctcgggctatgctcccgaggtacactaggacatttccgagaccaacgagaacgatttgtaatggaatctcaccggagggaggcatcgagccctcggaccctatcgaatgggttcgggtctag

SEQ ID NO: 37227 - DNA, 519 bp, Zea mays
  Peptide Sequence Number=SeqID_79006
atgcattctgttcaccacatgctcaatgaaatgcatcttttggatgttgtttgggatgagggtttgctggatgtagagggcttgcaaggggttcagtgggagcagccaatacagtgtggagagtacttgattggtgttgagaacttgattatattgttcaagaactatttcagaagtcggaagctcacgtccattacagttggggttgcttgcaagacaaatttctctgcacgaatttgggatccagcaattttggaccctttgctcagcgccataggctatggcgccgaggtaacacagctcggcgccatagcctatggcgccgagagccttgtcttttccgcgctaaggctgcaggggataggttttgatccaagagcttgcacaaacaaaatacttgtggcgatagcggttataacagcatccacagcgaccgataagcacaagcccaacgacttaaaaacagcttatccattatggactgcatcctctaaagcaaagttcaagaccatagattag

SEQ ID NO: 37228 - DNA, 225 bp, Zea mays
  Peptide Sequence Number=SeqID_79007
atggccgataaaggcaaaggcaagggcatcgtcattggcgatcctcgcatgtcaattatatcacaaaagaagattgctcgaaaggcttcgggcgagaaggctaaaaggttcgaagacgccgggggctatggcgccgaggtaacacagctcggcgccctagcctatggcgccgagatcgagcccgtctcagcatgtactgcactcgtacgtggcatttctctgtga

SEQ ID NO: 37229 - DNA, 219 bp, Zea mays
  Peptide Sequence Number=SeqID_79008
atgactggtctttccactcaaccaattaacgaaaagaagatatcgaggctcggcgccaagatctgtggcgccgagctacgaggccgcgccgccgccacgtcagcgccaggtcagccctggacgcagctagccgttgcggccacgtcacagctcggcgccataggctgtggcgccgagctgtgttacctcggcgccataggctatgacgccgagctaagg

SEQ ID NO: 37230 - DNA, 207 bp, Zea mays
  Peptide Sequence Number=SeqID_79009
atgacagcacggtctccgcaatcgcatcgaggcggtgagtccatccgtctttctgttgctacctccttctcctcatccgtcattggtggaggattcggggaggagctcggcgccaagatctgtggcgccgagctacgaggccgcgccgccgccacgtcagcgccaggtcagccctggacgcagctagccgttgcggccacgtcatag

SEQ ID NO: 37231 - DNA, 166 bp, Zea mays
  Peptide Sequence Number=SeqID_79010
atgacagcacggtctccgcaatcgcatcgaggcggtgagtccatccgtctttctgttgctacctccttctcctcatccgtcattggtggaggattcggggaggagctcggcgccaagatctgtggcgccgagctacgaggccgcgccgccgccacgtcagcgccag

SEQ ID NO: 37232 - DNA, 1641 bp, Zea mays
  Peptide Sequence Number=SeqID_79011
atggatggtttctttatggagaacggagaaccaacagaaacagatcagatggaacataatgatggacgcacaccattgacaaacatctcaaacaccattactatgggtaaagctgatgaaaatggatcgaaaaggcttggtccaaatgtcgatgctaaggaacttagtctttcagatggctgtagcacaattgatttcacaaactttgcaacacaagttccaaatgtgaatcgagatgatgatagcgattggttgcataggaatgagacattcaagtcagacgatgttttcacaacaagagaccttatgacaccaggcggtgtgcatgaaactgttggtaacacgcctaaccataatttgggaagggctgcctactttagagagcggtacaaaaacttaactccagccgagagggagcttaatcgtgaacgccttaggttgtataataatacaccaaagcggaaagggtcaaagatagagtacataagaaaacgtagagcactgttggctgacacattaagtcaggagtccatcgccatggagtccccaacatatacgcctgaggttgtacaccctacaacagatgcaattgaacctaatggatccgctcttaccccctgcgactgggttatccctgatatcgccagtaacccgttcctaccagcttcaacacagaccgaggatgccgattcactgcgtatgtctactagaccactaagacgtaaacaacatgtgccacgtggtgaaagacaagctatcttagcccgtcgaaaccggcaatttgaagcatccatttcaaggaacatggctactgtggctgaggatatcattagtgacgctgaggaaggggatgattggacacaaccccatatgtctgcaaagatcaacaacaatgttgatggcgatgacagtgtcgtatttgaagatgatgctgatgagaacgagggatacctattcgctgggaaatatgaggataccgatgaggatatagagatcgatggtagtcaagatgaatcgagtgccattgatgttcctgacccgtacgacaaggtgtatagcaacatccctgaagaaacccatatgctaaagactgttcccaactgcggttattgcaccacgaagaagtttgagtatgagacacctggtttttgttgtcgtggtgggaaggttgagctagccccactggagacccctccccaactcaagaggttgtgggatagtgcagactctgatgctaggcactttcgtgataacattaggttttttaatggccatttctctttcacttccctatactgttgcctcgatagtatgacaactaatgtaagggattctggtatatacacgttccgagcacagggcatgatgtatcacaatatcaagtcatttggtagggatggtggggcagatcataaacaccttgagctttacttttatgatgatgatcccactctcgagcatcggtaccgtaagtgtcgcgaagagcatcaacagaaagacaaagaggttattcgacagatagtcgacatactacgtggaaacccgtactccgagcaccttaggaccatgggtcacgttgagaaccttgatgactatcgtatcgcgttgaacctagaccagacgttgaaccagaagacataa

SEQ ID NO: 37233 - DNA, 5684 bp, Zea mays
  Peptide Sequence Number=SeqID_79012
atgaggataccgatgaggatatagagatcgatggtagtcaagatgaatcgagtgccattgatgttcctgacccgtacgacaaggtgtatagcaacatccctgaagaaacccatatgctaaagactgttcccaactgcggttattgcaccgcgaagaagtttgagtatgagacacctggtttttgttgtcgtggtgggaaggttgagctagccccactggagacccctccccaactcaagaggttgtgggatagtgcagactctgatgctaggcactttcgtgataacattaggttttttaatggccatttctctttcacttccctatactgttgcctcgatagtatgacaactaatgtaagggattctggtatatacacgttccgagcacagggcatgatgtatcacaatatcaagtcatttggtagggatggtggggcagagcataaacaccttgagctttacttttatgatgatgatcccactctcgagcatcggtaccgtaagtgtcgcgaagagcatcaacagaaagacaaagaggttattcgacagatagtcgacatactacgtggaaacccgtactccgagcaccttaggaccatgggtcacgttgagaaccttgatgactatcgtatcgcgttgaacctagaccagacgttgaaccagaagacatataacacacctctcacttcggaggtggccgctgtctggatcgaagggagcgaagggcgaggccagttcagcaagagtgttatgctccatgggaaggacagttcaagccactgcatccgctcataccatggatgctacgatgcattatcatatccattgttcttccctagaggcgaacttggctggcacgcaaatatcccaaaggttggagtatccatggacgaagtggatgcataccgtgcgacacatagggcaagtaatgcaaatgatgaagatgcggaatctcctagccatttatgtgtgtctgtacgtgactactactgctacaaattccagattcgccccggggtattcaatcctatacttcatggaaagcggctttttcagcagttcgcggtcgacacgtacataaagattgagaactctcgtttagattacatacgcaagaatcaggatcggttaagggcagacctgtaccagggcttggtggatagcatgctagatggagatattagaggagagaaggttggcaagcgaactgtgctgtcgacgtcgtttatcggcggtcctcgtgacatgagacgtcggtatatggatgctatggctctggtgcggaagtttggtaaaccagacatatttcttaccatgacatgtaaccctaactgggatgagataaggagggagcttctccttggacagacaccgcaagatcgtccggatcttgtagtgcgtgtctttcatgcgaagctacaagagttaaagcatcggctgactaaacaggatattcttggtaaggtccgagcctacgtctatgtcgtggagtttcagaagcggggtttgccgcatgcccattttctactcataatgcagaggaagtacaagctcacatgtcctgagcaatacgaccttttgatctcagccgagatcccaagcaacaagtaccctgaactacgaaagatggttatcaagcatatgatgcatggcccgtgtgggtcgctaaaccctaactgcccatgcactaagggtcgtaaatcgtgcaagaatcattaccctcggtctttcagtgacacaaccttgcaagggaaggattcgtaccctatttatagacgtcgtgacgatgaccgtaaagaaaaggtccgagggtgcgaactggacaatagatgggttgtcccttataacccatacctccttcgtctcttcaactgccacatcaatgtcgaggcatgtgggagcatcaaggctgttaaatacctgttcaaatacatatacaaaggccatgatcgtgcgtctgttgttatgagagatgcgagcaaggcagatgatgatgttgatgagatcaagcagtatagagatgcaaggtgggtgactcctccggaagccttgtggaggatatacggctttgagcttagtcagatatctccacctgttatgcagcttcgactccatcttccaaacatgcacatggtggcgtttcacgagcggcaaatggtcgagcgagtcgtcaaccgtccaggtgttgataggtcgatgctcacatcatattttgaggagaataggctacacgaggaggctcgtggcatcctatatcgtgacttccctgagtggtacacttggcagagtggtaagggaaaagtatggcaacggaggaaacgagatacaggtggacaagtcggtaggatagtctctgctcatccggctgagggggagcgctactatcttcgtgttctcctaaaccacgttactggcgccgcctcctatgtggatctaaggacagttgatggtgtcaccctaccgacctttcgtgaggcagcagagagaaggggactacttgagtcggacaacacactggatgagtgtctcactgaacgtgctcttttccagatgccatcgtcgctgcgacggctttttgccacaatactggtttactgtgagccaagcgatgtggctgtactctggcagaaacacaaagattctatgtccgaggactatcaacacaagagtcaaaacaaaactcatgttgagcagatggtattgattgacattaggaacatgctgcagtcaatgggaaaggacataaagacattccctctacctcctatgatcgacgcgtatgacgatgctattggtactgctcgagaggtttacgaggaggaaagtatccaatcgacagtggaagatgtgtctcttaaagactctcttaacgaggaacagagggccgcctatgataagattatgtctgccgttgacaccgatcagggcggattattctttgtggatggacctggtggcaccgggaagacttatctatacagagtgctgctcgcgacgctacgcaaccagggaaagattgcagtggcaacagctacatctggcgttgcggcttccataatgcctagaggaagaaccgcccattcacgcttcaagataccactcactattgacgatggcgttgtatgtagcttcacgaagcagagtggaacagcagagttgctacggaaagcatctctcattatctgggacgaggcttctatgactaagagacaagccgtggaggcactggacaatagcatgcgcgatataatgggtcgccctgcactaccatttggtggtaaaaccattgtcttcggtggagatttcagacaggtcttgcctgttgttcgtaaagggtcaagggctcaagtggtcgcgtcatcgctacgaatgtcttacctatgggagtccatgtcccacttaaagcttgttagcaacatgagagcaaaaaacgacccttggtttgcagaatttttgctgcgcgtaggcggtggaactgaggaaacaaatagtgacggcgacattcgtcttcctgatgatgtgtgtgtgccttacagtgggagtgacaacgatcttgacaacctaatagactttgctttcccaaatctcaacgaaaatatgtctgattccacctacatcacttcaagggcgatactgtcaacacggaacgactgggttgatatgataaatgttaagatgattgatcgttttcaaggggagcatatggtgtatcatagtttcgatagcgccatggatgatccccacaactactacccacccgagttcctaaacacattgacgcctaatgggctaccacctcatgttttgaagctcaagattggatgtcctgttatattgctccggaatatagaccctgcaaatggactttgcaatggcaccaggctggtcgttcgtggcttccaaagaaatagcattgacgcagagattgtactgggtcaacacgttggaaaacggattttcctaccacgtataccgttgtgtccctccgatgaagagatgttccctttccagttcaaaagaaagcagtttcctgtacggcttagctttgcaatgacggttaacaaagcacagggtcagactattcccaatgttggtgtatacttgcctgaaccagtgttctctcatggccaactatatgttgctctatctagagcgacggcccgatcgaacataaagattcttgtcatcccagctgtagatgggaggaaaaagtcaaggaagggtgtaaagaaaacccccaccgtagattgtgggacatataccaagaacatcgtctacaaagaggcttgtctcatacaagccaaaaaaatcgtggcacccgcaatagttcgagaagttttatctcatgactggttgctcctagactatatttgcacgcaaggtgatcttgctctcatcgattttatcaaggaaatcccttgtgaaccaagggtagaagtcgttcttattgatgatgcctttgttgaaaggaagtggatggagtgtttatttcagccgagcgcatatttaggtgacgaggtgtttattccgataaacatccgggagacgcattggtatcttgttgtgatccatgcaagaaatatggagatacaagtgctcgattcacttggtacttcacaagaccgcaaagacctcactgactctattaaaggactacaaagacaaatagatatgatatctcaacgtaaggagttaaaagaccacaggtggccagacctccaagttgcttcttggccgctcagagaaatagacatgggatatgcaaagcagacagatagctcttcatgtggcctctttcttttgaactatatcgaatactggtcaggggatgaactgtctgacagttttacccaggaaaaaatggctgctatattactatcttcagacctgaataagagaagggggtgtctgttatacaaaaatgaaaaagaagttgactctggaagcccatctgatgttgagatattagaaaacccaacagattctaataagaggaaactactccacgtgcttgatgatagcgaagtagtgtatgaagatgaggaaggccctattactcaagcagacttgcaaaggagaacatgggtgcgaagtttcaatccttttaagatagaaatatctgtcaaagacctgcaaaacatattaaagacaactcaagatatgattctaagatgttttgatatggctgttcgactgcttgccaataaagagtcacgtagaccgaaagaagaaatcataaataatagaaagcattatatggacatgcgtttttggagaatggttggttttggtaaacttccaaagtaccatcaggatcctacaacagaagagttagccaaaacactcgattgttggccatcaatgaattattatatcacgggttgtagatatgttctcatgccatggaaattcaatggatgtcacgcccttttcgtaatagatcatgttaaaaagcatgtgacttttatcgattttacaccgactcaagattggtgtaaacacatgccatacaagaggttcgcggaagtgattatcatggcctcaaaaaaatataagattgcttacaacaagaaacgttctggatgggctgaggatatctttaagtgggaacatacaattcagattggtgttccaattgacttaagagggtattttcttcgtaccaccttctcagcagtttaa

SEQ ID NO: 37234 - DNA, 297 bp, Zea mays
  Peptide Sequence Number=SeqID_79013
atggcctcaaagaaatataagattgcttacagcaaaaaacgttctggatgggcggaggatatctttaagtgggaacatacaattcagactggtgttccaattgacttaagaggctacctcgttctacaagctatggccatgtgggggaatgacagacgaatgaaatttgttggagatgcaaagattgttcgatggagctttgtgattgatctgttaagttatgaggataattcgtgccgatatgtcatccctgcaaacatacaacagagacttatcgatatcgctaaaaaggattag

SEQ ID NO: 37235 - DNA, 813 bp, Zea mays
  Peptide Sequence Number=SeqID_79014
atgaccgcgtcaaaaaagggaccgggaaagggggataccccaaaaaggatccttccccgtgagggaaccaggctccgagcctccctactgatcagaggttcgaaggctggcccctcgaaagggttcaacagccgcctcagagcgcgtgggctccacacccactactggtcagaggttcgaaggccggcccctcggaagggttcaacggccgcctcaggctactcgggctccgcgcccactactgatcaggggaacgatcttgtaacggaatcccatcagagggaggcatcgagccctcggaccccgtcgccaggggaccgggtccggcagatcacccgcagctcaccggagacaccatgttcggcgcccatcgagggcaacatgaggctcgggggctgctctcgcaaacccggctccggccgaaccgttgacaacgtcaacataccagcccgagaacttgggacccggccgtacacccgggctacggccagctcgcatgagggaacgaccagaccagccgaagcgttacgtgaggcattaagacctcggaggagtcaaaccactcctccgaggcctcgggggctacacccggcgggtgcgctcgcgcgcacccaccggaacaaaacgcaaccgagaaaggctggtccccttgcaaaaaagtgcgacgaaagcctccaagcgagtgctaacactcccttcgaggctcgggggctactatcggggaccataattaggggtaccctcaaggctcctaattctcagctggtaacccctatcagcataaagctgcaaaggcctgatgggtgtgattaa

SEQ ID NO: 37236 - DNA, 1350 bp, Zea mays
  Peptide Sequence Number=SeqID_79015
atggaagacagactcgacctcggcttcggaggagcctccatgtcgcccaacctagggcgcaggcctgccacgtcaacagggagcgccatcatcaccctaccccgagctgactcgggccgcaaagaaccagaccggtgtcccatctggctgtctccaccagataggctccgccactcctccgacggccacgacatcacaccagttgggttcaaggatctctccggctgccacattggcatagtgggtgcgcttgcagtaggggttacaagcgttcgcgagggagagagggagtcccgcgcgaccaccctccgtatgagggccctgactcttccttttagagatgcaaggagagggtccagagaggagccagagctctatttacatgccaacgtggctgttggagaggtgctagagccctgtgtacgcggtgtcgtggccgtcggaggagcgtttgagccctgtagaagcacagttgtcggggctgtcgggaccttgctgacgtctccttgcttccgtaaggggctgagagccaccgtcgtcatggacgcacgcagggagccgtcattacttggtaatgatgtaccccatgcggcgtggtcggtccgagcccaaggtcgggcgaggcggagactcctcctgaggccaaggctggggtcgggcaaggacacgattccgcccgaggtcgaggttgaggccgggccccgtggtcgggcgaggcggagaccaccttccgaggttgaggtcgaggctgtgccctggggtcgagcgaggcgaagtccaccttccgaggtcgaggctgagccctggggtcgggcgaggcgaagtccaccttccaaggtcgaggtcgaggccgagccctggggtcgggcgaggcggagcttcctgtggcgcctgaggctggactcagctgctgtcagcctcaccctggcgggtggcacaacagtcggagaggggcgagtggcgctgttttcctgtcaggtcagtcagtgggagggcgaagtgacggcggtcactttgaccttgccgactgaggcacgcgtgtgcgcgcgagcgcacccgcctggtgtagccgccgaggcctcggaggagtggtttgactcctccgaggctggtctgttgacgctgtcaacggtttggccggagccgggtttgcgagagcagcccacgagtctctgcatagagcgagaggacgatcaaggactgactcggcttttatcatacgccccttcgtcgcctttccgcaaggaggaggggggaagcgccatgttgccctcggagggcgccgaacatggtgtttccagtgagttgctaacgggtgatccgagtggacgcccctgccctgttcgataa

SEQ ID NO: 37237 - DNA, 255 bp, Zea mays
  Peptide Sequence Number=SeqID_79016
atggaagacagactcgacctcggcttcggaggagcctccatgtcgcccaacctagggcgcaggcctgccacgtcaacagggagcgccatcatcaccctaccccgagctgactcgggccgcaaagaaccagaccggtgtcccatctggctgtctccaccagataggctccgccactcctccgacggccacgacatcacaccagttgggttcaaggatctctccggctgccacattggcatgtactcagggcactag

SEQ ID NO: 37238 - DNA, 219 bp, Zea mays
  Peptide Sequence Number=SeqID_79017
atgtgggcctccacgctggacgaggccgcacggtgggatgacctcatcacaggtcttcgtccgatgtcgtatggagcgaagggtgtccctgcccgttgtcttgtctccgttggaccaacgaccacggcgaaggcctcgagcgaagggttaaagaagaaggagaaagacgtcgaggcggatctccaggagttccaggacttcgacgagttcgaggattag

SEQ ID NO: 37239 - DNA, 282 bp, Zea mays
  Peptide Sequence Number=SeqID_79018
atgctggacgaagccgcacggtggggtgacctcgtcacaggtcttcgtccaatgtcgtatggagcgaagggtgtccttgcccgttgtcttgtctccgttggaccaacgaccacggcgaaggcctcgagcgaagggtggcgtctttgccttcgccccaacacggacttcaccggaggcccgagatcgacctcactggacttcggtctttcgccgccgcgtgtggacagagctaaccgggaacctaggaaaaataaagagaccattagtccagatcaattttaa

SEQ ID NO: 37240 - DNA, 966 bp, Zea mays
  Peptide Sequence Number=SeqID_79019
atgaagatccttgaagctgagggcgggaccaagatcgcagcctggcttgcttctccccacccaggggctggtggtcaccgtcttggggcagaagaagccaaactgccgcgcgcggtgcgcgcaactgcccagcggttacaagcattcctccactttcgcccagaccagcgggtgaaagggcggaccgccatgcaggcggcatgcaaccgcaccaagtgggcgcaccctttcgactccaacgcgtccagcatggatgcccaggctcacacgtcgtgtaaccggtgcgccggttgctacacgcaagaaactgcaccgccactcgcgccactaccgtgcctcctcgactgcggaaccagtatcgcgactcgaggcaaccctgtgtatgacccaacagtgccaaccaggcacatcggtcacgggtcaatcaaccgcgggagaaggcgcgacggtcaatacggccaaaaatgggccggcagtaatggcggtggcaggcgagcggaagcagcggtcaagtcgtcagccaagctcacgcgacacctttggcaggagaagcgggcgacgcttcacctccgccataatgaccgcgtcaaaaaggctggcccctcggaggggttcaacagccgcctcagagcgctcgggctccgcgcccgctactggtcagaggttcgagggctggcccctcagaagggttcaacggccgcctcaggccactcggactccgcgcccactactgatcagggggcctgttacaatgggccggatcacacgtgggcctccatgctggacgaggccgcacggtgggatgacctcgtcacaggtcttcgtccgatgtcgtatggggcgaagggtgtcccagcccgttgtcttgtctccgttggaccaacgaccacggcgaaggcctcgagcgaagggtggcgtcttcgccttcgccccaacatttgccctctgagggaccagttcgactaa

SEQ ID NO: 37241 - DNA, 156 bp, Zea mays
  Peptide Sequence Number=SeqID_79020
atgactgtaaccgacaagggagagaatgcaaacaagggaagggtagatgagggagcagtcaacgatgaaatggatgaggcattatccccgaacatggatggaaatgaggagacttcaaaggataggttcaatgtaagcaggaaagcgagggaatag

SEQ ID NO: 37242 - DNA, 390 bp, Zea mays
  Peptide Sequence Number=SeqID_79021
atgctcaagggatgcttggtattctcctccatgcgcctaggggtcccttttatagccccaagatgctcgagaccaattgatgcagttcttgaggatctcctggacctgtgggttaggacccacacatgcttccgctgcgccactccgatcttgttggttgatgttgatcgcattgtcttcattggggtcttgactgatttggaggagttggaggttgccaaatggacaggtgcaagtggaaagaatagcgagaaaagacaaaacttgcaaggtgtcaaagaagggggagcagtcaacgatgaaatagatgaggcattatccccgaacatggatggaaatgaggagacttcaaaggataggttcaatgtaagcaggaaagcaagggaatag

SEQ ID NO: 37243 - DNA, 273 bp, Zea mays
  Peptide Sequence Number=SeqID_79022
atggtgagacgtggacacacggcgagggggctgcgcagctcacgtctgaccgggctatgggagcacggggcgcacgggccgactggccgcactggcctagggcaagccgtgcgggctggctgcgtgccgcgccgcagatgctcgagaccaattgatgcagttcttgaggatctactagacctgtgggttaggacccacacacgcttccgctgcgccactctgatattgttggttgatgttgatcgcattgtcttcattggggttagcggctaa

SEQ ID NO: 37244 - DNA, 231 bp, Zea mays
  Peptide Sequence Number=SeqID_79023
atggctgtgatgggttcaacatcagaaatgatgtacctctgtcagaaccccggtggcgagttgacatatgcaagggttaagtgctacatatgtcgtgtgattggagatcctcagtcttcctgttccttgagtgcaattgtttgtgagctccggctttctgccgtgatcatcaccgaaatgtctgaggaaggtcctcaaggtggagaaattatcaaaaagcaacaagattga

SEQ ID NO: 37245 - DNA, 486 bp, Zea mays
  Peptide Sequence Number=SeqID_79024
atggcgatccgaatcgattatactcagctgaggatctccaatcacacgacatatgtagcacttaacccttgcatatgtcaacccgccaccggggttcttaagaccggatcaggattcaagggggggggggtaatcaaaatcaaggaagttttcctgaaaaagaaaaagaaaagggataaacagaaccgggccgattctggcccagacggcccaagcctcagagaaaacgggacgcgcccgcgcccgcgagggaggttttgcgcagaggccctcggcgttttgactaaaccagaacagggtcgcttactgttttcgcaagtcactgacaaatcacagaaaaaccctcgggtttctgtttcttcgcaggggaaggtccccgaccacggcagcgcacggagaggctccggcgagcatctacgccggccgattaaggcaatgaccggcgctcccgagcggcagacaccaaatccaagctaccccgagtaa

SEQ ID NO: 37246 - DNA, 249 bp, Zea mays
  Peptide Sequence Number=SeqID_79025
atggatgggatgttttcaaaaataaaacttgatggtggatccatcatggccatgatgggttcaacatcgaaaaggatgtacctctgccagtctggtcttaagaaccccggtggcgagttgacatatgcaagggttaagtgctacatatgtcgtgtgattggagatccccagctgggtattaatcgatttggatcgccgttagttctcgaacatgaagacttggtcactgacttacatgtagcattctag

SEQ ID NO: 37247 - DNA, 369 bp, Zea mays
  Peptide Sequence Number=SeqID_79026
atggggaataatgtacaaggattgtacgtaggacgtggtagaagtttggtcaataatatgctactagaacgagcagcagcaacccagattaaaggaaatacatatacgtgggtggtgcttgttcgtcactttagtaaaacaggagaaaaccacagatttcatatacaaccacatgtgacggaacctcccaagtcattaggcccacctacagttgtccttgtccaacggacctcagacaaccctacaggtgcccctgaatcacttgacaagttcgctatctacttttcttacctttcccaagagcgttttacccgtcacgcagacattacaagcatcggagttacgaaagtgcgaaagccattaccttaa

SEQ ID NO: 37248 - DNA, 420 bp, Zea mays
  Peptide Sequence Number=SeqID_79027
atgggcttcgctccgataccagctgtgacagaacctcccaagtcattaggcccacctacagttgtccttgtccaacggacctcagacaaccctgcaggtgcccctgaatcacttgacaagttcggtatctgcttttcttacctttcccaagagcgttttacccgtcacgcagacattagaagcatcggagggttcttaagaccagatcaggttcacgccaaccgagagcacagatacaccaccatccaacctcttgtcacggcggggattccaaggaaggtaatcaaattcaaggaaggaaatgcaggaattgttttagcaatcaactcctatcacctaatgcatcaagcaagtgagaaagagtttaaaagaatcaaggaggtggcaaatgcaccggggcttgccttggtttacaagtga

SEQ ID NO: 37249 - DNA, 276 bp, Zea mays
  Peptide Sequence Number=SeqID_79028
atggggctcagtgtatgcggcttgctctgccaaggtggtgatgaggatgatggttctggttatgcctatggtaacgaaaatgaagaagaagtagaaattgaagaagcaagagctacaccaccaccactacctgaagaacctcaggccgggaactgcttttattttgacatctgtagagcagagcccgactcacctataacacaaggcaagccccggtgcatttgccacctccttgctattttaaaatctttctcacttgctttatgcattaggtga

SEQ ID NO: 37250 - DNA, 282 bp, Zea mays
  Peptide Sequence Number=SeqID_79029
atgtcgtcgcctcattggctgaaacgaggttgcaaggcacctgaagcaaatgggaaaatacatggagttgcgccaaaaattttgttatttactgttcatgataagatcattatgttaattggaacatggagaaccacccgggaccactactttaggtccaaaactcatgtttggggtggtttcgcgcaatttcattgtcgcacgtcacccattccgaaatcgggtgtcagggtgcatacagtgctaacacaagggtggtatgggacgtccttagctgactaa

SEQ ID NO: 37251 - DNA, 483 bp, Zea mays
  Peptide Sequence Number=SeqID_79030
atgacaaccgtccccatcgattccctgttcgcgtccaggcctcaccgccttggcatacaatgctccactgaccccggctgccgccgtgcagtgaccgcacttgtacccaccatagctagcatgggagacccagtctcaggtcgcatgagggataaagttcgcgcccggcttcactcaggtactaggtttaccggttaccatttttcccgacatgtgcttaatacgttcaaaagcttgactcagaaattgcaacttttgacgatgtatgatctacttgagttaaacaaggttaactttacttatgtaagacccttgggtggtatacttggtaaattgggtcaaactttatctaagtggcttggtactggtgtatgtttcactgtcccaaaaattggggatcagaaaggcagaaggggtgctttgaactacaactattatttaacagtgggtagttctctgaaacttatttttgctggcttttag

SEQ ID NO: 37252 - DNA, 501 bp, Zea mays
  Peptide Sequence Number=SeqID_79031
atgtcgttggtaatgaggaaatgggcaaggcctagcccactactcctcatgctcctctcctgccggagcaacatcccactcgaccgtccaacctggtggcagggtggtaggccaagtcacaccatcaactacatcctgcatggtacctgcaaaaatggtgccacaagcaaggctgagtatactaatactcagctagacttaaccggttacaaggaatcaagcagtctcattagctgcgagaagcagacgattcgaatcgagtttttaaaccttgcaaggcctcaccgccttggcatacaatgctccactgaccccgactgccgtcgtgcagtggccgcacttgtacccaccatagctagcatgggagaccctgtctcaggtcgcatgagggataaagtccgcgcccggcttcactcaggtactaggtttaccggttaccatttttcccgacatgtgcttagtacgttcaaaagcttgactcaggtccttgctcggggatga

SEQ ID NO: 37253 - DNA, 492 bp, Zea mays
  Peptide Sequence Number=SeqID_79032
atgaggaaatgggcaaggcctagcccactactcctcatgctcctctcctgccggagcaacatcccactcgaccgtccaacccggtggcagggtggtaggccaagtcacaccatcaactacatcctgcatggtacctgcaaaaatggtgccacaagcaaggctgagtatactaatactcagctagacttaaccggttacaaggaatcaagcagtctcattagctgcgagaagcagacgattcgaatcgagtttttaaaccttgcaaggcctcaccgccttggcatacaatgctccactgaccccgactgccgtcgtgcagtggccgcacttgtacccaccatagctagcatgggagaccctgtctcaggtcgcatgagggataaagtccgcgcccggcttcactcaggtactaggtttaccggttaccatttttcccggcatgtgcttagtacgttcaaaagcttgactcagtggcttgttactggtgtatga

SEQ ID NO: 37254 - DNA, 417 bp, Zea mays
  Peptide Sequence Number=SeqID_79033
atgtcgtcggtactgaggaaatgggcaaggcctagcccactactcctcgtgctcctctcctgccggagcaacaacccactcgaccgtccaacccggtggcagggtggcaggccaagtcacaccatcaaccaattcctgcatggtacctgcaaaaatggtgccacaagcaaggctgagtatactaatactcagctagacttaaccgtgaccgcacttgtacccaccatagctagcatgggagacccagtctcaggtcgcatgacggataaagtctgcgcccggcttcactcaggtactaggtttaccggttaccatttttcccggcatgtgcttagtacgttcaaaagcttgactcagtggcttgttactggtgtgttttgctctgtctcaaaattgggggatcagaaggtgttataa

SEQ ID NO: 37255 - DNA, 423 bp, Zea mays
  Peptide Sequence Number=SeqID_79034
atgggagaccctgtctcaggtcgcatgagggataaagtccgcgcccggcttcaatcaggtactaggtttaccggttaccatttttcccggcatgtgcttagtacgttcaaaagcttgactcaggccgggttgggactgatagttcgatcccaggctaaggagtcatgtcaattgaagtaccacattgcgaccgggacccttgctactgcattcttcggtgctgaaggtagaagggatttagtacttctattcttagggccagatggatttctgctaatcattgtgaccttctactttaacataggatgttgctacatgggaggcgatagagtgacatcattgcttgctgatgctcagctgcatcgtatgctcatactgctctcgcagatactagcttattataaggcctactatagtaaataa

SEQ ID NO: 37256 - DNA, 585 bp, Zea mays
  Peptide Sequence Number=SeqID_79035
atgagctggagccggaggcagcggtgtcggcgtggacagaggcggagtcggctcgagaagaggcttcgtcggcccaggagcaggtggctccctaggccgaggtggtgcagcagcggcggctggagcctggccaggtcatccgtgagcgggaccaacctcggagtcacgctaccgaggccgcggccgggccgatgtcttcgggggacagctggctgtggctacggagtgaccagccgaggtgtctgctcgggtcgggaccctggaggagaccctggctgcggtggcccaagcgcggtgctggcgtcctcttttgaggtggagatccttccgcccgtgtcgccgtctgaggccgggccagatcccgccgaaggtggaaacgacgccgagggtgctgctgctccctctgtcgacgacttgttcgtcggtagcagaatcgcttatccgagcgagagttacttttcacggaaggtgatgagtgaggattctgttatcgatatagtcgagaaggcacggaaatcgttccagcagaaaagttttcgagcgttaggacctgttcggttagcagaatcgcttatccgagcatga

SEQ ID NO: 37257 - DNA, 981 bp, Zea mays
  Peptide Sequence Number=SeqID_79036
atgaagccaaaagggtgcacaaccgtggtgcggttgtacgcctcctgcgtggcggtccgccctttcgcccgctggtttcggcgaggatgggggaacgcttataaccgcggggcgcccccgtgctggagggtgggaaccctagagctcgtcgatggagactttgctcgtgacacttggaatgcgagtggggagagctatctttataaagggatcgatcccccgggcagtagacatgcctctgcactcccctcatgcattgcgcccttccacctttcgagcccccggatggggtgcacccgtgttgcctttgtcttgctaccattggaggagcgcgaccccgcgggggttggcgcttcttcagacatcgctcggcttcaaggattttcatcacgcagcccggctgcagtccctcaccaatggtcatccgtagggatgatcaccatccttgtggtggggagaagcaagtcgggctgcggcctctaccccgccctcagcttcaaggatgttcatcatccgggctggggaggggggcgcaccgagatgggacctgcctccgcgtgggctggcgacccacttcttcctccagcattcgggggagaggggcatcctccagctgtgcggaggaggcgtcctccagccatgcgggggaaggtgaactgctgctgcctgaccagggtgcaactgtccgtcctccatccgggcgactgtcgcgccatgcgcaggcggctgctgtcgccggtgctgaagcggcagccgcctctggagaggcttcccaccgcagcggtggttgcttccgccggcgagactgtcagtgccacctgcgctccgggcctccggctctttggctttaatagctggttctcgtcccccgtgaggggtcgtgaacgaaggcctttcagcagtagcaaccttcggccgttctgcgatgagctaaagccggaggcagcggtgtcggcgtggacagaggcagagtcggcttga

SEQ ID NO: 37258 - DNA, 1005 bp, Zea mays
  Peptide Sequence Number=SeqID_79037
atgaaaatccttgaagccgagcgatgttcgaagagcgccaacccccacgaggtcgcgctcctccaacaacagcaagatgaagacaacacgggcggctctccccactcgcattccaagcatcacgagcaaagtctcgaccgacgagctccagggttcccaccctccgacgcgggggctgggtcccacatgtcatgcgagtggaccagaaacagaagaagccaaaccgctgcacgcgaagcaggtaaccgccccacggttataagcgttaccccatcctcgcagaaaccagcgggcgaaagggtgggccgctatgcaagaggcatgcaaccgtaccacggttgtgcaccctttcggcttcgtcgcatctggtgggtcagcgtgaaggcccgggcccgcatgttatgcaaccggcacaacggttactgcgtgcaaggaaaccgcaccaccactcgcgccaatgtcgcgtcttctcgactgcggagccagtgccgtgactcgaggcagccctgcgacacctctggcaggcgaagcgggcgtcgtttcacctctgccatgatgaccgtgtcagaaaaggctggcccctcggaagggttcgatagccgccccagagcacgtagagtgagggatgactctgggtacgtctgttacatggccgaggctcgggctatgctcccgagtcacttcgccctttcactgaccgatctgacaggaaaacagcgccgctcaccccgctccgactgctgtgccacccacccgggtaaggctgacaacagccaagttcagcctcgggcgcaacaggaagctctgcctcgcccgaccttaggcctcggcctcggaggaggtctccgcctcgcccgaccccaagactcggcctcagccccggccttgggaggaatcgcgtcctcgcctgaccccggcctcagcctcgggagaagtctccgcctcgcccgaccttgggctcggaccgaccgcgccacaggggatacatcattaccctacccctag

SEQ ID NO: 37259 - DNA, 846 bp, Zea mays
  Peptide Sequence Number=SeqID_79038
atgaagtggctgctgaagttctccggccttggagcagcagctcgtgatttcagctcaagggctctatggaagggagcattcgtcgatgctttcctagctagaataaagaagaacagagaaaacatgaatggcgtccacagtactggtggttctgcctcggttcagtccgcgctccccacggccgccgcaatcaacgcccacgtggatcccccgcgatcctctccaccgccgccgcaatcaacgcccacgcggatcctcgagcctccccaccgccatggaagatctgccattaccgtagcaggcgtcacttggtacttcaggcaagcgtcatggcatcgccgaccccgacccggcactggccaccacgcggatccactctgctctccatggaagggcacgatctgcgccgacctcgaccgggctctccatggaaaggtccacgtggttccatggaaaggtccgacccgacaccattcaatcggcccaaatcgacacggatccactctgcgcgcgttgttccatggaaggttctccggccttggagtagcagctcgtgatttcagctcaagggctctatggaagggagcattcatcgatgctttcctggctagaataaagaagaacagagaaaacatgaatgggaagaagatttggtctcgtagatcttctattttgtcggaatttgttggttccactgtgctcatttacaattggaaaagtcatgtccggtgcaagatcactgaagggaaggttggccataaatttggagagtttgcttttacacagagacgaaggccccatcgaacaataacaggaaagggaaatcaaggaaagggcagaaagtaa

SEQ ID NO: 37260 - DNA, 1752 bp, Zea mays
  Peptide Sequence Number=SeqID_79039
atgtttcattatgtcaatagcttctgctgcagatttgtctctacgaaagaaggcgtccacagtactggtggttctgcctcggttcagtccgcgctccccacggccgccgcaatcaacgcccacgcggatcccccgcgatcctctccaccgccgccgcaatcaatgcccacgcggatcctcgatcctccccaccgccatggaagatctgccattaccgtagcaggcgtcacttggtacttcgggcaaaagtcatggcatcgccgaccccgacccagcactggccaccacgcggatccactctgctctccatggaagggcacgatccgcgccgacctcgaccgggctctccatggaaggtccgcgtggttccatggaaggtccgacccggcaccattcaatcggcccaaatcgacacggatccactctgtgctcgttgttccatggaagatcacgcgggagctcgaccacaagtccgacactgagaccatgaagtggctgctggagcgcctaggccccagcacatcgcatctcctctattctccggccttggagcagcagctcgtgatttcagagacgaaggccccatcgaacaataacaggaaagggaaatcaaggaaagggcagaaagtaaaagtagaaatgtgcatgaaaggcgtccacagtactggtggttctgcctcggttcagtccgcgctccccacggccgccgaaatcaacgcccacgcggatcccccgcgatcctctccaccgccgccgcaatcaacgcccacgcggatcctcgatcctccccaccgccatggaagatctgccattaccgtagcaggcgtcacttggtacttcgggcaagcgtcatggcatcgccgaccccgacccggcactggccaccacgcggatccactctgctctccatggaagggcacgatccgcgccgacctcgaccgggctctccatggaaggtccgcgtggttccatggaaggtccgacccggcaccattcaatcggcccaaatcgacacggatccactctgcgcgcgttgttccatggaagatcacgcgggagctcgaccacaagtccgacactgagaccatgaagtggctgctggagttctccggccttggagcagcagctcgtgatttcagctcaagggctctatggaagggagcattcgtcgatgctttcctagctagaataaagaagaacagagaaaacatgaatgagacgaaggccccatcgaacaataacaggaaagggaaatcaaggaaagggcagaaagtaaaagtagaaatgtgcatgaaaggcgtccacagtactggtggttctgcctcggttcagtccgcgctccccacggccgccgcaatcaacgcccacgtggatcccccgcgatcctctccaccgccgccgcaatcaacgcccacgcggatcctcgagcctccccaccgccatggaagatctgccattaccgtagcaggcgtcacttggtacttcaggcaagcgtcatggcatcgccgaccccgacccggcactggccaccacgcggatccactctgctctccatggaagggcacgatctgcgccgacctcgaccgggctctccatggaaggtccacgtggttccatggaaggtccgacccgacaccattcaatcggcccaaatcgacacggatccactctgcgcgcgttgttccatggaagatcacgcgggagctcgaccacaagtctgacactgagaccatgaagtggctgatggagtag

SEQ ID NO: 37261 - DNA, 619 bp, Zea mays
  Peptide Sequence Number=SeqID_79040
atggataatggttacatggtaagggacacccctaggtctatggatggcaatttgaccgtggatatggatatccaccggatatccgacccgacggagccgggcgtccacagtactggtggttctgcctcggttcagtccgcgctccccacggccgccgcaatcaacgcccacgcggatcccccgcgatcctctccaccgccgccgcaatcaatgcccacgcggatcctcgatcctccccaccgccatggaagatctgccattaccgtagcaggcgtcacttggtacttcgggcaaaagtcatggcatcgccgaccccgacccagcactggccaccacgcggatccactctgctctccatggaagggcacgatccgcgccgacctcgaccgggctctccatggaaggtccgcgtggttccatggaaggtccgacccggcaccattcaatcggcccaaatcgacacggatccactctgtgctcgttgttccatggaagatcacgcgggagctcgaccacaagtccgacactgagaccatgaagtggctgctggagcgcctaggccccagcacatcgcatctcctctattctccggccttggagcagcagctcgtgatttcag

SEQ ID NO: 37262 - DNA, 306 bp, Zea mays
  Peptide Sequence Number=SeqID_79041
atggccagagaagacgatatcctccaaagtaccgtcaataggtacggacccccatgggatgtaccagacccctgtatatacggactggacctccgggtaaagtctaggaccccctcgggcacgaaccggaccctcggccatcctgcaggcggcatgcctgtccattccggtggcaggcaatacgcccgtgctgcggcatacgttgtgctcatcatcactcgtccgttgccagggaagcttccgctgcacgccaatgctacgcagaccgcggatatcagggcgcaaggagattgcactggcaactag

SEQ ID NO: 37263 - DNA, 636 bp, Zea mays
  Peptide Sequence Number=SeqID_79042
atgtgggcggctccggggctgccatgtggccagaggagacaatatactctaaggtgtcaacagttggggtccagacccccatgggaaagtgacggtcccctggatacacagaccggacctccgggcgaggttggagggaagcttccgctacatgccaatgctacgcagaccacggatatcagggtgcaaggagattgcactggcaaagttgctccaagtattacatctgttatgtctctgggcccgcatgacggggttcagtatccttgcaaaacgcttaggcccctcctcatcttaggatttagggcgggtgcattccgccacccggccggagatttcctctccgataggcacttaatcaccaaaacattatggaaattgcccaagggcacatttccctttctttcaatctccctctttttggtgatttatgccaacaccttagaaagcaaccaaaataagttcaacatcaatgcaaatgaggaccaaattgtttttgactataatttggcatatttggatcgctctttgccaccacttggtttgtttttgcaaatcaaattcattttcctatctctaagtcaaacacacttgtttcggcacatagagagatatttcaagataaggattgattaa

SEQ ID NO: 37264 - DNA, 405 bp, Zea mays
  Peptide Sequence Number=SeqID_79043
atggcccctggcgaggccgtggagctaggagggtggcgcaacaactctctggctgcggatagcgcaccgggggtggcccttgatgccctggtcgactgcgcaggagtgtgctgtcgcgctgagcgcacagcagcagctgcaccgggcgcagggcgactggaggcccgtggcatggaagaggcaacctcctccatgaggaagtccttagaggccatgtcatggtgctcgacgatatggaccatgatgccgagcgagaaaacaagcaaaaacctaatgtcaaggcccctacctggcgcgccaaatgtcggagaggaaatctccgaccgggtggcggaatgcacccgccctaaatcctatgatgaggaggggcctaagcgttttgcctgttatgagattgggggatga

SEQ ID NO: 37265 - DNA, 375 bp, Zea mays
  Peptide Sequence Number=SeqID_79044
atgaggaatacatgtctgagatattggacaactaaggcccgtagcgtggcagcagtcgacatatgctacggagttggtggtgttgttgtgtcgcttcggccggttcttcctccccaacctgctgcccccttctcggactggcgcatggtgcgagtgcctcttggtttggagctattctggctgggcttctttgcttgcgtgctctctccctatatatctagcggtatactacctatgtcgcctccagatgcccaggtcttcgttgtgtccttctccggcaacgaacaggaggatgctctagctcaactcaagagcatgaagaaacgtctcaaggaagcagaagaacaatataaggtgccaaaggttcacacttag

SEQ ID NO: 37266 - DNA, 237 bp, Zea mays
  Peptide Sequence Number=SeqID_79045
atgaggagtccaggtctgagatattggacaaccaaggcacgtagtgtggcagcagtcagtatatgctacggagttggtggtggtgttgtgtcgcttcagcagagctgctccggctggacttctttctccgcttgcgtggtctctccctataaatctcgtggtatactacctatgtcgcttccagatgcccaggtcttcgtcgtgtccttctccggcaacgaacaggtaaccgactag

SEQ ID NO: 37267 - DNA, 327 bp, Zea mays
  Peptide Sequence Number=SeqID_79046
atgaggagtccagatgcccaggtcttcgtcgtgtccttcttcggcaatgaacagcttcttgttcttggactggattggactgcagctgcttgctttgcttgtggggcgcctgcacttcactgcatgcaactaatggcgcgggaggttgagccgccacctgggcgcacctatattgcagatctcggcgtcaggatctatggcgccgaggtcctcattgacaggaaggctcatcacctgctgttcgcggaggcaagcaaggatgtagtcgacttcttcttgaaagggaaatgtgcccttgggccatttctattatattttggagattaa

SEQ ID NO: 37268 - DNA, 1008 bp, Zea mays
  Peptide Sequence Number=SeqID_79047
atgaaggttgcagatggcgtgaagactggcgactggcgtggaggtcatggtttgctggcggaggaagttcgttgtgagagccaatcggtacgaacgcgagaagcgggaggctggctggggcgtgtcgtgcggagggtgcgggaggcgacacatgtgttggcgagcgtgcacgagcctgtggtgtggagtcatggtctacttgtgtacgatagagatggcgtgaagacttgcgactggcgtgaagacttggcctccgatgaatggccaatagaggccgcgacgggccgcatatctgctggtggggtctgggaggggggcagtgtagactgcccccgctcctacccgcacgcgcacgccccgcacgcaacggccccacgccccgcacggccccacgttcgccgcgcgctcccaaacgccgtcgcgaaaccgccgcacgaccgcgccggcgaatcccgcaacggccgccgcgaaacctccgccgcgcaacacccgccgcccaaacgcggcggcggcaagtaccttcacttggagtgggcggcaagcgctttggttctaggggcagcaacagcggcacgggtgaacgccgacgcgcagaggcagagcgcaccgccattattcgtcgccggtggcagccggttcatcggggcgccgagcttgagcgacaccagcatagactgggctggcggcggcggcggcaccgacagcgcaagtgaagcgccagcgatgggcgccgtgcaggaccaacaacagatcgagctcccgttgtcacccgaggacgtgccgtttgcgcaggtgtacaggttcgtcggcgacatgttcgacgcggacgtgccggtcccggtggaagcccacctacagaagctgaaggagatggacgacatcacagccaagacagtcttgctggtgctgcggaacctcgagaacaacctgtcggtgccccagttcgagcgtgtgacaaggctgttgtcgacgtatgatccgacaagagccctgtctggccagttgtag

SEQ ID NO: 37269 - DNA, 252 bp, Zea mays
  Peptide Sequence Number=SeqID_79048
atggaggttgcagatggcgtgaagactggcgactggcgtggaggtcatggtttgctgacggaggaagttcgttgtgagagccaatcggtacgaacgcgagaagcgggaggctggctggggcgtgtcgtgcggagggtgcgggaggcgacacgggtgttggcgagcgtgcacgagcctggggtgtggagtcatggtctgcttgtgtacgatagaggaggcgacacgggtgttggcgagcgtgtgcgggcctag

SEQ ID NO: 37270 - DNA, 324 bp, Zea mays
  Peptide Sequence Number=SeqID_79049
atggaggttgcagatggcgtgaagactggcgactggcgtggaggtcatggtttgctggcggaggaagttcgttgtgagagccaatcggtacgaacgcgagaagcgggaggctggctggggcgtgtcttgcggagggtgcgggaggcgacaggggtgttggcgagcgtgcacgagcctggggtgtggagtcatggtctgcttgtgtacgatagaggtgagttggtgtgtgttttggtgcgggtggagaagcgggctggagtatgttgtggagtgggcgggtgggacgtgacaactgacatggcatggaggttgcagatggcgtga

SEQ ID NO: 37271 - DNA, 339 bp, Zea mays
  Peptide Sequence Number=SeqID_79050
atgaacaacctggggcagatgggcgtggccatgggctacgtcgacgtctccctcttcatctccatgaccagcatctggggattcttcggtcgcatcgcctccggcaccatctccgagcacttcatcaatttgagagaaaggagtgctatttcttctgttattgacatactggtaggagaggaagtctgctcttccttgctgagttctggaaggaacaagcatcaggcgacgaccgtctcgattgcgggagaggggagtgcccctcgagtatccgcagggatccaacacttggacaccgacattcgcattcctaggaacatcgaccggggggaaaagtaa

SEQ ID NO: 37272 - DNA, 1626 bp, Zea mays
  Peptide Sequence Number=SeqID_79051
atggcggggacgcgctgggggcggtggctggggctggtgacggcggtgtgggtgcagtgcatctccggcaacaactacaccttctccaactactcgcacgcgctcaagacgctcatgggcctcacgcagctgcagctcaacggcctctccgtcgccaaggacgtcggcaaggcgttcggcctcctcgcggggctggcgtccgaccgcgtccccacctggctcctcctcgccgtcggctccctcgagggcctcctcggctacggcgcgcagtggatggtcgtgtccggggccgtcgcgccgctcccgtactggcagatgtgcgtcttcctctgtctcggcgggaacagcaccacatggatgaacaccgccgtgctcgtcacctgcatccgcaacttccgccggagtaggggccccgtctccggcctgctcaagggctacgtcggcctcagcaccgccatcttcaccgacacctgctccgcgctcttcgccgacgacccggcctcgttcctcgtcatgctcgccgtcgtgccggccgccgtctgcgcgctcgccatggtgttcctccgcgagggcgccgccgctgcggacgaggacgacgacgggcgctgcttcgccgcgatcaactcgctcgccgtggcaatcgcgctgtacctcctcgccgcggacctcacggggctcggcggcgggggcggggtcgtcttcgtcgccgtgctcctggtgctcctcgcgtcccccgctgccgtgccggcgatcctggcgtggaaatcgtgggcggagacccgcaaggccgcgaacgccgacctcgaggaggcggactccttggccgcggccgcgccgctgcttctcgtcgcgaaggaggcgcgtgctcccggagagcggccgcgcctcggggaggagcacacgatcgcgcagacgctcacgtcgctggacttctggctgatgttcgcgtcgttcctgatgggcgtgggcacggggctggccgtgatgaacaacctggggcagatgggcgtggccatgggctacgtcgacgtctccctcttcgtctccatgaccagcatctggggattcttcggtcgcatcgcctccggcaccatctccgagcacttcatcaagacacgaggtattccccgcccgctgtggaacgcagcctcgcaggtcctgatggccgtcggatacatcgtgatggcgctggcgatgccaggctccctcttcatcggctcggtggtcgtcggcatctgctacggcgtgcggctggcggtcaccgtgcccacggcgtcggagctgttcggcctcaagtactacggtctcgtctacaacgtcctcatcctcaacctgccgctcggctccttcctcttctcgggcctgctggcgggcctcctctacgacgcggaagccaccgcggtgcccggcggcggcaacacctgcgtcggcgcacactgctaccgcctcgtcttcctgatcatggcgctcgcctgcgtcgtcgggttcggcctcgacgtcctgctctgcgtccggacgaagagggtgtacgccaagatccacgagagcaagcggttgagcaggtcagccgtggcggagaggggaaaagatgggatcaatttgattgatacagttgattgccactaa

SEQ ID NO: 37273 - DNA, 790 bp, Zea mays
  Peptide Sequence Number=SeqID_79052
actgcccccgctctcccctgcctcccgcatcccgcgcacgcggcaaaccaccgccgccgcttatctcgccgcccgcccgctgcctcccgcatccccagtcgcacgccagccgagtccccagtcgcacgccaggccccacccatccgattcccccgccgaggatcccgtcgccgccgagtatcccgccgcccgcccgccgccaaggattctcgtgcggatccgcgcgctcgacatgggcttcatcatgggcggcggcctcctacacgctgagctcgacgccgccatcgcggggctcgcacgaccgaaccccccgccgcgatccccctctcgcccgcggcgaatcccccgccaaccggcctccctcctcatccactccgtcgcgaacctccccatgcctccaccgccccttccgtacctcctcctcctcctcctcgggacacacggccaagcaccaagcgaaccaacgcgcgccggcttgaactcgaagcaagcaagcgactgggctgggcattttcttcaggtgtttggaaaggccctaatggcggggacgcgctgggggctggggctggtgacggcggtgtgggtgcagtgcatctccggcaacaactacaccttctccaactactcgcacgcgctgaagacgctcatgggcctcacgcagctgcagctcaacggcctctccgtcgccaaggacgtcggcaaggcgttcggcctcctcgcggggctggcgtccgaccgcgtccccacctggatcctcctcgccgtcggctccctcgagctgcgttcactg

SEQ ID NO: 37274 - DNA, 396 bp, Zea mays
  Peptide Sequence Number=SeqID_79053
atgcattcattagattgtaatcttgccgacggagagtacgtgctcatccccgagcaaggacctgtccaagaggaggaccaggagcaggcttcagaggctgctattgaggatctccccgcagccccagcagttgaaggcaagccccgctatggtgggtacaagtgcggtcactgcacggcggcagccggggtcagtggagcattgtatgccaaggcggtgaggcctggacgcgaacggggaatcgatggggacggttgtcatgtgtggggtcggagtaccctgacatgccgtaccatgcaggatgtagttgatggtgtgacttggcctaccaccctgccaccgggttggacggtcgagtgggatgttgctccggcaggagaggagcatgaggagtag

SEQ ID NO: 37275 - DNA, 282 bp, Zea mays
  Peptide Sequence Number=SeqID_79054
atgcgacctgagactgggtctccccatgctagctatggtgggtacaagtgcggtcactgcacggcggcagtcggggtcagtggagcattgtatgccaaggcggtgaggcctggacgcgaacggggaatcgatggggacggttgtcatgtgtggggtcggagtaccctgacatgccgtaccatgcaggatttggttgatggtgtgacttggcctaccaccctgccaccgggttggacagtcgagtgggatgtggctccggcaggagaggagcatgaggagtag

SEQ ID NO: 37276 - DNA, 282 bp, Zea mays
  Peptide Sequence Number=SeqID_79055
atgcgacctgagacagggttctcccatgctagctatggtgggtacaagtgcggtcactgcacggcggcagccggggtcagtggagcattgtatgccaaggcggtgaggcctggacgcgaacggggaatcgatggggacggttgtcatgtgtggggtcggagtaccctgacatgccgtaccatgcaggatgtagttgatggtgtgacttggcctaccaccctgccaccgggttggacggtcgagtgggatgttgctccggcaggagaggagcatgaggagtag

SEQ ID NO: 37277 - DNA, 165 bp, Zea mays
  Peptide Sequence Number=SeqID_79056
atggcgtggtcgaactctgacgacggcgtgggcgaaccctcagaaaacttaaatgcaattttggacccatttctcggcgccatgggttatggcgccgagtttacacgtctcggcgccatagatcttggcgccgagctacctgccgcgctgtcgtccacgagctga

SEQ ID NO: 37278 - DNA, 183 bp, Zea mays
  Peptide Sequence Number=SeqID_79057
atggcgcgagtgggttctggcggcgaggccaacgcgccagaacaagacgcgaaactcggcgccatagatcttggcgccgagctcggtgccacgtcgacgccgcgtcagctcgtggacgacagcacggcagatagctcggcgccaagatctatggcgccgagatgtgtaaactcggcgccatag

SEQ ID NO: 37279 - DNA, 210 bp, Zea mays
  Peptide Sequence Number=SeqID_79058
atgggccccacttaccagagggagcctgcgctcgcgtcccgcaccggggatgctcggaccgctgaagcgtgggacctgccgctcggcgccatagatcttggcgccgagctcggtgccacgtcgacgccgcgtcagctcgtggacgacagcgcggcaggtagctcggcgccaagatctatggcgccgagatgtgtaaactcggcgccatag

SEQ ID NO: 37280 - DNA, 246 bp, Zea mays
  Peptide Sequence Number=SeqID_79059
atggaggtgagggagacgtcgatccccgagatcgccgagggagggtgggtgtcggagcagttgggcggcgtggtatggcatgattatagagggccgaggaggcagaggcgacggagactcccagaaaacttaaatgcaattttggacccatttctcggtgccatgagctatggcgccgagtttacacatctcggcgccatagatcttgacgccgagctacctgccgcgctgtcgtccaccagctga

SEQ ID NO: 37281 - DNA, 873 bp, Zea mays
  Peptide Sequence Number=SeqID_79060
atgccttctgcttcttcgtcctcgttttcctccctctacatcatcggcgactcctcgcgtctccgtgacgaccccatcatcgaggtcggcgacatagacgagaacgacagcagcgacgacgcgctctcagggttaggggcagagcgcttcgcatcatccttcgaaacccaagggtccattgacgccctctgtagaaagtacggagtaccggaggagtactcgacggtcctccccgccggccacgagcgcgcgtgttcgcccccggggttcgccgtctccgtgtacgcgcatgcgctggagaccagcatgcccgtcccgctgcacggcttcttctgtgaggtgctcggccacttcggcgtcgcgccgagccagattgcgcccaacgggtggcgtgccattgccagcttcgtcttccgctcccacttcatcggcgtggccgtgaactacgcgtcgttctcgctgggctacacgctggagctcgaggataagctcgcggcaagggagcgcgaggcgaacgcgctgcggcgggagctgtcgcaggccaaggccgagctcgccggcgcgaagaaggcgaccgcggaggaggtgaggggcgccagggaggctgtcgtgcgcgacttctggggctccacggagcaggtggtccgtttcttggagcacgcgttggccgtaaaacttaaatgcaattttggacccatttctcggcgccatgagctatggcgccgagtttacacagctcggcgccatagatcttggcgccgagctacctgccgcgctgtcgtccaccagctgacgcggcgccgacgtggcaccgagctcggcgccaagatctatgacgccgagctcgaatatgtaaccacaaagcttgtctag

SEQ ID NO: 37282 - DNA, 1071 bp, Zea mays
  Peptide Sequence Number=SeqID_79061
atggatgcattgatatacttaaggctgactgtgttaaccttttggttaaatactaccacgaggctcggcgtgggggtatacatggcaagcatggacgaggaaacaatatgcaaaaatcaggtggaacaatcacttctcatcacaggttttggatatgaacatgatgatgcctggatgaccaatataaatttgtttaaggaatttactgtcctaagcacgatctgcacatctgagttttctattatcctgctcggctgccccttttttggagtgactgtagcaaccacttctaattcattttctaccgcgacaactggcgctgcaaggtactgcttctctcccattctcactattatgataaggacgtgccaagaatggaggaacaaaaccatgaagactacaactgagagccgtagttggccgagtcgtttaagcagaacatgcctttttaacacagagaagattgatactaagtggcttagttgttttgatggcagctcagactctaacaaacaatgccttctcccctttgtttggactggacttaataacaactacaggatggaaggtgaggcagagaccgtggttggttcttgttctaaaccatgtgggcctctggaggactactacattccagattacattctgaagccaggtgcccaacaagtacttgttgatcatgcggcaccctgccccattgtagtgttcatcaactcaagatctggaggccaacttggaagtagtttaatcaaaacatatcgtgagcttctcaatgaagcacaggttttttatctctcaaaagaggctccagataaggtattgcatcgtttatatgccaaccttgaaaggctgaagatggaaggacacattcttgcagttcaaatttggaggacactgaggctaattgttgcaggcggtgatggtacagctagcaggctgcttggggtagtcagtgaccttaagctttcccacccacctccagtggcaactgtgcctctgggaaccggaaataacctccccttttcatttggatgggtgttggcaaaatcttctaagatggtttctgactaa

SEQ ID NO: 37283 - DNA, 2712 bp, Zea mays
  Peptide Sequence Number=SeqID_79062
atgtccaccgcgcccgcgcggcgcgcccgcccgccgctgccgctgcagaacggcgcggagggcgacgacgagcgcgaggaggaggttgatgaggaggaagtgggcgatgacgaagcggaggaggaggaggacgacgacgacgaggaggagccgcggctcaagtaccagcggctaggcgggagcgtgccggcgatcctctccaccgacgccgcggccgccatcgccgtcgccgaccgcatggtcgcgctcggcactcacaacggcacgctccacatcctcgacttccagggcaaccaggtgaaagaaattgctgcgcacacagcaactatcaacgacataagctttgacgcagacggtgaatatataggcagctgctcggatgatggcacagtggcaataaacagcctcttcaccgatgaaaagctaaagtttgagtaccatcgccccatgaaggcaattgctctagaccctaattatgcccggaactatagaagatttgctactggtggtttagcaggccaagtacttgtgctgacaaagaagtcttggggaggttaccataagaaggttttgcgtgatggtgaagggccaatccattcgatgaagtggagggcggatcttcttgcttgggctaatgatgcaggggtcaaagtgcatgatatgagaacagacaaagggatcgcattcatagagagaccaaaaggcattcatcgaccagagttcttgcttccccacctagtctggcaggatgatacagtcttagttgttggatggggaacaagtgtcaagattgcagcgatccgaacagatctatctcagggactcaatggcctacaaagaactatcaccacagctagttctgagaagtatgtggacattgtgggctcattccaaacaggctatcacatatctggggttgctccatttggtgaccttttagtcgtacttgcctatattcctgatgaggatgaaaaagagaaaacatttagtacttctgttacttcacgacagggaactgcacagcgtccagaaatacatcttgtatcatggaaaaatgatgagcttactacagatgctctgcctattcatggttatgagcattacaaggcaaaggactatgctcttgcacatgcacctttctcaggaagtagcaatgcaggtggacagtgggctgctggtgatgaacctttgtattacattgtgtctcctaaggacatagtcgttgcaaagccaagagatgctgaagatcatattgcttggcttcttcaacatggttgccatgaaaaagcattggctgcagttgaggcagggcaaggacgcactgagcttcttgatgaggtgggctcaagataccttgatcacttgataattgaaagaaaatatgctgaagctgctcaacgctgcccaaagttgttgcgaggatccccttcagcatgggagagatgggtcttccactttgctcatctccgccaacttcctgttttggtcccttatattcctacagaaaatcctcagctgagtgatactgcatatgaggttgcccttgttgctctaactaccaatccttctttccatgaacttctcttgactactataaaaaattggccaccgacattatactcagcctcaccggtcatatctgccattgagccacagctaaactcctcatcgatggctgattcattgaaagagtcattagctgaattgtatgtgatcaatggtcaatacgaaaaggcactttctctttatgctgaactcctgaagccagaagtattcgagtttattgagaaatacaacttgcatgatgccattcatgataagattgtcaatcttatgatagtggacaataaaagaacagttcacctactgatccaacatcgtgatatcattcccccatatgaagttgtggagcagctgttgcataccagtaaaaaatgtgacaagagatatttgttacacctgtatttgcatgctttatttgagatagatatacacgctggaaaggattttcatgatatgcaggtggagctttatgctgactacgagacaaggatgctactacccttccttcgaaccagtcagcattacaggcttgacaaggcatatgaaatctttgcacaaaaagaacttgtaagggagcaagtttttgtccttggtcgaatgggcaatgctaaggaagctctgtcgacaattataaacaaactggaagacatgcaggaggctgttgaatttgttacggaacagcatgatgatgaactgtgggaggaactgattagacaatgcctccagaagcctgaaatggtagggaatctattggaacatacagttggcaatcttgatcctctgtacattgtcagtttggttcctgatggcttagaaatacctcggttgcgggatcgtcttgtgaaaattgtgacggattaccggacagaaacttcattgcgaaatggatgcaacgatatacttaaggctgactgtgttaaccttttggttaaatactaccacgaggctcggcgtggggtatacatggacatatctgtcatcgtgttctactgctgccatgcgtatcatctgtcttgccttgaaggtggcttagactcgatgagatcaaacagtggtcaggatagtgacggaggcatggacgatgaggatggttccccatcaggccagtctcgcatgcgctgtgtcttgtgcactactgctgcttcataa

SEQ ID NO: 37284 - DNA, 2934 bp, Zea mays
  Peptide Sequence Number=SeqID_79063
atggagacccgaccgcggacccggccagcgccgagcagccacacccacaccacgaccacgagccgaaggcccgcacccggcgcgtggctctcctgggtggctagcctggctcgatcaccagcccagcggcccagccggacccggctcggccgcactcgatgcactggactagtttttacaggcgttcacgacacatcaatggacgagcaccgaggcaaaggcagttcttacacgcgggccctcggcttcaccggaaatcgtcctcgggacgggagatctcgcgggccggccggcggcgagaggatgtccaccgcgcccgcgcggcgcgcccgcccgccgctgccgctgcagaacggcgcggagggcgacgacgagcgcgaggaggaggttgatgaggaggaagtgggcgatgacgaagcggaggaggaggaggacgacgacgacgaggaggagccgcggctcaagtaccagcggctaggcgggagcgtgccggcgatcctctccaccgacgccgcggccgccatcgccgtcgccgaccgcatggtcgcgctcggcactcacaacggcacgctccacatcctcgacttccagggcaaccaggtgaaagaaattgctgcgcacacagcaactatcaacgacataagctttgacgcagacggtgaatatataggcagctgctcggatgatggcacagtggcaataaacagcctcttcaccgatgaaaagctaaagtttgagtaccatcgccccatgaaggcaattgctctagaccctaattatgcccggaactatagaagatttgctactggtggtttagcaggccaagtacttgtgctgacaaagaagtcttggggaggttaccataagaaggttttgcgtgatggtgaagggccaatccattcgatgaagtggagggcggatcttcttgcttgggctaatgatgcaggggtcaaagtgcatgatatgagaacagacaaagggatcgcattcatagagagaccaaaaggcattcatcgaccagagttcttgcttccccacctagtctggcaggatgatacagtcttagttgttggatggggaacaagtgtcaagattgcagcgatccgaacagatctatctcagggactcaatggcctacaaagaactatcaccacagctagttctgagaagtatgtggacattgtgggctcattccaaacaggctatcacatatctggggttgctccatttggtgaccttttagtcgtacttgcctatattcctgatgaggatgaaaaagagaaaacatttagtacttctgttacttcacgacagggaactgcacagcgtccagaaatacatcttgtatcatggaaaaatgatgagcttactacagatgctctgcctattcatggttatgagcattacaaggcaaaggactatgctcttgcacatgcacctttctcaggaagtagcaatgcaggtggacagtgggctgctggtgatgaacctttgtattacattgtgtctcctaaggacatagtcgttgcaaagccaagagatgctgaagatcatattgcttggcttcttcaacatggttgccatgaaaaagcattggctgcagttgaggcagggcaaggacgcactgagcttcttgatgaggtgggctcaagataccttgatcacttgataattgaaagaaaatatgctgaagctgctcaacgctgcccaaagttgttgcgaggatccccttcagcatgggagagatgggtcttccactttgctcatctccgccaacttcctgttttggtcccttatattcctacagaaaatcctcagctgagtgatactgcatatgaggttgcccttgttgctctaactaccaatccttctttccatgaacttctcttgactactataaaaaattggccaccgacattatactcagcctcaccggtcatatctgccattgagccacagctaaactcctcatcgatggctgattcattgaaagagtcattagctgaattgtatgtgatcaatggtcaatacgaaaaggcactttctctttatgctgaactcctgaagccagaagtattcgagtttattgagaaatacaacttgcatgatgccattcatgataagattgtcaatcttatgatagtggacaataaaagaacagttcacctactgatccaacatcgtgatatcattcccccatatgaagttgtggagcagctgttgcataccagtaaaaaatgtgacaagagatatttgttacacctgtatttgcatgctttatttgagatagatatacacgctggaaaggattttcatgatatgcaggtggagctttatgctgactacgagacaaggatgctactacccttccttcgaaccagtcagcattacaggcttgacaaggcatatgaaatctttgcacaaaaagaacttgtaagggagcaagtttttgtccttggtcgaatgggcaatgctaaggaagctctgtcgacaattataaacaaactggaagacatgcaggaggctgttgaatttgttacggaacagcatgatgatgaactgtgggaggaactgattagacaatgcctccagaagcctgaaatggtagggaatctattggaacatacagttggcaatcttgatcctctgtacattgtcagtttggttcctgatggcttagaaatacctcggctgactgtgtttaaccttttggttaaatactaccacgaggctcggcgtggggtatacatggacatatctgtcatcgtgttctactgctgccatgcgtatcatctgtcttgccttgaaggtggcttagactcgatgagatcaaacagtggtcaggatagtgacggaggcatggacgatgaggatggttccccatcaggccagtctcgcatgcgctgtgtcttgtgcactactgctgcttcataa

SEQ ID NO: 37285 - DNA, 126 bp, Zea mays
  Peptide Sequence Number=SeqID_79064
atgtcaggggaacaaaggtgtctgaactcagagctatggcatgcatgcgcagggccccttgtgtccctgcctgtggttgggagccggtcgtctactttcctcagggccatagtgagcagttactag

SEQ ID NO: 37286 - DNA, 471 bp, Zea mays
  Peptide Sequence Number=SeqID_79065
atggcatgcatgcgcagggccccttgtgtccctgcctgtggttgggagccggtcgtctactttcctcagggccatagtgagcagataatcaatcttgttcggagattgttatcacatgacaatcaggttcaagaggtgtcacgcattcccaatggctccaaccccggcaactgcatctccctgctaagggagcaattgcagaaggtacttgatgctggaattagtattaaagtatggtccatctccgcatatggcattggttttctactgttatctgggcactgcattgctattgctttagtggacaaattgaagctaaagttgaggtactggcacaacataataataaccattatctcgaaggaagtttaccatgcaggagtgatcatgatgtacaacagcacaatgaggagtcagactacatggcactgccgaattattgatgatcaacatgcgggttcagtagtttaa

SEQ ID NO: 37287 - DNA, 1068 bp, Zea mays
  Peptide Sequence Number=SeqID_79066
atggcatgcatgcgcagggccccttgtgtccctgcctgtggttgggagccggtcgtctactttcctcagggccatagtgagcagataatcaatcttgttcagagattgttatcacatgacaatcaggttcaagaggtgtcacgcattcccaatggctccaaccccggcaactgcatctccctgctaagggagcaattgcagaaggtacttgatgctggaattagtattaaagtatggtccatctccgcatatggcattggttttctactgttatctgggcactgtattgctattgctttagtggacaaattgaagctaaagttgaggtactggcagaacataataataaccataatctcgaaggaagtttaccatgtaggagtgatcatgatgtacaacagcacaatgaggagtcagactacatggccgtccgatcctgcccatacccgacgcagcctctcccaccctgtcttccgccgccagctcgcaaccgtccggcgcaagcaaagagcccccgttccgctcccacgatcgccgtcgccgtccctctgccctcatatcccctcccacgacaccgaaacaatgacgacgcataccgcggaggagctcgccacccagatcgagcagcagaaactcgaggagcagaagaccgagcctaggaacaaagcccttgcactctcaaaaggagtggaacaaatatggggcattggtgttgatttgggatggggaacgaaatggaggttgggaactctgaggtgggtggtggaggaggagagcgagggaggacgacgaggctgcctggccgagccacgaggggaaggtgagcgtcacctgcaaggccacaaccttggtgagaccgccaccatgagtgtgccccacggtcgccgccaggatcttgagctcgccatcgatgacttcgacgaggagttgatcgaccatgagctacgctactcgttccagcgcaacagcaagtccattcagcaaaccttggcgctcctcacctatcgcaacctcttcggcattgccatcagacttcctgtcatgctgctccgagataggcgtgcctga

SEQ ID NO: 37288 - DNA, 312 bp, Zea mays
  Peptide Sequence Number=SeqID_79067
atggaggacaaccaaactcctctcccatggcagcattttcccccatccgagctccacccatggcgagaggccaatgccgcccagctcactgtccagggcgcccataaaattccagcagcgagctccaccgccgatctacgcagccccaacttcgcgcgctgtcggctcgctgttttgtggagccccatggacagcgcgccgtcgacgcccgccctaatggtcgacgtcgtgccttgcccgttcgacgaaataccgagccatgtggacggccatgcgtctagtcacgacccgttcaggttgattgaattatag

SEQ ID NO: 37289 - DNA, 498 bp, Zea mays
  Peptide Sequence Number=SeqID_79068
atggcgccctcctccctggcgcttgctccctgcaggagagcagccgacgccccattttcctccttccctgcttgcaggcagcctttctccctgcgcgctgtagctccttgggctgacctcggtgaggtccaggtccatggcgacgcagcagctcctttcctccatggccagccgccctctgttgctgccgagctccaactccggtcagcagccacggcgccgaggattccctgcgcgcgagcacaagccccatttcttctacccctgtccggcgcccagcagcatccatgcgcagcgctgctgctccatttcctccccatcttccccaccaaacggcacccgcagcgagtcgccgtcgcccatggccgagcccccttcctccctggccgcccagctcactgtccagggcgctcagaaaattccagcagcgagctccaccgccgatctgcgcagcaagttgcacgccgcagcagcatgctccttcgcctcgcgcgttga

SEQ ID NO: 37290 - DNA, 498 bp, Zea mays
  Peptide Sequence Number=SeqID_79069
atggcgccctcctccctggcgcttgctccctgcaggagagcagccgacgccccattttcctccttccctgcttgcaggcagcctttctccctgcgcgctgtagctccttgggctgacctcggtgaggtccaggtccatggcgacgcagcagctcctttcctccatggccagccgccctctgttgctgccgagctccaactccggtcagcagccacggcgccgaggattccctgcgcgcgagcacaagccccatttcttctacccctgtccggcgcccagcagcatccatgcgcagcgctgctgctccatttcctccccatcttccccaccaaacggcacccgcagcgagtcgccgtcgcccatggcccgagcccccttcctccctggccgcccagctcactgtcagggcgctcagaaaattccagcagcgagctccaccgccgatctgcgcagcaagttgcacgccgcagcagcatgctccttcgcctcgcgcgttga

SEQ ID NO: 37291 - DNA, 144 bp, Zea mays
  Peptide Sequence Number=SeqID_79070
atggggtcgtattcttggctaaggtacttcacccagggggccaccaccatcgtctttagaaaccttagcgggttgcttcgtattaagcttcaccttgctatacctgcattagtttttcccccacttgctgagccccgaccataa

SEQ ID NO: 37292 - DNA, 138 bp, Zea mays
  Peptide Sequence Number=SeqID_79071
atggggtcgtattcttggctaaggtacttcacccagggggccaccaccatcgtctttagaaaccttagcgggttgcttcgtattaagggtgatgctggagactttgatgaagattttatcgacgacgatgatttctaa

SEQ ID NO: 37293 - DNA, 138 bp, Zea mays
  Peptide Sequence Number=SeqID_79072
atggggtcgtattcttggctaaggtacttcacccagggggccaccaccatcgtcttagaaacccttagcgggttgcttcgtattaagggtgatgctggagactttgatggagattttatcgacgacgatgatttctaa

SEQ ID NO: 37294 - DNA, 177 bp, Zea mays
  Peptide Sequence Number=SeqID_79073
atggggaagcctatcccatcactcctcatgctcctccttagcggagtatcacatcaaagtaaagcggaaataaacaactgggcaatctcccacaggaagatgaccggcgcatcgttagacttagaaatcatcgtcgtcgataaaatctccatcaaagtctccagcatcaccctctga

SEQ ID NO: 37295 - DNA, 249 bp, Zea mays
  Peptide Sequence Number=SeqID_79074
atggggtcgtattcttggctaaggtacttcacccagggggccaccaccatcgtctttagaaaccttagcgggttgcttcgtattaagagggtgatgctggagactttgatggagattttatcgacgacgatgatttctaagtctaacgatgcgccggtcatcttcctgtgggagattgcccctgttatttatattccgctttactttgatgtgatacttgttaaagatacaatgattcagatgatgtaa

SEQ ID NO: 37296 - DNA, 342 bp, Zea mays
  Peptide Sequence Number=SeqID_79075
atgagggttgtatgggacgcccttggccaaggatctagtgaggacgctagggaaaagctacgtagtgaaaccttggaagtgtttaagggtccgtacaacccgaggcaaaagggatcacaactcatgggtaaaaccaaggcgaggattgtggtttccaagaaagctcgtaaagaggcgagatcatcatctttataccaagaggccttgattgcaaaccaatccatcgacacggaggttgtccttcaagatatgcgtgggccggacagccctgagccggtcgttgatctcatcctcgaaaagggattcaacctgtcggagcagatgtcatatgaccctgcctag

SEQ ID NO: 37297 - DNA, 369 bp, Zea mays
  Peptide Sequence Number=SeqID_79076
atggtggcatctgttatggctcctataatctcgctcagggatctaggtacgggcatcgtcccacggctttttcctgaggtcggaggtataggttttggtacgtcagatggtcgctatgcaatggtcattttcaacattcgcatactgaggaccctagggaaaagccatgtagtgaaaccttgcctactcaccttggaagtgtttaagggtccgtacaacccgaggcaaaagggatcacgactcatgggtgataatgaggatgatggttttgattatgtttatggttgtccacattgcaaccactactcaggagaagatggagtcatggaggaggacttccaggagttccaagagtacgatgagttctag

SEQ ID NO: 37298 - DNA, 297 bp, Zea mays
  Peptide Sequence Number=SeqID_79077
atggcgctcggcgtggtggccagcagccccagtgaacagggactcaggctgtttcctgagtgcctctccgtaaggacctgttcggggagcgacaccccgggaaaacagtgcaaccatgagggtgaggcatctgttatggctcctatattctcgctcagggatctgcgtacgggcatagtcccacgactttttcttgagggcagaggttgcctttggtgcaatctatgctcaggtaaagaagaagacgtcgaggcggatctccaggagttccaggacttcgacgagttcgaggattag

SEQ ID NO: 37299 - DNA, 366 bp, Zea mays
  Peptide Sequence Number=SeqID_79078
atgtctaggcgtggtaaatctgctaaacaaagcttatggaaatttaggaagggtcctttgaccggaactgccttcgacccgctgcctttgccaagtggtgttccagtgcctatgtgtttttgtggtgatccttgtaaggttgataagtctgaggatcatgacacctatcgacaggggtattggatgtgtgctaactttgcatttgagccaactattgttcaacgtcggatgaatttaatgactcctccaccgctatgtgattttgagcagtggattgacaaagaaatatcagagaaagacaagaagtggttggataatcttaaaaagtgggatgcagaggacaaagagaggatggagaaaagatga

SEQ ID NO: 37300 - DNA, 756 bp, Zea mays
  Peptide Sequence Number=SeqID_79079
atggaccctatgctcggcgccatcatcattggcgccgagcctgtgtgtgccggcgccaataatattggcgtgcagacgtcagatggagggatgactcgaaatctacgtggcacatacctcggcgccatagatcttggcgccgaggtaggcgcctccggtcaacgacgcctacctcggcgccaagatatatggcgccgagatttcagcctgatttataggatgtctaggcgtggtaaatctgctaaacaaagcttatggaaatttagaaagggtcctttgaccggaactgccttcgacccgctgcctttgccaagtggtgttccagtgcctatgtgtttttgtggtgatccttataaggttgataagtctgaggatcatgacacctatcgacagaggtattggatgtgtgctaactttgcatttgagccaactattgttcaacgtcggatgaatttaatgactcctccactgctatgtgattttgagcagtggattgacacagaaatatcagagaaagacaagaagtggttggataatcttaaaaagtgggatgcagaggacaaagagaggatggagaaaagacgagaggagcttgctgccgagcaacaacgtgaagacgagcagaaaatgaggcatgttgctgaatgcagggaagagaaggagaagaagcttgagcgtgcacgtcgtgcaaaggaagcaatggaggagaaccctgatgcatttcgcaagggcaaatggccctgttgcactcagtag

SEQ ID NO: 37301 - DNA, 873 bp, Zea mays
  Peptide Sequence Number=SeqID_79080
atgcatggtctgcgagacaacgttcctgctaggcatttcgccgagcacctgcagcaccagctcaaggcggctggtcttggcgtactcatccaaaagacgacctccttcgccaccgcacgcgacattgccgtgtccgcgcggtgcctcttcatgcccatgaacctccacatgctctcgctcgtcgtccacctctccgagctggctgcctccttgcctggcgagttcggagacctggccgagccggtgcgtctacccggttgtgtgcccatcctagggcccgacatcgtctcgtcgctccaggaccggttcgacccatcgtacgtggtgatgctgcacctcgtcgtgcgctgccgcgaagccgccgaagccatcctcgtcaactccttcgacgctatcaagcctgaggccgtcgaggttctgcgccatccagcaaagtccgacaggccaccagtccgcgtgatgggagatctggtggtgacttgcaagtggagctacagggagagggagtgcgagagcgagagcgatgagatggtggatgatgaggacagcaatgacgtactccacagccgcctcggactcctagatctagaggaggcattgctcctccttggagtcgacgcaggtgcctccgcctcgaccgccgcacgagcacgcgccaagccaattgaagagggagtgcgagggcgcgggatggcggatctgctcgatctcaagacttggcgggcgcggcggacgggattgacgaaggtgcacggggcagggcaggagatcgcgccgcggtccaggggcgctgtgccgctgtcggcgcgggagtggggacgcacgggcgggggcacggtgaagccctgtggacgcccacgagctggtagttga

SEQ ID NO: 37302 - DNA, 492 bp, Zea mays
  Peptide Sequence Number=SeqID_79081
atgacacttttggatgagtacgccaagaccagccgccttgagctggtgctgcaggtgctcggcgaaatgcctagcaggaacgttgtctcgcagaccatgcatgtcgcctcgctggtgaggggtggccagtggcactacacgctctttcctccagtgtggcccacgactcccatgcctacacggtcatgctcacggcaatgtcctcgtcctcgtccaagaagtctaacttctttggccacgcgtgggatagagcacgtgttcaagattgtgatgatttgtagtaatgaattggaggcttcgatccactgcaatttatgtggtacaagggttttgtttgagaaggcgaatgagattctaatggaggaaagaaatgttcagattatgtttatatcccacagaagcaagtcgcatggtatgttctatgtccagatggcaaaaaccatggaaggacaatatttcttatgtgtcaagccaaagaaatttagtcaatga

SEQ ID NO: 37303 - DNA, 1341 bp, Zea mays
  Peptide Sequence Number=SeqID_79082
atggaaacaagtcgtactagccgtgatggggcccgatcgacaccagcagccggcggatgggatcgctgccccgctctcgccgtcgttgccccattggtggaggcacggcttcgatcccctgcaatttatgtggtacaagtaagggttttgtgtgagaaggcgaatgagattctaatggaggaaagaaatgttcagtgttctgacgttctgtcatacaacgtagcggtatgtaacgtatctgcccgccgtctcgctgggcctgatgatcttcacgacctggcctcgcctgaggccgtagtatctagcaattggatccatgatctgtattctaggaagctgttggtccgatatgcattcagaaaaaaagaaaaggaagggttacagacttcaagggatgtatattgcttggaatgcacggcaaaaatgcacagagactgtcataaaactgaactggagaagcacattgaagacatgcatgtcctgattaccaccccattccacccagcttatgtcactgcagagaggataaagaaggcgaagaatcttgagcttcttctcacggcaggaatcggctccgatcatattgatcttccagcagctgctgctgcgggcttaactgtggctgaggtcactggaagcaacactgtctctgtggcagaagatgagctcttgcgcattctgattctgctcaggaacttcttgcctgggtaccaacaggtagttcaaggcgaatggaacgtagcaggcattgcccacaaagcttatgatcttgaaggaaaaactgttgggactgttggggctggtcgtattggcaggctcttgcttcagcgtcttaagccctttaactgcaacctactttaccatgatagacttcagattgacccagagcttgagaaagaaattggggccaaatttgaggaggacctggatgctatgcttccaaagtgtgatgtgattgtgatcaacacacctcttacggagaaaacaagaggcatgtttaacaaagagaggattgcaaagatgaagaaaggtgtaattgttgtgaataatgctcgaggagcaatcatggatgctcgagcagtcgcagatgcatgttctagcggtcacattgctggatatggtggtgatgtgtggttcccacagccagcaccaaaggatcacccctggcgctacatgcctaaccatgccatgacccctcacatctctgggactacaattgatgagcagctgcggtatgcggatggtgtgagggacatgctggataggtatttcaagggcgaggacttcccggtgcagaactacatcgtcaaggaaggccagctcgccagtcagtaccagtga

SEQ ID NO: 37304 - DNA, 705 bp, Zea mays
  Peptide Sequence Number=SeqID_79083
atggagcaacagacgcacgacagggcggcgggagaggagcgtgacggtactggagaacggggcaatggagcaagggcggcgacactaagcaggccgcacaccgcgtacagtggccgcttcgatgtacctgaccgccgtttcctcccccccacaaccgccttctcgtcttcatcccagaagctgctgcccaggtcggccggggtcgaccgacgcctggtggtgtgggcatacgtcaagttcatatcgacgggcgaggcttgccgccgcgggcttgccgccggcatcgacaagctcgccaacgccgtcagcgtcaccctcggccccaaagggaggaatgttgttattgaccaagatgatgtacctaaagtaattaatgatggtgtcacaattgccaaggctatagagctcccaaatgcacttgagcatgcaggtgccacgctacttcaagaagagcggcaattctactcggagtcggagatcctggaggccaagatccgcctcctcaacggcaccaacatggtcgactatgccatggacatccacaagtccctctacgacaccgacgacgtgctcgaggacatggtgaagcgccgagccgaggtcgtctccaggctcaggtcgctcgaggaggccgcagccccgctcgtcgccttcctccagaacccgctcgtcgccccgttcaggtttatgttctttcaactctag

SEQ ID NO: 37305 - DNA, 690 bp, Zea mays
  Peptide Sequence Number=SeqID_79084
atggtgaagcgccgcgccgaggtcgtctccaggctcaagtcgctcgaggaggccgcagccccgctcgtcgccttcctccagaacccgcggctcgtgcaggagttcaggctcgtcgtctccaggctcaggtatgtggagaatggctcactttccaatattatcaagccaaacaaattcggacctattcctgaatctttggtggctctttacattgctcagtttttatatgaccaggtgttggaaggtcttgtttatctgcatgaacaaggtgtcattcatagagatatcaagggcgcaaatatactgagtaccaaagagcctttgaagtttgaactacattttcatataactgacaccattattgggtgctttgaagcaggatgtgactatattacagttttaggtgttgacttcatgtcagaaaatgttcgggcagtaattgatcaagcaggatttaataagtctcatatggaggctttgagggctgaacctgttgctgaaggtgagatgccagcatccagtagcagctcacaccaattcctaaagagcgttggcatcaaaacatcggcatcctccaagtcatcatcatcaaatcaaagtgagcttcgggagcaacttgcagctgaagcgacggctgctgttcaaggtgaactcgaccagctcaggaagaaatgtgaagtcaagtggtga

SEQ ID NO: 37306 - DNA, 360 bp, Zea mays
  Peptide Sequence Number=SeqID_79085
atgacctgccataccaactccaaacgtggtctgagtgaaccgtcaagagaagcacttagcagctcacaccaattcctgaagagcgttggcatcaaaacattggcatcctccaagtcatcatcatcaaatcaaagtgagcttcgggaacaacttgcagctgaagcgacgactgctgttcaaggtgaactcgaccagctcaggaagaaatgtgaagaagctgaggaacaacaggcgaggacacaaagggagttggaggagtacaagatgataacagagaagaatagcaaggagatggaggagaccaatgtgctcatcaagaagctcttgtccttgcatggtaacgcttcttcttcgacatga

SEQ ID NO: 37307 - DNA, 279 bp, Zea mays
  Peptide Sequence Number=SeqID_79086
atggattcaaactttaattcaaacttagtgattcgtcaattattacattctatgtttgtgcaattaagagaacatacccttgagagtcttttccttagtcgggtgaggaagcgacaaatttttgttgcttttgctccaaggtggttcctaaagaagaaaaacaagactgaagtgcgggaggactcggtcctccacataggatcttttgcttataacttatcgggaggagtttgtgcctcccttggtttgtataatattactactctgcactcgctttag

SEQ ID NO: 37308 - DNA, 504 bp, Zea mays
  Peptide Sequence Number=SeqID_79087
atgacgagcagcaacccagcggcgagcttcaaatcccgaccagggcaagcggtcgcgccgaccacaaattgcaccccgaggccaaccaaacaccttcgtggggacttgatggagcccccggaacgtgaagaagaaattgaagtaattgaagagaagacaccaccaccttcggaatctcaggccggaaattgtttctactttgatatctgcggatccgagcctgactcacctgtgaacgaaggcaagccccggcgtgctgaccgaggaccctttaactggtcacatgcctcgtcatggcatacccttgagagtcttttccttagtcgggtgaggaagcgacaaatttttgttgcttttgctccaaggtggttcctaaagaagaaaaacaagactgaagtgcgggaggactcggtcctccacataggatcttttgcttataacttatcgggaggagtttgtgcctcccttggtttgtataatattactactctgcactcgctttag

SEQ ID NO: 37309 - DNA, 321 bp, Zea mays
  Peptide Sequence Number=SeqID_79088
atggaacgtgaagaagaaattgaagtaactgaagagaagacaccaccaccttcggaatctcaggccggaaattgtttctactttgatatctgcggatccgagcctgactcacctgtgaacgaaggcaagccccggcgtgctgaccgaggaccctttaactggtcacatgcctcgtcatggcatacccttgagagtcttttccttagtcgggtgaggaagcgacaaatttttgttgcttttgctccaaggtggtaccaaatgaagaaaaacaagactgaagtgcgggaggacttggtcctccacataggatcttttgcttaa

SEQ ID NO: 37310 - DNA, 261 bp, Zea mays
  Peptide Sequence Number=SeqID_79089
atgaagctttggaaggaaacttccaggagttccaagactacgacgagttctaggagtgggttagcggcaacccccagtcggctgcctgtgaaggccgcagttatctacgtttcttttccgcactttgatttattctggggcaggcagatcctcgatggcaggctctggtgctggctcctggactacctcctgagcaactccttgctccggaacgaggatgtactctccgtcagcgagattacagtctatcgaatgcaatga

SEQ ID NO: 37311 - DNA, 315 bp, Zea mays
  Peptide Sequence Number=SeqID_79090
atgcagtacaatggatcaagcagtctcattagctgcgagaagcagacgattcgaatcgagttttatccttgcaagatcagggctcaccgccttggtgtacaatgcctcactgaccccgactgtcgtcgtgcagtgaccgctcttgtacctaccataaccgaaatgggagaccacgtctcaggtcgcgtgaggggcaaaatcctcgatggcaggctctggtgctgggtcctggactacctcatgagcaactccttgctccggaatgaggatgtattcctcgtcagcgagattacagtctatcgaagcaatgaataa

SEQ ID NO: 37312 - DNA, 450 bp, Zea mays
  Peptide Sequence Number=SeqID_79091
atgatagttcaaaaatgcttaataaggagcacaatagaaagaaaaagggaaattttgggaagaatagataatgtacaaccaaaaccttccaaggacctcagggaacatacaaatataattaaagagtactgtaatctcgctgacggggagtacatcctcgttccggagcaaggagttgctcaggaggtttgtaatgtgcacttaagtgtaggagttgtttggaaccttagttgcatgactcaggaataccttttgagatggatactagctcagctagtgcttttggcaaaccaaacccctcagccaaacatctgcatgtctagaggtagaggagtagactcctcacaccggttctctggaggacatgattgctggagtgacttggccattcgtcttgccatcgggttggacagtcgagtgggaccctacctcggcagaggaggagcatga

SEQ ID NO: 37313 - DNA, 690 bp, Zea mays
  Peptide Sequence Number=SeqID_79092
atgtcccctgcccgtgcccgcgcctataaagccagccaaggcttcagtcgtatgcccccgcgcgctctcgacctcaccgaagcacgagatcgccggagtttgccctgcacacggcgtgccagcacccgcccgagcacccaccaccgtaggtcagccaaccgagccatccccagccccgtccaaccctcgagagagactctacgtgcctcggtgaagctcccagagcaaggaatcgagctctgcctcgccggagacgctggatcaaggtcaccggacttcacccgaccgtcggcgagcgtagaccgagctccacggttcaaagttaagaaaaatagaaaagactgtaatctcgccgacggggaatacatcctcgttccggagcaaggagttgctcaggaggtttgtaatgtgcacttaagtgtaggagttgtttggaaccttagttgcatgactcaggatacctttgagatggatactagtatgctaggtcgagtagctgctacgctaattagggatctcggtagaagtcgagtgatttttctagcactcgcgcaaggtcaggaaattggttgtatccattttgataacagaatgatgatggtatgtggacacggatccatggggatgcgtggtctacgagatgaaattggaataaggattaacgtgcggatacctgtgtcaagcgtttga

SEQ ID NO: 37314 - DNA, 333 bp, Zea mays
  Peptide Sequence Number=SeqID_79093
atggggaagcctgtcccatcactcctcatgctcctcctcaaccgaggtagggtcccactcgactgtccagcccggtgtacaatggatcaagcagtctcattagctgcgagaagcagacgattcaaatcgagtttttatccgtgcaagtacattcaaacgcttgacactggtatccgcacgttaatccttattccattttcatctcgtagaccacgcatccccatggatccgtgtccacagaccatcatcattctgttatcaaagtggatacaaccaattcctgacctcgcgcgagtgctagaaaaatcactcgacttctaccgagatccctaa

SEQ ID NO: 37315 - DNA, 201 bp, Zea mays
  Peptide Sequence Number=SeqID_79094
atggcagcagggttcaatgactgtgggttttatgttatgggttacattctcttttatcaatgcgacgaaggatctttgcggtcagacatagaagcaggcaacactagtgagatacggtctcttgcgctgcattatatcacattccacccgaagaacaaagcattatcgctgctcgaagacatccaaagattcaaggtctaa

SEQ ID NO: 37316 - DNA, 2022 bp, Zea mays
  Peptide Sequence Number=SeqID_79095
atggaaaagctcgaccccaatgacatgacaattcgagctggccctggaaaggagctgaaaataacaaaggatacggtgcacctaattttgggtttaccgaatgctgggggaggaactgcattgggcatcgatgaagctgttgttgccaacaatttgagagctgaacttgggctatcgaaagaagattttggggttacagctctacaagatcgtttgaggaaaggttctgacgatgatttaagcatcagatgctttttcttgatattgttcaataggttgttgttccctactgccagctggggtataacgaaccatgaggttcttttaaccgagcagatggatcgtttccaccagattgactggtgtcagcttattttcaatgatttatgccaagctgccaagaagtggcataacaggagcgttacgaacgtttctacaaccatctatggatgttccatcgttattcttcataagaccaggaccaacgcttttgatgttcctcgtcctgacccatctggacagcactcaattcacatcgaactcccgctcatcagggatttgatatcaagcaagcttaatcagcttccatcccgccaccgcatgggtttcatagagaagctgtcacattttgatgcggaggttggtaaggcgtgttcagttattaaacagaatcttcagcagattgttgagaaacaattcaatctatctgatgtttttggcgagttaattgatgaggtcctccgtgccgaggcgggtgacaacgaagatgcttatgatgtgcagaaaaccacatcaaaatcagatgatattcttccccagacagctgaaggatgtacgtgtccggcccccccaactgtacccgatatgtctactccagtttctcagctggatacgcagtttacagacacacagggtaaacatggtgacggtggcaagaacatgccgaccaatacaaacgtcactcctaaagcaacaccacacatggatcctgacgcgccgatatttgatgcgacaccgcaaatcaagtctactggcggcgtacaacaagtggcagaaacagacttgcctgacagtggtccatgctttgatcagactccatctgaacatgtttatgttgaaaccgatccagctacaaacactccacaggttggccaggcttctcttgattcggagatgcaaactgtgttagctctacgcgaatatttgtgtggtctgcaatctgacaccggcaggaccataatagattatggtgaatattcagcgacatgttctgacatatatgaatcttttgccgatgggaagtgtctcgacaatggattcatgcagtgtttcatccaatgtgttattcatgatgcaaaaaatcagcagacttccatgagttcaaacagtttggttcttgatgttaatgttgggtcaatactcaactttgaggaacaggaacgacacagtcgcaatcctcaaccttttgatgaatctgtactccacacacttctagacaattcattgcctgagacagatgagttggaccaatacaaagcgatcatggtccccatggtaagcagggggcattggacattgtatgttgtcaacaaggtcaagaagtgcattcatattttagattccaacccatatggaccaacacttggtggaactacatggaaggactatcattttgcacatttgggctcaggtggcagaaagttaccctgggctaaggttattatgagcagattaaacaaagcaatacaacatgtgcggcccagttcatgttttcccaagtttggtaacttcacaattgacttgtgccaaaattgtcctaacatggtagctggatcaaatgactgtggtttttatgtcatgggttacattctattttatcaatgcgacgaaggatctttgcggtcagacatagaagcaggcaacactagtgagatacggtctcttgcgctgcattacatcacattccacccgaagaacaaagcattatcgctgctccaagacatccaaagattcaaggtctaa

SEQ ID NO: 37317 - DNA, 2445 bp, Zea mays
  Peptide Sequence Number=SeqID_79096
atgaagaacgtagaccgaccaccttccaatccaaaacgcatcataatccagtctactcaggagtgcttcagcgttgacataccccgtgctccggcggggactgttagacccgagacaaggcgtgctgctgatgaggatgatgactttatgccatcatccaagaagcgtaacttggacgacagccctggtaaagttttgaagaaggtagtcactaagcggcggaaagcagtgccccaccccgacagcagatcacacttagcttggctgatggaaaagctcgaccccaatgacatgacaattcgagctggccctggaaaggagctgaaaataacaaaggatatggtgcacctaattttgggtttaccgaatgctgggggaggaactgcattgggcatcgatgaagctgttgttgccaacaatttgagagctgaacttgggctatcgaaagaagattttggggttacagctctacaagatcgtttgaggaaaggttctgacgatgatttaagcatcagatgctttttcttgatattgttcaataggttgttgttccctactgccagctggggaataacgaaccatgaggttcttttaaccgagcagatggatcgtttccaccagattgactggtgtcagcttattttcaatgatttatgccaagctgccaagaagtggcataacaggagcgttacgaacgtttctacaaccatctatggatgttccatcgttattcttctgtattatttggatcatttgcatgactcagcggcacccctgaacaaacgtggaacaccacgaatcaaatactttgataggaatattattcaagccctgacaagagctgacaagggcaagatacacaaaggagaagaagcatttggacattgctcgcataagaccaggaccaacgcttttgatgttcctcgtcctgacccatctggacagcactcaattcacatcgaactcccgctcatcagggatttgatatcaagcaagcttaatcagcttccatcccgccaccgcatgggtttcatagagaagctgtcacattttgatgcggaggttggtaaggcgtgttcagttattaaacagaatcttcagcagattgttgagaaacaattcaatctatctgatgtttttggcgagttaattgatgaggtcctccgtgccgaggcgggtgacaacgaagatgcttatgatgtgcagaaaaccacatcaaaatcagatgatattcttccccagacagctgaaggatgtacgtgtccggcccccccaactgtacccgatatgtctactccagtttctcagctggatacgcagtttatagacacacagggtaaacatggtgacggtggcaagaacatgccgaccaatacaaacgtcactcctaaagcaacaccacacatggatcctgacgcgccgatatttgatgcgacaccgcaaatcaagtctactggcggcgtacaacaagtggcagaaacagacttgcctgacagtggtccatgctttgatcagactccatctgaacatgtttatgttgaaaccgatccagctacaaacactccacaggttggccaggcttctcttgattcggagatgcaaactgtgttagctctacgcgaatatttgtgtggtctgcaatctgacaccggcaggaccataatagattatggtgaatattcagcgacatgttctgacatatatgaatcttttgccgatgggaagtgtctcgacaatggattcatgcagtgtttcatccaatgtgttattcatgatgcaaaaaatcagcagacttccatgagttcaaacagtttggttcttgatgttaatgttgggtcaatactcaactttgaggaacaggaacgacacagtcgcaatcctcaaccttttgatgaatctgtactccacacacttctagacaattcattgcctgagacagatgagttggaccaatacaaagcgatcatggtccccatggtaagcagggggcattggacattgtatgttgtcaacaaggtcaagaagtgcattcatattttagattccaacccatatggaccaacacttggtggaactacatggaaggactatcattttgcacatttgggctcaggtggcagaaagttaccctgggctaaggttattatgagcagattaaacaaagcaatacaacatgtgcggcccagttcatgttttcccaagtttggtaacttcacaattgacttgtgccaaaattgtcctaacatggtagctggatcaaatgactgtggtttttatgtcatgggttacattctattttatcaatgcgacgaaggatctttgcggtcagacatagaagcaggcaacaccagtgagatacggtctcttgcgctgcattacatcacattccactcgaagaacaaagcattatcgctgctccaagacatccaaagattcaaggtctaa

SEQ ID NO: 37318 - DNA, 309 bp, Zea mays
  Peptide Sequence Number=SeqID_79097
atggcgcctccacctccctgcgtgacctctgcccttcttctcccctggctgggctactacgcaaagcagcggcagcagtttccttggacgacgcctagaaattccagcagagctcaccccattttttttcctccctggccgaaggttccccctgctgctagctcggcaaccatggcgagcagcccccggcagcgagctcctcccttgctttgctgtcggacgtccctgccactacctcgctccctcgtcgcgcagcgagctccatctccgacctacgcagcaagctgcgcgctgcagcagcagccatga

SEQ ID NO: 37319 - DNA, 342 bp, Zea mays
  Peptide Sequence Number=SeqID_79098
atggcgagcagcccccggcagcgagctcctcccttgctttgctgtcggacgtccctgccactacctcgctccctcgtcgcgcagcgagctccatcgccgacctgcgcagcaagctgcacgctgcagcagcacgccgtgatgcccgccggtgggttgctgtttttgcgcagccccgtcgtcgtcgtcgttcaccccggagagacaccccgtgttttgcgtggagaagaaggcaagccgctcgacgctcatcgatgttcggagcgatgcacaaatcggaatcgccatcgtccttacaaacaccgattgggtttgtttatgatatgtgctatagaaaagtggtag

SEQ ID NO: 37320 - DNA, 342 bp, Zea mays
  Peptide Sequence Number=SeqID_79099
atggcgagcagcccccggcagcgagctcctcccttgctttgctgtcggacgtccctgccactacctcgctccctcgtcgcgcagcgagctccatcgccgacctgcgcagcaagctgcatgctgcagcagcacgccgtgatgcccgccggtgggttgctgtttttgcgcagccccgtcgtcgtcgtcgttcaccccggagagacaccccgtgttttgcgtggagaagaaggcaagccgctcgatgctcatcgatgttcggagcgatgcacaaatcggaatcaccatcgtccttacaaacaccgattgggtttgtttatgatatgtgctatagaaaagtggtag

SEQ ID NO: 37321 - DNA, 243 bp, Zea mays
  Peptide Sequence Number=SeqID_79100
atgggcttaccacttagtttaactaagtttgaccctaaattactaagtatacccccagaatcttcaaattgcaatctcgctgacggagagtacgtactcatccccgagcaaggagctgtccacgaggaagaccaggagcaagctcccgagactgccatcgaggatctccccgcagccccagctattgaaggcaagccccgatttatgcataactgtttatatatgatactttactacacttaa

SEQ ID NO: 37322 - DNA, 261 bp, Zea mays
  Peptide Sequence Number=SeqID_79101
atggacttaccacttagtttgaccaagcttgaccctaaattactaagtataccccaagaatcttccagtagcaagattaagccctaccttattaaagtgatcattcaccatccaaattgtaatctcgctgatggagagtacgtgctcatccccgagcaaggagctgtccacgaggaagaccaggagcaagctcccgaggctgccatcgaggatctccccgcagccccatctattgaaggcaagccctggttttatgcataa

SEQ ID NO: 37323 - DNA, 261 bp, Zea mays
  Peptide Sequence Number=SeqID_79102
atggacttaccacttagtttgactaagcttgaccctaaattactaagtataccccaagaatcttccagtagcaagattaagccctaccttattaaagtgatcattcaccatccaaattgcaatctcactgacggagagtacgtgctcatccccgagcaaggagctgtccacgaggaagaccaggagcaagctcccgagactgccatcgaggatctccccgcagccccagctattgaaggcaagccccggttttatgcataa

SEQ ID NO: 37324 - DNA, 213 bp, Zea mays
  Peptide Sequence Number=SeqID_79103
atggacttaccacttagtttaactaagcttgaccctaaattacaaattataccccaagaatcttcaaattgcaatctcgctgacggagagtacgtgctcatccccgagcaaggagctgtccacgaggaaggccaggagcaagctcccgagactgccatcgaggatctccccgcagccccaactattgaagacaagccccgattttatgcataa

SEQ ID NO: 37325 - DNA, 408 bp, Zea mays
  Peptide Sequence Number=SeqID_79104
atggacttaccacttagtttaactaagcttgaccctaaattgttaagtataccccaagaatcttcaagtagcaagattaagccctaccttattaaattgatcatttttccccatcaaatcttaattataattgcatatcatgccatgcatatatcttactcattgcattcattagattgcaatcttgctgacgaagagtacgtgctcatccttgagcaaggagctgtccacgaggaagaccaggagcaagctcccgagactgccatcgaggatctcccagcagccccagctattgaaggcaagccccgatgtggtgggtacaagtgtggccactgcacggcggcagccagggtcagtggagcattgtatgccaaggcggtacgctctaggatatggttgatggtgtga

SEQ ID NO: 37326 - DNA, 429 bp, Zea mays
  Peptide Sequence Number=SeqID_79105
atgtgggggaaggcgaattgctgctgcttggacagggtgcagttgtccgtcctccgccccaggcggcggtcgtgccgtgcgcgggtggctgctgtcaccggccttgcggagggggcgaacttcgacaatgtgggcctggtcggccgcgagcgttgtcagctgcagcttgtctggcacgctggatcggctggctctggcgccgcctccgatgttgcctcctgccgcttggtccgggcgtggctgtccgtccaccgcacgggcgactgtcgcgccgcgcgcaggctggggcggccgccgttcgtcggcatggcgctggcgcgcaggtggccgctgtcgtcggtgctgaggtggtggcagccagagaaggtttctccgccgacgagaccgtcggtgccacctgcggtcggacccccggctctttggctttga

SEQ ID NO: 37327 - DNA, 1845 bp, Zea mays
  Peptide Sequence Number=SeqID_79106
atgggcgcgtcgtcttcacgccgtgggagagggctcccctgccgcttcaggagggagctcgagcctgcaggcgatttggccgctgcttccgctcgtctgctgccgccattaccgcggggtttcctcgagtcgcggcactggttccgcagtcgagaaggcgcgacattggcgcaagtggcggcctccatgctggatgcgacgaagccgaaggggtgcgcccacgcggtgcggttgcacgccacctgcatggcggtctgccctttcgaccgctgcccggttgcattccctcaccaatggtcatccaggatgatgaccaccagttcggtggtggggagaagcaaaccgggctgcggcctttgccccgccctcagcttcaaggatcttcatcacccgtgctgggaaggagggcggggcgagttggggcctacctccgcgtgggccggcgacccgcttcttcctccggcgctcgggggagaggggcatcctccagctatgcggaggaggcgtcctccagccatgtgggggaaggcgaattgctgctgcttggacagggtgcagttgtccgtcctccgccccaggcggcggtcgtgccgtgcgcgggtggctgctgtcaccggccttgcggagggggcgaacttcgacaatgtgggcctggtcggccgcgagcgttgtcagctgcagcttgtctggcacgctggatcggctggctctggcgccgcctccgatgttgcctcctgccgcttggtccgggcgtggctgtccgtccaccgcacgggcgactgtcgcgccgcgcgcaggtcgggcatcatgatgcctccgcgcggaggtcggtgccggcccgtccgtgaggacttgagtgaggatctaccggtgcaggctggggcggccgccgttcgtcggcatggcgctggcgcgcaggtggccgctgtcgtcggtgctgaggtggtggcagccagagaaggtttctccgccgacgagaccgtcggtgccacctgcggtcggacccccggctctttggctttgatggcttgtcctcgccccttgtgtggggacatgggcgagggcctttccgcagcagcgtctgccatgaggtcatcgctgctgctgtttagccgcccaaagcagaggtcgtttcgctgctggtgcagtggtcgctggcgagccacctggagtttgttgtcccgcaggctctctggtgtggagaaccttcggctgcactgcgatgagctggagccggaggcagcggtgtcggcgtggacagaggcggagtcggctcgaaaagaggcttcgttggcctgggagcatgtggcttcccagaccgaggagggtgtctgctcgggccggaacccttgcggagaacctggtcgtgagggcccaagcgcggtgctggcatcctcctccgaggtggagatcgccgggagccgggctgaggtcctcgggggacagccggctgaggctacggagcggctagccggggtgtctgctcgggccggaacccttgcggagaacctagtcgtgagggcccaagggcggtgctggcgtcctcctccgaggtggagatccttctgctcgcgtcgccgtctggggccgggccagatcttgccgagggtggagacgacgccgagggggccgctcctccccctggcgatgtctgattctgccggagtagtttgtttggatgcatacttgttcgtcagtagcagaatcgcttatccgagcaagagttacttttcgcggaaggtgacgagtgagccgaagtaccaagtctaccacctggaagcctcggggccgaacccctcgggcgtggtagcatcgcagagactgctgataccgcgccgattgtag

SEQ ID NO: 37328 - DNA, 768 bp, Zea mays
  Peptide Sequence Number=SeqID_79107
atgcaggtggcgtgcaaccgcaccgcgggggcgcaccccttcggcttcgtcgcatccagcatggaggcccaggatcacatgtcatggaccgggaaaagggatatttcgaaagggatccttctccgcgaaggaagcgggccccgagccctcctactgattaggggttcgaaggctggcccctcggaagggggttcgaaggctggcccctcagaagggttcgacagccgccccagagcacgcagagtgagggatgactctgggtacgtccgttacatggccgaggctcgggctacactcccgaggccggccgaggcgtcacgaaaggcattaagacctcagaggagtcaaaccactcctccgaggcctcaggggctacacccggcggcctcaggcgcaacaggaagcaccgcctcgcccgaccttgggcctcagcctcaggaggaggtctccgccttgcccgaccccagggctcggcccccacctcggcctcggaaggtggtctccgcctcgcccgaccctagggctcggcctcaacctcggcctcggaaggtggtctccgccttgcccgaccccagggctcgacctcaacctcgacctcgggaggaatcgcgtcctcgcccgaccccggcctcggcctcaggaggattctccgcctcgctcgaccttgggctcggaccgatcgcaccacgggggatacatcattaccctacccctagctatctcaggctacgggggaacaagaccggcgtcccatccaggctcgccccg

SEQ ID NO: 37329 - DNA, 597 bp, Zea mays
  Peptide Sequence Number=SeqID_79108
atggatgcttctcaggcatctgatggggagctccacactagcgtgctcaaccactatgctatcaactacctgcgtgactatccaacatttgccgctacggctcgctactggacagaggcctttgctaagagtgcatcaacgggcatggaagagaagaagctggttgagatgggattcccagaggatcaggtgagaagtgccctgaatagcgtggatggcgacgagaacatggctctcgaaaagctctgctctggctctgggtatccggctccgtcggttcgtaattcacgctctcacagcgaagggctctctctcaggagccgtgggaaggctgctgcgctcttgggagagcagcccgtctaccacgccgtacaacgtaccattggttgcggggccgccatgcccccagtggcgctgcccggcaaggacgctaggtatttgggggagtattggcgaagcatcatggctcccaacgaagcagaggctgcgacctgcgcgctggacgttgctggggggccgcctgatgctggcggcggctgctgcctgggggcagaggcagagctcatgatcgtcgagacctttataccagattggtag

SEQ ID NO: 37330 - DNA, 622 bp, Zea mays
  Peptide Sequence Number=SeqID_79109
atggctaaaccttcagcccaaatgcctaatgtactagctttcagggacataaacgctcaagctccaacacacatcctcatcatccccaaagtcaaggatggactaactggtctgtcaaaggtctacgatggatccatcctgttggacaatcgctcgagcatcgtgtcagagaatcggacccctcttagaataagacgatttggagtgctacaattttgttttcttctcagctcctcctcttggtcccagcagctcctcgacgtcggcgtccgcatcatccaagagaaagaatcaaagatggatgcttctcaggcatctgatggggagctccacactagcgtgctcaaccactatgctatcaacgtttgcaccatagtaggacctcagtaccattttatggaggaggagctggcaggaacaagacctcaagcccaagcagaaatatcttcaaggcccgatgccgaagatgttctccgtaagttcaagcacccttgtaacttgtgcttgaaagggaaatgtgcccttgggccatttctaagtattttggtgattgagtgcaaacacaagtgcttaaatgtgagaatatgcccatggttgaacaaagtgcaaatcacaagtaaag

SEQ ID NO: 37331 - DNA, 921 bp, Zea mays
  Peptide Sequence Number=SeqID_79110
atgtcagcatctcgtgcggaaaacggctgcagtggtgtatgccctgtcaatagaatcagcggtgtattccctacaaaatctgacaatagcatcgacggtgtatgccctatcaccggcaaggatcatggtagcaacctcaaggaaagtcgtgatcatggtgaagaaaagggcaagggtccttgtgtggtaccagcaaaatgcccatttggttatgactccaacacttccaagctaggtctgcttagcttcactgtctgccagacactgctccatgaaagtagaaaatacagtccactatgtggtgccgatatagaattcaagctcttgttcaccgattcattgatggtcatgccagaatcaagcgatcacatgctacaggggatgtggaagcagcagcatattgcatctttgtttccccatgtttactttgccagctcgagttaccctgtggacctaacagatcctgagtatgatcacaagtctatatttgggaggacacattctgttgtggcattcttgccaaatttaaaagctggtaaaaagaagagcttgctaggagattcaaaagagcctgaagaccaagcaccacataaggttgttattttcatcctttgtcatcaagtactggctttcagggacataaacactcaagctccaacacacatcctcatcatccccaaagtcaaggatggactaactggtctgtcaaaggtctacgacggatccatcctgctggacaatcgctcaagcatcgtgtcagagatgttcgccacacccaacaacaactcgatgtgcgggtaccccgtagtcgatgccgtcaaggcggtgctggaggaggtttgcctaggcatcgtctcatacgttgacatactggagctgagaaagggacaaaacaaagaacgaacttcaaatcaaagctaa

SEQ ID NO: 37332 - DNA, 780 bp, Zea mays
  Peptide Sequence Number=SeqID_79111
gagaaaaatgctgaacttggactgccagaaacaagccttgctattatacctggaactttcccactgcatgctttgactatggtaattgtacatgcattttttgatgtacttaaattaaaaggcttagcaaactactgtgttccagcaggagaggcttaccagaaggctcttgacattgcctttgagataactcagaaggaggcgtactctcatcttcccaaaatctctagcaaggaaacacatccaaagatagcacaagttctgctggaacgacaaaaatatgatatggcacttcgtgtgctaaagtgcacagggcatggaagcttctctgctacagaaaactttaaaaaagatggcatttcattgcttagtgaggcagtgattgtggttcgtgtcagaattgaatgtcgcctcctaacagaaacgtttatgtatcatagaagctactgctctaaggtgaaagagcaacactcagaaaatatgacacatgctgaggatacattaaaaaactcttgggtttatcatgttgagatgatggggaccgaattttgtgctatctgcattaaaaggaatttagttgataaaatgatggatctgccctgggattcggaggaggagaaacatcttcacaagtccctctttgactctgctcatgaaatgcccatgaaaccaaatggtagtctgcttgttatctactaccttcgggatgaagtgttgactattacgatgcctaggaaacttaacaactaccctcgcaaagacactctttacttgtgttaa

SEQ ID NO: 37333 - DNA, 414 bp, Zea mays
  Peptide Sequence Number=SeqID_79112
atgggcttagcaaactactgtgttccagcaggagaggcttaccagaaggctcttgacattgcctttgagataactcagaaggaggcgtactctcatcttcccaaaatctctagcaaggaaacacatccaaagatagcacaagttctgctggaacgacaaaaatatgatatggcacttcgtgtgctaaagtgcacagggcatggaagcttctctgctacagaaaactttaaaaaagatggcatttcatttcttagtgaggcagtgactgtggttcgtgtcagaattgaatgtcgcctcctaacagaaacgtttatgtatcatagaagctactgctctaaggtgaaagagcaacactcagaaaatatgacacatgctgaggatacattaaaaaaactcttgggtttatcatgttga

SEQ ID NO: 37334 - DNA, 528 bp, Zea mays
  Peptide Sequence Number=SeqID_79113
atgccctttgttccgttgtttgagttgcaaatcgagttctttctcagattctcttacgttcccttgcatctaaaacttctgaacttggattggaagcatgttgatgacacgttagacccgatgtgccttaaagttgaaagtagaaaaggagaaaatgttgaacttggactgccagaaacaagccttgctattatacctggaactttcccactgcatgctttgactatggtaattgtacatgcattttttgatgtacttaaattaaaaggcttagcaaactactgtgttccggcaggagaggcttaccagaaggctcttgacattgcctttgagataactcagaaggaggcgtactctcatcttcccaaaatctctagcaaggaaacacatccaaagatagcacaagttctgctggaacgacaaaaatatgatatggcacttcttgtgctaaagtgcacagggcatggaagcttctctgctacagaaaactttaaaaagatggcatttcatttcttagtgaggcagtga

SEQ ID NO: 37335 - DNA, 240 bp, Zea mays
  Peptide Sequence Number=SeqID_79114
atgcccccggagccgtcatctcagaacccaagcatgcaaatagcagttatccgccatgtggtctctggaatattattacacaataccatatatgacgttgttcccctttctagcaagttaacagttttggacactcagcttcctgttaaacaagcatttaaaatagtgcatgatgagatgccatactgcatattgattgatggccttgtcaaaggtggaaagatacaggctcgtgaatag

SEQ ID NO: 37336 - DNA, 621 bp, Zea mays
  Peptide Sequence Number=SeqID_79115
atgcccccggagccatcatctcagaacccaagcatgcaaatagcagttatccgccatgtggtctctggaatattattacacaataccatatatgacgttgttcccctttctagcaagttaacagttttggacactcagcttcctgttaaacaagcatttaaaataatgcatgatgagggtcttgctctggttcctctttgggatgaccgtcagggaaccataacaggcatgctcactgcatcagattttgttttaatcttgagaaagttgcagagaaacattcaagttattggcaacgaagagcccatttctgcttggaaagaagcaaagctacagttctatggtgggcctgatggtgctgccatgcagagaaggccattaatccatgttaaggattcagataatttagtggatgtggcactgactataatcagaaatgaaatatcttcagttcctatctttaagtgcatggcagattcatcagggttctttgctcgaagctacaagaagaggctgagggctgttcccttctgcacaatcagcttctcagtattcctattggtacatggtctccacatacggggaggtcaagtagcaggcaactcagaactttgctactga

SEQ ID NO: 37337 - DNA, 519 bp, Zea mays
  Peptide Sequence Number=SeqID_79116
atgcccctggagccatcatctcagaacccaagcatgcaaatagcagttatccgccatgtggtctctggaatattattacacaataccatatatgacgttgttcccctttctagcaagttaacagttttggacactcagcttcctgttaaacaagcatttaaaataatgcatgatgtgggtcttgctctggttcctttttgggatgaccgtcagggaaccataacaggcatgctcactgcatcagattttgttttaatcttgagaaagttgcagagaaacattcaagttattggcaacgaagagcccatttctgcttggaaagaagcaaagctacagttctatggtgggcctgatgcacctcttaacactgcaaagctaatgttcttccgcgtcacagggtacttgcagatcgatgtcggctctatggacgaacactcgaccaagtcagatgaggagtatgagggcctagccatgcgcgacgtgatggctactggtccgacgatgagcagcaagctgtga

SEQ ID NO: 37338 - DNA, 180 bp, Zea mays
  Peptide Sequence Number=SeqID_79117
atgaccctcgtgatgctgaaattgatgaagacctccgatgaagaaagagacatgctgcacatgcacgagatagatgtcggctctatggatgaacactcgaccaagtcagatgaggagtatgagggcctagccatgcacgacgtgatggcgactggtccgatgatgagcagcaagatgtga

SEQ ID NO: 37339 - DNA, 258 bp, Zea mays
  Peptide Sequence Number=SeqID_79118
atggcgctccacaagctctgtgacgacggcggcccccagctctcttacggaagcagggcgacgtcagcaaggactcgaccgctccaacagctgtccctccgccaggctccgtcgcacctccgacagccacgacatcacgccagcaagatagatgtcggctctatggacgaacactcgaccaagtcagttgaggagtatgagggcctagccatgcgcgacgtgatgactactggtccgacgatgtgcagcaagttgtga

SEQ ID NO: 37340 - DNA, 585 bp, Zea mays
  Peptide Sequence Number=SeqID_79119
atgccggagacggcggcgccgatcggcctctcatgggcgcccaagcttccttccttcgcaacgaccagcggcggcagcaagagcgaccacgcgccgaacccgagcgctgcgcagggatcgctctggaaccgcgcgagcgacctcgtggacgggctgttcgttgccccgagggaccctaggcagctgaataagctggccaggaagaacgtcaaggacactgccggcaagggctggttcgacatgccagctccgaccatcactcccgagttgaagaaggatctcgagattttgcagctgaggcatgtaattgacccaaaaaggcacttcaagcgggcaggaaaatccaaggcccttcccaagtacttccaagtcggtacggtcgttgagcctgcatctgagttctactcaagtaggctgaaaaatagggaacgcaaggcaacattggttgacgagctgttatcagatcaatctctgaagagctacagcttgtgttcggttggagaacatggatcactgctccttacaagtggggcccacctgtcatccacgcctacggctcaggccgtcggggtccaaggtgggtga

SEQ ID NO: 37341 - DNA, 579 bp, Zea mays
  Peptide Sequence Number=SeqID_79120
atggcgactgacatggatggatttgatcaaacagtgattgtgaaggttgtaatggcaactaatagggtagatactctagatcctacttcgttgcggccaggtagacttgacaggaaagttgagttccctcttcctgattggcggcagaagaggcttgtgttccaagtatgtactgctaagaagaatttgagtgaggaggctaatttggaagattatttttgcagaccggataagatctgtgatgctgatgttgagttgttgaggcatataattgacctaaaaaggcacttcaagcgggcaggaaaatccaaggtcgttcccaagtacttccaagtcggtacggtcgttgagcctgcatctgagttctactcaagtaggcttaaaaatagggaacgcaaggcaacattggttgacgagctgttatcagatcaatctctaaagagctataggcgagaaagaccaactactggtggcactaccggtagctgctttgtgtcggcttggaaatcagagcatggtcagatctcgaccaggatggcgctaatccgagcagggcggccgcaatgcgaggagatctag

SEQ ID NO: 37342 - DNA, 423 bp, Zea mays
  Peptide Sequence Number=SeqID_79121
atgttgaggcatataattaacctaaaaaggcacttcaagcgggcaggaaaatccaaggcccttcccaagtacttccaagtcggtacggtcgttgagcctgcatctgagttctactcaagtaggctgaaaaatagggaacgcaaggcaacattggttgacgagctgttatcagatcaatctctgaagagatatagagaaaactctagctcaacggttccctcgggcgagcgagtggcggcggcggtttcctcgggcgtgcgagcagtgacgatctcgggggccagcggcggtggcgccttgaggagggtgattgacgggggtgctccaccaggatcgagctacggcgacgctcccgaaggatcgagcgacgacgacctcccccaggaccaagtgacggctggcgacactccccctaggatctag

SEQ ID NO: 37343 - DNA, 168 bp, Zea mays
  Peptide Sequence Number=SeqID_79122
atgtcgcgcacgttcgacgactactatatcatgaactgtgacgtcatctcggcgccggaggtaacacagaggaggaccgacaacaatgatcagtttgtcatcctcgccaccgtcacggcagcttttgtgctggaggaagcagtttatcaacagcgtcaagctcaatag

SEQ ID NO: 37344 - DNA, 1020 bp, Zea mays
  Peptide Sequence Number=SeqID_79123
atggcacccaagtctgaggtcaagtgccataccaccgtgttttcaggatggttcaccaagccaccatcacgctgtgttgtgttcaaatacggaagtggtttgattatcgtagccatatttgtattaaaactggcatctgtgaaggagaagtcccttgggctcctcaccaagaattttgtcaagctcttcttcaccatggagctaattgcacttgatatgggtgcattaattgctggtgccaaatatcgtggagagtttgaggatagacccaaggctattctcaaagaagttatagattttgatgggattgtaataacgtcatgctctcatgcagctgaaaatgatccacatgatgggaagagaaagtgtgaagctctctggcctattttctgtatttctcatcaaaggagccacttcatatatggtctttactacagaaggaaggagatatcgcaggagctttatgagttcttggacccgggttatgcagacttctttggatattgcagggaccggaggagctggagacactcggagtggcactatgttgaggaagaggagatggtgaccggtggtggcaagaatgcagtggaggaagctcctcctcggaatgatgtagagaggatccatatcgggtcagagaatagcagtgaggatgatgaatacaggggaagactggtgtgcacattgcagagaaacaacagggtgatgtgggttctaagaagccagagcggctgcaccgcgttgtccatcgtcaagcagggggacctcatggtcgtagccaacatcggcgactctcgggttgttctgggcaccgcatccaacgacagcgtcatcacgctgtccagctcatcccaagagtcatcggtactcgccatgtcgcgcacgttcgacgactactatatcatggactgtgacgtcatctcggcgccggaggtaacgcagaggaagaccgacagcaatgatcagtttgtcatcctcgccaccgtcacggtagcttttgtgctggtctgtctttaa

SEQ ID NO: 37345 - DNA, 1065 bp, Zea mays
  Peptide Sequence Number=SeqID_79124
atggcgtctccgccccactcagtcgaggtccggacccccggcgactcgccgcggcccaccaccgctctcctctccccctctgtggccgcacctcagccctccaccgcctcccgcctcttgctcctcctcaccgcggtcgtcgccgtcgctacggccttcgtcctgctccgcccgcccatcaccgtcgtgaccgcggcgtccgccaccgcgcatccgctctccaagcccgtggtgctgctcaccccctgtcatcctcgtcgattcaaggtgttctgctcaccccctgtccttctcgctctttactctttgattgagattagggttctagggatttacactgctctccaaggaaggacagggacttgctctaccccgtgttccactcccccaccgagctgctttcctaccgaggtcgcgaactcctcctgtgcgagatccacgctgctctccatggaaggccggggacctgctgtaccccgatgtggaaatctcatcctcggcgattcaagtgacccacaaatctcctgcttgttggtgaaaaaggttaagaggatgagggagctgaaaactgtgaagacagatttatcttttgcaaaggaacgctatgctcagctcgaagaagagaataaaatgtcgtgtgagagttatgacaagggtgataatccagaagctaatgatcagcacaagattgtaataacgccatgctctcatgcagctgaaaatgatccacatgatgggaagagaaagtgtgaagctctctggcctattatctgtatttctcatcaaaggagccacttcatatatggtctttactacagaaggaaggagatatcgcaggagctttatgagttcttggactcaggttatgcagactgtaagctgatcacaaagtgggaaaagagtcattttcttaatgctgctttagttgcttcagtctttggatattgtagggaccggaggagctggagacacttggagtggcactatgttgaggaagaggagatggtgaccgagaagtctggtggggaggatactgaggagcggagtgctgcgcattcagagtag

SEQ ID NO: 37346 - DNA, 111 bp, Zea mays
  Peptide Sequence Number=SeqID_79125
atggcccacgtggatctccaggaagggaacgagaggcttttctacaagcttctcattgacaagattgaggagtcgttagaaaagatccttgagatgctaaaaactggctag

SEQ ID NO: 37347 - DNA, 1326 bp, Zea mays
  Peptide Sequence Number=SeqID_79126
atggtggagtggcactgtttacttcttggttcttggaacaaagaaggcgttcagaaatcagagcatatgttccagtgttctcagtgctggaaggcaagtcttggacgacgcaactgctgtctgtggcgtgcttgtccctggctgccaagatggaggagacctacgttcctccgtctctggacctgcagctggtgctacccatcttcaacggcgcgggcctacatctacgaggcgcacgtccggcgctacttcaagatcagcagctacgtgagccccagctacagcgagcaccaccgccgggtgctacagatgacgagcctcgacgcgtgcagtttcagttgtgttaatttggagctgccgcaggagcatgtcgtcacggcgctttcagtggagagctactacaggccagacgcgccgcgcaggccactgccccgccaagaggaggattttgaggtcgacttcgaggagttcggggtgaaggccggcgactcggagctcgactctgcagatgaggcaatgaccttcgccgccccaggagtgcactcgccagaggttacaactggctcttcccaatctccagagctatccttgtctgtcaccccattcttggctgcaatagcagttcctcttgaagacaaaacttcaacggtggattttgtttgggcaatccccctctccctcctattcttaggtgatttgcagccacctcgtagaaggtgtctgtatacgatggcatcagtgatgctcatcttttcagcaaaagctgctgatattcaccagataatccctcttgtgaaagctgcaggaccagataaaatgtcatctaacagtgagatggtttatggttttgaggaagatgaaaatgatgcactggcctttctttcagccataagcgagtacgacacggagctaatagaaaccgtgatgtgccacttcagggagaagtttgaaaatttaccagagaaatttaatggggtagaacaacttcttcaagagttttccctggatgatttgtttcctcttgttgctccactgttcatggagacgccacactcttgttcgatgtatgcagaaaaggccgaacaatgttttgacgagtattgccgttgtaacctgttgtttttgtctgctcatctcctgtccacaggatactacaagtttcctttgcagcgctacatggccctcgtggatctccaggaagggaacgagaggcttttctacaagctgctcattgacaacattgaggagccgttggtgaggcctgccaaaagcagcataaagcttgagaccatttgtttagtctatgctgatcagttcgactgctaa

SEQ ID NO: 37348 - DNA, 594 bp, Zea mays
  Peptide Sequence Number=SeqID_79127
atgaagaccatgatcacgggcctattcctcagcacgctctcgctcggcttcttcttcagcaccgacatcgtcagcgccgtgcacgctgtcaccacctcgggtggccggacgcccgggctcaccgacgacctcgaccagggcagcctccacaagttctactggttgttggctgccatcagcgctgtcgacctgctggccttcgtggcagtcgccagaggatacgtctacaaggagaaagcgcctggctcaccgacgaccctcgaccgcgggatccatggcgccgccctcgcccaaccccccctgcccctggtgctacccatcttcaacgacgcggcctacatctacgaggcgcatgtccggcgctacttcaagatcagcagctacgtgagccccagctacagcgagcaccactgtcgggtgctgcagatgacgagcctcgacgcgtgcaaatccgtcgagcgcttcatcaacacgcacgggcccgacgcgctcgacaggatcatccgagctgtgagttctttcttcttcgtcgtcctagctatgcgccttgtttttttggtttccctgacggagaagcatctaaaactggtgtag

SEQ ID NO: 37349 - DNA, 228 bp, Zea mays
  Peptide Sequence Number=SeqID_79128
atggagacggtgacgctcgggctcggagatggggacggggacggcggagttgggctcggggacggcgcggcgtggcgggcgccaagctcggagacggtggcgcttggtctcgggctcggcgacggcgtggcgggcgctcacggctcggagacggggacgggaacggcgacgcagtatcagcctggcggcgtagtgaaccctaacttccggagcccgacacgccgctag

SEQ ID NO: 37350 - DNA, 228 bp, Zea mays
  Peptide Sequence Number=SeqID_79129
atggagacggcgacgctcgggctcggagatggggacagggacggcggagttgggctcggggacggcgcggcgtggcgggcgcccagctcggagacggtggcgcttgggctcgggctcggcgacggcgtggcgggcgctcacggctcggagacggggacgggaacggcggcgcaggctcggtggttccagcgcaggaaccctaacttccggagcccgacacgccgctag

SEQ ID NO: 37351 - DNA, 207 bp, Zea mays
  Peptide Sequence Number=SeqID_79130
atggagacggcgacgctcgggctcggagatggggacggggacggcggagttgggctcggggacggcgcggcgtggcgggcgcccagctcggagacggtggcgcttgggctcgggctcggcgacggcgtggcgggcgctcacggctcggagacggggacgggaacggcggcgcagaaccctaacttccggagcccgacacgccgctag

SEQ ID NO: 37352 - DNA, 372 bp, Zea mays
  Peptide Sequence Number=SeqID_79131
atgggcacggcggcgcactcggcgctcgggctcggcggcgctcgggctcggggacggggacggcggcgcttggcctcggggacggggacagaggcgctcgggctcggagatggagacggcgacgctcggagatggagacggcgacgctcgggctcggagatggagacggcgacgctcgggctcggagatggggacggggacggcggagttgggctcggggacggcgcggcctggcgggcgcccagctcggagacggtggcgcttgggctcgggctcggcgacggcgtggcgggcgctcacggctcggagacggggacgggaacggcggcgcagcagcctggcggcgtagtatcagctccgggcgaaacctaa

SEQ ID NO: 37353 - DNA, 216 bp, Zea mays
  Peptide Sequence Number=SeqID_79132
atggagacggcgacgctcgggctcggagatggggacggggacggcggagttgggctcggggacggcgcggcgtggcgggcgcccagctcggagacggtggcgcttgggctcgggctcggcgacggcgtggcgggtgctcacggctcggagacggggatgggaacggcggcgcagtatcagcctggcggcgtagtatcagctccgggcgaaacctaa

SEQ ID NO: 37354 - DNA, 342 bp, Zea mays
  Peptide Sequence Number=SeqID_79133
atgggagacccagtctcaggtcgcatgagggataagttcgcgcccgacttcactcagggctgcggggagatcctcgatagcagcctcaggagcttgctcctggtcttcctcttggatagttcctttcttggggatgagcacgcgggcggccaaaagtccggtgagggcgatcttggccttccggtgaagttctgccgggtccgagggctgggaaagcttcacaagctactggcgaagctaaccgagcggctggcgcggcttggaagtgactggagtgggatggccacggtggccgaggctctggcggcaatggcgggcagaaaaagagctcaccggagctaa

SEQ ID NO: 37355 - DNA, 158 bp, Zea mays
  Peptide Sequence Number=SeqID_79134
attataatctcgctgacggagagtacgtgctcatccccgagcaaggaactgtgctcatccccgagcaaggaactgtccacgaggaggaccaggagcaagctcccgaggctgctatcgaggatctccctgcagccccagctattggaggcaagccctag

SEQ ID NO: 37356 - DNA, 426 bp, Zea mays
  Peptide Sequence Number=SeqID_79135
atgagcagcagcagcatcgacaccgtccgctgcatcgcgcttgctaggtcgggccactcgccgtcgatctgcgcagtccctgtcgcgatgccgtcaatctgtggttatgttgtgagaaatgcatcgatagaaatttatgtgatgagtaagtttggaaatacaagttatgtgaggattgaattggtacacgtcttatatgagcatgatcgcagcccaataattattggagattgtaatctcgccgacggagagtacgtgctcatcctcgagcaaggaactgtccaagaggaggaccaggagcaagctcccgaggctgctatcgaggatctccccgcatccccagctattgaaggcaagccccagtttatatgcataaccgtattattatatgctactttactacacttaatgcttgtaggattgtaa

SEQ ID NO: 37357 - DNA, 327 bp, Zea mays
  Peptide Sequence Number=SeqID_79136
atggcttggtggcgttgggagctcggtgatcacagtgaagatcttgttggtgacccgactcaagtttgtaagcggtctcgagggatccaccgcgccggagtggcaaaggatcatctggtatcactcccccttggttctcgagggatccaccgcgccggagtggcaaaggatcatctcgtagtgagcacttggttcttgcgaggaccaagggggagtgatacccttgcgcgggtgctccaacgaggactagtggagagtgccgactcttcgatacctcgggaaaaattggaggagtcttctaaaccttgctttacattccatacttaa

SEQ ID NO: 37358 - DNA, 501 bp, Zea mays
  Peptide Sequence Number=SeqID_79137
atgggcgtgcctgacttctgcgcgcgctggcgcgcaataaatgcgctgcagagacaaatgctgaaaaacaagagatggggtttctggccctgggggcaccggactgtccggtgcaccctgccaggcgggacccaggctggtccggggaagaagcttcccttctcagaaaacccgagagcgcctgtttcagaattgaattttagtggcgcaccggacatcccaccggactgtccgacggcttggtggcgttgggagctcagtgatcaccgtgaagatcttgttggtgacccgactcaagtttgtaagcggtctcgagggatccaccgcgccggagtggcaaaggatcatctcgtagtgagcacttggttcttgcgaggaccaagggggagcgatacccttgcgcgggtgctccaacgaggactagtggagagtgccgactcttcgatacctcgggaaaaattggaggagtcttctaaaccttgctttacattccgcacttaa

SEQ ID NO: 37359 - DNA, 372 bp, Zea mays
  Peptide Sequence Number=SeqID_79138
atggcgccggggctgaagctctcgagcaagcaggagggactgtggaaagctggccaaggtcgcagcgacggggaagcggcagccgcaaggaaggagggcgaggtgtacatcgggtgctctgtcgcagatctagctcgtccccgaccaactgaaagggaaatgtgcccttggaccatttctaatcccttccttactccgtatttctttgtgaatcttaagtgtaagggcgagaggctccaagttgtggagattcctcgcaaacgggatattgaaaggcaaagcaaaacaccgtggtattcaagttggtctttggaccacttgagaggggttgattgcaaccctcgtccattgggacgccacaacgtggagtag

SEQ ID NO: 37360 - DNA, 810 bp, Zea mays
  Peptide Sequence Number=SeqID_79139
atggccaaactgcagcagccactgaagcaggaaccagagaagttcagtgaagcagggactgcatcagccttgcttgatgatgcatggaatgataagcattacaatgatcagcacagctcaaactgtttcacatggaacttccattgtataattaatctgtttccacatgttttccgcatttcgaccttgagaattaattgtgttcatgtgcccaataagccaacaactgtattccaattgcaagctattcagaatttgcaaggggtgaaagagagaattagttatctagtgttcccgatcagtgcgcagcaatccaatttctcaagggttgtaccagtagaaggttactgttccatgtacgacatttgtgcacaacgaagcgacgggaaggtcttaaactgtgcaaatgcaaccaaagctgttaagttgaaagggaaatgtgcccttgggccatttctaagtattttggtgattgagtgccaacacaagtgcttaaatgtgaatctatacccatggatggacaaagtgcaaatcaagagtataggagaaatcgagtcagagaaaagttggctgtgtacagccaaaaaggctgttcggtctggagcaccggacagtgtccgttcctcccttactccgtatttctttgtgaatctcaagtgtaagggcgagaggctccaagttgtggagattcctcgcaaacgggatattgaaaggcaaagcaaaacaccgtggtattcaagttggtctttggaccacttgagaggggttgattgcaaccctcgtccgttgagacgccacaacgtggagtag

SEQ ID NO: 37361 - DNA, 2307 bp, Zea mays
  Peptide Sequence Number=SeqID_79140
atggcacgatacctgatgaccggaggttttcctatcctcctcaatattttgaaagaagaccgtgaggatgtagagcttgtgagaggtgccctggagacctttgtgagtgcattgactcctattgagacgtcacaagggccaaatactgaggttcaaccagcgttacaagaagcaattctattgattcctcgtggtataacagttctcatggacatgcttatggaccgtgaggtcataaggaatgaagcactgttacttcttacttatttgactcgggatgcagaggaaattcaaaaaattgttgtatttgagggtgtgtttgagaagatatttagcattattagagaggagggctattccgatggaggtgtagttgttcagatgcttttgaaagagacaatgggctttgacccattgatatcaatactaaagattaggagaggcagtgcatttaattttacccaacagaagacagtaaatcttcttggtgctttaaatactgtggaattgcttttgatggggggcccatctggtgaagcaggtaaagacgctaacaagaatgcaaatcaaactgcattggctcaggcactgcgatgtattggcaatttggtattaagaaatcctcagaatcttgattctcttgcaagaaaacaagttggagaagagcctcatgttcaacctgcactgaatgccatcttctctataatcttgcggacctctgtagcgcaggaatttgttgctgctgattatgtattcaagtgtttctgcgagagaaatcctaatggccaggcattattagcatcaactattgttccacatccgaaccaaggaaatatgcatgaacctgctatcgacatgccttttggaagtgtacttctgcaagcactggtttcaagtgatgtcaatggagatatggaggcatgttgcagagcatctagcgttctttctcacattgtcaaggacaacatgcaaagcaaggatcgtgtattgcaaattcagcttgagacacttacaccgtccttggggcgcactgagccagtattgcatcgtattgtcacatgtttgtccatcgcagcctcaacagagggagaaaacaaccaaaacaaccaaccagaagaaccgtacattcaacctgttattcttcggctactcatcatatggcttgttgattgttcaaatgctgttaactgcctgttggaatcagcagtgcatctgaactacataatagagcttgcttcaagcaaacgttacactgcttgtgttcgtggactggctgctgttgttctaggtgcttgcatcctgtacaatgctagccatgagaagggccgtgatgcttttgctgttgcagatgctataagtcaaaagattggcctcacaacgtacttcttgaggtttgacgaattgaggagaagcttggcacatcctttgccagagcagcatcatcgcaaggagctttcccgatcaagtgcgaatagcatgtcagatttccaagaaattgaagaggatgaaacaaataaagatgatcaacaccctgtcctctcagaaatatttgattcacagtttgttaattttcttagtaagctcgaggctgatattagagaaaacataatggatatatttagtcggacaaaaactgcaactgcactccttcctactgaattggagcagaagaacggggaggttgatggagagtatatcaaacgactaaagtcgtttgtagagaaacagtgcaatgagatgcaggacttgctggctcgaaacgcaatgttagcagaagagttagtgagaactggtggtggtaccaccacagatacttcacagagaccgaacaacgggcgagaaagggtccagatcgaagccctgagacaagaactggagggagcgagacgacagatagaggcactcgaaactgacaagtcccagatcgaagccgaagctaacaaccaacgaaaccttgcagtaaaactggagtccgatctcaagagcttgtcagaagcttacaacagcatagagcaggccaactaccgcctggatgccgaggtaaaaaccttgcggcagggaggcagtgtgccgtatcctgacgtggaggcaataaaggcgcaagccaaggaagaggctgagaaggacagtgaggcggagctgaacgatctgcttgtctgcctcggtcaggaacaaactaaggttgagaagctgagcacaaggctggcagagctcggcgaagatgtggatgcccttctgcaaggtattggtgacgacactgccattccggacgatgatgacgacgacgatgaagatagtgaagagtga

SEQ ID NO: 37362 - DNA, 234 bp, Zea mays
  Peptide Sequence Number=SeqID_79141
atgtctgttgacaaacagtgcgcccgtgccgagcggcgcactaagctcatcataccttctacgagaagcctcccctgcacgccgaagacgcgcagatctcgggtgtcagggtacaagaagatcgctacaacagcaaacacatacgcgactgagtacttcaaccgtgaggacgtgcaaaaggcgctgcacgcgaatgtcactggcgtgccttatccctactcgctttgtcggtaa

SEQ ID NO: 37363 - DNA, 189 bp, Zea mays
  Peptide Sequence Number=SeqID_79142
atgaggaggggcttaggcgtttcgcttgttagttggaaatgcgggaagaacacaagaacacaacaggatttagagtggttcgggtcgccggagcgggaggcttctcgtagaagggatgatgagcacagtgcgccgctcggcacgggcacactgtttgtcaacagactggacaggcgcgccgtctgctag

SEQ ID NO: 37364 - DNA, 429 bp, Zea mays
  Peptide Sequence Number=SeqID_79143
atgatggaagcatcagaaatacgaggtatagtacctcgcaccttggtgaagcgggagatgaacttccgaagagtctcccaggctcctacctcaccgcatggaggtgggcctccacaccgtgttgctggagaggcttctcgtagaagggatgatgagctcagtgcgccgctcggcacggggcgcactgtttgtcaacagactggacaggcgcgccgtctgctaggtgaccctgacgccgcctgccagcggattgaacaagacacattaaatactaagagggcacgtcatccgtcagcatggtggcaggcggcgcgtcctctccgcaataaatgcagaggctgcgcggcgttatgggcctcacgtcaggcccagcccgttggcttatgtcacgggccacaagccacgcggcagcagcaggtctctgcctga

SEQ ID NO: 37365 - DNA, 346 bp, Zea mays
  Peptide Sequence Number=SeqID_79144
atggcgggcggaaatgagctcgccggagctaaggaacggtggctggccggtgagggtgagtgcggggcgaagagagccgaagctgcttcttcgcgcaagaccttcggcgcaacgaagcatggccccaacaggatcaaggtgaacatccctgatctttggctcaaggtgcttaatgcaaagataacagggttcaacacaaagacaaccgatgaagccaaggatggaggcaagaagagcttcgaggtaccgagtgcacgggagaaggtcaaggagaccaggaacccaaagtcaggggtgaagaagaagacttgcaaagtcaaggttgatctagttaagaagagttatg

SEQ ID NO: 37366 - DNA, 297 bp, Zea mays
  Peptide Sequence Number=SeqID_79145
atgggtgacaacaggtgctctcatgacaattcaggaaaagacaaagatgacaacccaattaaaggaataacaagtgtgctaagtgttgaacaggtgcttaatgcaaagctaacagggttcaacacaaagacaaccgatcaagccaaggatggaggcaagaagagcttcgaggtactgagtgcacgagagaaggtcaaggagatcaagaacccaaagccagggatgaagaagaagacttgcaaagtcaaggttgatcgagttaagaagagttatggtgcatcaaggaacactacataa

SEQ ID NO: 37367 - DNA, 436 bp, Zea mays
  Peptide Sequence Number=SeqID_79146
atgggatggaaccggggtataaacccaacctcggatacttccgcccctggtaaacctgaaagctctcttgtgggttttggtggtttggatgacaacccaattaaaggactaacaagtgtgctaagtgttgaacaggtgcttaatgcaaagctaacagggttcaacacaaagacaaccgatcaagccaaggatggaggcaagaagagcttcgaggtaccgagtgcacgggagaaggtcaaggagaccaggaacccaaagccaggggtgaagaagaagacttgcaaagtcaaggttgatcgagttaagaagagttatgagtccaacatcgacctcaaacaagccaaattgggtaaaacgatgaaaaaggttaaagaaagtaccattctgagctctgctggaggacaaacagaaaagctaggagaagaacaagaaagat

SEQ ID NO: 37368 - DNA, 431 bp, Zea mays
  Peptide Sequence Number=SeqID_79147
atggatatcattcatcgcttcagggtccccaactccatcatcatggacaacgctgaaagctctcttgtgggttttggtggtttggatgacaacccaattaaaggactaacaagtgtgctaagtgttgaacaggtgcttaatgcaaagctaacagggttcaacacaaagacaaccgatcaagccaaggatggaggcaagaagagcttcgaggtaccgagtgcacgggagaaggtcaaggagaccaggaacccaaagccaggggtgaagaagaagacttgcaaagtcaaggctgatcgagttaagaagagttatgagtccaacatcgacctcaaacaagccaaattgggtaaaacgatgaaaaaggttaaagaaagtaccattctgagctctgctggaggagaaacagaaaagctaggagaagaacaagaaag

SEQ ID NO: 37369 - DNA, 339 bp, Zea mays
  Peptide Sequence Number=SeqID_79148
atgggatggaaccggggtataaacccaacctcggatacttccgcccctggtaaacctgaaagctctcttgtgggttttggtggtttggatgacaacccaattaaaggactaacaagtgtgctaagtgttgaacaggtgcttaatgcaaagctaacagggttcaacacaaagacaaccgatcaagccaaggatggaggcaagaagagcttcgaggtaccgagtgcacgggagaaggtcaaggagaccaggaacccaaagccaggggtgaagaagaagacttgcaaagtcaaggttgatcgagttaagaagagttatggtgcatcaaggatcactacataa

SEQ ID NO: 37370 - DNA, 267 bp, Zea mays
  Peptide Sequence Number=SeqID_79149
atgaggatcaataacgatgacaacccaattaaaggactaacaagtgtgctaagtgttgaacaggtgcttaatgcaaagctaacagggttcaacacaaagacaaccgatcaagccaaggatggaggcaagaagagcttcgaggtactgagtgcacgggagaaggtcaaggagaccaggaacccaaagctaggggtgaagaagaagacttgcaaagtcaaggttgatcgggttaagaagagttatggtgcatcaaggatcactacataa

SEQ ID NO: 37371 - DNA, 339 bp, Zea mays
  Peptide Sequence Number=SeqID_79150
atgaattacgaggggatcatcggggagtttcttggacatgatcttaaggaaggcgacgtggaacaccctgtagccttgctcgaagctgatgacaacccaattaaaggactaacaagtgtgctaagtgttgaacaggtgcttaatgcaaagctaacagggttcaacacaaagacaaccgatcaagccaaggatggaggcaagaagagcttcgaggtaccgagtgcatgggagaaggtcaaggagaccaggaacccaaagccaggggtgaagaagaagacttgcaaagtcaaggttgatcgagttaagaagagttatggtgcatcaaggatcactacataa

SEQ ID NO: 37372 - DNA, 300 bp, Zea mays
  Peptide Sequence Number=SeqID_79151
atgtggattaagaattcttggagaaataagaatggaggatggaccaaagatgacaacccaattaaaggactaacaagtgtgctaagtgttgaacaggtgcttaatgcaaagctaacagggttcaacacaaagacaactgatcaagccaaggatggaggcaagaagagcttcgaggtaccgagtgcacgggagaaggtcaaggagactaggaacccaaagccaggggtgaagaagaagacttgcaaagtcaaggttgatcgagttaagaagagttatggtgcatcaaggatcactacataa

SEQ ID NO: 37373 - DNA, 343 bp, Zea mays
  Peptide Sequence Number=SeqID_79152
atggatgacaacatgcgcgagccgtctaggatgacatcaaagagaaatcaagtcgacagggctgaagtgaccgcggtcacttctgaaagctctcttgtgggttttggtggtttggatgacaacccaattaaaggactaacaagtgtgctaagtgttgaacaggtgcttaatgcaaagctaacagggttcaacacaaagacaaccgatcaagccaaggatggaggcaagaagagcttcgaggtaccgagtgcacgggagaaggtcaaggagaccaggaacccaaagtcaggggtgaagaagaagacttgcaaagtcaaggttgatcgagttaagaagagttatg

SEQ ID NO: 37374 - DNA, 531 bp, Zea mays
  Peptide Sequence Number=SeqID_79153
atgacctctcatggttcctcggaaggagggaaagcacattcccacacggacggacttgcacgagacgggtttccccctgttcgaggagcaccgggtgcccctgaaagctctcttgtgggttttggtggtttggatgacaacccaattaaaggactaacaagtgtgctaagtgttgaacaggtgcttaatgcaaagctaacagggttcaacacaaagacaaccgatcaagccaaggatggaggcaagaagagcttcgaggtaccgagtgcacgggagaaggtcaaggagaccaggaacccaaagccaggggtgaagaagaagacttgcaaagtcaaggttgatcgagttaagaagagttatgagacaaccgatcaagccaaggatggaggcaagaagagcttcgaggtaccgagtgcacgggagaaggtcaaggagaccaggaacccaaagccaggggtgaagaagaagacttgcaaagtcaaggttgatcgagttaagaagagttatggtgcatcaaggatcactacataa

SEQ ID NO: 37375 - DNA, 141 bp, Zea mays
  Peptide Sequence Number=SeqID_79154
atgacttcgacgcgcggtggcggaggttccttgatccggagtagtggcggcggttcccaggtcggtggcggcggctccctgatccagagggcgagcgacagcggggcccttgtgcggttggtaacagattttacgcagtaa

SEQ ID NO: 37376 - DNA, 156 bp, Zea mays
  Peptide Sequence Number=SeqID_79155
atgacttcgacgcgcggtggcggaggttccttgatccggagtagtggcggcggttcccaggtcggtggcggcggctccctgatccagagggcgagcgacagcggggcccttgtgcggttggtaacagatttttacgcattataccgaattgcataa

SEQ ID NO: 37377 - DNA, 612 bp, Zea mays
  Peptide Sequence Number=SeqID_79156
atgacaccgctcgctcgaagatcgcgcctcatgcgtcgccgtcgctactcgcacgttgacgggcgtcgcttgctcgccggccttggaagtgccgcctcctcgggaccttggggaagccgccgcttgcccgcacaagggccccgctgtcgctcgccctctggatcagggagccgccgccaccgacctgggaaccgccgccactactccggatcgaggaacctccgccaccgcgtgtcgaggtcatggagttgcggccaacggctgggggtccaccgccgcgcacgctctggggcaaccgtcgtcgtcgcacgcggcgtcgctaatgaatcggggtggagccacgacctctgcgttctccgcccctcccccaccctcgcgcaccgtctcctcgctaccgcgttctccacccctcctccactctcccgcatgaagccacctctcacctcccgcatgaagaaaccatctgctgctgtcactactaacaaggtcgtgctggactcggtcatcagcttggctgctgctaaaaagcctactcgcacaaatacttatgatatgcctgttatgaggaaggtttctcttcaccgcttcctcgagaagagaaaggatcggtaa

SEQ ID NO: 37378 - DNA, 264 bp, Zea mays
  Peptide Sequence Number=SeqID_79157
atgtacgacaagctccggcgcagccgccgcttggacgcggtgcagagcggttgctccgcgctgtccatcgtcaagcagggggacctcgtggtcgtcgccaacaagagtagcgcatctggtggtgcaacggccaggggtactaccttgcaggggtactaccttgctgatgagcccagggaggcgacgcagaggaggaccaacaacaatgaccagttcgtcatcctcgccatcgttggagtagcttttgtgccgacttgcctttaa

SEQ ID NO: 37379 - DNA, 303 bp, Zea mays
  Peptide Sequence Number=SeqID_79158
atggtgctcgtgctcccgtcccagaaagaggaaatcttggtcgtctccggagggtctgggagcgtgccgcggcttgactcccccgtcaagaccccaggatgcggcggcgcatgttttgtttctcagtgcggccgcaccctcggcatcccctcagggccggtcgtgctcgtcgttggagaacatgtctcacacctgacggaagaagacgacacaaaagctactccaacggtggcgaggatgacgaactggtcattattgtcggtcctcctctgcgtcacctccggtgccgagatgacaccatag

SEQ ID NO: 37380 - DNA, 171 bp, Zea mays
  Peptide Sequence Number=SeqID_79159
atgtcgcgcgcgttcgacgactactatatcgaggattgtggtgtcatcttggcgtcggaggtgacgcagaggaggaccgacaataatgaccagttcgtcatcctcgccaccgttggggatgtacgaggaaatttatcccgagacgtgcggaaggtgctctccaatgattag

SEQ ID NO: 37381 - DNA, 1407 bp, Zea mays
  Peptide Sequence Number=SeqID_79160
atgtaccgagaggcgttgtggcagaagagaggtcgtcctcgggagttatatccggacgtatctagtaaggatgctcctgttcctcctgaactccccgtgcctaactgtgactgtggcagactggcttggggacatcagaggtgtttctttttccagtggatcgatggtcctgataaatttgaccctcgatatcttcttttcgttaattggttgagtggaaggaccactcatgagcgttttaagcgttgggtacctcctcccccgaatcctccaccaatgacggatgcggagaaggaggtagcaacagaaagacggatggactcaccgcctcgatgcgattgtggagaccgtgctgtcatcgacaaagactatgacaagcagttctgttgtccgaacattgattattcatacgggtggcgtaagtgtcgtttcagagagtggttgtatggtcctttgtcccattggccagagccagaggtaaaggaaaagagatacatggggtgggcggcagaagaggtcaaatttgatccagtactctgcaaatgtggtattgaagctaagtatggattagttccttcggagcttggcgttggatatttttgtggacatatggtcgattacgatgaggagacgaggaaatgcagttgggagagttacgacgacaaaggagaggtgatgcgcacaatagagtccaagagaataatgggacagaagatgcgttgtggatctcgactcgttgattcgtacattaacgatcgcatacgcgacatgcgtagggaagcaaaatctgccttttatgatagcccgaagcgtgcagagtataggaggttgaaggcggcagatgagaagagagcacaggatgcaagggaatgggaagcggctcaagccgagaaacagatgttggataatcttgctgatcgcctcaagggaaagattggaagcggcgtaaactatttggccgatgaggcgcatgcgagatatgttcaggataaaatggcaacggttgagctgatggaggaggaggacgacgacacatctagattgagtgagcttatcgccctcgcagaggcaggattacatgaagaagaggaggacgacatgtcaaggttgagtgagctcatagcactagctgaggctggattacgtgctcaagaggaagaggatgagtttatgtcacaggccgccgcagaggtagaggcagcttattacaagaagaagtctgatgaggctgaggctgaggatgagctattctcccaagctgcagatgaagcagaagccaattattacaaaagaactggtgacaagtgtgatgcaggacaatgcagcaagtggaatgaggttgttgttgaggattgcgcgacggatgactccgaagatgagttactcatagattgtgattcagactga

SEQ ID NO: 37382 - DNA, 684 bp, Zea mays
  Peptide Sequence Number=SeqID_79161
atggcgttgtctactgagtcgtgcgccaccgtacccctggtccacgagggccggctccgccacccgcgcaaggcgctcatcgacctcgtcgcgcttctcgtcgatgacaccgtcgcggtcgctgccgtctggccaccgtcctccccgtcaagggaaagtgatgctgctattgcggctagagctgactcttatgctctgctcttggctgctagagcagaagcccttttccatctcaatttacttgatgaggctgatgttgcaatctctagtgcctccaaattgaattatacatcgtcatgctccccagacaccaaattttgcgggtttattgccaacgcctacctcttttatgtacatgcccaagttgacatggcattaggaagtggagacacggagattggaggacagaagtgcgcatcacaggactacagcgagggggaaggccagatcaagcaggagacaacaagaggtggctgctgctcaattggtattgcatatgctcatgctcaaatatacccttcactcactgacgttttcaaacctctgataaaggagggcaatgtctacaatgtctcctatattcagatcaagaaagctaataggatgtacaagcctgttgacaacgatatcatgatctgtttcacaaaatggatcctatgctgcctcgacaaacccgcggtttga

SEQ ID NO: 37383 - DNA, 306 bp, Zea mays
  Peptide Sequence Number=SeqID_79162
atgttcgtggccacacaacagcaagagacagttttgttttaccagtggagacacagagattggaggacagaagggcgcagcacaggactacagcgaggtgggaaggccagatcaagcaggagacaacaagaggatgtgataaatggtgatctctgcgagcagtatccctccctcccagctgatatgcagaggaagattgttgatcagttggatagaactccgacgcctgcagcactgcttggtgaggattgccaaggaggaagactagaacaggcaagagcagcgctaatcagtgacagagcatga

SEQ ID NO: 37384 - DNA, 327 bp, Zea mays
  Peptide Sequence Number=SeqID_79163
atgatgtgtgtgcataggaggatgttcgtggccacacaacagcaagagacagttttgttttaccagtggagacacagagattggaggacagaagggcgcagcacaggactacagcgaggtgggaaggccagatcaagcaggagacaacaagaggatgtgataaatggtgatctctgcgagcagtatccctccctcccagctgatatgcagaggaagattgttgatcagttggatagaactccgacgcctgcagcactgcttggtgaggattgccaaggaggaagactagaacaggcaagagcagcgctaatcagtgacagagcatga

SEQ ID NO: 37385 - DNA, 252 bp, Zea mays
  Peptide Sequence Number=SeqID_79164
ggggcgggatctgcggccgaggctgcctgggctgcagcctcggtcgcggcccaggagcggggtcatagtctgaagaactgtcttgacaaaagcgaggaaaatttgaagacattttgctataactgtggtgaatctggacacccattgagaatgggttacgaattttgcaagctgctttatctgcaatcagtaagggcattgagcaagaactgccctgaaaacaaacatggcatctatccaaaggtatcataa

SEQ ID NO: 37386 - DNA, 621 bp, Zea mays
  Peptide Sequence Number=SeqID_79165
atggctaacaagcgtcagcgggatgcgcggaagcgcttccgggaggcgaacccagacctattccctccgcaaaccgccccttctgccgacggaaccaagaacaagagcaagaagaagaagaataagagcatgttcaagaaggccaataagggcggcacgggaaggtttaagcacccgctacgggttcccgggatgcggcccggggaacgctgcttcatctgcaagtccaccgaccacgtcgccaaggcttgccccgagaaggccctctgggacaagaaaaagatttgcttgctttgcagggagcggggtcatagtctgaagaactgtcctgacaaaagcgagggaaatttgatgaaattttgctataactgtggtgaatctggacactctctttccaagtgccccaagcccattgagaatggtaatcctcacgcactcattgtagacattccagggggtacgaattttgcaagctgttttatctgcaatcagcaagggcatttgagcaagaactgccctgaaaacaaacatggcatctatccaaaggtacttcatgatactcatgccttctcaattctcatgatactgcgaatgggcatggcttcgattatgcagcaataa

SEQ ID NO: 37387 - DNA, 969 bp, Zea mays
  Peptide Sequence Number=SeqID_79166
atgcgccctatctccgccgtgcctacgcctcctcccccacccgcccgatacccgccacgctccctctacgcgcctgcctcctcctcggcccggatcccgctgccagcgcctaatatggagatgaaggcatcggccttcgatgaaaccctagccgccgtcttggaccacctcaagccccacatcgtcggcaccttcctccccccttgctgcgccggccctcaatctgcgtccgcgacaggtaaaccttttacctattttatcgggtgtcatgctttgttcttggagtccaactattttgatcctattgggaaggcaagtgatctagcattattgtcgatattaatatttatattgctggtagcttctactttaactgatctcaatggggcatttgggtggctagcaattcacattgataatttagaagtgaatttcaggtgtacatttgatggcctccgatatggtggtgccttcaatcctctgcaatgcgcaataatgctgctcaggaggatggctgaaaaactcccagtgctgctacgctaccagagtcttcatgtgcatacttacttcaagaactcaagcgagaagctcaaagaaggggaagacatctacatctatcagggtgacaaatccttttgcagcacagagtgcagagaaaatttcatggtagacgagatggaagggaggctggaagcaccttttttgcatgggagctgcatgcagagaaattattggcagaaaacaaactttgaccagattcttgaatgtgccaaggaaataagggagcggggtcatagtctaaagaactgtcctaacaaaagcgagggaaatttgaagaaatttgctataactgtggtgaatctggacactctctttccaagtgccccaagcccattgagaatgggttacgaattttgcaagctgctttatctgcaatcagcaagggcatttgagcaaaaactgccctaa

SEQ ID NO: 37388 - DNA, 2592 bp, Zea mays
  Peptide Sequence Number=SeqID_79167
atggagccaaccgtattgaaccgtgaaagagttgcattggacaagaaaaacaggatgcctgagttgttcgatgactatagcgatgaagatttttatggggtacaacggaagtatagtattgtcgctcgagttgaagttaaattcccgattgaaccacgttatcgtgacaggcaacattacattttatctgacatcaatggagccaagatcgaggccattgcaaatcggtatgagatagtcaaatacttcaacagtttgctccatgaaaagcatgtctacaagatgcacaacagtgtctcgaatcaactgaccatacaacaatacacttcaaaccgttccatcacaacacccattattttgaactattatttttatgctcatgttttctcgggtactgttcttgttatagatcagatgggacataatgccggtcgcaaaccattcacagacatctctagcaatatcattagaggtgatcaaaatgaattgctcggaccaatggtcgatgctaaggagcgtaagaggaaacgggatagggaaagatatgcagcgatgtccgttgaacaaaaaaacgagaagaataggaagcgtcgtgaagcacgtcaacaaaacaagggacacaatgtgatgcccaatgtgtcaggaggtgaccaaaatgaacagcttaggttgtataatcagacaccaaggcggaaagagggaaagttagagtacataagaaaacgtagagcactgcaagcaagcactttgaatcaggggtccatcgccatggaggtcccaacatatacctctgaggttgtacaccctacagcagatgtatcagaacctgattcatcctctgataacgcatgcgactgggttatccctgaatacaccagtacacctttcatgccagcttcaacaaaaactgaggatgtcgattcatccgatatgtctactgggccactaagacgtaaacatcatgttctgcctggtgaaagacaagctatcttagcccgtcaaaacaagaaatttgaagcaaacattgcacgtaacatgactactttgactgaggatactatcagtgacgtcggacaaatggatgattcgacacaacccggttcaactatagagatcaacaacactgctgatgacgatgatgagggtgtcatattcggagaggataatgatgagaacgagggatatctattcgctgatgaggacactaacgaggacttcgagatagatggtactcaagatcaatctgttgtcactgatatgcctgacccgtacgacaaggtctacagtaacatccctgaagaaacacatatgctgaagcccgttcccgactgtggttattgcactgcgaagaagtttgagtatgagccgcctgggttttgctgtcgaggtgggaaggttgagctagccccactagagacccctccccagctcaggcggttgtgggatagtgcagactctgatgctaagcactttcgtgataacatcaggttttttaatggccatttttctttcacttccctgtactgttgcctcgacagtatgacaactaatatgagggattctggtatttacacattccgtgcacaaggcatgatgtaccataatatcaagtcatttggtagtgaatgtggggcagagcataagcacctagagctttacttttacgatgatgatcccagtctcgagcatcgataccgtaagtgtcgtgaagatcagattcagaaagaccaagaggttattaaacagatagttggcatacttcgtggaaatccgtactctgagcaccttaggagcatgggtcatgttgagaaccttgctgactatcacatcgcattgaaccttgaccagacgttgaaccagaagacatataacacacctctcacttcggaggtggccgctgtctggatcgaggggagcgaacggcgaggccagttcagcaagagtgttatgctacatgggaaggataggtcaagccacggcatccgctcataccatggatgctacgatgcgctatcatatccactgttcttccctagaggtgaacttggatggcatgcaaatatcccaaaggttggtgtatccatggacgaagtggatgcataccgggcgacgcatagggcaagtaatgcaaatgatgaagatgcggaacctcctacccatctatgtgtgtccgtgcgtgattactactgctacaaatttcagatacgtccaggggtattcaatccaatacttcatggtaaacggcttttccagcagttcgcggtcgacacatacattaagattgagagctcccgtttagatttcatacgtaagaaccaggatcggttaagggcagatctataccagggcttggtggatagcatgttagatggagatgttagaggagagaaggttggaaagcgaactgtgttgtcaccgtcgtttattggcggtcctcgtgacatgagacgtcgatatatggatgctatggctctggtgcggaagtttggtaaaccagacatctttcttaccatgacatgtaaccctaactgggatgagataaggagagagcttctacctggacagacaccgcaagatcgtccggatcttgta

SEQ ID NO: 37389 - DNA, 1794 bp, Zea mays
  Peptide Sequence Number=SeqID_79168
atggaggtcccaacatatacctctgaggtcgtacaccctacagcagatgtatcagaacctgattcatcctctgataacacatgcgactgggttatccctgaatacaccagtacacctttcatgccagcttcaacaaaaactgaggatgtcgattcatccgatatgtctactgggccactaagacgtaaacatcatgttctgcctggtgaaagacaagctatcttagcccgtcaaaacaagaaatttgaagcaaacattgcacgtaacatgactactttgactgaggatactatcagtgacgtcggacaaatggatgattcgacacaacccggttcaactatagagatcaacaacactgctgatgacgatgatgagggtgtcatattcggagaggataatgatgagaacgagggatatctattcgctgatgaggacactaacgaggacttcgagatagatggtactcaagatcaatctgttgtcactgatatgcctgacccgtacgacaaggtctacagtaacatccctgaagaaacacatatgctgaagcccgttcccgactgtggttattgcactgcgaagaagtttgagtatgagccgcctgggttttgctgtcgaggtgggaaggttgagctagccccactagagacccctccccagctcaggcggttgtgggatagtgcagactctgatgctaagcactttcgtgataacatcaggttttttaatggccatttttctttcacttccctgtactgttgcctcgacagtatgacaactaatatgagggattctggtatttacacattccgtgcacaaggcatgatgtaccataatatcaagtcatttggtagtgaatgtggggcagagcataagcacctagagctttacttttacgatgatgatcccagtctcgagcatcgataccgtaagtgtcgtgaagatcagattcagaaagaccaagaggttattaaacagatagttggcatacttcgtggaaatccgtactctgagcaccttaggagcatgggtcatgttgagaaccttgctgactatcacatcgcattgaaccttgaccagacgttgaaccagaagacatataacacacctctcacttcggaggtggccgctgtctggatcgaggggagcgaacggcgaggccagttcagcaagagtgttatgctacatgggaaggataggtcaagccacggcatccgctcataccatggatgctacgatgcgctatcatatccactgttcttccctagaggtgaacttggatggcatgcaaatatcccaaaggttggtgtatccatggacgaagtggatgcataccgggcgacgcatagggcaagtaatgcaaatgatgaagatgcggaacctcctacccatctatgtgtgtccgtgcgtgattactactgctacaaatttcagatacgtccaggggtattcaatccaatacttcatggtaaacggcttttccagcagttcgcggtcgacacatacattaagattgagagctcccgtttagatttcatacgtaagaaccaggatcggttaagggcagatctataccagggcttggtggatagcatgttagatggagatgttagaggagagaaggttggaaagcgaactgtgttgtcaccgtcgtttattggcggtcctcgtgacatgagacgtcgatatatggatgctatggctctggtgcggaagtttggtaaaccagacatctttcttaccatgacatgtaaccctaactgggatgagataaggagagagctaaaattataa

SEQ ID NO: 37390 - DNA, 7311 bp, Zea mays
  Peptide Sequence Number=SeqID_79169
atggagccaaccgtattgaaccgtgaaagagttgcattggacaagaaaaacaggatgcctgagttgttcgatgactatagcgatgaagatttttatggggtacaacggaagtatagtattgtcgctcgagttgaagttaaattcccgattgaaccacgttatcgtgacaggcaacattacattttatctgacatcaatggagccaagatcgaggccattgcaaatcggtatgagatagtcaaatacttcaacagtttgctccatgaaaagcatgtctacaagatgcacaacgtatggtttggtcttaatccgggtgcatttaattttcgacatctaaatggtaccatggagttgtatttcacccaccaaactgtcgtagagccatacgctgtcccagttcaaatgccgccatttccaaaacatatattcttgaaccttgatgatattgccgagctgccaaacaggactttagttgaaaacaagagtgtctcgaatcaactgaccatacaacaatacacttcaaaccgttccatcacaacacccattattttgaactattatttttatgctcatgttttctcgggtactgttcttgttatagatcagatgggacataatgccggtcgcaaaccattcacagacatctctagcaatatcattagaggtgatcaaaatgaattgctcggaccaatggtcgatgctaaggagcgtaagaggaaacgggatagggaaagatatgcagcgatgtccgttgaacaaaaaaacgagaagaataggaagcgtcgtgaagcacgtcaacaaaacaagggacacaatgtgatgcccaatgtgtcaggaggtgaccaaaatgaacagcttaggttgtataatcagacaccaaggcggaaagagggaaagttagagtacataagaaaacgtagagcactgcaagcaagcactttgaatcaggggtccatcgccatggaggtcccaacatatacctctgaggttgtacaccctacaacagatgtatcagaacctgattcatcctctgataacgcatgcgactgggttatccctgaatacaccagtacacctttcatgccagcttcaacaaaaactgaggatgtcgattcacccgatatgtctactgggccactaagacgtaaacatcatgttctgcctggtgaaagacaagctatcttagcccgtcaaaacaagaaatttgaagcaaacattgcacgtaacatgactactttgactgaggatactatcagtgacgtcggacaaatggatgattcgacacaacctggttcaactatagagatcaacaacactgttgatgacgatgatgagggtgtcatattcggagaggataatgatgagaacgagggatatctattcgctgatgaggacactaacgaggacttcgagatagatggtactcaagatcaatctgttgtcactgatatgcctgacccgtacgacaaggtctacagtaacatccctgaagaaacacatatgctgaagcccgttcccgactgtggttattgcactgcgaagaagtttgagtatgagccgcctgggttttgctgtcgaggtgggaaggttgagctagccccactagagacccctccccagctcaggcggttgtgggatagtgcagactctgatgctaagcactttcgtgataacatcaggttttttaatggccatttttctttcacttccctgtactgttgcctcgacagtatgacaactaatatgagggattctggtatttacacattccgtgcacaaggcatgatgtaccataatatcaagtcatttggtagtgaatgtggggcagagcataagcacctagagctttacttttacgatgatgatcccagtctcgagcatcgataccgtaagtgtcgtgaagatcagattcagaaagaccaagaggttattaaacagatagttggcatacttcgtggaaatccgtactctgagcaccttaggagcatgggtcatgttgagaaccttgctgactatcacatcgcattgaaccttgaccagacgttgaaccagaagacatataacacacctctcacttcggaggtggccgctgtctggatcgaggggagcgaacggcgaggccagttcagcaagagtgttatgctacatgggaaggataggtcaagccacggcatccgctcataccatggatgctacgatgcgctatcatatccactgttcttccctagaggtgaacttggatggcatgcaaatatcccaaaggttggtgtatccatggacgaagtggatgcataccgggcgacgcatagggcaagtaatgcaaatgatgaagatgcggaacctcctacccatctatgtgtgtccgtgcgtgattactactgctacaaatttcagatacgtccaggggtattcaatccaatacttcatggtaaacggcttttccagcagttcgcggtcgacacatacattaagattgagagctcccgtttagatttcatacgtaagaaccaggatcggttaagggcagacctataccagggcttggtggatagcatgttagatggagatgttagaggagagaaggttggaaagcgaactgtgttgtcaccgtcgtttattggcggtcctcgtgacatgagacgtcgatatatggatgctatggctctggtgcggaagtttggtaaaccagacatctttcttaccatgacatgtaaccctaactgggatgagataaggagagagcttctacctggacagacaccgcaagatcgtccggatcttgtagtgcgtgtctttcatgcgaaactacaggagctaaagcataggttgactaaacaggatattctcggtaaagtccgagcctacgtctacgtcgtggaatttcagaaacgaggtttgccacatgcccattttctactcatcatgcaaaggaagtacaagctcacgtgccctgaacagtatgaccttttgatctcagctgagatcccatccaacaagtaccctgaactgcgaaagatggttatcaagcatatgatgcatggcccgtgcgggtctctaaaccctaactgcccatgcactaagggtcgtgcatcgtgcaagaatcaatacccacggcatttctgtgaggcaaccatgcaagggaaggattcatatcctaattacagacgtcgtgacgatgggcgtaaggcaaatgttcgaggatgtgaattggacaatagatgggttgtcccttacaacccttacctccttcggctcttcaactgtcacatcaatgttgaggcgtgtgggagcatcaaggctgttaagtacctgttcaagtacatatacaaaggccatgatcgtgcgtcggttgttatgagagatgcgagtaaggaaaatgatgatgtagatgagatccagcagtatagagatgcaaggtgggtgactcctccggaagccttatggaggatatatggatttgagcttagtcagaactctccatctgtgatgcagctgcaactccatcttccaaacatgcacatggtgacgtttcacgagcgacaaatggtcgagcgagtcgtcaaccgtccaggtgctgataggtcaatgattacagcatattttgaagtgaataagctatacgaggaggctcggggcatcctgtatcgtgacttccctgagtggtacacttggaagcagggcaaagtgtggcaaaggaggaaacgaaatacgggtggacaagtcggtagaatcgtctctgctctaccatctgaaggggagcgcttctatcttcggctcctcctaaaccatgtgactggtgctacctcctatgtggatctaaggacagtagacggtgacacactaccatcgtttcgtgaggcagcacaaagaaggggattacttgaagcagacaacacaatagatgagtgtctcaatgaagctgctctttaccaaatgccatcagcgctacgaaggttgtttgcaacgatactggtttactgcgagccaaatgatgtggccgaattgtggcagagacaccttgacacaatgtccgaggattatcatcatattactcagagcaaaactcatttgcagcagatggtcttgattgacattagaaacatgttgcagtcaatgggtaaagacataaagacattccctctccctgctatcatcgatagatatgacgattcacaaggtattgatagagagatttacgaggaggaaagtatcgaggcgacgacagaagatgttgctttgcacgaaaccctaaatgaggagcagaagtctgcctatgaaaagatcttatctgttgttgacaccagtaatggcggtatgttctttgtggatgggcctggtgggactggaaagacttatctgtataaggcattgcttgcggtgctacgtagtcagggcaagattgcagttgcaacagctacatctggggttgcggcttccataatgcctggtgggagaactgcccattcacgcttcaagataccacttactattgatgatggtgctatatgtaccttcacgaaacaaagtgggacatcaaagttgctacagaaagcgtcgctcattatttgggacgaggcatcaatggctaagcgacaatcaattgaagcgttggacaacagcatgcgtgatatcatgggacgccctggtctgccctttggtgggaagactattgtgtttgggggagatttcagacaagtactccctgttgtacgtaaggggtcaagggctcagatagttgctgcctctctacggagttcttacctatgggaatcaatgtgccacctaaagcttgttcgcaacatgagagcaaagagcgacccatggtttgcagaatatttgttgcgtgtcggtggtggaactgaggaagtgaacaacgatggtgatgttcgtcttccagatgaggtatgtgtgtcatataccggtgatgaccacgaccttgacagattgatagatgacatttaccccagtctaaacgaaaacatgtctaatacaagctacatcacttcaagagcaatattgactactcggaacgactgggtggatatgataaatatgaggatgatcgatcgtttccaacgggagcagatgatgtaccatagctttgacaccgcgatggacgatcctaataactattatccatcagaattcctaaacacgctgagtcctaatggactacccccgcacgttctgaagctcaaaattgggtgcccaatcatgttacttaggaatatagaccctgctaacggactttgcaacggtacacggctggtggtacgtggtttccaaaaaaatagtatcgatgctgaaattgtccttggtcagcatgctggaatgcgggttttcttgcctcgtatacccctgtgcccttctgatgacgagatgttccctttccattttaaaaggaagcagtttccagtaagactaagtttcgccatgactgttaacaagtctcagggacagacgattcctaatgttgctgtgtacttgcccgaaccagtgttctctcatggccagctatatgttgctctctcaagggccacaactcgattgaatgtgaaggtacttgtaattccagtcactgatgataaaatgaagaagggggtgcaaaagaagtcaacaataaatggcgtaacatacacaaagaatattgtctataaggagggtgatcttgcactcatcgattggattaaagaaatcccttgtgaaccaagggtagaagtcgtgcttattgatgatgcttttgtggaaaggaagtggatggaatgcctatttcaaccggacgcatatctaggtgatgaggtgatagactgttacataaatttaataaaagctcaagagcatctaaaatgccgatctggaggtcgtgtacacatagaaaatgcttttcagttcaactttctaaagcgagacggtgatgttgaaactaaaacagatgagttatatccaagtaaagacatggcacaaatatctagcgctgaaagaagagttttactttatctagaccatgacatggtgtttattccaataaatattcgagaaatgcactggtatcttgctgtgatcaatgcaagaaatatggagatacaagtgctcgactcacttggtacatcatccggtcgcaatgacctcattgccactataaaaggactccaaagacaaattgatatggtatctcagcgtaaggagttaacagatcataggtggccagacctccgagttgcttcttggccacttaaagaaatagaaatggaatatgcaaagcaaacagatagctcctcgtgtggcctctttctactaaactatatcgagtactggacaggggatgaactatctgataattttacccaggacgacatgtcacactttaggaaaaaattggctgctatattactatcctcagatataaacaagagaaaggggtgtccgttatacaagtatgacaaagaagtcgatgctggatgctcctctgatgttcagatattagatagtcccacaaatcctaagaaagaggaaaactaccttgtgtatctgaagaaaacaaagatgacatgggtgcgaagtttcaacccttttaagatagaaatatctgtcaaagacctgcaaaacgtattaagggtaaatctagatatgactctaaaatgttttgacatggctgttcgattgttggccattaaagagtcacatatgtcgaaagatgaaatgataaaggataaaaaacattatatggacatgcgcttctggagaatggttggttttggtaaacttgcaaagtaccatcaggatcctacaacagaagagttagccaaaacactcgactgttggccttcattgaactattatatcactggttgtaaatatgttcttatgccatggaaattcaacggatgctacgcacttttcataatcgatcatggtaaaaagcacgtaacttttatggactttacacccactgaagattggtgtaaacacatgccatacaagaggtttgcagaagcaattatcatggcctctaagaaatataagattgcctacaataagaaacgttctggatgggcacatgatatttttaagtgggaacatacaattcggtctggtcttccattggacttaaaaggggttaatacaagctacttcgttctacaagctatggtcatgtgggggagtggtagacgaatggaatttaatagggatacaaagattcttcgaaggaactttgtaattgatctattaagttacgaggagaattcatgccgctatgctatccctccaaacatacaacaacgacttatcagtatcgctaaaaaagattag

SEQ ID NO: 37391 - DNA, 216 bp, Zea mays
  Peptide Sequence Number=SeqID_79170
atgtgttggtctaggctattgatcaagtggcttgatgatgatggtgaaggaacttcatgctatggacaaatggagatggaaatgaatgctcaaggcaaaggttgccgcctcctagatggcttggtggtagttccccgtgagctcttcaacgaagattgtgaagaggccgcggtggtgattgtgagaggcgttgtccttgcctcgccggagcggtga

SEQ ID NO: 37392 - DNA, 116 bp, Zea mays
  Peptide Sequence Number=SeqID_79171
gttgccacctcctagatggcttggtggtagttccccatgagctcttcaacggagattgtgaagaggtcgcggtggtgattgtgagaggcgttgtgcttgcctcgccggagcggtga

SEQ ID NO: 37393 - DNA, 141 bp, Zea mays
  Peptide Sequence Number=SeqID_79172
atggaaatgaatgctcaagacaaaggttgccacctcctagatggcttggtggtagttccccatgagctcttcaacggagattgtgaagaggtcgcggtggtgattgtgagaggcgttgtgcttgcctcgccggagcggtga

SEQ ID NO: 37394 - DNA, 381 bp, Zea mays
  Peptide Sequence Number=SeqID_79173
atgggtttcgctccgataccaactgtgacggaacctcccaaggtattaggcctacctatagttgtccttgtccaggggaccttggacaaccctatagatgcacataatcacttgacaagttcgaccagggaggcaaaacaccctcccgcacaaaagtttattgatttcaaagtgggaggcaaacgtcctcccgtgaccaccttcactgctggggctcttccttgggtaccacctttgaacagaaacagcagaactccgctgcttcctctcctacaacaacatgggttcgaaaaccctgagtacgaagtgtactttcgcaagtcttacccaacaaaggaaaaagactctcaaggatatgctggcttgagggagtcaaggtaa

SEQ ID NO: 37395 - DNA, 174 bp, Zea mays
  Peptide Sequence Number=SeqID_79174
atgggttcaaaaaccctaagtacgaagtgtactttcgcaagtcttacccgtctaaggaaaaagactctcaaggatatgctggcttttgggaatcaagattttcaggtggtggacttccggatcgtacttagggatttgcccgaacttccggtacttgatacatgttgggaatga

SEQ ID NO: 37396 - DNA, 399 bp, Zea mays
  Peptide Sequence Number=SeqID_79175
atgggttcgaaaaccctaagtacgaagtgtactttcgcaagtcttacccgtctaaaggaaaaagactctcaaggatatgctggcttttgggaatcaagttcaatgtcacacccggttttggaaggcaacccaaatgcgaaccatcatcacctcctgagcactgagtacaatgggggcaacctggggtgggggtggtgtgtaaagcaaggaggttgtacactttacccacaagtcatgatccctttccggcctgggttgtacagacccgatcttcactaccaaggtgaatggccagggatacactacgtagcctttacaaagactcccctggtgcatagctgctcgttagatttcgccagtcgtacaaacgcagtacacctccccaaggtgggtgactaa

SEQ ID NO: 37397 - DNA, 807 bp, Zea mays
  Peptide Sequence Number=SeqID_79176
atgagcgcgccgatcgccactcaagtccagggatacagatacacacagcaatacaacggcaggaggttggggggcgcggaaagtggaaatttaccgtgcatgtctgaaatcaagcggggcaagaccagtgagacgcgtggggacttggcaacgacagagagagagggaaagaagggagcagccaccggccagcgggacaacccaaccaacgcgatctctggggcaggcaaaggacgacgggtcggcgagaggcggggccatgaggatccggaagcgcacccctgccagggcagcgtcgccgggaccgccgcctctgcctcctcctcctcccctaccgctgcagcgtcccacggtgagatgccggagcttattattgattttacctgtgtggcctcccgggagaaaccacgggatgaggcggcggcggaggaggaggaggagaagcgggcggtcctcgccgccggagtccgagaaggcgacgaccgggttcgccccgccgccgccgccgctggctctgggaacagcagcgcaacggacgacgtgccgaggccggagccgcaggagcaggacgccgccaggtgcagccggaacgacgggaagcggtggcgctgcaagaaggcggccgtgccggggtacctgttctgcgaccgccacatcgcgtggtccacacgcaagcgcaagcccagagccagcaccaagcccaaggttcacggcagcggcgtcctggagcccaccgccatcgcccaggagttcgcggaggaccacggccccacgcagcgcgacgccgggttcctcggcggcttctag

SEQ ID NO: 37398 - DNA, 804 bp, Zea mays
  Peptide Sequence Number=SeqID_79177
atgggtggaaagcggtccgtagatccccctactctctcgtcgccccagcctctccaaccgtcgcctcatcccgtggtttctcctgcaccaaaaacggagggcaagcgcggtaggggaggaggaggcaagggcggcggtcccggcgacgctgccctggcaggggtgcgcttttggatcctcatggccccctgtcttcatgcccctggctcagattccagaggtgggaaagcttgtaagaataagaaaaggaataaaataaggaaagatcaagctaagaatcccacaaaagcatactccggacctgtaaataagctatggccaaaaacaggcatcttccttgctgccgcagtcactgattggctagatggttatattgctagaaagatgcagctaggaacaccttttggtgcatttcttgatcctgtggccgacaagcttatggtagcagcaacattagttttgctatgcaccaaacctttggaatcatcactgctcaatgatgggccatggcttctaacagtcccttccattgctatcattggaagagaggcacttccttcgagtgggaaagaagcgattgaacttcttgacatactattaaggtggattgtcttacgcttttgtgaatctaacacaacatgtttgttgaaggttcttgactttctactagagctttttgatatcttaaaagaccagtcttacatgttgacagaagctgaagctgcaatttatcttccttgcctcataatgaagtcaagatttgttgcgaggaaccaaaaaattacgctaatggttatgaggtga

SEQ ID NO: 37399 - DNA, 489 bp, Zea mays
  Peptide Sequence Number=SeqID_79178
atggccaaaacaggcatcttccttgctgccgcagtcactgattggctagatggttatattgctagaaagatgcagctaggaacaccttttggtgcatttcttgatcctgtggccgacaagcttatggtagcagcaacattagttttgctatgcaccaaacctttggaatcatcactgctcaatgatgggccatggcttctaacagtcccttccattgctatcattggaagagaggcacttccttcgagtgggaaagaagcgattgaacttcttgacatactattaaggtggattgtcttacgcttttgtgaatctaacacaacatgtttgttgaaggttcttgactttctactagagctttttgatatcttaaaagaccagtcttacatgttgacagaagctgaagctgcaatttatcttccttgcctcataatgaagtcaagatttgttgcgaggaaccaaaaaattacgctaatggttatgaggtga

SEQ ID NO: 37400 - DNA, 525 bp, Zea mays
  Peptide Sequence Number=SeqID_79179
atggggttcgtgtccttcgtcgggagggtgctcttcgtcgccgctttcctcctctccgcctaccaggatgacataagcataaactgtggaggactggaggtttacagaagttgcaacacaattttcatagactcaaggtttaatgaattcggtgctgatggtggaccagcagctaaggcccttcggcccaaattcaacgtgtttgtcaaaaatgtatctgctcatctgggagtagctgtgccacacattgagttgaagcatgtgattgctgctacaattggtcttaagggtcttggaagcctcctttttattttgagcagctctctcggtgcttatctcctgctgctgtaccttgctttgatcactcctatcatccatgacttctacaactacgatatggagaaggcagaatttgcaggcctctttgcgaagttcacccaggcaataactgatttctctgttcagaaatgttccacccaacgcacattctgtcgcagtatccaaataacacagaacaacttgtga

SEQ ID NO: 37401 - DNA, 598 bp, Zea mays
  Peptide Sequence Number=SeqID_79180
atgcccgctggaccgctggcgctggagccccttgcattctctactcatctgggagtagctgtgccacacattgagttgaagcatgtggttgctgctacaattggtcttaagggtcttggaagcctcctttttattttgagtagctctctcggtgcttatctcctactgttgtaccttgctttgatcactcctatcatccatgacttctacaactacgatatggagaagacagaatttgcaggcctctttgcgaagttcacccaagatttggcgctgatcggagctctgctcttctttctgggcatgaagaactccatcccgaagtctatttcgaagcaggctcagcgcgatgcagcgaatgccatcgagctgcgcttttacatgtttatcatcagattccattttgcggggcatgacccgaacaaaggcaactggcgactggtgaaaccacagactggtgccaccaaagtggaagaaattcactcaaagaaccatcctgtcagtctccttatcatagagtattcaccttttcttgcagttgtggagtccaaggacagaaggatctcagttgctttagcatttgctggtcatcaagaag

SEQ ID NO: 37402 - DNA, 1077 bp, Zea mays
  Peptide Sequence Number=SeqID_79181
atggaagttgtggagtccaaggacagaaggatctcagttgccttagcatttgctggtcatcaagaaggtgatgttgttgtctcctcactcactaaactctctacttgtctcatcaccatttcactgcatggcatggcattcaactttcaaataatacaatttatgcattcaagtatatggaacaatctgaaatcaccaaatgtgaacagagatagatataatgatggtagcaccaaacattcactcttgaagcagtcatcattggatctattgacgattgagactcctggtttgaagaaaaatgacagcttttcaagatggatgaataaagaacttgaagaggttgttgatttgggtattaaatccacttctgatgctttctggagtaacattgagacagtgaaggtgcctgatggttctaatgttctgactaatgaacagctggatgcttatgtagtgaacccttcactttctcaagaccaactattcagcattctcgatgtttcaccaagttgtgcatatattggtacaaatacaaaggtgtgtgcaaagtttagtcaaggaaacctgtgtaaacgatttgtaacaggtgcaggaatagctgaagcagactcttgcgcctcagcaagtacaggtgctcatataccaacctttgagtctgttcctgagtcaagtgtcttgacagtggacgacagaactcctgaggacaaagaaaggtggtggaggaggggcttgagagccatttcagaggggaagttggctattgttttattggctggtggccagctactatgttcactgcacagtcaattcagctgggtatcaatgatattgtccaatgccccaaagtactttgtcgaagctaggacagctgcccgcgccccaacccggccccgcgcgacggcgctgctggcgctcgacgccgtgcgagatctcccgccgtccccaggtctctctctgtaccttcgtaccattagaggatgtataagcaaccatggtttatattataaattcagtgtgaagaaggtgcattctacatgtttctataaagaaaaatctatgttcaacagtcaataa

SEQ ID NO: 37403 - DNA, 624 bp, Zea mays
  Peptide Sequence Number=SeqID_79182
atggaggccgccaggttcggcgcgcggagcagccacttgtacggcagcgggctgggcgagcttgatctcaacaggcgcgagagcagggtgtttggctgggatctcaacgagtggagctgggacagtcagcggtttactgccacgccggtgcctgttgaggcggcgaatggctctggactgaacagctcgccgtcatcgtccgaggaagccggggaagagatggctaagaatggtggcttgggaggtgatactgacaagaggaaaagggccgtggtcattgacgacgacgacgatgatgaaacggaggatcaggacacggtcgtgaatggtggcgggtcgctcagcctgataatagggggtagtgctgctggtgctggagcgatggagaacggcgatgtaaatgaggatgagagaaatggaaagaagatcagggtgcaaggaggcggctcaagtgggccggcatgccaggttgagggctgcggagcagatctgactgcagcgaaggattatcaccgccggcacaaggtctgcgagatgcatgctaaggccaccaccgccgtggtcggaaacactgtccagaggttctgccagcaatgcagtagttatttgttcatagaagaatga

SEQ ID NO: 37404 - DNA, 1335 bp, Zea mays
  Peptide Sequence Number=SeqID_79183
atggaggccgccaggttcggcgcgcggagcagccacttgtacggcagcgggctgggcgagcttgatctcaacaggcgcgagagcagggtgtttggctgggatctcaacgagtggagctgggacagtcagcggtttactgccacgccggtgcctgttgaggcggcgaatggctctggactgaacagctcgccgtcatcgtccgaggaagccggggaagagatggctaagaatggtggcttgggaggtgatactgacaagaggaaaagggccgtggtcattgacgacgacgacgatgatgaaacggaggatcaggacacggtcgtgaatggtggcgggtcgctcagcctgataatagggggtagtgctgctggtgctggagcgatggagaacggcgatgtaaatgaggatgagagaaatggaaagaagatcagggtgcaaggaggcggctcaagtgggccggcatgccaggttgagggctgcggagcagatctgactgcagcgaaggattatcaccgccggcacaaggtctgcgagatgcatgctaaggccaccaccgccgtggtcggaaacactgtccagaggttctgccagcaatgcagtagatttcaccttcttcaagaatttgatgaagggaagcgaagttgccgtcgacgcttagcaggccacaataaacggaggagaaaaacccgccctgatactgcaagttgtgggactgcttcaattgaggacaaaatcagcaattatctactgttgagccttattggaatctgtgctaatttgaactctgataatgttcagcattcaaatggccaggagttgctatccactcttttgaagaacctagggtctgttgccaaatcactggagccaaaagaactatgtaaactcctggaggcataccaaagcctgcaaaatggatcaaatgctggaacctctggaacagctaatgccacagaagaggctgcagggccatctaactctaagttgcctttcgtgaatggtagtcattgtggacatgcatcatcatctgttgtgccagtacagtcgaaggctaccatagtggtaactccagagcccgcatcatgcaagcttaaggattttgatctgaatgacacttgcaatgatatggaaggctttgaggatggacaagaaggttcacctacacctgcctttaagacagctgactctcctaattgtgcatcatggatgcaacaagattctactcaaagtccaccgcagactagtggcaactcagattcaacatcaacacaatcattgtcaagctcaaatggagacgctcagggatttaataactcctacgagtcctacctttaa

SEQ ID NO: 37405 - DNA, 2919 bp, Zea mays
  Peptide Sequence Number=SeqID_79184
atggaggccgccaggttcggcgcgcggagcagccacttgtacggcagcgggctgggcgagcttgatctcaacaggcgcgagagcagggtgtttggctgggatctcaacgagtggagctgggacagtcagcggtttactgccacgccggtgcctgttgaggcggcgaatggctctggactgaacagctcgccgtcatcgtccgaggaagccggggaagagatggctaagaatggtggcttgggaggtgatactgacaagaggaaaagggccgtggtcattgacgacgacgacgatgatgaaacggaggatcaggacacggtcgtgaatggtggcgggtcgctcagcctgataatagggggtagtgctgctggtgctggagcgatggagaacggcgatgtaaatgaggatgagagaaatggaaagaagatcagggtgcaaggaggcggctcaagtgggccggcatgccaggttgagggctgcggagcagatctgactgcagcgaaggattatcaccgccggcacaaggtctgcgagatgcatgctaaggccaccaccgccgtggtcggaaacactgtccagaggttctgccagcaatgcagtagatttcaccttcttcaagaatttgatgaagggaagcgaagttgccgtcgacgcttagcaggccacaataaacggaggagaaaaacccgccctgatactgcaagttgtgggactgcttcaattgaggacaaaatcagcaattatctactgttgagccttattggaatctgtgctaatttgaactctgataatgttcagcattcaaatggccaggagttgctatccactcttttgaagaacctagggtctgttgccaaatcactggagccaaaagaactatgtaaactcctggaggcataccaaagcctgcaaaatggatcaaatgctggaacctctggaacagctaatgccacagaagaggctgcagggccatctaactctaagttgcctttcgtgaatggtagtcattgtggacatgcatcatcatctgttgtgccagtacagtcgaaggctaccatagtggtaactccagagcccgcatcatgcaagcttaaggattttgatctgaatgacacttgcaatgatatggaaggctttgaggatggacaagaaggttcacctacacctgcctttaagacagctgactctcctaattgtgcatcatggatgcaacaagattctactcaaagtccaccgcagactagtggcaactcagattcaacatcaacacaatcattgtcaagctcaaatggagacgctcagtgccgaactgataagattgtcttcaagctttttgacaaagttcccagtgatttacccccagttttgcggtcacagattcttggttggttgtcaagtagccctactgatatagagagccatattagacctgggtgtattattctaacaatatatctacggttagttgagtctgcatggcaagagctttctgagaatatgagcctgcacctggataagcttttgagtagctccactgacaacttttgggcatctggcttggtatttgtgatggttcggcgtcgcttagcttttatgctcaatggtcaaattatgttggacagacccctggcacccagttctcatcattactgcaagattttatgtgtcaaacctgttgctgcaccttattctgcaacaataaatttcagagtcgaaggatctaatctactcagtacttcctcaaggctaatttgttcatttgaaggacgttgtatattccaggaagacacagactctgtagcagaaaatgatgagtatgaggatagggccatcgaatgcctcagtttttgttgttccgttcctggtccaagaggaagaggatttatagaggttgaagatagtggttttagcaatggcttcttccccttcataattgctgagaaagacatatgctttgaggtttctgagctggagagcatatttgagtcctccagtatcgaacatgcagatgctaatgataatgccagggaacaagctctggagtttctaaatgagctgggttggcttcttcacagagcgaacagaatgtctaaagagaatgtaactgatacatctgtagctacctttagcatgtggagattcaggaatcttggtgtatttgccatggagcgggagtggtgtgctgtgatcaaaatgctgttagatttcttatttattggccttgtcgatgtgggatcccgatctccagaagaggtggtgctttcagaaaatttgttgcatgctgctgtacggaggaagtctgttaacatggttagatttctgctgagatacagaccaaacaaaaactccaaggggactgcacagacatacttatttagacctgatgctctgggcccgtcaatgattacccccctccatatagcagctgccactagtgatgcagaggatgtgttggatgtgctgaccgatgatcctggactgattggaattagtgcttggagcaatgcacgggacggaacaggttttaccccagaagattatgctcggcagagaggcaatgatgcttacctgaatctggtccaaaagaagattgataagcatcttggcaaaggccgtgttgtcctcggtgttccgagcagtatatgctctgtaataactgatggtgttaagcctggcgatgttagcctcgagatctgcatgccaatgtctgcatcagtgccaggttgcctcctctgcagccgtaaggcacgggtgtatccgaattctacatcgaggaccttcctttacaggccagcgatgttgactgtgatgggagttgctgtggtctgtgtctgcgtgggcatactcctccatacctttcccagggtttatgccgcgcccacattcagatgggagttgctggagcgtggacccatgtaa

SEQ ID NO: 37406 - DNA, 672 bp, Zea mays
  Peptide Sequence Number=SeqID_79185
atggaggccttgtatttcgtcaagagcatgcccgtggagccacaccctggtttatggggcgcactagctagcgcctgcaagatgcatggcaaggttgagcttggtgaggaggttgccaagaagctcattgaactggagcctcgccatggcagccgatacatcctgctgtcaaacttgtatggctctgtgaatagatgggatgacatggcctctgtgcgtaagatcctcaaaaggagcaagggtggtgcagattcactaaaagaagctgcagttcctgccccacggttgatcagctcccaagaactcgagcgaccgacggtggcgctccaccaggaacgagcgacggtggcgctccacagggagctcgcccgcctcgacgccaggtctgtcgcgcgcctgcctgctggggctgggctcggcgggagcggaaccgccgaggaggccgagatggccgccgcgctcatggacgtcgcggccgccagcgccgccgcctccgccgccgtgttctcggccgtcgcgtacgtgtctgccgccgcgtcgtcgtgctcgaacaagaaggccccgacggccttcgtggctgctgccttcgccaagaagccggagacgccgacgacggccgatgtcgcgcaggagaagcacgaggagcttgagcgattatattctttttcctaa

SEQ ID NO: 37407 - DNA, 372 bp, Zea mays
  Peptide Sequence Number=SeqID_79186
atggtggcgctccacagggagctcgcccgcctcgccgccaggtccgtcgcgcgcctgcctgctggggctgggctcggcaggagcggaaccgccgaggaggccgagatggccgccgcgctcatggacgtcgcggccgccagcgccgccgcctccgccgccgtgttctcggccgtcgcgtccgtgtctgccgccgcgtcgtcgtgctcgaacaagaaggccccgacgaccttcgtggctgctgccttcgccaagaagccggagacgccgacgacggccgatgtcgcgcaggagaagcacgaggagcttgagcgatgcatcgacgagtgcgagagcggcagcgaggtggtgttcaggagcattgttcggaaatag

SEQ ID NO: 37408 - DNA, 408 bp, Zea mays
  Peptide Sequence Number=SeqID_79187
atggtggcgctccacagggagctcgcccgcctcgccgccaggtccgtcgcgcgcctgcctgctggggctgggctcggcgggagcggaaccgccgaggaggccgagatggccgccgcgctcatggacgtcgcggccgccagcgccgccgcctccgtcgccgtgttctcggtcgtcgcgtccgtgtctgccgccgcgtcgtcgtgctcgaacaagaaggccctgacggccttcgtggctgctgccttcgccaagaagccggagacgccgacgacggccgatgtcgcgcaggagaagcacgaggagcttgagcgatgcatcgacgagtgcgagagcggcagcgaggtggtgttcaggagcattgttcggaatagggtttcgttgctcaacatccatagtccggcgatctag

SEQ ID NO: 37409 - DNA, 651 bp, Zea mays
  Peptide Sequence Number=SeqID_79188
atgggccgccaggtcgagcaggccggcgaagtgggccacgggcggggctgcggcgcgctgggccgggaagcaggccggggcgcgggggtggctaggtgggccgctggcgccgagtgtgagatgggctgcgggagggagaaggagggggatggatgcttgagaccgatcaatgcaattcttgaggatctcttggacctgtgggttaggacccacacacgcttccgttgcgtcactctgatcttgttggctgacattgatcacattgtcttcattggggagttggagattgccaaatggacaagtgtaagaggaaagaatagcgagaaaagaagaatagggaacgaacaagagcggggagagatatgggataagcatcaaggtaaagatcaagggatgacaaggttaaggcgacgacagacaaacacacaaccaaggatgtattctaaacaggacttgcaaggtgtcaaagaagggggagcagtcaacgatgaaatagatgaggcattatccccgaacagggatggaaatgaggaggcttcaaagggtaggttcaatcgtacccagacaagggaatacaaaaaggcagaggataatgacttaacagcggaacagggagggatctcggaagaccagaagttcatggacatataa

SEQ ID NO: 37410 - DNA, 360 bp, Zea mays
  Peptide Sequence Number=SeqID_79189
atgggtgtcaaagaagggggagcagtcaatgatgaaatagatgaggcattatccccgaacagggatggaaatgacgaggcttcaaagggtaggttcaagggaatggtgatagaaaataaaaatatatcaaaggatggaattgggacagaacctgtaaggcgacaaggagtgaaaagaaatcaagggagagagataggaaaggtcaaggcaacactaaacagaggcacaaccaaggatggagttgaaaaatcgcatgcgacgaagaagaggatacgaccaagggaagagtatgtaaagtacaacacttcgattgagatggaaaaggagatgttaaagggtcgatataagataaacatcaag

SEQ ID NO: 37411 - DNA, 174 bp, Zea mays
  Peptide Sequence Number=SeqID_79190
atgggagaggcagctttaaaatatgggtacatgataagaatcaaggacttgcaaggtgtcaaaggagggggagtagtcaacgatgaaatagatgaggcattatccccgaacagggatggaaatgaggaggcttcaaagggtaggttcaatgtaagcaggaaggcaagggaatag

SEQ ID NO: 37412 - DNA, 330 bp, Zea mays
  Peptide Sequence Number=SeqID_79191
atggaggagaggagctcggctgctgggctgctcgccggccatggagaagcctgctggcggccatggagcaaagagcagggaaggtcgcggccaagggagagcaggggcatcggcgtgctcccagggagctcctgctcctgcggcaagaacagagggaggaggagcgcagagcactgggcagagggagccctgcggccatgggaggctgctggcgaccttggagatcctgcgctggctgctgttgccgccgtgggcagggaggaagaaaggggtcggctggagaagagagaaagggagtggcggctgaaacaattagaggggtgggagtga

SEQ ID NO: 37413 - DNA, 573 bp, Zea mays
  Peptide Sequence Number=SeqID_79192
atgggaggagctcctgccggcaaccccacacacgcagcgaaggcagcgaccaaggggaaggggctcggcacacagggggctggagatgtggcacagggagcgcgtgattcatcacctgagcagggcgttggccatgggcgacggcggctcaccagctcgagctcgaaccagagaagtgccctgcgccatggctggagcagaagggctcgcgtcgggccctggcaggtcgagctcggccagggggaaaaagggtgtccgcgcccatggaggagaggagctcggctgctgggctgctcgtcggccatggagcaaagagcagggaaggtcgcggccaagggagagcaggggcgtcggcgtgctcccagggagctcctgctcctgcggcaagaacagagggaggaggagcgcagagcactgggcagagggagcccggcggccatggggggctgctggcgaccttggagatcctgcgctggctgctgttgccgccgtgggcagggaggaagaaagggatcggctggagaagagagaaagggagtggcggctgaaacaattaggggctcgttcggttag

SEQ ID NO: 37414 - DNA, 168 bp, Zea mays
  Peptide Sequence Number=SeqID_79193
atggcgcagggcacttctctggttcgagctcgagctggtgagctgccgtcgcccatggccaacgccctactcagattagagtgggttaaaaatataaattatgcgacatgttattggtgtttaaagacgaaatgtgcaaagaatcagtttggtgtttcacccgtctag

SEQ ID NO: 37415 - DNA, 405 bp, Zea mays
  Peptide Sequence Number=SeqID_79194
atgggggatttgtggaccaacataagggctgatcttgcaaagatgcaagccacgctccagaaggttgagcaagggctgctgcaaatcaaggcagcagtgcaacatgagcagcaccagctggcattgtccgcacggctccggacgtcggcggttgtgggcatacaagctgctgcatgtggcttccttgcacgacggagagtgcgggagatgcgccggcagatgctcgaggcagccttggtgacggttgacctcggcacacgggggcgcgacctcgccctgtcggacgaccatcagcagtggcaccaggccgctatctccaagtgcgagcatgatggcgtccatgggatccaggtggctgcacacgtgcaagtccaatgcgcgcagggtgtccgccttatggggtaa

SEQ ID NO: 37416 - DNA, 666 bp, Zea mays
  Peptide Sequence Number=SeqID_79195
atgggcagcatcgcctgccaattttgttaccacatcctggacgccggcgtgcccatcccagggataacgccaaatttcatcacatcatcttcgttgacggcgtctccgtcaccatgggcgacgccactaggggcaaccacggctcaacaatcaccagatccatcgatgggggatttgtggaccaacataagggctgatcttgcaaagatgcaagccacgctccagaaggttgagcaagggctgctgcaaatcaaggcagcagtgcaacatgagcagcaccagctggcattgtccgcacggctccggacgtcggcggttgtgggcatacaagctgctgcatgtggcttccttgcacgacggagagtgcgggagatgcgccggcagatgctcgaggcagccttggtgacggttgacctcggcacacgggggcgcgacctcgccctgtcggacgaccatcagcagtggcaccaggccgctatctccaagtgcgagcatgatggcgtccatgggatccaggtggctgcacacgtgcaagtccaatgcgcgcagggtgtccgccttatgggaggcccccggccggtgttcctgcccatcgatacccctcttcaatccctcaccgatctagcgaccataacagtgtacaattcaagagctttacaagcatga

SEQ ID NO: 37417 - DNA, 342 bp, Zea mays
  Peptide Sequence Number=SeqID_79196
atgccgcggatgagacgaccgacggtggtgcactggcttcggggatctccgattcagcgcgcacaagaccccgcaattggttctgggcgtggaatagaggagggagaagggccacaccgcgctttatggtgccagagaactccgagcgtgggggattttgttgcgcggacgacgcggtcttcacggacgttcacatatatgcgtaggagaatcggagctgcgcagggagaagcggaaggtttgttacgcgggcgaggagattccgtcatcatcgcgcagcagaagtgcggcgccgtggagaaggaatcacgtttctgttggagattttgggcattacaataa

SEQ ID NO: 37418 - DNA, 327 bp, Zea mays
  Peptide Sequence Number=SeqID_79197
atgtcgcggatgagacggccgacggtggtgcactggcttcggggatctccgattcagcgcgcacaagaccccgcaattggttctgggcgtggaatagaggagggagaagggccacaccgcgctttatggtgccagagaactccgagcgtgggggattttgttgcgcggacgacgcggtcttcacggacgttcacatatatgcgtaggagaatcggagctacgcagggagaagcggaaggtttgttacgcgggcgaggagattccgtcatcatcgtgcagcagaagtgcggcgccgtggagaaggaatcacgtttctgttggaggtag

SEQ ID NO: 37419 - DNA, 282 bp, Zea mays
  Peptide Sequence Number=SeqID_79198
atgggtcacaccacaccacattatagtcatctcaacggactgaggttgatggttcaaatgagtccaatgactttgagcctggttcacttaacacaacaaaccagctcatatgccaatggctatctttcacaatgcgaccaattcactgcacaggttgagcccattgcttctactgtgccttacatggttgggagtggtagccacaaaagagattggcctggatcaggatctttctatggaaatcttgattcaggtggtgaatgcggaagggcgaatcgttaa

SEQ ID NO: 37420 - DNA, 429 bp, Zea mays
  Peptide Sequence Number=SeqID_79199
atggttcaaatgagtccaatgactttgagcctggttcacttaacacaacaaaccagctcatatgccaatggctatctttcacaatgcgaccaattcactgcacaggttgagcccattgcttctactgtgccttacatggttgggagtggtagccacaaaagagattggcctggatcaggatctttctatggaaatcttgattcaggtggtgaatgcggggtaccagctcagaatatgttctacgtgccagcagaaaaccgtgagcagttctggtactcaacggactacgggatgttccgtttctgcaaacagccatggctcatcttcctcgcgcaccgtgtcctgggttactcgtcagccaccttctacgccgacgaaggaacgaccgaggagcccatgggccacgagtgccttcagccactctggtag

SEQ ID NO: 37421 - DNA, 564 bp, Zea mays
  Peptide Sequence Number=SeqID_79200
atgggtcacaccacaccacattatagtcatctcaacggactgaggttgatggttcaaatgagtccaatgactttgagcctggttcacttaacacaacaaaccagctcatatgccaatggctatctttcacaatgcgaccaattcactgcacaggttgagcccattgcttctactgtgccttacatggttgggagtggtagccacaaaagagattggcctggatcaggatctttctatggaaatcttgattcaggtggtgaatgcggggtaccagctcagaatatgttctacgtgccagcagaaaaccgtgagcagttctggtactcaacggactacgggatgttccgtttctgcgtaagccaataccgagttggactggaggccaggaacagagcagtacagaaacagccatggcttatcttcctcgcgcaccgtgtcctgggttactcgtcagccaccttctacgccgacgaaggaacgaccgaggagcccatggggccacgagtgccttcagccactctggtagaagtacaaggtcgatatcgctatgtacggtttcaataa

SEQ ID NO: 37422 - DNA, 525 bp, Zea mays
  Peptide Sequence Number=SeqID_79201
atgggtcacaccacaccacattatagtcatctcaacggactgaggttgatggttcaaatgagtccaatgactttgagcctggttcacttaacacaacaaaccagctcatatgccaatggctatctttcacaatgcgaccaattcactgcacaggttgagcccattgcttctactgtgccttacatggttgggagtggtagccacaaaagagattggcctggatcaggatctttctatggaaatcttgattcaggtggtgaatgcggggtaccagctcagaatatgttctacgtgccagcagaaaaccgtgagcagttctggtactcaacggactacgggatgttccgtttctgcgtaagccaataccgagttggactggaggccaggaacggagcagtacagaaacaaccatggcttatcttcctcgcgcaccgtgtcctgggttactcgtcagccaccttctacaccgacgaaggaacgactgaggagcccatgggccacgagtgccttcagccactctggtag

SEQ ID NO: 37423 - DNA, 525 bp, Zea mays
  Peptide Sequence Number=SeqID_79202
atgggtcacaccacaccacattatagtcatctcaacggactgaggttgatggttcaaatgagtccaatgactttgagcctggttcacttaacacaacaaaccagctcatatgccaatggctatctttcacaatgcgaccaattcactgcacaggttgagcccattgcttctactgtgctttacatggttgggagtggtagccacaaaagagattggcctggatcaggatctttctatggaaatcttgattcaggtggtgaatgcggggtaccagctcagaatatgttctacgtgccagcagaaaaccgtgagcagttctggtactcaacggactacgggatgttccgtttctgcgtaagccaataccgagttggactggaggccaggaacggagcagtacagaaacaaccatggcttatcttcctcgcgcaccgtgtcctgggttactcgtcagccaccttctacaccgacgaaggaacgactgaggagcccatgggccacgagtgccttcagccactctggtag

SEQ ID NO: 37424 - DNA, 1125 bp, Zea mays
  Peptide Sequence Number=SeqID_79203
atgcaggcacgtgggatgcgagtcgccggggcacgggtgcgggcagggacgcggccgagggcgggcgaccagggcgcggggccgggcacggccgccggggagcgcggcgagggcgcagccgccggggcacggccggggagcaggggcttgcggcgagggcgcacgggcaggggccgagccaccggcgccgggcgcaggcgggcacggggccaggggagggctcgccgggggagggggctcgccggggcagggagcagggtgcggccgaggggcggcgcagggagaggctcgccgggcgtgcggggaggccgccgggggcatggctcgccggggcagggagggcgtgggaagggcgcgggaccggggctggggccgggcgcgaggccgggcgcggggagggtggggcgcggcgcggccgcgagggcttgccagggagccagttatacgacgcctcctcagtacgcggtgcaggtgttcgaggagcaccgggtgccccgctgtagggtgaggatgaccctggaacctcatcccttgcagccaggctggcgttcgttggactccgagtctttcagataccaggctgaagacactatcgaggccattactctccacgggctgacgaccttctgtggttttcaccccttggagctgtctactcatcacattggcttgttccccgctgaaaaggaggacgacccaatgtggaaagaccgagtggagcatgccaaggatatatgggctctttacccagggcagactactcacttgacagtgcgatgcatgaatgccctgtaccgcctgcaagcggtgcgaggagaggcgatgtctcagctaatggccttgctggaggctaccaaggtcaccctagataacagagagaaacttatggtagacctatccactgagatggtggaaaaggacctacaggtagaacagatggccaaccagatccaggagcttaaggagctagtaggagccagggagaacaccattgaggacatggaggccaacgaggatgttgacatcgagggtggagtggagccggagcccgcatctagcctggacactgctggctcagggagacccccttcccccgagtcaagcgttgcctcgtttgttcattaa

SEQ ID NO: 37425 - DNA, 2178 bp, Zea mays
  Peptide Sequence Number=SeqID_79204
cctcgtccccgccccggcgagccgcgccctcccccgcgcgtgctcggccccggcgagcccctcccctccccgcgtccagctcggccccgccccgccgcgcccttcaccggcgagccccgcgccccctcggcctccccgcggccggcgagccctccccggcccctctgcccgcgtcgccccggcgtcctcgcgcccagtgccggcggctcggcccctgcccacgcgccctcgcctcgtcgagcccgccccatcgcgagcccccgctccccggccgtgccccggcggctgcgccctcgtcgcgcgctccggcggccgtgcccggccccgcgcccctgccccggcgactcgcgtcccgtgtgcctcacgggccgcctcgctccgcatgtcgtccccttccatccacgcctctgcccctacacccgctgtgcatgcccctcagtccgcgatccacatgcccctgccagccctcgcgtgccccgccagccaccgtacgcctcctccctgcgcccgctcacggatgtcgtcgcacgcctccactgcgcccgccgtggatctcacccacaacccatcgcccgtcccccatccccgtgtccctgctcccgtccccatcctcccgcagtgcccccgcaccgtgcgcccaccgctaccgccatcaaggctcctactcgcgcgacccacccctgcccgcggggacgcccccgaaacctagctgtcacccgcaccaccacaaaccactacacatggacgacactcgtcgtggacctgcaaagcggcatctgcgaccaccgacaccggggacgggagcacaggcgcaccgacgacatgagagaaaaaacagaaaataagaggaggcgaggcatcgaaattcatgttggaagttctgttgtccagctatatgcaaaggaatcaagcaagatgatgttggaagttctgagaaaaggcccaaggactactgcagaattggaggcacctgtagctgatacatctcttgtgtctgctgatgcacctcgtgtgcttgctgatattgtactggatatatctggtggggagcatgcttttattgaggcagatgaaacaaaggaactgcttagtccacttaccaaaccagggaattcatataaaagaatttgctttagcaacaggagctttggtattggtgctgctaatgttgctggtccaattcttgattcagttaagaatcagctcacaaaggttgacatctcagattttgtggcaggaaggtctgaggatgaagcccttgatgtgatgcgcatattctccaaagcattagaaggttctgtcctgagatatctgaacatctctgacaatgctttgggtgagaaggatgtcagggcattcaatgagctcctgaaatcacaggaatccctggaagaactatatgtgatgaatgatggcatatcagaggaagctgcgaaagctctatatgagcttattcctgcaactgagaagcttaaggttctccacttccacaacaacatgacgagagatgaagtcgaattaaataagcagatctcctgcacgctgccgctgacgaacaagacaaacaagcaggtcacgttcaagttcaagcccaaatacgggcacctgaaagacctccacgacctgatcaggtccatggagaaaatccttgtccatgggaagtacaatgacacaagttatggcaagaatgccattgtgaccctcagcggcggaactcacctcgttccggcatggtccgtcagcatcttgcccgactgcaagactgttgcctacaacactgcaaagatcaagacgcagacatcggtgatggtgaagaaggccaactcggtggagaaggaaccggaggccttgcgatggtcgtggatgcccgagaacctcaagcccttcatgacggaccaccgtgacagcttcagacactcgcaactcttggagcagattacaacatccactgatcagagcgactacttgtggtacaggacaaggtacaagtattggcaaaactactcggccgatggagcgttcgtcttccagctccagtctccggtgaagctccactccggaaagaactacgtttctctcctcagcggcacagtcggactcaagagcgcaaagacattggtcattgttgtggagaatcctgataagttcagagttgttgctttttctgctcacttctag

SEQ ID NO: 37426 - DNA, 1188 bp, Zea mays
  Peptide Sequence Number=SeqID_79205
atgcgcgcgcgtcagatgattgcgcggtcggcgctggacgaggtcacctacacgggcgacttcgaccggtcgccatccaccttccggagctccgtttctagggacgggcggttccccaccgtggcagggcggtaccacctctacgtctcgtacgcgtgcccctgggcatcccggtgcctcgccttcctcaagctcaagggcctcgaccacgccatcggcgtcacggtcatgaagcccatcttcgagcggaccaaggagagcgacgagcatctgggctgggtgttccccgccgtcgccgacgaggagcccggcgccgagcccaaccctctcaacggcgcctggagcgtgagggagctctacgagattgccagctccaactacgccgggaagccaaccatccccgtgctgtgggacaagcagctgaagacggtggtgaacaacgagagctccgagatcatccggatgctcaacgccgagttcaacggcatcgccaggaacccccgggctggacgagttcttatttctgttcctattgtatgtagtggtaggtacatgaacgaaagaacacaggacgatcactatctagatctcaaaggtctcgatcccactctcttgaacactgaagctcctgacttgtacataaggcagaatccggttccaaatgcctacaccttagcaatcaacagcaaaaaaccattcattgtcgttcacacaagccttgtggagttgcttactccaagggaattgcatactgttgtttactctaaacaaactcatcggctggctgttttggctcatgagctgggtcacctcaagtgcgatcatggtgtttggctcacttttgccaatatactcacaatgggagcatacactgtccctggtttcggcatggttactggctttctggaagagcagctatatagatggctacgagctgcagagctgacttgtgacagggcagctcttcttgtggtgcaagacccgaaggtagtcatctctgttctgatgaaattggctggaggatgcccatctcttgccgacaagctaaatgtggatgccttcctggagcaagctcgttcgtacgacaaggctgcatcgaacccagttgggtggtacatccggaacgcacaaaccagagagctttcacaccctttgcctgtgatgcgagccagagagattgatgagtag

SEQ ID NO: 37427 - DNA, 978 bp, Zea mays
  Peptide Sequence Number=SeqID_79206
atgaacgaaagaacacaggacgatcactatctagatctcaaaggtctcgatcccactctcttgaacactgaagctcctgacttgtacataaggcagaatcctgttccaaatgcctacaccttagcaatcaacagcaaaaaaccattcattgtcgttcacacaagccttgtggagctgcttactccaagggaattgcatactattgtttactctaaacaaactcatcggctggttgttttggctcatgagctgggtcacctcaagtgcgatcatggtgtttggctcacttttgccaatatactcacaatgggagcatacactgtccctggtttcggcatggttactggctttctggaagagcagctatatagatggctacgagctgcagagctgacttgtgacaggacaactcttcttgtggtgcaagacccgaaggtagtcatctctgttctgatgaaattggctggaggatgcccatctcttgccgacaagctaaatgtggatgccttcctggagcaagctcgttcgtacgacaaggctgcatcgaacccagttgggtggtacatccggaacgcacaaaccagagagctttcacaccctttgcctgtgatgcgagccagagagattgatgagtggtcaagaagccaggagtacaagaccctaatgcaaaaaatgtttcagatggggctgaacagagtatatctcggttcctcatccctggctgggtttcgtttggatcgtgcagcagcaacatggcaactacgtcatcgcgaggcgaagcatccagttcatctccaccgcgaaaaacactggttcagtattgtctttgccacagggaagaaagttggtaggtctaaggagttgttgaagccagatgaggttatagagcaagtggactctaggacagttgctgcatcaccgcttccttacaatgtaaaactggaggaagtcgaatctttttttgctcagtgtggcaag

SEQ ID NO: 37428 - DNA, 321 bp, Zea mays
  Peptide Sequence Number=SeqID_79207
atggcaactacgtcatcgcgaggcgaagcatccagttcatctccaccgcgaaaaacactgatgaggtcacacctaggtctcgaaggggatgcgaaaccagaaacagtgccagaggagaccgtacttgtagttgtcgacatcttgcgccgttccacagcgctccgcgtattagaggatgggaagaaagttggtaggtctaaggagttgttgaagccagatgaggttatagagcaagtggactctaggacagttgctgcatcaccgcttccttacaatgtaaaactggaggaagtcgaatctttttttgctcagtgtagcaag

SEQ ID NO: 37429 - DNA, 498 bp, Zea mays
  Peptide Sequence Number=SeqID_79208
atgcacccgcaacaaccaggcccgcggatctccgcgctcatcgttccctcgcacacgattgcacagtgggcatccacagtggatacctctcggttcctcatccctggctgggtttcgttcggatcacgtagcatcgtgcagcagcaacatggcaactacgtcatcgcgaggcgaagcatccagttcatctccaccacgaaaaacactgatgtttctttcatagagtttgagaactgccgggagatgcagttcgctgcaatgaagcggggagacctgttggagctctgtcggcagcacggcttcgccacccgcggctccaaatttgtcctcacatgcgcgctcttggaaacttcagatttccttactgtatctgttttgttatatgaaaaaaaattaaaaagaacctctcttgagaatgtgaatggtaccatgcaaggatcatggaacagctatgtgaatgatgatgacagagcacttttgaaggaaaattctttctag

SEQ ID NO: 37430 - DNA, 457 bp, Zea mays
  Peptide Sequence Number=SeqID_79209
atgaagcggagagatctgttggagctctgccggcagcacggcttcgccacccgcggctccaaatttgtcctcacaggcgcgctcttgatggcaaaggaccatcttttcctagccgctgttataactatggaatggatgggcactgggttcgtgattgcaaatctggcgtgggaggagctacttgaggtctgcatctcctcaccatgggaaggttcgaaggagaagctactcaaggtctctatctccttaccttggaaggggccgagggagaagctactcaaggtctccatctcattatcatcggaggggcagaagctggagttacagtcgccaaggaacaactctaaggcttatggtgaagaattgccatcaattagatctggttacagccgcggtcccaggaggagctccccaccgatggagcgagctgaatgcaatggtggtagccccatgagag

SEQ ID NO: 37431 - DNA, 222 bp, Zea mays
  Peptide Sequence Number=SeqID_79210
atggcgggcggaattaagctcgccggagctaaggggaagtggctggccggtgaggaaaccctaggtgacactggggtgtcacaggatgattctcagcaaaaagggcacgaagtgaagaccttcgagtggattattttcaagaatccactcgaagctcgggggctacacccattgggtgcaccttcggcgcacccaatgaatcgtcatttcaagtcaagataa

SEQ ID NO: 37432 - DNA, 726 bp, Zea mays
  Peptide Sequence Number=SeqID_79211
atgctctttgggcaatcacactggccaccgtttgccacctgcagtgctgggccaaagaaccaaatgaacaaggagaaggaccctaagcttaacgatgatgagtgcgtctctcagctgaaattgaaggagatgatgtgtgcgatcactgaagctttcaaaaaaataccaggactctgcggctgtcggtgttttgggtccgaccgcgcacccggggttgcccctcaaggtgctttttggagtaggacgccgactcatcctcgcctagttccgatgtatggggctcctgtgcgggaaggtcgggccacttctgtgattactgcttggatgttgttgggccgtctgggcttgctccgacccggccttgtgctgatctgtctcactgttcgttcctcccaggcccacaagggggatgaccttacgaattatggggcctttgggcctttcgtgaggtcttttatccttctagtggacccgggggatatctgtcccccacaagcccccgatcttaagcctgattttgaaataaacggcccaaagatcccaggtccagcttgcgacaatccactcgaaggtcttcacttcaggtattatcagaaatcactttcatcttccactcgtgttttttcagagaggtcagcattttgcttcttcggggatgatgattcattgggtgcaccgaaggtgcacccaatgggtgtagcccccgagcttcgagtggatttttga

SEQ ID NO: 37433 - DNA, 408 bp, Zea mays
  Peptide Sequence Number=SeqID_79212
atggaggttactgccgctgcttggtgttttggagggtgggctgttgttcttccctgtgccatggaagttgcaaaggggagctcgacggggtgcctgggacagcaggcatgggggagagggctatggctggggaaatggtggctcggccacggcaagaacaaggaaggggaggctggccgtcgaccttgggcgcggccagggaaggtggagctgttgcttggcgccatgtacagcagagagagggaggaagggtgccatggagcaggggaaaatggagaggggctcggccatggagaagcttttgcacggcgtccattgcaggggaggtggagctcgtgcccacggaacaggaaagggcgtaggctaggaggtgctgcgcagggaggaatgagggcaccactggcttga

SEQ ID NO: 37434 - DNA, 423 bp, Zea mays
  Peptide Sequence Number=SeqID_79213
atggcgtgtggcctggcgaggtcagacggcgcagctgcagcagagcacaaggcggagctcgaagcagggcacggtcagggaaagtggagctgctgcctggcgccatgtacaacagagagagggaggaagggcaccatgcgaagcttggcctcggccatggcaaaggagggggaaggaggaaggggagccagctgccctgtgttgaagaggaatagggagggcgccgggcagaggagatgggagcagggagctcggtggccaccatggctaggctgtggagctcgcaggggcgactggcagccatggaagtcgcaggggtgccatgggaggagcttctgcgctgcgtccaaatcagggaaggtggagctcgctcccatgggcgaagaagggcaggggagggagcaggcttgggcgccggattga

SEQ ID NO: 37435 - DNA, 525 bp, Zea mays
  Peptide Sequence Number=SeqID_79214
atggctaggctgtggagctcgcaggggcgactggcagccatggaagtcgcaggggcgccatgggaggagcttctgcgctgcgtccaaatcagggaaggtggagctcgctcccatgggcgaagaagggcaggggagggagcaggcttgggcgccggattgaggaagaagggcttgggcgccatggagaggaagggagtcgagctccctgcgctctgcctgctgcgcgtggggaaaaaaagccagggagagaagaaatggcggctagggaaaatagaggggtgggaatggaaaatttccatggcctgttacaatgggccggatcacgcgtgggcctccatgctggacgaggccgcacggtgggatgacctcgtcacaggtcttcgtccgatgtcgtatggggcgaagggtgtccctgcccgttgtcttgtctccgttggaccaacgaccacggcgaaggcctcgagcgaagggtggcgtcttcgccttcgccccaacatttgccctccgagggaccagttcgactaa

SEQ ID NO: 37436 - DNA, 588 bp, Zea mays
  Peptide Sequence Number=SeqID_79215
atgaaggattgtccctctcacctaaggaccgatttgtcatcactccttacctatactcttatcaagtacaagcactcaagactgtatggacagtctcttgatctgaacttgcacggtccgaaccccgggattatgatggctagggagcaccagggggataaggaaggggaatgttttgtctggtttgggcaaggtggtggtcttgttcctttcgatataatcgctaagcctcttgggactagtaattgtatcacatttgagtcccagaggattggggtgcttcagtcgtgcactatgagatgtctctgtatccctgtagatggcctgagtggggtaggtatgcgcattgaatgcggttgtccctcgacggactttggatgggtcttgcccttcttgcccgaggcaggctcggttgaggcgaacaccgctgttctggggcgaggggacctcgatcaggatggagattctctcaagaacatgccccgttcgagaataggctcgggcgaggcggagtttggggagacccctgaggggtacctcgggcgaggcgtggctcttgatccttcgacctcagggaacgtgccttga

SEQ ID NO: 37437 - DNA, 750 bp, Zea mays
  Peptide Sequence Number=SeqID_79216
atgcagcagtatggatgtgccgcctgccaatggaatagacaggcacgccgcctgcgggatggtctggtcgccgcctgccagcggagtggacagagctcattaaatgctgaggcgttacatcgcctgccagtggaatggacagggctcattaaaataccgaggcggcacatcacctgcgagtggattggacaggcggtgcgccttatccgcaataaatgcaggggccacgcggcccagaggccttacgtcaggctccgtccgttggcttacgtcacgtgcaccatgccacgtggcagcatcggggctccgcctgagcgaggagtagaagcgtatacggtatggtccggacacgcgtcggctccggaccaccgcctagccctgattaaggtctgggtattctttgtcccagaatcccgagaccctgccgtgagtggcctggaccccacgcagaggggtccggaacccatcctaggggtccggtttgcacccgtggaggtcctggaccttacccggaggtccggtacgttccccgaggtcgaaggatcaagagccacgcctcgcctaaggtacccctcaagggtctccacaaactctgcctcgcctaagcctgtccttggacgagatgtgttctcgggagaatcttcgtcccggcctgggtcccctcaccccagaacagtggtctctgtctcgcccaagccctcctcgggcaagggagacaaactcaaggcaagaccatatgaagactgttag

SEQ ID NO: 37438 - DNA, 1905 bp, Zea mays
  Peptide Sequence Number=SeqID_79217
atggtgaccgcctcagggccgacgaacatgggggcgtcagcatctctggcgaggacgatggtgccttccagccaccggaccccgctgcagcggcgcatgaacaaggccgtggacttggtccatgagaactggaagaggatatgggtgctctccctctggggcgtcctcaacatggccctcttcgtattcaagttcacccagtaccggaggcgcgcggtgttcgaggtgatgggctactgcgtatgcatagccaagggcgcggccgagaccctcaagctcaacatggcgctcatactgctgccggtgtgccggaacacgctgacgaggctgcggtccacggcgctcagcaaggtggtgccgttcgacgacaacataaacttccacaaggtcatcgctcttgcaattgccatcggatctgcaacccatacgcttgcacacgtcctctgcgacttccccaggctggtggcgtgccccaaggacaagttcatggagaagctggggcccttcttcaactacgctcaaccgacctgggcgaccctgctgtcgagcatcccggggtggaccgggatcctcctcatcctcataatgtccttctccttcacgctggcgacgcactcgttccggaggagcgtcgtgaagctgccgtcgccgctgcaccacctggcaggcttcaacgccttctggtacgcccaccacctgctggtgatcgcgtatgtgctcctggtcatgcactcctacttcatattcctcaccaagcagtggtacaagagaacgacatggatgtacttggcagtccctgtcgtgttctatgcctctgagagaagcatcagaagaattcgtgagaaaagctaccgcgtgagcatcataaaggcagcaatttacccgggaaacgtgctgtcactctacatgaagaagccaacaagcttcaagtacaaaagtgggatgtacatgtttgtaaaatgcccagacgtttcacctttcgaatggcaccccttctccatcacttcggctccgggagatgactacttgagcgttcatatccgtacgctaggcgactggacatcagaactcaggaatctgtttgggaaggcttgtgaagcagaagttacttctaagaaggctacactagcaagacttgaaacaactgttgtggcacatggtctggcagaggacactaggtttcctaaggtcttcatagatggtccctacggcgcaccggctcaaaactaccgcaaatacgacatccttctgcttattgggctcggcattggtgcgactcctttcatcagcatactcaaggatctcctaaacaacataaagtccaacgaggatgtaatagagatgcacaactacctgaccagcgtgtacgaggaaggcgacgcgaggtcggccctgattgccatggtccagtcacttcaacatgccaaggacggcgtggatatcgtgtcaggcagcaagattcgaacgcattttgcaaggccaaactggagaaaagtgttctctgatctggctaatgcccacaagaactcacgcatagtggccttggtagctttgtggaactgggagctaggcctgggcttgactggaccaagagcagtatgcttggtcagctcaaagaggggcacgtacaaggatactgagcctcgacgtgtgggcccaggggcaaaatggaaggaaataactaatgcctataacgcctgggcgatctccgagcgccataatgttcgtagtccatacagtattgatatgtcgcggttgcttcctcggtacgcgcgagtcatgatgagtgtagtgcatgcgacagtatggatgtgccgcctgccaatggaatggacaggcacgccgcctgcgggatggtctggtcaccgcccgtcagcggagtggacagggctcattaaatgctga

SEQ ID NO: 37439 - DNA, 399 bp, Zea mays
  Peptide Sequence Number=SeqID_79218
atgggatttcatgggtcaagaggctcacccgagtcgtggcagaggaagatgaaggtcacccttcgcttccttcgtcgggttagttatcggtggatatcgcagcttattgcactccttatttatgcagttctactcattcctggtttcataaaagttgggtactactatttcttttcaagacatgttattagaagtgtaatctatggagaacaaccaagaaataggttggatttgtacatacccaaagataatagcaaatcaagttcagtagtggcattcgtaactggtgaagcttggatcattggttacaaggcttggggtgctctctgttgggatcatgcttcgtcgtcgaaggtcctgcaggaagaaacagcttcggctaaagctgtttatacatga

SEQ ID NO: 37440 - DNA, 879 bp, Zea mays
  Peptide Sequence Number=SeqID_79219
atggagaatgtggttagttatcggtggatatcgcagcttattgcactccttatttatgcagttctactcatgcctggtttcataaaagttgggtactactatttcttttcaagacatgttattagaagtgtaatctatggagaacaaccaagaaataggttggatttgtacatacctaaagataatagcaaatcaagttcagtagtggcattcgtaaccggtggagcttggatcattggaaatttccctcaaggaacaataagcgacatggtcagtgatgcttctgaggcgatatcattcatttgtaacaatgttgttagctttggaggggatcctaataaaatctacttgatgggtcaatcagcaggagcacatatcgcggcctgcgctctcttagagcaagcaattaaggaatctaagggagagaatacctattggaattctgacgatgaacgtgaaatgtgtgcaaggactatctaccgcacaaacattgacaagaaggtcactcaagcagatctaaagttattctttgagtccatatgtggtgagctaaaagtttgcagaaatggcaccatcaagatcgatctggagaccaacaagatcatggacttcatcaagtttgacgtcggcaacgtggtcatggtgaccggcgggaggaacaccgggcgtgtaggagtgatcaagaacagggagaagcacaagggcagcttcgagaccatccacgcgaactcaaagcctgaggaggacttcacagtacccgcgaatgaagctcaagccatgacctctatgcgtccgactgaggaaaccaagaggatcaacctcgagttcgctgatgaacgcaagaccgccgtcatcagctccagcctggatgacaaatag

SEQ ID NO: 37441 - DNA, 279 bp, Zea mays
  Peptide Sequence Number=SeqID_79220
atggtgcctgggctagagaagactgacgatgaacgtgaaatgtgtgcaaggactatctaccgcacaaacattgacaagaaggtcactcaagcagatctaaagttattctttgagtccatatgtggtgagctaaaagtttgcagaaatggtaccatcaagatcgatctggagaccaacaagatcatggacttcatcaagtttgacgtcggcaatgtggtcatggtgaccggcgggaggaacaccgggcgtgtaggagtgatcaagaacagggagaagtag

SEQ ID NO: 37442 - DNA, 240 bp, Zea mays
  Peptide Sequence Number=SeqID_79221
atggacttcatcaagtttgacgtcggcaacgtggtcatggtgaccggcgggaggaacaccgggcgtgtaggagtgatcaagaacagggagaagcacaagggcagcttcgagaccatccacgtcgaggactccatgggccaccagttcgccacccgcatgggcaacgtgttcaccatcggcaagggcaacaagccgtgggtgagcctgcccaagggcaatggaaaagataggaaaagatag

SEQ ID NO: 37443 - DNA, 315 bp, Zea mays
  Peptide Sequence Number=SeqID_79222
atgtctgacgatgaacgtgaaatgtgtgcaaggactatctactgcacaaacattgacaagaaggtcactcaagcagatctaaagttattctttgagtccagatgtggtgaggtaaaagtttgcagaaatggcaccatcaagatcgatctggagaccaacaagatcatggacttcatcaagtttgacgtcggcaacatggtcatggtgaccggcgggaggaacaccgggcgtgtaggagtgatcaagaacagggagaagcacaagggcagcttcgagaccatacacgtgctgcttggagctttttgctatgtctaa

SEQ ID NO: 37444 - DNA, 1413 bp, Zea mays
  Peptide Sequence Number=SeqID_79223
atggggcgcttgatgaggtccacgagctgtagctcgaaccgctgcttgccgagccagtcgcggaggccgcgcaccgcggcgtcccgacgcttcgggggaaccctcatgttcggccgcgcaccgaagaagagcgacaacacccggtactacgagatcctaggggtctccaaggacgcgtcacaggatgacctcaagaaggcctaccgcaaggccgccatcaagaaccaccccgacaagggcggcgacccggagaagtttgttttgactcacttggataacaggcagctgctgatcaaatcgaaccctagcaaagttgtgaagcctgattctttcaaggcaatcaacgatgaaggcatgcccatgtatcagaggcccttcatgaagggcaagctgtacatccacttctcggtggagttcccggactcgttgagcccgaagcagtgcaaggccctggaggctgttctcccgcccaagccagtatcacagcacactgacatggagctggacgagtgcgaggagacgatgccctacgacgtgaacatcgaagaggagatgcggaggcggcagcagcagcaccagcaccaggaggcctacgacgaggatgatgatgtgccaggcggtgggcagagggtgcagtgcgcccaacacgattctcgccgacggcagctgcagtgccgcagtggagaaggggaggaactcaggaacatatcgacgttgcgcggggagccgaggcagtgggccacgggcaaggacgatgcgaagattctctccgaggcggaagctcgcgctggcggcggaggagagggtttgctgacggcggacgagggacgcgagttcgcctcgctctacagcatgctgcagtgggcaattgggaactctgatccggataagttgagagaaaaggctgcagaattggtgaaactatcggcagaggaattactcaagagacagatggagattaaggagttgatggagaagttcaaggcgccatcagatgctgagttgataaagattgctattgctgacttaaataattcctctctggaggaccgccaacgtgcactgcaagagctcttaattctcgttgagcccatcgacaatgctaatgtagttgagatgatatcagcagtgcctgaccttgacctccaggagaaggctttgttagctgttaggaatctgctgcaccttacgtcagctgatgctacagatcttcagaagttttcaggcctggatgattccctgaatgcactgaaggtgcaattggatgagttgacatctcatgaggaacaaagagagtatgctccggaaattgaaattctccggagagaagtccacactgtcttccagcggaaaactgaccaggtattgattcataccttcaatggtgctggagtagcagattctcttgtttaa

SEQ ID NO: 37445 - DNA, 426 bp, Zea mays
  Peptide Sequence Number=SeqID_79224
cagaaggagcatcccaagttcaagagaaaggacgatgacctcttctatgagcacacacgaaccttgactgaatctctgtgtggcttccagtttgttctgactcacttggataacaggcagctgctgatcaaatcgaaccctggcgaagttgtgaaccctggcgaagttgtgaagcctgattctttcaaggcaatcaacgatgaaggcatgcccatgtatcagaggcccttcatgaagggcaagctgtacatccacttctcggtggagttcccggactcgttgagcccggagcagtgcaaggccctggaggctgttctcccgcccaagccagtatcacagtacactgacatggagctggacgagtgcgaggagacgatgccctacgacgtgaacatcgaagaggagatgcagaggcggcagcagtag

SEQ ID NO: 37446 - DNA, 1419 bp, Zea mays
  Peptide Sequence Number=SeqID_79225
atgcatgcccgcgccaagtactcccccgccgtactcccccgccgtacacgtacgcggttggatcgccgcaacgcggtgaagcgcgtcgactacgaggcgggcgcgggggcgtccgtgtcggtggccgcgtcgtggtcgttctcgtcctccgtggaccagcagcgttcgacgggcccggggctccagccttcgcgttccctagaccttgcccccggagcggacctccggatcagcgggagcgtagagggggaggtcgacgaactctgccgcagcctggggctctcggggcccgaggatttcgccatccccgtcgcggcctgggaggcgcgcaagtcgcgctctaactccgacctatcggaagggtcccaatctctgattgcttcccaggaggccacaccgcagaagcagcagccggtccaccaaggcagggtgcagctcgccctcgccaaggctgagatcctctgcatccagaagggtcctggtctgccgattgcttcccagcatgacgacgctgtcgagtgcgacatcgacgatgcaactacctccgctggtgtataccattttcgtcaaccaactgataaaccattcaggactgaacacatgaggcgtcttgaatttgccttctggttcaaggtaagcacgccaccgcgacgtagcggtgggaggaggagcaggatagggagaagcaagacccacaagcgctggcttcgacgagagctgggcataaccaatgatgtcacgtcgcttttgcagtctggagcttcgtcgaggtgtgctggttgtcaaggttctggcttcaaggtccaaatccggcagttgggacatggaatgattcagcaaatgcaacatccttgcaatgagtgcaagggttctggagagaccatcagcgataaggatagatgcccacaatgcaaaggtgttaaagttgtgccagagaagaaagttcttgaagtgcctgatactgccactggagatatcatctttgttctccagcagaaggagcatcccaagttcaagagaaagggcgatgacctcttctatgagcacacactgaccttgactgaatctctgtgtggcttccagtttgttctgactcacttggataacaggcagctgctgatcaaatcgaaccctggcgaagttgtgaaccctggcgaagttgtgaagcctgattctttcaaggcaatcaacgatgaaggcatgcccatgtatcagaggcccttcatgaagggcaagctgtacatccacttctcggtggagttcccggactcgttgagcctggagcagtgcaaggccctggaggctgttctcccgcccaagccagtatcacagtacactgacatggagctggacgagtgcgaggagacgatgccctacgacgtgaacatcgaagaggagatgcagaggcggcagcagtag

SEQ ID NO: 37447 - DNA, 153 bp, Zea mays
  Peptide Sequence Number=SeqID_79226
atggcgcgcaggaagctggggcaggggcagggccgagtgccgtcctgggcgaggagccgggataccgcgacagacgaggacgccatggcagctcgtcagggaacgagaggaacagagaagagagagagcacggcaggaacgtacgagagataa

SEQ ID NO: 37448 - DNA, 594 bp, Zea mays
  Peptide Sequence Number=SeqID_79227
atggcgagctcgcgcgcgcaggaagcaagaaacaaccgcgcgaccaacagaggagccaggggcgcgcgagatccggaaatccagggtgctgggcgtgcgcaaggagacacgcgcgcgcaggaaaattcacggcgcggcgatcagggagctcgaccgggcgagcagcagggagcaaggcgagctagagacggccgagccaggcgcgcggcgctgggcagtttggcgcagcgagctgagcagggagatgaaaagcggctgcgcgcaggactgaatccgagcagggaagcaggcgcgcgtgggggcaagaaccagggcgcacggcacatgggagctccggccatggagatgaggagagagaggaacgccgaccagggtagaggatgtgctgggggaagaaccgctcagctgccacggctacgagcgagcagggaagttggggtaggggcagggccgagtgccgtcctgggcgaggagccaggataccgcgacagacgtggacgccatggcagctcgtcagggaacgagaggaacattgaagagagagagcacggcagggtatttgaagagtcccagggcggcgccgtgaggagataa

SEQ ID NO: 37449 - DNA, 570 bp, Zea mays
  Peptide Sequence Number=SeqID_79228
atggcgagctcgcgcgcgcaggaagcaagaaacaaccgcgcgaccaacagaggagccaggggcgcgcgagatccggaaatccagggtgctgggcgtgcgcaaggagacacgcgcgcgcaggaaaattcacggcgcggcgatcagggagctcgaccgggcgagcagcagggagcaaggcgagctagagacggccgagccaggcgcgcggcgctgggcagtttggcgcagcgagctgagcagggagatgaaaagcggctgcgcgcaggactgaatccgagcagggaagcaggcgcgcgtgggggcaagaaccagggcgcacggcacatgggagctccggccatggagatgaggagagagaggaacgccgaccagggtagaggatgtgctgggggaagaaccgctcagctgccacggctacgagcgagcagggtgagggggaggagcacgacaccagggagaatctcggcgagcagagaagagcagagggagctcggcgagcatggcaagggcccgcggccaagggaagatgagcaggggcgagccggagaccaacacggcgcgcggccatag

SEQ ID NO: 37450 - DNA, 387 bp, Zea mays
  Peptide Sequence Number=SeqID_79229
atgggtcccacacgtcatgcaagctggcccgggacagaagaagccaaaccgccgcgcgcggagcgtataaccgcccagcggttacaagcacacctccatcttcgcctaaaccagcgggtgaaagggcggaccgccatgaaggtggcatgcaactgcaccacggagacgcaccctttcgacttcgacgcatccagcatggaggaccaggcccacacgtcatcagggagccctctcccatggcgtgaagacgacgcgcccgtgttccgtccctcgaacggctcgcgcaacggctgccccgcgaaccacccgtcccgtcgcattaacttcgcggcagggcaggcgacacctttggcaggtgaagcgggcgacgtttcacctccaccatga

SEQ ID NO: 37451 - DNA, 825 bp, Zea mays
  Peptide Sequence Number=SeqID_79230
atgggtcccacacgtcatgcaagctggcccgggacagaagaagccaaaccgccgcgcgcggagcgtataaccgcccagcggttacaagcacacctccatcttcgcctaaaccagcgggtgaaagggcggaccgccatgaaggtggcatgcaactgcaccacggagacgcaccctttcgacttcgacgcatccagcatggaggaccaggcccacacgtcatgtaaccggcgcgccggttactatgtgcgaaaaactgcaccgccacttacgctaatgtcgcgccttctcgattgcggaaccaatgccgcgactcaaggcaaccctgcgcatggcccaacagtgccaaccaagcgcattggtcaagggtcagtcagccgcgggagaaggcacgacggtcgatatggccaaaagtgggccggcagtaatggcggcagcaggcgggcggaagcagcagtcaaatcgtctgcaagctcacgtcccctcctggagcagcagggagccctctcccatggcgtgaagacgacgcgcccgtgttccgtccctcgaacggctcgcgcaacggctgccccgcgaaccacccgtcccgtcgcattaacttcgcggcagggcaggcgacacctttggcaggtgaagcgggcgacgtttcacctccaccatgatgaccgtgtcaaaaaagggaccaggaaaggggataatccaaaagggatccttctccgcgaaggaagcgggccccgagccctcctactgatcaggggtttgaaggctggcccctcggaagggtttgacagccgccccagagcactcgggcttcaggctcattactga

SEQ ID NO: 37452 - DNA, 438 bp, Zea mays
  Peptide Sequence Number=SeqID_79231
atgcaggcggcgtgcaaccgcaccatagagacgcaccccttcaacttcgatgcatccagcgtggaggcccagacccacacggcaggcgacacctttggcaggcgaagcgggcgacgtttcacctccgccatgatgaccgtgtcaaaaaagcgggccccgagccctcctactgatcagaggttcaaaggatggcccctcggaagggttcgacagccgcctcagagcactcgggctccacgcccactactgatcaggggttcgaaggctggcccctcggaagggttcaacagccgcctcagagcacgcagagcgagggatgactctgggtacgtccgatacatggccgaggctcgggctacgctctcgagaggctcgggggctgctctcgcaaacccggcttcggccaaaccgttgacagcgtcaacaaaccagccctag

SEQ ID NO: 37453 - DNA, 255 bp, Zea mays
  Peptide Sequence Number=SeqID_79232
atgggatccacttttagtaagcatttctacaaaacagagtctttgattattgaaaagccttaccttgactcccttaaccagcatacccttgagagtcttttctttagtcgggtgaggaagcgacaaatttttgttgcttctgctccaaggtggttcccaaggaagaaaaacaagagtgaagccgcgggaggacttggtcctccatatagaacttttgtgaaagaacttatcgggaggagtttttacctcccttga

SEQ ID NO: 37454 - DNA, 189 bp, Zea mays
  Peptide Sequence Number=SeqID_79233
atggtgtctttgattattgaaaagccttaccttgactcccttaaccagcatacccttgagagtcttttctgtagtcgggtgaggaagcgacaaatttttgttgcttctgctccaaggtggttcccaaggaagaaaaacaagagtgaagctgcgggaggacttggtcctccatatagaacttttgtttaa

SEQ ID NO: 37455 - DNA, 255 bp, Zea mays
  Peptide Sequence Number=SeqID_79234
atgaacggttttgttaagaaattggctagtgcaggacaagtgattgaactagggatccactttagtaagcatttcttcaaaacagagtctttgattattgaaaagccttaccttgactcccttaaccagcatacccttgagagtcttttctttagtcgggtgaggaagcgacaaatttttgttgcttttgctccaaggtggttccaaaggaagaaacacaagagtgaagctgcgggaggacatggtcctccataa

SEQ ID NO: 37456 - DNA, 321 bp, Zea mays
  Peptide Sequence Number=SeqID_79235
atgaccgaggaccctttagctggtcacatgcctcgtcatgggatccactttagtaagcatttcgacaaaacagagtctttgattattgagaagccttaccttgactcccttaaccagcatacccttgagagtcttttctttagtcgggtgaggaagcgacaaacttttgttgcttctgctccaaggtggttcccaaggaagaaaaacaagagtgaagccgcgggaggacttggtcctccatatagaacttttatgaaagaacttatcgggaggagtttttacctcccttggtattgtaataatattactctgcactcctag

SEQ ID NO: 37457 - DNA, 321 bp, Zea mays
  Peptide Sequence Number=SeqID_79236
atgaccgaggaccctttagctggtcacatgcctcgtcatgggatccactttagtaagcatttctgcaaaacagagtctttgattattgaaaagccttaccttgactcccttaaccagcatacccttgagagtcttttctttagtcgggtgaggaagcgacaaatttttgttgcttttgctccaaggtggttcccaaggaagaaaaacaagagtgaagccgcgggaggacttggtcctccatatagaacttttgtgaaagaacttatcgggaggagtttttacctcccttggtattgtaataatattactctgcactcctag

SEQ ID NO: 37458 - DNA, 1047 bp, Zea mays
  Peptide Sequence Number=SeqID_79237
atggagccagccgtattgaaccgtgaaagagttgcattggacaagaaaaacaggatgcctatcttcaagttgttcgacgactatagcgatgaagatttttatggggtacaacggaagtatagtattgtcgctcgagttgaagttaaattcccgattgaaccacgttatcgtgacaggcaacattacattctgtctgacatcaatggagccaagatcgaggccattgcaactcggtatgagatagtcaaatacttcaacagtttgctccatgaaaagcatgtctacaagatgcacaatgtatggtttggtcttaatccgggtgcatttaattttcgacatctaaatggtaccatggagttgtatttcacccaacaaactctcgtagagccatacgttgtcccagttcaaatgccgccatttccaaaacatatattcttgaaccttgatgatattgccgagctgccaaacaggactttagttgacattatggctattgtagtccacttggatacaatccatcgcacaatgtggggtacattcaggaagattgttataatggatgctaggtggtctttacataccattaaagtttggggcgatttactaaacaaaaatgcactccactgggcgttggctaatgagaattatagcatcataattgggaccatgtttcggcggttcagaaaacaagatcagatgggacataatgccggtcgcaaaccattcacagacatctctagcaatatcattagaggtgatcaaaatgaattgctcggaccaatgctcgatgctaaggagcgtaagagaaaaagggatagggaaagatatgcagcgatgtccgttgaacaaaaaaacgagaagaataggaagcgtcgtgaaacacgtcaacgaaacaagggacacaatgtgatacccaatgtgtcaggagcagcctccatcgtcaaggaggctcgacatgaggtcttaatgtcttaccagcagagagctgaggctctggagggattgcttgagttcagtgcccagttgctgccacaggagagattttaa

SEQ ID NO: 37459 - DNA, 1605 bp, Zea mays
  Peptide Sequence Number=SeqID_79238
atgggacataatgtcggtcgcaaaccattcacagacatctctagcaatatcattagaggtgatcaaaatgaattgctcggaccaatgctcgatgctaaggagcgtaagcgaaaaagggatagggaaagatatgcagcgatgtccgttgaacaaaaaaacgagaagaataggaagcgtcgtgaagcacgtcaacgaaacaagggacacaatgtgatacccaatgtgtcaggaggtgaccaaaatgaacagcttaggttgtacaatcagacaccaaggtggaaagagggaaagttagagtacataagaaaacgtagagcactgcaagctagcactttgaatcaggggtccatcgccatggaggtcccaacatatacctctgaggttctacactctacagcagatgtattggaacctgattcatcctctgataacgcatgcgactgggttatccctgaatacaccagtacacctttcatgccagcttcaacacaaactgaggatgtcggttcacccgatatgtctactgagccactcaaacgtaaacatcatgttcggcctggtgaaagacaagctatcttagcccgtcaaaacaagaaatttgaagcaaacattgcacgtaacgtggctactttgactgaggatactattagtgacgtcggacaaatggatgattcgacacaacccggttcaactatagagatcaacaacactgttgatgacgatgatgagggtgtcatattcggagaggataatgatgagaacgagggatatatattcgctgatgaggacactaacgaggacttcgagatagatggtactcaagatcaatctgttgtcactgatgtgcctgacccgtacgacaaggtctacagtaacatccctgaagaaacacatatgttgaagcacgttcccgactgtggttattgcactgcgaagaagtttgagtatgagccgcctgggttttgctgtcgaggtgggaaggttgagctagccccactagagacccctccccagctcaggaggttgtgggatagtgcagactctgatgctaggcactttcgtgataacatcagtatgacaactaatatgagggattctggtatatacacattccgtgcacaaggcatgatgtaccataatatcaagtcattcggtagtgaatgtggggcagagcataaacacctagagctttacttttacgatgatgatcccagtctcgagcatcgattccgtaagtgtcgtgaagatcagattcagaaagaccaagaggttattaaacagatagttggcatacttcgtggaaatccgtactctgagcaccttaggagcatgggtcatgttgagaaccttgctgactatcacatcgcattgaaccttgaccaaacgttgaaccagaagacttataacacacctctcacttcggaggtggccgctgtctggatcgaggggagcgaacggcgaggccagttcagcaagagtgttatgctacatgggaaggataggtcaagccatggcatccgctcataccatggatgctacgatgcgctatcatatccactgttcttccctagaggtgaacttggatggcatgcaaatatcccaaag

SEQ ID NO: 37460 - DNA, 1251 bp, Zea mays
  Peptide Sequence Number=SeqID_79239
atggaggtcccaacatatacctctgaggttctacactctacagcagatgtattggaacctgattcatcctctgataacgcatgcgactgggttatccctgaatacaccagtacacctttcatgccagcttcaacacaaactgaggatgtcggttcacccgatatgtctactgagccactcaaacgtaaacatcatgttcggcctggtgaaagacaagctatcttagcccgtcaaaacaagaaatttgaagcaaacattgcacgtaacgtggctactttgactgaggatactattagtgacgtcggacaaatggatgattcgacacaacccggttcaactatagagatcaacaacactgttgatgacgatgatgagggtgtcatattcggagaggataatgatgagaacgagggatatatattcgctgatgaggacactaacgaggacttcgagatagatggtactcaagatcaatctgttgtcactgatgtgcctgacccgtacgacaaggtctacagtaacatccctgaagaaacacatatgttgaagcacgttcccgactgtggttattgcactgcgaagaagtttgagtatgagccgcctgggttttgctgtcgaggtgggaaggttgagctagccccactagagacccctccccagctcaggaggttgtgggatagtgcagactctgatgctaggcactttcgtgataacatcagtatgacaactaatatgagggattctggtatatacacattccgtgcacaaggcatgatgtaccataatatcaagtcattcggtagtgaatgtggggcagagcataaacacctagagctttacttttacgatgatgatcccagtctcgagcatcgattccgtaagtgtcgtgaagatcagattcagaaagaccaagaggttattaaacagatagttggcatacttcgtggaaatccgtactctgagcaccttaggagcatgggtcatgttgagaaccttgctgactatcacatcgcattgaaccttgaccaaacgttgaaccagaagacttataacacacctctcacttcggaggtggccgctgtctggatcgaggggagcgaacggcgaggccagttcagcaagagtgttatgctacatgggaaggataggtcaagccatggcatccgctcataccatggatgctacgatgcgctatcatatccactgttcttccctagaggtgaacttggatggcatgcaaatatcccaaag

SEQ ID NO: 37461 - DNA, 348 bp, Zea mays
  Peptide Sequence Number=SeqID_79240
atggccgagtttgaaaatttggaagctcagggttggccaacaaagcatctagagttcttatctgttgagaagtacttttcactcttgtggcatgaacatgacaatgtcaatgattttgagcaatcacacttaaaagctccagaatttgaacttgccgttgagtctttgctatacgctcttgttaccgaagtaaggcttgaagagaaaacgaaagctccggctgacacagaagctgctcctgaggacatcgatgacgttatcgagcttcctgatgtgcctacgaaagtgccagagaggcctgaagctccagaaaaaaacaaagttttggaggagccgctacctgcataa

SEQ ID NO: 37462 - DNA, 306 bp, Zea mays
  Peptide Sequence Number=SeqID_79241
atgtcgctgtgtgtatgcagagaagcatttttgttaaatactcagtggcatgaacatgacaatgtcaatgattttgagcaatcacacttaaaagctccagaatttgaacttgccgttgagtctttgccatacgctcctgttaccgaagtaaggcttgaagagaaaacgaaagctccggctgacacagaagctgctcctgaggacatcaatgacgttatcgagcttcctgatgtgcctacgaaagtgccagagaggcctgaagctccagaaaaaaacaaagttttggaggagccgctacctgcataa

SEQ ID NO: 37463 - DNA, 624 bp, Zea mays
  Peptide Sequence Number=SeqID_79242
atgtcgctgtgtgtatgcagagaagcatttttgttaaatactcagtggcatgaacatgacaatgtcaatgattttgagcaatcacacttaaaagctccagaatttgaacttgccgttgagtctttgccatacgctcctgttaccgaagtaaggcttgaagagaaaacgaaagctccggctgacacagaagctgctcctgaggacatcaatgacgttatcgagcttcctgatgtgcctacgaaagtgccagagaggcctgaagctccagaaaaaaacaaaggtcacttcgtaattctccaggcagcatcctcgacgttcttcatgaaacaggcggcgaccctggaccggcggatcgggcgacacttccaggtgccacctgttgcgctgcatagcttcatcagcatcacaatcatggtcatcatccctatctacgaccgcgtcctcgtgccggtgtcgcgccggtactccggcaaaccatcagggatcaccatgctgcagcgcatcggcacggggatgttcctctcgttcttgtccatggtgatcgcggcgctcgtcgagaatcggagttgtgatctggaggccgccacatggaggctctacccttcctacgggagagccatttga

SEQ ID NO: 37464 - DNA, 408 bp, Zea mays
  Peptide Sequence Number=SeqID_79243
atggctagggaaccactacgaggcctttacaaagttccactagcttccgaaaacccgctacagtttataggaagatccagtacagggttcctggctgacagccatcgcagcaaaatcaaccagggacctccccgcactgacctctcccctactgcccttgcccctttcggagaagtcgggggcccaggcgtaaatgtaaccgagactcataacactgcagaggcggacggcgggttaaatcctgctttcctcggggactctttaacaaaagtacccgcgaaggggtatcagacgaccctggccgtccgatcgcaagtcaagggccgagatcagatccgcccaagatcgaaacggtatgcaccaggagccgcaggattaaaaaccaatgaccaggatttaaaaacctag

SEQ ID NO: 37465 - DNA, 300 bp, Zea mays
  Peptide Sequence Number=SeqID_79244
atggctagggatccactacgaggcctttacaaagttccactagcttccgaaaacccgctacagtttataggaagatccagtacagggttcctggctgacagccatcgcagcaaaatcaaccagggacctccccacactgacctctcccctactgcccttgcccctttcggaaaagtcaggggcttctacgcaaaagtactcagactcagaacactccccactggacggcgggttgatatcctgaaagcagaggggctctttagcaatgttgacccgcgaaggggtatgggcaaaaactga

SEQ ID NO: 37466 - DNA, 822 bp, Zea mays
  Peptide Sequence Number=SeqID_79245
atggctagggatccactacgaggcctttacaaagttccactagcttccgaaaacccgctacagtttataggaagatccagtacagggttcctggctgacagccatcgcagcaaaatcaaccagggacctccccgcactgacctctcccctactgcccttgcccctttcaggctctggactgggcctcgatttccagaaaactcaggggtctctgcgcaagaggtacgagacccagtgcacagtcagataggatggcgggttgatttcagtgttttccaggggctgttatgcaaagtgtcgcggccgaaggggtatcttcggatcctggccgatggatctaggttggatggctcagatttaaataaacgaagggagaagcccgcgatcaccaccggggctacgtcgcacgcactccgacccaactccgaggcgcgcgcacccacacacttgccggacgatgacggcggccaaacccgagcccgtggcggcggtagcagcggcggtttttcaacggactgcgggcgcgagggagggcgagaagttagcaggggaaggatgggtcacggaggctcccttttatctccgggagtccaggtccaagcggaggggaaggtcgcccatgaccccggcaatggcggcgatttccgcgccagccgttgcgaaggacggggagaaggtgctgacatgcgggtcccgcgcaccagagggatccacggtaaacacgcacacataggagactgccagtgggccccatccgtcagatggctgcgtgcgcgcggaactgagaaaaggggctggaaagtggggcccaggcgccattga

SEQ ID NO: 37467 - DNA, 318 bp, Zea mays
  Peptide Sequence Number=SeqID_79246
atggcgcgacggcggcccaggtcgacggtggcggacctccgcagctgcacggaggacggcggtgggggtgctagcatagactcactccgaatggtgaatcactcagactcgaacgtggggttgagacagagggtccagtgtagtgacgactgtagtattgcttgggaacatgttacaactggtgcatgtgttggaaggagtgtaatgcccaacttttggaatggcgagaggctccaacttgtgaagattcctcgcaaacgggaaaatgatataaggaagaaaagtcgtggtattcaagttgatcattggatcacttga

SEQ ID NO: 37468 - DNA, 267 bp, Zea mays
  Peptide Sequence Number=SeqID_79247
atggcgcgacggcggcccggggcgacggtggcggacctccgcggctgcacggaggacggcgggtcttcgtccggcgacgtgtgggacaaaggcgaggtcggcgaaggcatcgagcgaagggtggcgtcttcgccttcgccccaacatttgccctccgagggaccagttcgactaagtcatctagtgccgaagacgtcgctagatggtggagacgctgccctcgctcgaagtggttccgcgggggtttttgacatgaccgttgattga

SEQ ID NO: 37469 - DNA, 552 bp, Zea mays
  Peptide Sequence Number=SeqID_79248
atggcaatagaaaacccttatattaaagagataatcgatgatgatgcggacagacctaaagaggtttgctcaacttttgctctgaatttattagtaggttgtcttcgatacagatggaaggaaacagtgggcgatgaaagcagggaatttgggaggtacatgcgacagagagaagagcaagagaagcaggaagcggagttgttcactcgggctcctgtaaccaaacatgataagcagatcgagaagcgcataaggagacaacttcatggcctccgagttgttatcatgcggcgaacagctacctaccaatcccatcccaccttgattggaaatcacagatgtatggtacatcagtcttgtggtccgccacatttctcgctggagacctcaggcgctccgttgtcgtacctcagccagcctcaccatggaagccctcttggctgcatggacaaccagagttgtatgcacccacttgacacggcgttttgcctggcgataaatccgcagtatcatttcctcaacggtgttagcgatgcatcgtctcagttgtag

SEQ ID NO: 37470 - DNA, 513 bp, Zea mays
  Peptide Sequence Number=SeqID_79249
atggccaggtccccaatgctcagtgctaggacgcctgccttgacttcatggaatattatagctatgttccctccaacactggaaaatgagccgctaatgtggaaaactaggagattaccaatgctagaatctgtatggattctatcagctgttcgcctactgatgcttatgtgccaatttagtgagactggagtcatacactccatacaaatctatacaaaatcaaatccctacaatgacaagttgaggtatggatcgaggggccctagctcacattttgttcctgtttgtgatcaggtacatcagtcttgtggtccgccacatttctcgctggagacctcagacgcttcgttgtcgtacctcagccagcctcaccatggaagccctcttggctgcatggacaaccagagttgtatgcatccacttgacacgacgttttgcctggcgataaatccgcagtatcatttcctcaacggtgttagcgatgcatcgtctcagttgcagctaatttga

SEQ ID NO: 37471 - DNA, 192 bp, Zea mays
  Peptide Sequence Number=SeqID_79250
atggaagccctcttggctgcatggacaaccagagttatgcacccacttgacatggcgttttgcctcgcgataaatccgcagtatcatttcctcaacggtgttagcgatgcatcgtctcaggaggagcgggcgttcacgaggccgctcggcgctccgcctcgcctcgcccttttgaaggactccgctttctaa

SEQ ID NO: 37472 - DNA, 2040 bp, Zea mays
  Peptide Sequence Number=SeqID_79251
ggcgttacaatcaaagctgttaaatacctgttcaagtacatatacaaaggccatgatcgtgcgtctgttgttatgagagatgcgagcaaggaatacgatgatgttgatgagatcaagcagtatagagatgcaaggtgggtgactccgccagaagccttgtggaggatatacggctttgagcttagccagatatctccacctgtgatgcagctgcaactccatcttccaaacatgcacatggcgaatagtcttcacgaggaggctcgtggcatcctatatcgtgacttccctgagtggtacacttggcagagtggtaagggtaaagtatggcaacggaggaaacgagatacaggtggacaagtcggtaggatagtctctgctcatccggctgagggggagcgctactatcttcgtgttctcctaaaccacgtgactggtgccacctcctatgtgggtctaaggacggttgatggtgtcaccctaccgacttttcgtgaggcagcagagagaaggggactgcttgagtcggacaacacactggatgagtgtctcactgaacgtgctcttttccagatgccatcggcgctgcgacggctttttgccacaatactggtgtactgtgagccaagcgatgtggctgtactctggcagaaacacaaagattctatgtccgaggactaccaacacaggagtcagaacaaaactcatgttgagcagatggtattgattgacattaggaacatgctgcagtcaatgggaaaggacataaatacattccctctacctcctatcatcaacgcgtatgacgatgctattggtactgctagggaggtttacgaggaggaaagtatccaaccgacagcgggagatgtggctcttaaagactctcttaacgaggaacagaggactgcctatgataagattatgtctgccattgacaccgatcagggcggattgttctttgtggatggacctggtggcaccggtaagacttatctatacagagtgctgctcgcgacgctacgcaaccagggcaagattgcagtggcaacagctacatctggcgttgcggcttccataatgcctggaggaagaaccgcccattcacgcttcaagataccactcactattgacgatggcgctgtatgtagcttcacgaagcagagtggaacagcagagttgctacggaaagcagctctcattatctgggacgaggcttctatgactaagagacaagccgtggaggcactggacaatagcatgcgcgatataatgggtcgccccacactaccatttggtggcggtggaactgaggacacaaatagtgacggcgacattcgtcttcctgacgatgtgtgtgtgccttacagtgggagtgacagcgatcttgacaacctaatagacttcgctttcccaaatctcaacgaaaatatgtctgattccacctacatcacttcaagggcgatactgtcaacacgtaacgactgggtggatatgataaatgttaagatgattgatcgttttcaaggggagcatatggtgtaccatagtttcgatagcgccacggatgatccccataactactacccacctgagttcctaaacacattgacgcctaatgggctgccacctcatgttttgaagctcaagattggatgtcctgttatattgctccggaatatagaccctgcaaatggactttgcaatggcaccaggctggtcgttcgtggcttccaaagaaatagcattgacgcagagattgtactgggtcaacatgttggaaaacggattttcctaccgcgtataccgttgtgtccctccgatgaagagatgttccctttccagttcaaaagaaagcagtttcctgtacgacttagctttgcaatgacggttaacaaagcacagggtcagactattcccaatgttggtgtatacttgcctgaaccagtgttctcccatgacgtgggacgcagcccatgtaaaattacatttatgcccactacatttgctaatgacttatggggatctgtcaaggcctaa

SEQ ID NO: 37473 - DNA, 1731 bp, Zea mays
  Peptide Sequence Number=SeqID_79252
agtggtaagggtaaagtatggcaacggaggaaacgagatacaggtggacaagtcggtaggatagtctctgctcatccggctgagggggagcgctactatcttcgtgttctcctaaaccacgtgactggtgccacctcctatgtgggtctaaggacggttgatggtgtcaccctaccgacttttcgtgaggcagcagagagaaggggactgcttgagtcggacaacacactggatgagtgtctcactgaacgtgctcttttccagatgccatcggcgctgcgacggctttttgccacaatactggtgtactgtgagccaagcgatgtggctgtactctggcagaaacacaaagattctatgtccgaggactaccaacacaggagtcagaacaaaactcatgttgagcagatggtattgattgacattaggaacatgctgcagtcaatgggaaaggacataaatacattccctctacctcctatcatcaacgcgtatgacgatgctattggtactgctagggaggtttacgaggaggaaagtatccaaccgacagcgggagatgtggctcttaaagactctcttaacgaggaacagaggactgcctatgataagattatgtctgccattgacaccgatcagggcggattgttctttgtggatggacctggtggcaccggtaagacttatctatacagagtgctgctcgcgacgctacgcaaccagggcaagattgcagtggcaacagctacatctggcgttgcggcttccataatgcctggaggaagaaccgcccattcacgcttcaagataccactcactattgacgatggcgctgtatgtagcttcacgaagcagagtggaacagcagagttgctacggaaagcagctctcattatctgggacgaggcttctatgactaagagacaagccgtggaggcactggacaatagcatgcgcgatataatgggtcgccccacactaccatttggtggcggtggaactgaggacacaaatagtgacggcgacattcgtcttcctgacgatgtgtgtgtgccttacagtgggagtgacagcgatcttgacaacctaatagacttcgctttcccaaatctcaacgaaaatatgtctgattccacctacatcacttcaagggcgatactgtcaacacgtaacgactgggtggatatgataaatgttaagatgattgatcgttttcaaggggagcatatggtgtaccatagtttcgatagcgccacggatgatccccataactactacccacctgagttcctaaacacattgacgcctaatgggctgccacctcatgttttgaagctcaagattggatgtcctgttatattgctccggaatatagaccctgcaaatggactttgcaatggcaccaggctggtcgttcgtggcttccaaagaaatagcattgacgcagagattgtactgggtcaacatgttggaaaacggattttcctaccgcgtataccgttgtgtccctccgatgaagagatgttccctttccagttcaaaagaaagcagtttcctgtacgacttagctttgcaatgacggttaacaaagcacagggtcagactattcccaatgttggtgtatacttgcctgaaccagtgttctcccatgacgtgggacgcagcccatgtaaaattacatttatgcccactacatttgctaatgacttatggggatctgtcaaggcctaa

SEQ ID NO: 37474 - DNA, 570 bp, Zea mays
  Peptide Sequence Number=SeqID_79253
atggatgatccccataactactacccacatgagttcctaaacacattgacgcctaatgggctgccacctcatgttttgaagctcaagattggatgtcctgttatattgctccggaatatagaccctgcaaatggactttgcaatggcaccaggctggtcgttcgtggcttccaaagaaatagcattgacgcagagattgtactgggtcaacacgttggaaaacggattttcctaccgcgtataccgttgtgtccctcggatgaagagatgttccctttccagttcaaaagaaagcagtttcctgtacgacttagctttgcaatgacggttaacaaagcacagggtcagactattcccaatgttggtgtatacttgcctgaaccagtgttctctcatggccaactatatgttgctctatctagagcgacagcccgatcgaacataaagattcttgtcatgccagccatcgatgggaggaaaaagtcaaggaagggagtaaagaaaaaccccaccgtagattgtgggacatataccaagaacatcgtctacaaggaggtcctaacaaactag

SEQ ID NO: 37475 - DNA, 210 bp, Zea mays
  Peptide Sequence Number=SeqID_79254
atgtcgtccccgtgctccgcggcggccaaatggctgcttcattgtgggggaattgctcctactctgatctccaccgtcctcgctccttcggctactccgccgcccgacactgtccacgtcggagtccatgttcggcgtctccacttctacctcctgatccgctacgcgtttcaccttggcagatgtcaaagaactggtataattaggtga

SEQ ID NO: 37476 - DNA, 414 bp, Zea mays
  Peptide Sequence Number=SeqID_79255
atgggcgcaggcgcagcactatcgcgagcgggtggcacgtgccacgagcgcgagcaggaggagaccgtagaggcaccagtgcggctgacggacccgcagagcgtgaggaggcctgtctcccacggcgagacgcctactttgacatctgccaaggtgaaacgcgtagcggatcaggaggtagaagtggagacgccgaacatggactccgacgtggacagtgtcgggcggcggagtagccgatggagcgaggacggtggagatcagagtaggagcaattcccccacaatgaagcagccatttggccgccgcggagcacggggacgacatggtcgcatacccgtgcgagagaggtatttccctcgtcaagaatcaaaccgtggaaatagtatgcggcagcctgagataaacatgtaa

SEQ ID NO: 37477 - DNA, 1038 bp, Zea mays
  Peptide Sequence Number=SeqID_79256
atggggtgcggggcgtcgagccagaaggacgccggggcgccgcggaggcggccggtgagcgtcggcgacgtggtcgtcttcctcccgggcctccgcgtgccgagggccgtcgacttggcccaggcgctcggcggctgcctggccaggagcgccgtggaccggctgtcggctctgcgatcgcgggtcgtcgacatggcaatgcgagagtcggcggcggcgctcaagcccaggcggagggcggcggcacggcacgggtctagtacagccaatcttctacaggccctcgaagactacttgccggctctgctaggactggtaaaagaaggtagcgtcttgaggaacaaagtgcacttcacctggagtaaccaggaggataatgctgagctgtgcgtaaatccagctcctcctcaatctcaggagacggccatgccagacgcctggtacgaggccaacgccctgcttctcccgaggtcatacggcgatggctatgccccaagggtttctgaagagagtcgacgggctactgttgatgtcttcttgaaggcagctggatacctagactgtgcagttcggcatgtactcccgaagatgccactggagctaaggagacaacttccagtagacctggctgaaggaaatctcaaagctctaagcctccaagccctgggtcagggggttgacatgcagcttggtttggctattgatagtccaaaggccactttagcagtaaaacggcgcttagcctgtgagatggtcaaatattggcaacaagttcaagagagcattccagagcttcctatctctgatggatggggtaaaaagcaccggctctttataaagtggaaatatgttgaagctaaggctgcagcatactatttccacggtttgattcttgacgagggaaataccgaaaaatcccatggaatggcaatagctgcactccaagcttcagaggaatttctaaaagaaagcaaaagggtttcagaagccttccatgcaactcctccaacatcgaggcaagattttcctcatacttaa

SEQ ID NO: 37478 - DNA, 627 bp, Zea mays
  Peptide Sequence Number=SeqID_79257
gaggaggacggcgagggcgtcgtgggcgtgtcgctgtcgagggacctgatggcggtggcgggcgacgcgctcaagacgaacataacaacgctgggcccgctggtgctgccgctgtcggagcagctgctgttcatggcgacgctggtcgccaagaagctgctcaagatgaagaaggtgaagccgtacatcccggatttcaaactggcgttcgagcacttctgcatccacgccggcggccgtgccgtgctggacgagctggagagcaacctggcgctcacggattggcacatggagccgtcgcggatgacgctgcaccggttcgggaacacgtccagcagctcgctctggtacgagctggcctacagcgaggccaaggggaggatccggcgccgccaccgggtgtggcagatcgcgttcgggtcagggttcaagtgcaacagcgccgtgtggagggcgctccggtcggtgaacccggcggaggagacgaacccgtggatggacgagatcgacaggtttcccgtggatgttcccaagtacctgttcttttttcccccttttggtctgctggtgttctctaatgctcagcagctcatcgtgttcgtctctgaatatcctaaaactgcatga

SEQ ID NO: 37479 - DNA, 381 bp, Zea mays
  Peptide Sequence Number=SeqID_79258
atgtcacagttcactctcaacttgccacagcagtacatcccatccaagattgccatttgtttgacggttgtgaatccttacacaaagtatgcactgacgatgacgtcggtcgcattgtcgatagaggaagccctaccaaagaagatgcagagttacctggtcggaatgctcgttaggacattcctcgtcctctcaaccgttgcggtggctctgtttttcccttactttgatgttttcaaatttctcagccctggtgatggcgctgcttggatccgtgttcacaatgctcgtggtaggttctggagaacatttcacctacacttctgcggtggatttctctactttggccagttgaaacaagttgataaaaaatgtgcttga

SEQ ID NO: 37480 - DNA, 465 bp, Zea mays
  Peptide Sequence Number=SeqID_79259
atggagttttcagctttcacggtggtaacgcttgtgtacgccggagttgctgtctcagggttcctgatgttcggcgagtccaccatgtcacagttcactctcaacttgccacagcagtacatcccatccaagattgccatttgtttgacggttgtgaatccttacacaaagtatgcactgacgatgacgtcggtcgcattgtcgatagaggaagccctaccaaagaagatgcagagttacctggtcggaatgctcgttaggacattcctcgtcctctcaaccgttgcggtggctctgtttttcccttactttgccctggtgatggcgctgcttggatccgtgttcacaatgctcgtgatcatcctgggcgtgtcgctgtcgagggacctgatggcggtggcgggcgacgcgctcaagacgaacataaggacgctgggcccgctggtgctgccgttgtcggagtag

SEQ ID NO: 37481 - DNA, 447 bp, Zea mays
  Peptide Sequence Number=SeqID_79260
atggagctgatggaagatgagcgcttagaattattagaactggcctctcgtagtaaagggctcctctcaatggtttctcttgatagtgacacattacagcagcttgattcatttagaggaatgctgggaaagtttcctcctgaaactgtgagactgaaggattcaaggctcttaggtgaattgcatattcctctgctgaaatctatcattaaagatattaaggatgttgctcggactccttcagttgctttaggtgtaaatcagagcagttctgccaatcctggaggtggtcactcagtggtcgccataaacttatatgtcgtcgtcgccatctgcgactgctcgaatagacaattgaaaaagagaattgatcttttttatgggcgaagtgttgaagatggctttggtgaaggaaatgtcttgttagcatcaattgttgaatgctaa

SEQ ID NO: 37482 - DNA, 258 bp, Zea mays
  Peptide Sequence Number=SeqID_79261
atgggcccggcgggctcggccaccgtcctgtgctacgaagacaccgtgacgcagctccacatcgcggcacaaacaaaagactgcccatatgattcgttgatcaacattcatgttgctatgttttgcaaaatcagtttgattaacttgatcgccattatgccaatattatcttgtctaattgatcttttttatgggcgatgtgttgaagatggctttggtgaaggaaatgtcttgttagcatcaattgttgaatgctaa

SEQ ID NO: 37483 - DNA, 327 bp, Zea mays
  Peptide Sequence Number=SeqID_79262
atggtccatttggcccaccaaaaggagtccattaaagcttgcggtgccccattctgcaaaacgcccaattatgttgtggagtatcgtggcgtcaaaacaaaggaggaaagtagcatagagcagtttttttgcaacttcaacgttcaaccattttatttctgtaaggctgcattggacttgatggtcttaacttttccagacaggcaattgaaaaagagaattgatcttttttatgggcgaagtgttgaagatggctttggtgaaggaaatgtcttgttagcttcccgtaagtggcgacattacaacccctacaagcttgtgccttaa

SEQ ID NO: 37484 - DNA, 567 bp, Zea mays
  Peptide Sequence Number=SeqID_79263
atggcgcgggggctgggtcccacacgtcatgcaagctggcccagggcagaagaagccaaaccgccgcgcgcggtgcatgcaaccgcccagcggttacaagcattcctccactttcgcccagaccagcgggtgaaagggcggacagccgtgcaggcggcatgcaactgcgccaagtgggcgcgcccctccaacttccaacgcacccagcatggaggcccaggcccacgtgtcatgcaaccagcacgccggttgctacgtgcgagcaactgcaccgccactcgcaccactaccacgcctcctcgactgcggaaccagtaccgcgactcgaggcaaccccgcgtacgactcagcagtgccagccaggacaggcggcgcctctggcaggagaagcgagcgacgcttcgccttcgccataatgaccgcgtcaaaaaaggtacgccacgtcattcgatttcatatccttttccttttcctctttctctctcttacaacggggaccgggaaagggggatacctcgaaaaggatccttctccgtgaaggaaacaggccccgagcctaactactga

SEQ ID NO: 37485 - DNA, 579 bp, Zea mays
  Peptide Sequence Number=SeqID_79264
atgaccgcgtcaaaaaaggtgcgccacgtcattcgatttcgtacccttttccttttcctctttctctctcttacaacagggaccgggaaaggggatacctcgaaagggatccttctccgtgaaggaaacaggccccgagcccccctactgatcagaggttcgaaggctggcccctcgaaagggttcaacagtcgcctcagagcactcgggctccgcgcccactactggtcagaggttcgaaggttggcccctcgagagggttcaacggctgcctcaggccactcgggctccgcgcccactactgatcaggggttcgtaggctggcccccgaagggttcgacagccgcctcagacgcagagcgagggatgaccttggcacaaagctgcgaaggcctgatgggtgcgattaagtcaaggctcggtccactcaagggacacgacctcgcctcgcccgagcctagcctcgggcaagggaagccgaccccggaggattcacgtcttgcccgaggcccagtcttcgccgagaagcaaccttggccagatcgccacaccaaccgaccgtatcgcagaagcatttaa

SEQ ID NO: 37486 - DNA, 504 bp, Zea mays
  Peptide Sequence Number=SeqID_79265
atgtcgggagatcacgccaaaaaggagatggagaccggcgacaagcccactacaagtcacgggaaagcttcatcggaagagtcccgcaacaaggggaaggggaaggagaagaaatcctcttcccacaaatcgcatcggagtggcgacaagaaaaagaagatgaggaaggtggtctactacgagactgatacttcatcaccttccacctccggctctgacgcgccatccattacttctaagcgccatgagcgcaagaagtttacacaaagctgcaaaggcctgatgggtgcgattaagtcaaggctcggtccactcaaggacacgatctcgcctcgcccgagcccagcctcgggcaagggcagccgaccccggaggattcacgtctcgcccgagggctccctcaagcaacggacacaccttcggctcgcccgaggcccagtcttcgccaagaagaaaccttggccaaatcgccacgccgaccgaccatatcgcaggagcatttaa

SEQ ID NO: 37487 - DNA, 312 bp, Zea mays
  Peptide Sequence Number=SeqID_79266
atggcgtcgtcgtcggatgcggtgtccagaacaacccgagagtcgtcgacgttggcgacaaccatgaggcccccctgcttaacgatggacagcgcggtgcagctgctctggaccgcgtccaagcggcggcttcgcgggagcttgtcgtacacagcggcgcatgcgaccactcattggacacgtaccaccatacgcttttgcttaaacaaaaagaatagctttggctcatctaaagaagtggtttcacctcgtgagccagagctaaagccgtttttggataagccagagccatgccaaaggggccctaaataa

SEQ ID NO: 37488 - DNA, 279 bp, Zea mays
  Peptide Sequence Number=SeqID_79267
atggcgtcgtcgtcggatgcggtgtccagaacaacccgagagtcgtcgacgttggcgacaaccatgaggcccccctgcttaacgatggacaacgcggtgcagctgctctggaccgcgtccaagtggcggcttcgcgggagcttgtcgtacacagcagcgcatgcgaccactaactgccttgaacaagccattttggccggtcatttagcccttgactgccagggacgcgatcacacccttaggggcgatcacgcctatcgaaaacgaacgcttagctag

SEQ ID NO: 37489 - DNA, 306 bp, Zea mays
  Peptide Sequence Number=SeqID_79268
atggctactgttgggggtcttcatcttccaaagaaaaggttcgacataaatcaatggaagtacgacgaagcaagcttcgtcatgatgaagcaggaaggcgattcctacgtggccgcatgcgccgctgtgtacgacaagctcccgcgaagccgccgcttggacgcggtccagagcagctgcaccgcactgtccatcgttaaacatgggggcctcatggttgtcgccaacgtcgacgactctcgggttgttctggacaccgcatccgacgacgacgccatcacgccgttcagctcatcgtccacctga

SEQ ID NO: 37490 - DNA, 348 bp, Zea mays
  Peptide Sequence Number=SeqID_79269
atggtctctaacctcgacgccgtcatcattgccgtcgagggggtcagcgccaccctggatagcaccggaccccgccgtcaagggggtcggcgccaagatatatggcgccgacccactgggacttgccacatcggctgccacataggaaaagttggcaccaacgatactgacgtcgttgtgcgttacctcggcgtcaatgatgatggcgccgagagcagctgcaccgcgctgtccatcgttaagcaggggggcctcatggttgtcgccaacgtcgacgactctcgggttgttctggacaccgcatccgacgacgacgccatcacgccgtccagctcatcgtccacctga

SEQ ID NO: 37491 - DNA, 279 bp, Zea mays
  Peptide Sequence Number=SeqID_79270
atggttgtcgccaacatcgacgactctcgggttgttctggacaccgcatccgacgacgacgccatcacgccatctagctcatcgtccaccttaagcctaacctgccaccccaaccaagagtcatcggtactcgtcatgtcgagcgcgttcgacgactactatatcgaggattgtggcgtcatcttggtgccggaggtgacgcagaggaggatcgacaacagtgaccagttcatcatcctcgccaccgtcagggtagcttttgtgtcggcctgcctttaa

SEQ ID NO: 37492 - DNA, 300 bp, Zea mays
  Peptide Sequence Number=SeqID_79271
atgggcaggggcattgatataaatgtctgccacggccgactcatcctcgctcggttccgatgtacgaggctcctgcgcgggaaggtcggatcactgttgcgattactgctcgaacttgttgggtcgtctgggcttgcgccgacccggcctggtgttaatccgtttcactggtcgttcctcccaggcccacgaggggatgaccttacggattatggggctctttggcctttcgtgaggttcatgcttcggaggtcagcattttgcactgttggatttcgaacttctttgggtgcaccaaag

SEQ ID NO: 37493 - DNA, 351 bp, Zea mays
  Peptide Sequence Number=SeqID_79272
atgggcaggggcattgatataaatgtctgccacggccgactcatcctcgctcggttccgatgtacgaggctcctgcgcgggaaggtcggatcactgttgcgattactgctcgaacttgttgggtcgtctgggcttgcgccgacccggcctggtgttaatccgtttcactggtcgttcctcccaggcccacgaggggatgaccttacggattatggggctctttggcctttcgtgaggttcatgcttcggaggtcagcattttgcactgttggatttcgaacttctttgggtgcaccaaaggtgcacccaatgggtgtagcccccgagcttcgagtggatttttgcaaataa

SEQ ID NO: 37494 - DNA, 297 bp, Zea mays
  Peptide Sequence Number=SeqID_79273
atggttgaggatagttctgacatcattgccatagtgctggtttactgcatggctaataacaacattattcgtttccatcccacaagaaggaatatcaatggtcttctacgaagctgttcatatgacctcctttacttacgcagtgtgaggcttgtccttcattgccaaattttagataccgatgttgaatatgaagtggcaccgttttttactattattgttcgggctcgtgtaacaaaggtctgcgcttataaagatggaaatgtcataatagatattgctgtcggttgccaataa

SEQ ID NO: 37495 - DNA, 1548 bp, Zea mays
  Peptide Sequence Number=SeqID_79274
atgagaggtaccccaaagccagcgtataatttcttcatatggacggggcagcaggaggggtaccaacatagcacaagcatttgcatcctcgtcatgaaggttttcgctgagtgtggggagcgtgcgttaattttatttgcttatgttgtctgctacaatttgctttctccactaagaactaaaggttgtgtttctctacacgctttattcatagctctaaagacaaagcattctacacccaagtatgggctcgtctaccttgcatccttaattggcaaggcttctcaaaagcacaaggggaaaatctctctatctctagctacgaaaactgctcttgctatctattatgatggcgaggacaactccattaccactgagtgtcaaatcaagttcttgaaggtagagaacttgggaaatcaattggttcaacaaaaaggaaagcccaagatagaagtgtatgaaaaggacaggaagaagggtgttggggctttgacaactcatgctagggatagctctgacatcattgccatagtgctggtttactgcatggctaataacaacattattcgtttccatcccacaagaaggaatatcaatggtcttctacgaagtaagcctatactagactggcatgagaattccaatgatgaggtagcagagaagtgtgatgccataacatctgacattgagtcgaaattgagacagatagaggaagatcctgaaggtgcaggtactgctcacttgtattcagtgacactaaaaattagtggtgtggcaaatcgtgcatttgagcctctatttgagaggcagacaattgcacaagtaagaacagtgtactcttttgtcggagagagcaaagcgctcaattcatattatgaagcaatccagaacacactgaagcttggttacaaagctgggatggccaaaggaggattaaatcaaacagtccccatcaggaggattgcatgtcatgggcactggtatttgggcgaagcagtacatcgagaaccactacaagtcgtagatgaagtcgcttcaggagcgcaaggagagtcctttaactacaagttttggctcattgtcgcagaattggacggtcgcatcgacgccagaggtgccatactcttgaaacaaatagctagagtctttgctatagggctagagtctttgctagggatagcaatggtgtcgacgcatggcgatacagccgggccgagctctagccaggaagatctggcagccaccatgaagaaatgcattagcaataggcctcaggatcatccatttactcaacaacagcttccagcttgcaagactatacttgcgactcagacatggaaccagcacggcctgggcggcgacaacgtgttcggtagctgctgccctctccataacgggctcgtcagcctcatgcactgttctgggaagggcaagccatgggaccgtctcgacgccggcaagccttgcgcactggaccacacctggaaggcgtacgacctctatattggcgagaatgattcatcatcagcatcagcttcatcggggtaa

SEQ ID NO: 37496 - DNA, 1083 bp, Zea mays
  Peptide Sequence Number=SeqID_79275
atgagaggtaccccaaagccagcgtataatttcttcatatggacggggcagcaggaggggtaccaacatagcacaagcatttgcatcctcgtcatgaaggttttcgctgagtgtggggagcgtgcgttaattttatttgcttatgttgtctgctacaatttgctttctccactaagaactaaaggttgtgtttctctacacgctttattcatagctctaaagacaaagcattctacacccaagtatgggctcgtctaccttgcatccttaattggcaaggcttctcaaaagcacaaggggaaaatctctctatctctagctacgaaaactgctcttgctatctattatgatggcgaggacaactccattaccactgagtgtcaaatcaagttcttgaaggtagagaacttgggaaatcaattggttcaacaaaaaggaaagcccaagatagaagtgtatgaaaaggacaggaagaagggtgttggggctttgacaactcatgctagggatagctctgacatcattgccatagtgctggtttactgcatggctaataacaacattattcgtttccatcccacaagaaggaatatcaatggtcttctacgaagtaagcctatactagactggcatgagaattccaatgatgaggtagcagagaagtgtgatgccataacatctgacattgagtcgaaattgagacagatagaggaagatcctgaaggtgcaggtactgctcacttgtattcagtgacactaaaaattagtggtgtggcaaatcgtgcatttgagcctctatttgagaggcagacaattgcacaagtaagaacagtgtactcttttgtcggagagagcaaagcgctcaattcatattatgaagcaatccagaacacactgaagcttggttacaaagctgggatggccaaaggaggattaaatcaaacagtccccatcaggaggattgcatgtcatgggcactggtatttgggcgaagcagtacatcgagaaccactacaagtcgtagatgaagtcgcttcaggagcgcaaggagagaggtgccatactcttgaaacaaatagctag

SEQ ID NO: 37497 - DNA, 369 bp, Zea mays
  Peptide Sequence Number=SeqID_79276
atggaggaggtgttgccggttgccgcttccagcggacgacgagatactaccggaggcgccgtcatcgcagtaggcacgtgtgcgcgatcaagcctggatgggacgatgttgacacagcacgtcctgtgtgcggcgatctcgaactgggtcagttcgtgtaatcgccatctggagatgcgaccggaggttgaagacaacagtaaccgtcatctgggactagatttgggtcttttcatcaccctcggtgatgttttcccttttagtccagcctccaatccattttccatgccagacaacaacaactggtgtactcattaccactttgatggttgcacagtggtaaaagaacaatcgattgccactaagtaa

SEQ ID NO: 37498 - DNA, 351 bp, Zea mays
  Peptide Sequence Number=SeqID_79277
atggaggaggtgttgccggttgccgcttccagcggacgacgagatactaccggaggcgccgtcatcgcagtaggcacgtgtgcgcgatcaagcctggatgggacgatgttgacacagcacgtcctgtgtgcggcgatctcgaactgggtcagttcgtgtaatcgccatctggagatgcgaccggaggttgaagacaacagtaaccgtcatctgggactagatttgggtcttttcatcaccctcggtgatgttttcccttttagtccagcctccaatccattttccatgccaggtatttacctaacgtacattaaacctgcacacaaccctatctgtgagactagaaggtag

SEQ ID NO: 37499 - DNA, 474 bp, Zea mays
  Peptide Sequence Number=SeqID_79278
atggagatggtctcacgaccggaaaaaaggtgggctggttctcagtgtaaaaatcacgagacatcgctaggggcttactggactgaaagggaaaacatcgccgaggaacattaccacgaactaacccagttcgagatcgccgcacacaggacgtgttgtgtcaacatcgtcccatccaggcttgatcgcgcacgcgtgcctactgcgatgacggcgcctccggtagtatctcgtcgtccgctggaagcggcaaccggcaacacctcctccatgtccggctccggcgttgacgtccgcggcaactacgctagcggtggcgccgatgctgaattgctgatgacgacgcttccgctagtttctggttgtgctcccaacgcaacagtgcctccccagttccccacagcgcctgccgctcccagcaccgacatccccgcagctgggttgcatcgcgtcccgctgactcctgggccatga

SEQ ID NO: 37500 - DNA, 210 bp, Zea mays
  Peptide Sequence Number=SeqID_79279
atgtatgaagagatgcctccagaacaccaagtgaagtatgataaaatcaaagctctttttgaagccgacctcatcgactctttcgagaggactcacaaccatagcatccggtggaaggggttctcgcctaagggcgctcttgatgagcccaagtatcgactccctgagttcaccaagttcaacatatcaaagtatggaggaatcttttga

SEQ ID NO: 37501 - DNA, 645 bp, Zea mays
  Peptide Sequence Number=SeqID_79280
atgtatgaagagatgcctccagaacaccaagtgaagtatgataaaatcaaagctctttttgaagccgacctcatcgactctttcgagaggactcacaaccatagcatccggtggaaggggttctcgcctaagggcgctcttgatgaggttgacctctcgttaccttcgccacctctaccgtattcagtggctgccccagaagcacaattggctgctacaccgacgtacgttatgtacaagatggatggatgtcctaaggattgtcagttcttgaacgagccacctaaccacattccacatggattttcatgcatgtatgggccaaactatgccggcacgacacacccaatacggtctagcgcaacaggagtttctagagcagatgccgagaaacaggcatggctggaccaatatgctacccatccgagccatgagaactcggccttaggagtcgctactgtagatcagatcagcataattgtgagagatcagtttggaatgataccgaagcggagggtagttagctatatcaagcatatcccgggggctgagaaccgccgtcgtcatggagcacgcggggtgccatcattacttatttaccagggcgagccagatgggatgctggtcttgttccctgtagcctga

SEQ ID NO: 37502 - DNA, 3531 bp, Zea mays
  Peptide Sequence Number=SeqID_79281
atgttttactcgcagttcattttggccaaaaagggtcccctcgggaccatatggattgccgcgcacttggagcggaagctgcgcaagaaccaggtcgcggacacggacatcggcgtctccgtagattctatcatattccctgatgttccaattgcacttcggttatcaagtcatcttatgttaggcgtggtcagaatctattctcggaaggtcaactacctattccatgactgcagcgaagctttgctgaagataaaacaagctttcaggtccactgctgttgatcttcctcctgaagagtcaactgctccgtatcactctataactctgcctgagacattcgatcttgatgattttgaactgccagaagctgcgtttcaaggcgacactgatcatcatgtgagcacaaaagaacagatcactttgcaagacaacccagagaaaacagggtattcaacatcccagtttggcctagatgaaagatttggtgatgccagttcatcacatattggctttgacttggaggaggaattaattctgaacaaggaccactcaattcatctccaatctgatgatggcattattattcaaggtcggtcatcagtcccttctactgatatggacattgatgataacaaaagtcaagacataatagctgaaggataccacaacatggatggtgggcattctagtcatggaaagctaggttcactgaatctgaatgcaattgacctaggaggaaacagtatccctaactggactggttacaatgtacatactcctgatttgaatgatatattattgcataatgagggtattgcagggccatcagcttcgtacattcaacctagcccatatacttgtgatgaacctgcatcaccagagttcattagtgctcaggccccagctacacctggtttaatggaagagacagttccttctagagtccatgaaagtcctgttctaagtccacagagaaaaccatcaccgtcaaccaatgatgaaactgcaaagactgacactcctgctgctccagcctcagattttcttcattcggctacaggaaatgccaatgatgttggtgctgaaaggacagaacttggattggcgaagcatgtgcaagttgagtcttctgctttctgggacgctgatgcatcgggacaacagcacacaagtgagggtttaccatcccagggtcaagctgatcacttagaacccgctgctgataaattggtcaattctgatggtatagccgcatctgttgaaactgtaactgtcaatgcaaccattaaagatgtacctttggctgtaaatgattcagagccatgtgttgatggttctactgaaccatctgtggtggagaacctggtacagattaatgggccattaattgatgcacaagattttcaacatgaagcccaagcaatgcaacaagtagtggcatctaatgatagactgaatgaactagcaacttcagaatttgctgagcctgagaaaatgctgtcagttccagattctgaattcaatcatccaattgacttggggctcataactgcggaaaagggaacaactgaatctgatggaagtaacataataggcagccttgctagcagaaaaagacatctggaagatagcttaccagctttagagagtgagaccactgaaaggttgtctagccgaccacatggtatacgaaccaacgattttgttccccatgatgatgatatactggcatctattttagtcggtagaaggacccctggattcacacttgattcaacaccactaccaccgagggaatcgtctctgaaacgccggaggttgggctcgaagatgggcacactcaagaggaaagtgcaaatagacgatgccatggtcctgcatgctgatactatacggcaacagttgatcaacactgaggatatacggcgcattcgtaaaaaagctccatgcactcgttccgaaatatggatgattgagaaaggttcactggaagatgatatattccacgagcccatcttttcctgcctatctgaggagctaaacaaattacacaatcggacatatgaggctattgtacatcctgctgtacagaacatggaactgcaaggtcaattagacatgcctgaagcaattacagaagatagcaatattgctgggtttggtgctgctactattgatggcccacttcacataccagatgggattcaatcagatgccatgctgccacgtgccaatgatgcatatggcgctacagctgcttttagtttgcaagttcctcctaacaaccaggttaacggtgcatctaatgattttgttattggcactctgtttcaaggggtgactggaccttttattggtaatgagaaagaagtggcacttgctgacagagagcgtgctcaagtaaatacactgtatagtgaccattttcaagatgtcccatctgatttgcatagtactgatgcaaacatttctagtcaagatgtgactctagataactctggccaagcttgcgctcacgcaacggacggcatgacaagggagcttactcattttgttcatagtaatgctaatattttcgagagtaatgaggtccctgcttctgagattactggggtggaatataatcaaggtgcctctggtttccctcaatcaacggaggatgaaaatgcggtggggtataatcaagatgtctctggttttcctcgaccaacggaggatgaaaatgcggtagattataatcaagatgcctctggtttttctcgaccaacagaagatgttcaagatgcctctggttttcctcgaccaacggaggatgaaaatatggtagattataatcaagatgcctctggttttcctcgaccaacagaagatgtaaatgcggtgggatataatcaagatgcctctggttttgctcgaccaacggaagatgtaaatgcggtgggatgtaatcaagatgcctctggttttcctcgatcaatgaaggatgaaaatgcggtggaatataatcaagatggctctggttttcctcgaccagctgaaaatgaaaatgatgtgtctgctatgggagataattctggcttccatgaaaacaacatgggttctcttacggatctggatatggtgaatgactatgaactgaaggaaagcaatgattttgggagtgcaattaatggtgttgatacagattttctgaactacgacgatgatgacggcggggacttcgacgacgccaacgacgatgagccaaatcccaacgagtttcagtctctcgacaacagtggttggtcttctcgcaccaggggcgttgcaagatacctcaaggctttattcgacgacgagtctggtctggagaggaagagcgttgctatcgaccatctggtgcgcgggaagacgcggaaggaagcgtcgagaatgttcttcgagaccttggtgctgacgacgaaggactacatcagcgtggaccaaccgaaccccttcgacttggtgagaataaagccaggctcaaagctgctgatgtcggaattctag

SEQ ID NO: 37503 - DNA, 364 bp, Zea mays
  Peptide Sequence Number=SeqID_79282
cttgcagcagcttcagcttctcagttctcacagccaacgcaggcgtccaagtccaagcaaagccccgctcctgtcacagacaaatttccacgggagtatctccccccctgcttttttcttcttcccttcaccccccgcgtgcgcgctcagtccctctcgcctgtggcgacgcttgagcgaccgctgctgccgctcgacgccagatcttcgccgtgccgctccggtgacgagcaccctccaggtatgcccttggagttcattttggccaaaaagggtcccctcgggaccatatggattgccgcgcacttggagcggaagctgcgcaagaaccaggtcgcggacacggacatcggcgtctccgtag

SEQ ID NO: 37504 - DNA, 418 bp, Zea mays
  Peptide Sequence Number=SeqID_79283
atgccacggtcacttcatcactgtcagttcacacacagactcactgctcgagctcgaggagcagcttcagcttctcagttctcacagccaacgcaggcgtccaagtccaagcaaagccccgctcctgtcacagacaaatttccacgggagtatctccccccctgcttttttcttcttcccttcaccccccgcgtgcgcgctcagtccctctcgcctgtggcgacgcttgagcgaccgctgctgccgctcgacgccagatcttcgccgtgccgctccggtgacgagcaccctccaggtatgcccttggagttcattttggccaaaaagggtcccctcgggaccatatggattgccgcgcacttggagcggaagctgcgcaagaaccaggtcgcggacacggacatcggcgtctccgtag

SEQ ID NO: 37505 - DNA, 312 bp, Zea mays
  Peptide Sequence Number=SeqID_79284
atgcaggataagggcatgagcataataaaggatgaagctaaagcaagaattgtaacaaggaagggagagaatgcaaccaaggtcaagatcggtaaaacaccattctcaaatcaagatggaaaagatgattttcaaaaggtacatgataagcatcaagacaaaacttgcaaggcgtcgaagaagggggagcaatcaatggtgaaagtgggtgaggcattaccctcaaacagggacagaaaagaggaggctttaaaaggtaggttcaaaaagtacaagggtaagtactttagattaagggataagggtatttaa

SEQ ID NO: 37506 - DNA, 294 bp, Zea mays
  Peptide Sequence Number=SeqID_79285
atgcaggataagggcatgagcataataaaggatgaagctaaagcaagaattgtaacaaggaagggagagaatgcaaccaaggtcaagatcggtaaaacaccattctcaaatcaagatggaaaagatgatttttcaaaagacaaaacttgcaaggcgtcgaagaagggggagcaatcaatggtgaaagtgggtgaggcattaccctcaaacagggacagaaaagaggaggctttaaaaggtaggttcaaaaagtacaagggtaagtactttagattaagggataagggtatttaa

SEQ ID NO: 37507 - DNA, 303 bp, Zea mays
  Peptide Sequence Number=SeqID_79286
atgcaggataagggcatgagcataataaaggatgaagctaaagcaagaattgtaacaaggaagggagagaatgcaaccaaggtcaagatcggtaaaacaccattctcaaatcaagatggaaaagatgatttttcaaaaggtaggcataagataagcatcatgaaaagatctagagactacaaatgtaagggagacaaaacttgcaaggcgtcgaagaagggggagcaatcaatggtgaaagtgggtgaggcattaccctcaaacagggacagaaaagaggaggctttaaaaggtaggttcaaa

SEQ ID NO: 37508 - DNA, 132 bp, Zea mays
  Peptide Sequence Number=SeqID_79287
atggcgctcggcggtattgggactaacagttcgatcaaagctaaaggggtcacgtccgttgagtcaaccatcgggactaaggccaccgcgtatcattctactccaccaaaaggcagaggggcatatgtttag

SEQ ID NO: 37509 - DNA, 132 bp, Zea mays
  Peptide Sequence Number=SeqID_79288
atggcgctcggcggtattgagactaacagttcgatcaaagctaaaggggtcacgtccgttgagtcaaccatcgggactaaggccactgcgtatcatcctactccaccaaaaggcaggggggcatatgtttga

SEQ ID NO: 37510 - DNA, 201 bp, Zea mays
  Peptide Sequence Number=SeqID_79289
atggcgctcggtggtattgggactaacagttcgatcaaagctaaaggggtcacatccgttgagtcaaccatcgggactaaggccactgcgtatcatcctactccaccaaaaggcaggggggcatatgtttggagccaaaatgagcggcggacggtccgcgcctgtgggccggatggtccgcgcaagcgccgaacagattag

SEQ ID NO: 37511 - DNA, 231 bp, Zea mays
  Peptide Sequence Number=SeqID_79290
atgtgcttcttagcagattttcacaagcctgggtatggtttacatgtgaggacagtgaaggtcaccaatgtctctcttagtgcaactgtgcaagacattaaggagttcttttcccttttaggagatattaatcatgtggagatgcaaagatactcgctggagaggattttcaacacccttaggtctggctctcggaagacacaggtgagtgatgtagttgttggcttttga

SEQ ID NO: 37512 - DNA, 195 bp, Zea mays
  Peptide Sequence Number=SeqID_79291
atggccgagtccagtgataataatcatctaaatataaaacttgaaaagaaaaggccatactcgctggagaggattttcaacacccttaggtctggctctcggaagacacaggtggggaacataagaaagtatgtagagcaaaatgagaggagctgtcgttaccctcaattctttgtgattattgtgctagagtga

SEQ ID NO: 37513 - DNA, 357 bp, Zea mays
  Peptide Sequence Number=SeqID_79292
atgaggattcaacctgaagataagcttaatgtgcaattcattgacaagtcgatatccaatttgatagtaaatctttctgttgatgagaaggaaaatggcttggaagaaaaaactcttgctgacgattatgaatacattcatgcatggattgagggagaggaagcaaaaatgactgtatgggagaatatgcataaagctgaagcagcaatacaaaagcttgtgataaaacttgaaaagaaaaggccatactcgctggagaggattttcaacacccttaggtctggctctcggaagacacaggtgcaaacctcgatctcgcctcccgggagggaccccgtctgggaggagagatcctag

SEQ ID NO: 37514 - DNA, 702 bp, Zea mays
  Peptide Sequence Number=SeqID_79293
atgcggaggctcctagtgccgagctcgaccccacgtgccttgccactgcctaggcctattccctcttgccccgactccggttccgaccagggcgctggttccgtcgatgctcagacccaggcggccagctctgcccgtgttttggcctcaagacaacatcccaggcttcaacatgtgtggaatctgtcgtgccttcaaaggaacataagcttgaggattcaacctgaagataagcttaatgtgcaattcattgacaagtcgatatccaatttgatagtaaatctttctgttgatgagaaggaaaatgttactcaaatcgaaatgtgcatgcaactagatgttgctactgaggtctattcaatgcgtgttggtgacacgttcaacatggttctagctctcactctgaacctggatggatcatcagacactggctactacacacagattcactattatgagaagtatttcaatagcttggaagaaaaaactcttgctgacgattatgaatacattcatgcatggattgagggagaggaagcaaaaatgactgtatgggagaatatgcataaagctgaagcagcaatacaaaagcttgtgataaaacttgaaaagaaaaggccatactcgctggagaggattttcaacacccttaggtctggctctcggaagacacaggtgagtgatgtagttgttggcttttga

SEQ ID NO: 37515 - DNA, 702 bp, Zea mays
  Peptide Sequence Number=SeqID_79294
atgcggaggctactagtgccgagctcgaccccacgtgccttgccactgcctaggcctattccctcttgccccgactccggttccgaccagggcgctggttccgtcgatgctcagacccaggcggccagctctgcccgtgttttggcctctagacaacatcccaggcttcaacatgtgtggaatctgtcgtgccttcaaaggaacataagcttgaggattcaacctgaagataagcttaatgtgcaattcattgccaagtcgatatccaatttgatagtaaatctttctgttgatgagaaggaaaatgttactcaaatcgaaatgtgcatgcaactagatgttgctactgaggtctattcaatgcgtgttggtgacacgttcaacatggttctagctctcactctgaacctggatggatcatcagacactggctactacacacagattcactattatgagaagtatttcaatagcttggaagaaaaaactcttgctgacgattatgaatacattcatgcatggattgagggagaggaagcaaaaatgactgtatgggagaatatgcagaaagctgaagcagccatacaaaagcttgtgataaaacttgaaaagaaaaggccatactcgctggagaggattttcaacacccttaggtctggctctcggaagacacaggtgagtgatgtagttgttggcttttga

SEQ ID NO: 37516 - DNA, 2061 bp, Zea mays
  Peptide Sequence Number=SeqID_79295
atggctgaggcggcacaacgggatgaagcgcgctgggagttggttatgaagaagctgagttgtctggtccagaagatggagtcgttggtggggggtcaggcagatctagcagcagcggtggcgcagcaagcggcggaggatctgcccgttctgcctcagttcgttcgatctgcgggcaataccacgacgccagtctttgacgagggacctgtcttcgacgacgagctgcccatcgacttcggttcccaggggaagaccgcgtccatggcggcagcaagcgccatggaggtccccggatccaccccgacgccctccgtccccttctacgacagcgtcgacatcttccacctcaatagtgaacccgtctacgacgtctacgatgacgacgaggatggcgattcgtcgcagcaggccgtggtgctcgctgcggacaagaactactaccccaccgctgaagagatgtacgggccgggcatggaggcgcttgtcatggacgaggtcgagcaaccgctggagcagcccatcgtcgcagacgcgcttgcgctgctcgaggagatgcgaggcaaggggtaccatgctgacgtgatgagggccttgtgcaagctgcgcgatgcagacaggacggtccaggtgctcggggagatgatggaggtcggcttcaggccatgggtcttgacattgacatacaactttgtggtggctgtgctcgtgaaggcaggaaggatggaggaggcactaaaggtgaaggatcagatgttgttggttgctggaaagaagatggatgtggttctcgcgacaacattgatgcatgggtattgcttgctcggtgaagttgggaaagcgttggatttatttaacgaggctgtcagggatggtgtgacagcaaccaatgtgacatatgcggttctgataaaaggttgtgatgcagaggggatgacagataaggcatatgagctatgtcgtcagatgatagagcagggattgctgtcaagcacacatgggttcaatttggtgataacaggtctgttaagagacaagcggtgggaggatgccatcagcttgcttgaggttatggttgatataccttctgccggtactgcggctaagtgtgaagagcttgatatcatgacagaatgtgttgctcaatgcaatcttgtcactgctgtgtcctctgattttcatcctgaattcatctgtctgtttgtcaaaaaatttggtggctctgtggcagtatcaagcaagagagtattgtttctcagttggggctacatggaggagtatgaggttctgattccatttcagttccttcaggttcgtgagagccaagtaaatgatgtttgccaggacatgggtgtgggagataagtgcttggctgccattcatgactttggcgatgttcagggtgtagatgaagcaaaggaggagcttgttgagatagtgagctgtctgcatggttcactgaactccaagaagcttggagcaaaattgccctggggtgtcctgcttgttggccctccaggaactggaaacactcttctagcatgggcagttgcaggagaggctggaattccatttttctatgtttctgctagtgagtttgttgaagcttttgttggaagaggtcttgcccgtgtcagggaattgttcaaggaagccaaagaagctgctccatccatcatttttattgatgaacttgatgttatgggtggaaatagaggtagaagttctaacgatgtgagggaccaaactctaaaccagctaattgcagaaatggatggttttgactcggacatgaaagttattgtcatggctgctactaacaggccaaaagcactggatgttgctctttgtcggcctggtcacttctccaaaaaggtgcagtcttggagacttggtccttttactctaggagtaagtggtctgcaacttgggccatacatgaggagacaatgggatcctggtattacaaatgggcaattggtgatgagctgcgaggagctagctttgcagatcgcagtgttgcttggggacaagcaacatttcgtcggggcgataatgtaa

SEQ ID NO: 37517 - DNA, 222 bp, Zea mays
  Peptide Sequence Number=SeqID_79296
atggtgtgcgctaagtgtaagattgcccctcccttcctccctgtcgtagatggcgagaagaagctcgggaaggtgatcgtgcctgacaagtggaaggagggcgccagcaacaccaacgagagcggcggccgcaagatcaacgagaacaaactcctatccaagaagaacaggtcagattccctttcccagcccctgcctagccttctcccctactactgctag

SEQ ID NO: 37518 - DNA, 2406 bp, Zea mays
  Peptide Sequence Number=SeqID_79297
atgggcctcgatgtcgcatggcccaactcggagcagcctaaaggcaggaccacaacggcaggagagctcctcacgtcctggctcaccatcggcggctacggggacgtgacagttggtatcagaggtagtcgattctcgacattttcctcggtttcgtccttggtgctcgcgacgatggctgaggcggcacaacgggatgaagcgcgctgggagttggttatgaagaagctgagttgtctggtccagaagatggagtcgttggtggggggtcaggcagatctagcagcagcggtggcgcagcaagcggcggaggatctgcccgttctgcctcagttcgttcgatctgcgggcaataccacgacgccagtctttgacgagggacctgtcttcgacgacgagctgcccatcgacttcggttcccaggggaagaccgcgtccatggcggcagcaagcgccatggaggtccccggatccaccccgacgccctccgtccccttctacgacagcgtcgacatcttccacctcaatagtgaacccgtctacgacgtctacgatgacgacgaggatggcgattcgtcgcagcaggccgtggtgctcgctgcggacaagaactactaccccaccgctgaagagatgtacgggccgggcatggaggcgcttgtcatggacgaggtcgagcaaccgctggagcagcccatcgtcgcagacgcgcttgcgctgctcgaggagatgcgaggcaaggggtaccatgctgacgtgatgagggccttgtgcaagctgcgcgatgcagacaggacggtccaggtgctcggggagatgatggaggtcggcttcaggccatgggtcttgacattgacatacaactttgtggtggctgtgctcgtgaaggcaggaaggatggaggaggcactaaaggtgaaggatcagatgttgttggttgctggaaagaagatggatgtggttctcgcgacaacattgatgcatgggtattgcttgctcggtgaagttgggaaagcgttggatttatttaacgaggctgtcagggatggtgtgacagcaaccaatgtgacatatgcggttctgataaaaggttgtgatgcagaggggatgacagataaggcatatgagctatgtcgtcagatgatagagcagggattgctgtcaagcacacatgggttcaatttggtgataacaggtctgttaagagacaagcggtgggaggatgccatcagcttgcttgaggttatggttgatataccttctgccggtactgcggctaagtgtgaagagcttgatatcatgacagaatgtgttgctcaatgcaatcttgtcactgctgtgtcctctgattttcatcctgaattcatctgtctgtttgtcaaaaaatttggtggctctgtggcagtatcaagcaagagagtattgtttctcagttggggctacatggaggagtatgaggttctgattccatttcagttccttcaggttcgtgagagccaagtaaatgatgtttgccaggacatgggtgtgggagataagtgcttggctgccattcatgactttggcgatgttcagggtgtagatgaagcaaaggaggagcttgttgagatagtgagctgtctgcatggttcactgaactccaagaagcttggagcaaaattgccctggggtgtcctgcttgttggccctccaggaactggaaacactcttctagcatgggcagttgcaggagaggctggaattccatttttctatgtttctgctagtgagtttgttgaagcttttgttggaagaggtcttgcccgtgtcagggaattgttcaaggaagccaaagaagctgctccatccatcatttttattgatgaacttgatgttatgggtggaaatagaggtagaagttctaacgatgtgagggaccaaactctaaaccagctaattgcagaaatggatggttttgactcggacatgaaagttattgtcatggctgctactaacaggccaaaagcactggatgttgctctttgtcggcctggtcacttctccaaaaaggtgcagtcttggagacttggtccttttactctaggagtaagtggtctgcaacttgggccatacatgaggagacaatgggatcctggtattacaaatgggcaattggtgatgagctgcgaggagctagctttgcagatcgcagtgttgcttggggacaagcaacatttcgtcggggcgataatgaaggtgatcgtgcctgacaagtggaaggagggcgccagcaacaccaacgagagcggcggccgcaagatcaacgagaacaagctcctctccaagaagaacagccgctgccgtctgccgagccttctcccctgtgtcacgtccccgtggccgccgtcgacgagaaacggggcgtga

SEQ ID NO: 37519 - DNA, 822 bp, Zea mays
  Peptide Sequence Number=SeqID_79298
atgaaaggccataagtatttccaatgcaaggcaataaccggggataagcaaaaggaaaagctcaagcaaaagccaacaagcaaaatctccaacacctacatcaacaaggtggacaaaaaggctgctacaccatatttgatcaagaagaaaaagaatggaaaagtgatagcaatcaaggccaacaagcaagccaacaaaggaaagggggccaaacgcatctgggtgccaaaggaaataatttcaaccatgaaaagcaccaagaagtggcgaggaagatacgacgccaaagtggagcacttggccgtcggcgaggtcaacctggctgcccttgccggcacggatgcaccgaagcaagagaagaagcatgtaatcatcattatatctgctctgcttggagcatccctgttgcttgtagtcgccccttggttgctacatgctgacacgttgtgtgatcttgaagtggcgacctcgcctggaagcgacaacaagcacctcgaagtcgaagctcgcctgcaccacgttgatgtcggagccaccaccatctcccacgggcggcgcgttcaacaccacactaaccaccggcagcatgcgcatgtcatagcgattaaaagcaaaagcgtaaaggagaaggcggcaacagacgaggagagcacgggcgaggcgacgccattgcatgcatgcacaaggccgaggcagaggctgcagacaggcccctatgtagccgctgaatattccactacaccacccatctgcactcatggaccgagcaagccggagtggccaacgactggagccaacgacggccgttggacaaaattctag

SEQ ID NO: 37520 - DNA, 891 bp, Zea mays
  Peptide Sequence Number=SeqID_79299
atggaacaggatcacctattcaccccctctaagtgctctcaagatgatcaagcctctatatcatccttcgaagatgatgaaacagtccgacacatcgaaaaggtcgaggatcttctctttaacattaacaagaaaacacaaagaaatataggatacttcgcatgtggggagaagggccactttcgggataattgcgcaaatacgaccgaacccaagaaaaggaggagcaaaggcaagaagctaacaagtgttaagacttgggatgattcttcaattgaagatgaacctccaaggagctgcaaccatcgctcttcatcacgatcttcacgttcgtcacacaaattccttacggtgagagctagctctcaagatgctattgaaaacttgctagagaaaatggaatttcttagaatatataataatgagctaactattaagctagaaagcactggtggtaccccaaaagcatctttagttgaaattcctgaaattattaaaaaggatgcttctacttcttgcttagatttaattgatattaattctaatccttgcaatcaagtcttggttaagaatgtcattgtagatacttgttccaatgagattgctatggaaaatgagttattaaagaaagaagtggcacgccttgataaggctttttacgataagaaagacaaagccaaacaaacccaacctctgcacgataacgccactgtgggagtgaacaagactatggagggagaaactgtggtttgctggctatgtcataaagaagggcacaagtcttaccaatgcaatgcaaagaccgagggagagaagaagaaaaagccaacaagcaagatctccaacacctacaccaacaaggtggaccaaaaggtggctacaccatattga

SEQ ID NO: 37521 - DNA, 1002 bp, Zea mays
  Peptide Sequence Number=SeqID_79300
atggacctggtctggtgcccatcagtttatggaaaggcatcaattagatcccagactgggggcgcacagacccggtccggtggtgcactagaccggtctggaggacatcacaacgtgcaggatcacctattcaccccctctaagtgctctcaagatgatcaagcctctatatcatccttcgaagatgatgaaacagtccgacacatcgaaaaggtcgaggatcttctctttaacattaacaagaaaacacaaagaaatataggatacttcgcatgtggggagaagggccactttcgggataattgcgcaaatacgaccgaacccaagaaaaggaggagcaaaggcaagaagctaacaagtgttaagacttgggatgattcttcaattgaagatgaacctccaaggagctgcaaccatcgctcttcatcacgatcttcacgttcgtcacacaaattccttacggtgagagctagctctcaagatgctattgaaaacttgctagagaaaatggaatttcttagaatatataataatgagctaactattaagctagaaagcactggtggtaccccaaaagcatctttagttgaaattcctgaaattattaaaaaggatgcttctacttcttgcttagatttaattgatattaattctaatccttgcaatcaagtcttggttaagaatgtcattgtagatacttgttccaatgagattgctatggaaaatgagttattaaagaaagaagtggcacgccttgataaggctttttacgataagaaagacaaagccaaacaaacccaacctctgcacgataacgccactgtgggagtgaacaagactatggagggagaaactgtggtttgctggctatgtcataaagaagggcacaagtcttaccaatgcaatgcaaagaccgagggagagaagaagaaaaagccaacaagcaagatctccaacacctacaccaacaaggtggaccaaaaggtggctacaccatattga

SEQ ID NO: 37522 - DNA, 162 bp, Zea mays
  Peptide Sequence Number=SeqID_79301
atggcgggcggaattgggctcgccggagctaaggagagggggctggccggtgaagttttgagtttcgaaaaacagagaacgcagttgatctttggaaagaggtctgaatttcagaaattcagaaatctgaatttctccaagggttcatggttcaagggctga

SEQ ID NO: 37523 - DNA, 162 bp, Zea mays
  Peptide Sequence Number=SeqID_79302
atggcgggcggaattgagctcgccggagctaaggagagggggctggccggtgaagttttgagttttgaaaaacagagaacgcagttgatctttggaaagaggtctgaatttcagaaattcagaagtctgaatttctccaagggtttatggttcaagggctga

SEQ ID NO: 37524 - DNA, 162 bp, Zea mays
  Peptide Sequence Number=SeqID_79303
atggcgggcggaattgagctcgccggagctaaggagagggggctggccggtgaagttttgagttttgaaaaacagagaacgcagttgatctttggaaagaggtctgaatttcagaaattcagaaatctgaatttctccaagggttcatggttcaagggctga

SEQ ID NO: 37525 - DNA, 162 bp, Zea mays
  Peptide Sequence Number=SeqID_79304
atggcgggcggaattgagctcgccagagctaaggagagggggctggccggtgaagttttgagtttcgaaaaacagagaacgcagttgatctttggaaagaggtctgaatttcagaaattcagaaatctgaatttctccaagggttcatggttcaagggctga

SEQ ID NO: 37526 - DNA, 384 bp, Zea mays
  Peptide Sequence Number=SeqID_79305
atgggtgcaaggaattgggcggagactcaccggttagctctgtccacgtgcggcggcggaagaccgaagtccggtgaggtcgatctcgggcctccggtgaagtccggcctagtccgagggcttgggaagcttcacgggccattggtggagctagccgaagcattggctcgactcgggggtggctggagtgggctggccacggtgaccgaagctctggcggcaatggccggcggaattgagctcgccggaactaaggagaaggggctggccggtgaagttttgagttttgaaaaacagagaacgcagttgatctttggaaagaggtctgaatttcagaaattcaaaaatctgaatttctccaagggttcatggttcaagggctga

SEQ ID NO: 37527 - DNA, 837 bp, Zea mays
  Peptide Sequence Number=SeqID_79306
atggcagccgcccttctccttcacctgcccagcgccgttaattttgcccttctccttcacctgcccacggccataaatcctggcacacatatgctatgcacccggctctgcccttgggaaacgggtgtgacagaagtgatcagtacaaacaaaagtgaaactacaaagcagaagaaccggattttgttttctggtataaaaagtcaatggtcttcccaagaacaactaatagaagatgcactatcagacgatgaattgccaggttttccaaaaaggaaacatcacaaggatgcccagcttcaaaaagaagcacatgagtgttacattgatggatggactatcacctgcacacagtttcagccccgtcgccgcatcaggtccaagaaacaaaaatggaagcatggaaaaagtcaagaaataacttcaagaaaagcttgttatctatgtggacgtgaagatcattatcttcgtaattgtcctgagaagagttcactaccgaacacccccgggataaagctatctcagtcttcagacgtgaaatatgaacaaaaatgtacaaaaacttctatcaacatcgtgaagaacaacaaaaggaataggaaaatctttggatacatgagtagtccacctcaaccacaagcaaaagccccgaaaaacatggatacccaaacggaagaatcaagccagactcagctatgtgagatacagacactcaatcatttctcgccacctgttggtcaagcaaagttgactgcaaagaactcaaagcaagaggtgcttgcttctactgcaagaatgaagaacatattattcgcgaatgccccaagaagcgtctag

SEQ ID NO: 37528 - DNA, 216 bp, Zea mays
  Peptide Sequence Number=SeqID_79307
atgacccgcaaagaactcaaagcaagaggtgcttgctactactgcaaaaatgaagaacatattattcgcgagtgccccaagaagcgtctagaccgactagagaagaaagttgtcaagcaagacccaaacaataatccagaagaccaaccagttataaccttccctaatctcgaggacgatattctttttaagaggggtagatttgtaacactataa

SEQ ID NO: 37529 - DNA, 470 bp, Zea mays
  Peptide Sequence Number=SeqID_79308
ggataaacgtcgtcgagggtgtttcgaccgtgcaggggagggacagtgggtttggcgtcgagcagggaacgacgcgatcctcgtgctgcgttcaacggagcttcgacggggttccacggatggcgaacgacgtacagatgcgggggcgcggggtcttcggcgctggtcgctcggctcctgctcttggggcgcgcggcttcggtcggtcgtggggcgcggggctcggcggcttcatgggcagggcgctgtcgaggcttgaggcggggtcatgcctgggcggaaagcgtcgagcagatgggcaggggaaagggcagggagcgacgccggctagcagggagataagggaggagagagagaagttgggcggcggcggctgggagccaagggaggcagggcgcgcggctcctatgggtgttacaaaatctaccccccttaaaaagaatctcgtcctcgagattagggaaggctag

SEQ ID NO: 37530 - DNA, 582 bp, Zea mays
  Peptide Sequence Number=SeqID_79309
atggtcatctctgagttgagcgcaataccttttgttcctgctccgtcgcagcctgaggatgttgaggaagacaaaataacacagtctcctagacgaaaacgacataagcgtcatgtatcgtctggtgcaaaacagaacctggtatctcgtcaaaaccagaaatttcaatctacaattggaggaaactttgctactgcaactagggatcgtgaaatggataccaatgagaacaatgaaattgatcatccgactgtttctgagattgataacaatgataatcatgacgaggatatactttttgaagctgatgatgacgaagaagagggatacttgtttgcttatcaagatggtgaatccggtgaggatatcaatattgatgatacccaagatgcctttgctgtaacccctgacgtacctgatccgtatgacaaggtgtatagtaacatacctaaagaaacacatttgctaaacgttgttgctgattgtgactactgtaaagcgaagaagtttcaatatgaaccacctggattttgttgtcgtaatggacagattgatctagctccattcgagacaccgtcctag

SEQ ID NO: 37531 - DNA, 3510 bp, Zea mays
  Peptide Sequence Number=SeqID_79310
atgactgaaggagcagacgttgggatgcaacaccagacaaccctaaatgtcaccaccaatgataatcatgacgaggatatactttttgaagctgatgatgacgaagaagagggatacttgttcgcttatcaagatggtgaatccggtgaggatatcaatattgatgatacccaagatgcctttgctgtaacccctgacgtacctgatccgtatgacaaggtgtatagtaacatacctaaagaaacacatttgctaaacgctgttgctgactgtgactactgtaaagcgaagaagtttcaatatgaaccacctggattttgttgtcgtaatggacatattgatctagctccattcgagacaccgtcccagcttaggaggttgtgggagtgtgcagatgctgatgcgaggcacttccgtgataacattcgattttttaacgggcatttctcattcacttctctgtattgttgccttgatagtatgactacaaacatggattgtggtatctacacgtttcgtgcacatggcatgatgtaccacaacttaaggtcgttcggtagggaagttgggacggaacataaacaccttgaactttacttctatgatgatgatcccagtctcgagcatagatatcgtaaatgtcgtcaagagcaacttgagaaagacaaggcggttattaaacagttggttgaaatacttaagggaaacccatactctgagcaccttaggagtatggggcacgttgataacattgaagactaccatatcgccttgaaccttgaccaaacattgaaccagaagttatataatgtacccatcacttcggaggtcgctgcagtttggattgaggggagtgaacttggatggcatgccaatattcctaagtccaatgtttccatggacgaagtagatgcgtaccgcgatcaacataggagaagtgatgcaaacaatgatgatacaaaacgacctagccatctatgcgtgtctgtacgtgactattactgctacagattccaaattcgtccaagtatattcaatccaatacttcatgggaagcggcttttccaacagttcgcggttgacacctacatcaagattgagagctctcgtttggatttcatacgtaaaaatcaagacagattaagggcggatctatacaagggtttggtagatagcttgcatgaaggcgagaacagagcagacaaaattggaaagcgaaccgtgctgtctacatcatttatcggtggtcctcgtgacatgagacgccggtatatggatgctatggcccttgtgcggaagtttgggaagccagacatattcctcactatgacgtgcaaccccaattgggatgaaataacgagagagcttctccctatgcagtcaccacaggatcatccaaaccttgttgttcgcatattccgtgcaaaactagaggaactgaagaagagattgactaagcatgatattcttggaaaaatccgggcttatgtctatgtcgtggagttccagaagcgaggtttgcctcatgtccatttcctactcatcatgcagagaaagtacaagctaacttgccccgatcagtatgatctccttatctccgctgagatccctgacaagaagaagcgtcgtgatgatgggcgtaaggaaacggttcgaggttgtgaattggacaacagatgggtcgtcccttataacccttacctcctccggctcttcaactgtcacatcaatgttgaggcgtgcgggagcatcgaggctgtcaaatacttgttcaaatacatatacaaaggccacgatcgtgcgtctgtggctgtgacagatgcaaacaaggctgatggtgacgttgatgagatcaagcagtatagagatgctaggtcaatgcttacagcatattttgaggcaaataggctacacgaggtggctcggggcatcctttaccgtgatttcctgagtgatgagggggagcgcttttttcttcgacttctcttaaaccatgtgatgggtgctacctcctatgcggatctaaggacagtagatggtgacacactaccatcttttcgtgaggcagcacaaatgaggggactgcttgaagcaggcgacacaatagatgagtgtctcaacgaagccgctatttaccaaatgtcgtcagcactacgaaggttgtttgcaacaatactggtatactgcgagccgaacgatgtggcagaattatggcagagacaccttgattcaatgtcagaggactatcaccgtagtactcaaagcaaaacccatgtgcaacagatggtcttgattgacattagaaacattttgcagtcaatgggtaaagacataaagacattccctctccttgctatcatcgacaaatatgacgattcacatggtactgatagagagatttacgaggaggaaagtatcgagccgatagcagaagacgttgctatgaaagaaaccctaaatgaggagcagaggtctgcctatgataagatcctatctgtcgttgacaccaataacggtggagtgttctttgtggatgggcctggtgggactggcaagacctatctgtataaggcactgcttgcggcactacgcaatcaggacaagattgcagttgcaacagctacatctggtgttgcggcttccatattgcctgggggaggactgcccattcacgcttcaagataccacttactattgatgatggtgctacaagtactccctgttgtatgcaaggggtcaagggctcagatagttgctgcctctctacggagttcttacctctgggaatccatgtgccatctaaagcttgttcaaaacatgagggcacagagcgacccatggtttgcagaatatttgttgcgcgtcggtggtggaactgaggaagcgaacaacgatggtgatgttcgtcttccagatgagatgatgtaccatagttttgacaccgcggtggatgatcctaataactattacccatcggagtttctaaacacgctgactcctaatggactacccccgcacgttctgaagctcaaagttggatgcccaatcatgttgcttaggaatatagaccctgctaatggactttgcaatggcacgaggttggtggttcgtggtttccaaaaaaacagtattgatgctgaaattgtccttggccaacatgctggaatgcgaattttcttgcctcgtatacccctgtgcccctctgatgatgagatgttccctttccagtttaaaaggaagcagtttccgataagactaagttttgccatgacggttaacaaggcccagggccagacgattcctaatgttggtgtgtacttgccggaaccagtgttctctcatggccagctttatgttgctctatcaagggtcaccgctcgatcgaaagttaagatacttgccattccagtccatgatgagaagaagaagaagggggttgaaaggaactcagcgataaatggcgcaacatacacaaagaatatcgtttataaggaggtccttacgccgtag

SEQ ID NO: 37532 - DNA, 343 bp, Zea mays
  Peptide Sequence Number=SeqID_79311
gcgggctccggggactcctcggtggcggcaatggcgcgacggtggcccggggcggcggtggcggacctccgcggctgcacggggaacggcggcgagggagaggtggaagaggggtctgctggagcgcaaatgggggagggggagagggcgagtggggctcggggctcaagtggccaggggcggggcggttgcgagctccacgcgcgacgtgggcgcggagaaggcggccgcgcgcagctcgggcggcagttacgcgaggacgacggggctgacaagccggtcccgcgagcagagagagaggggaaagcgggggcgggcgcgcggaaggcggccgcgctgacgg

SEQ ID NO: 37533 - DNA, 375 bp, Zea mays
  Peptide Sequence Number=SeqID_79312
atggcgcgacggtggcccggggcggcggtggcggacctccgcggctgcacggggaacggcggcgagggagaggtggaagaggggtctgctggagcgcaaatgggggaggggggagagggcgagtggggctcggggctcaagtggccaggggcgggcggttgcgagctccacgcgcgacgtgggcgtggagaaggcggccgcgcgcagctcgggcggcagttacgcgaggacgacggggctgacaagccgggcccgcgagcagagagagaggggaaagcgggggcgggcacgcggaaggcggccgcgctgacgggcgggcccgccagggcagagagagcgggggggggggggggggggaggcgtgcgcgcccctga

SEQ ID NO: 37534 - DNA, 276 bp, Zea mays
  Peptide Sequence Number=SeqID_79313
atgaccctctctccgataacactgcaaagcactggaaatccaatgagcgtcaaagaatttactcaaagcaatattgtgtatttgattctaatactaggagaaaacaggattggattctggagtgccatgacttcgaatcttatgaatcaatcgcggaacgtttacaacaagaaaattctcgctgataaagaggacagtttggatgacataaatctcttctcaataataactgtcatggcattcttgttatttcgaacaccaacaatgacgatctag

SEQ ID NO: 37535 - DNA, 1193 bp, Zea mays
  Peptide Sequence Number=SeqID_79314
ttgggaaggtgattgtcgatctatgcctggaccgtgtgcgcaagcttgcatacaactgcactgggcttcagggattcttggtgttcaatgctgttggtggtggtactggctctgtacttggttcactgctgttggagcgcctttcagttgattatggcaagaagtccaagcttggtttcaccatttatccttccccacaggagttaaatctggtcggtaacaagatcagtgaggtagatggtcttcaccgacttctaaagatcaaggttctggacttgtgccacattcagttcttctatagccactatacttggggcgcagaggatgctaggaaaatactcaataattatggtacatgtccaattctaagtatggagatgatttggtgctcaggccccatgtccaagaaatggaccacgcttggctattgccaccacctgcacgccccgcttgcgacgcaaggtggatcacctattcaggccgagagccatcctcgccccaaatcctcactgcagtcgacggccacctcccatctacaccaggaccaagaggctcatgctgcagaggttggacctaccactgctctttttaaggctaaagtgccctggtcatcccaaataggaaatctctcggagaaacaaagagtcttcaaaacggtgaaagggtggacaccttcactaccagtgttgggttctcttgtccctattgttggtggagttgtattggcgtcgatgactgaagtttcattcaactgcaatattgtgtatttgattctaatactaggagaaaacaggattggattctggagtgccatgacttcgaatcttatgaatcaatcgcggaacgtttacagcaagaaaattctcgctgataaagaggatagtttggatgacataaatctcttctcaataatatctgtcatgacattcttgttatctgctccactgatgctatgtgtagaaggaatcaagtttagcccaccgtatctacagaatgctggagttaatgtaaaagaattatttgtaagagcggcacttgctgggacatctttctatttttaccaacaggaatggccagtgtgtgtcacctatggtgcagttgctgggtatttgttcggaatggcagtgtcattggtcctaagtcctaatagctgttcacaagagaagggtttgtgcaaaaactgtctggcctag

SEQ ID NO: 37536 - DNA, 224 bp, Zea mays
  Peptide Sequence Number=SeqID_79315
ttgggaaggtgattgtcgatctatgcctggaccgtgtgcgcaagcttgcagacaactgcactgggcttcagggattcttggtgttcaatgttgttggtggtggtactggctctgtacttggttcactgctgttggagcgcctttcagttgattatggcaagaagtccaagcttggtttcaccatttatccttccccacaggattggcctcatgttcctctttga

SEQ ID NO: 37537 - DNA, 437 bp, Zea mays
  Peptide Sequence Number=SeqID_79316
ttgggaaggtgattgtcgatctatgcctggaccgtgtgcgcaagcttgcagacaactgcactgggcttcagggattcttggtgttcaatgttgttggtggtggtactggctctgtacttggttcactgctgttggagcgcctttcagttgattatggcaagaagtccaagcttggtttcaccatttatccttccccacaggagttatatctggtcggtaacaagatcagtgaggtagatggtcttcaccgacttctaaagctcaaggttctggacttgtgccacattcagttcttctatagccactatacttggggcgcagtggatgctaggaaaatactcaataattatggtacatgtccaattctaagtatggtatattgtgctctaatatttttaggcatcattgtttctgttaaatactttgcccatggttaa

SEQ ID NO: 37538 - DNA, 828 bp, Zea mays
  Peptide Sequence Number=SeqID_79317
atggcgctctccgtctcctccctcgccgtcgccctctcccacctctccctcccatcgacctccacccccaagcctcacctagccccgctcctgcgcctgcgctccacctactgccgcaggcgaagccaccgaagccttcgaggcgggcctgcccatggaggaggtgatggctgtcgaggaggaggtagaggaggatgccctgtcgggaatcgtgctgcgaaagtatgtgaagcatcgactgccgggcaggaagttgaagccgatgtggcatttctttttagcttgagtgatacctcagttggcgtcgcacatgatgccttcaacacattcttcagcgagactggttccggcaagcatgtgcctagggccatcttcgtcgaccttgagcccactgtcatcaacgaggttcgcactggctcgtaccgccagctcttccacccagagcagctcatctcagggaaggaggacgcagctaacaactttgctcgtggccactacacggttgggatggtgattgtcgatctatgcatggaccgtgtgcgcaagcttgcagacaactgcactgggcttcagggattcttggtgttcaatgctgttggtggtggtactggctctggacttggttcactgctgttggagcgcctttcagttgattatggcaggaagtccaagcttggtttcaccatttatccttccccacagcactatgccaccctcttttatcaggctcttttgttcactggatttatgctttctcttttagcatcaatcatcgtgaaagaaaaagttttggctaatataagtaatgttagggcgctagatgtgtag

SEQ ID NO: 37539 - DNA, 486 bp, Zea mays
  Peptide Sequence Number=SeqID_79318
atgaagagagcatctctatttgaaggtgtcaaagattcaacagaaaccaatagaaagaacaagacatggttcaaaacaaaggagcaaaaagaaatcgaagtgctccctggtctggcacaccggactgtccggtgtggcaccggacagtgtccggtgcaccagggaggattgccttcgaactcttcaccttcggttttctcaggcgcagaccactataattcaccggactgtccggtgcaccaccggacagtgtccggtgctccagagagaagcggcttcaaactagccagcttcgggaaatcggaaggccgctccgctaaaattcaccggattgtccggtgtacaccagactgtccggtgcgccagcggagcaacggctacctcgcgccaacggtcgactctgacagtgaacagtgcgcaacagtacacgcggctgaagtcagagcagagaatcagaggggcaccggactgtccggtgccacatga

SEQ ID NO: 37540 - DNA, 1046 bp, Zea mays
  Peptide Sequence Number=SeqID_79319
gcgcagaccactataattcaccggactgtccggtgcaccaccggacagtgtccggtgctccagagagaagcggcttcaaactagccagcttcgggaaatcggaaggccgctccgctaaaattcaccggattgtccggtgtacaccggactgtccggtgcgccagcggagcaacggctacctcgcgccaacggtcgactctgacagtgaacagtgcgcaacagtacacgcggctgaagtcagagcagagaatcagaggggcaccggactgtccggtgtacaccggactgtccggtgccacatgaggacaaagcctccaacggtcgaccagctccaaccccaacaggagacgccacttgtaacccaccacgcatacagagccatcccagaaagtagggtattacgcctctcaaagcgacctgaacctgtagaaaatcgcttatctctctctctcgtgctcatagcacgaactatcgagccacaatcaacaacaccgtcctacccaaaagcaccgcaaggggacctctgggtgtgcggtcggacactagataccgacagggggctgctatcgtgtgtggttacgagggcacgatggagcggccgaccagtggcggatggatcggatgatgcacacgacgaggattgcggggcgtgggtggtggtgtacctagaaggcgccgatggaagggcgtggagtgcgggggcggggatgtacctggacgggagtgtgatggaagggcgtggagtgggggtgaggaccgcagaggcgataatcacggaggtgagggagaatggcgtctgtccgagcgtagagagcgaatgcaggggcgaggtgtactacctcaccgatgagcctggggtgcacttcgtctggcagaccagccaagagtcatcggtactcgctatgtcacgcgcgttcgacgactactctattaaggactgtggcgtcatctcggcaccggaggtgatgcagaggaggaccgacaacaatggcaagtttgtcattctcgtcaccgtcggggtagcttttgtcctgatatgcctttaa

SEQ ID NO: 37541 - DNA, 294 bp, Zea mays
  Peptide Sequence Number=SeqID_79320
atgtacctggacgggagtgtgatggaagggcgtggagtgggggtgaggaccgcagaggcgataatcacggaggtgagggagaatggcgtctgtccgagcgtagagagcgaatgcaggggcgagaccagccaagagtcatcggtactcgctatgtcacgcgcgttcgacgactactctattaaggactgtggcgtcatctcggcaccggaggtgatgcagaggaggaccgacaacaatggcaagtttgtcattctcgtcaccgtcggggtagcttttgtcctgatatgcctttaa

SEQ ID NO: 37542 - DNA, 282 bp, Zea mays
  Peptide Sequence Number=SeqID_79321
atggcgtgcatgccggctgtgtctgccccctccgtcctcgcgccggcaccggcgtcgacccgcacccacctctgctactcaacggaaatgcgacgcggcgcgctctccctccgtcccgcccgcgctatccccacgttgaggctcggcggccaccgcgacgcccgtggcgctgtcgtcgtccgcgccactgcggcagaggtatttgtggctacgggcacctacggcgctccccgaggccaagcgcgttgtgacagactgcccggttgtttcgctgcaggagcc

SEQ ID NO: 37543 - DNA, 504 bp, Zea mays
  Peptide Sequence Number=SeqID_79322
atggcgtgcatgccggctgtgtctgccccctccgtcctcgcgccggcaccggcgtcgacccgcacccacctctgctactcaacggaaatgcgacgcggcgcgctctccctccgtcccgcccgcgctatccccacgttgaggctcggcggccaccgcgacgcccgtggcgctgtcgtcgtccgcgccactgcggcagagggagccgtggagctgcaggccaaggtgacgagcaagtgcttcttcgacgtggaggtcggcggggagcctgcgggccgcatcgtcatcgggctcttcggagaggtcgtacctaagaccgtcgacaacttccgtgcgctctgcactggtgagaaagggtacggctacaagggctgctccttccaccggatcatcaaggactttatgattcaaggcggggacttccagcaaaacaatattttgttaaatattcctacaactgaagaagatgtgagtagaattgaagttcctattcatcattcaacatag

SEQ ID NO: 37544 - DNA, 287 bp, Zea mays
  Peptide Sequence Number=SeqID_79323
gtgagaaagggtacggctacaagggctgctccttccaccggatcatcaaggactttatgattcaaggcggggacttccagcaaaacaatggtactggtgggagaagtatttatggtgaatgctttgatgatgaaaattttacactgaagcatgttggccctggtgtgctaagcatggcaaatgctggccccaacacaaatggaagtcaatttttcatttgcactgtgaagcgaaatgctcttggtgagtttgaacctgaggtaccgcgaagtcttctcttacgttag

SEQ ID NO: 37545 - DNA, 321 bp, Zea mays
  Peptide Sequence Number=SeqID_79324
atggaccgtgtgatcgtggtcatggtcgtggcctccatcgaggaggctaagccgcccaacttccagtcccatgctaggaagtacacaccagagcgccgccagaagttcatccgagggcaacgaagcaaccacgagaagatccacacggccacaatgaagatcctgatgtaccagctttgcaacaatgtggtcttcgtccacgaccccaaggtgctgcacagggagctcaagttgcacatacttctcaaggaccacaagaccatggtgctcaagatcgccgacctcagccttagccacgccatcaggttcatggagatctag

SEQ ID NO: 37546 - DNA, 636 bp, Zea mays
  Peptide Sequence Number=SeqID_79325
atggctgtggtggggcagcaggtgagtggcaggcatgtctgcatgtgcgggttccccgtgtgcgcatgcaccaggggccgacatggaccgtgtgatcgtggtcatggtcgtggcctccaccgagggccagttgatcgccgactcgtcgaggccctctgtgatggagacagcgacagccaccccaagccctccactgccaccgccacaaagacaaaaaccctagcgctttgcaacagcgtggtcttcgtccacgaccccaaggtgctgcatagggagctcaagttgcacatacttctcaaggaccacaagaccatggtgctcaagatcgctgacctcagccttagccacgccatcaggagtctaacctttgctatgctctccaggagttccttttctttagcaggtcctccatgctaccgtcaacacagacggcggcgaggccgggcagcaggatctgcgccagcatgtgcatcacctctaagtcacagtacgcacactggatcagcgatacgtgaaggctgcgtcgaggccactagcgcgatgatctgctatgcaactggatgctcgccgacccgttgttcctcttcaaagttggcaccgaggttggtgcggttgataaacattaaacatttgtag

SEQ ID NO: 37547 - DNA, 231 bp, Zea mays
  Peptide Sequence Number=SeqID_79326
atgccattcgtaaatgcactggttgcgttgtacctttaccctttcttgaacactgtctacaaaacaagagagtatgagttcttgaggcttaccagcctgggtgtgatcggtgctcttgtgaagtcttacatggttgttccccagggcctgagaatattgaatcatgagatggatgatgatcgcgtagagtgcctaagccaccacctcaagaaagtagtgttgaaaggttaa

SEQ ID NO: 37548 - DNA, 414 bp, Zea mays
  Peptide Sequence Number=SeqID_79327
atgccattcgtaaatgcactggttgcactgtacctttaccctttcttgaacactgtctacaaaacaagagagtatgagttcttgaggcttaccagcctgggtgtgatcgatgctcttgtgaagccggttgttaggaagtgcaccgaaatgttgagtcgagcaatttgcatatctggcggcgatttttatgtacgcaggtttcataaggatggacctattgtttggaggttgttggctttatctccattccgacgtctgtcaaagatggatgaaaaagcaatcattttaccatatagggatacctcacttaactcagaggaacctatggctgagatctctagccaaaagattcagattgcagtcctggacatgatcgctgcatatcttcgaacaagagaaatgttgttgcactag

SEQ ID NO: 37549 - DNA, 1734 bp, Zea mays
  Peptide Sequence Number=SeqID_79328
atggcctcccagacgactttgactggagggaccacaccgtcgttgggcccatcaagaactaggtcgttttctgctgaatctgggttcgtgtggatcctgctggtcgttcagcgcattgggagtgctggagggtgcgcactacctcacaactgttgcttagcagtagtcggtctacaggtcctcaaagggaatttgtttgtaagattcagcaactggatgctcgccgacccgttgttcctcttcaaagttggcaccgaggttggtgcggttgagccttctccaaaatctgtggcagagcgctcgccgatgccagagccacagtgcttcctcgccgcctcagccacccacaccctcctccatcggcgcggcagcaacggcttcacgcacacactggttgcactgtacctttaccctttcttgaacactgtctacaaaacaagagagtatgagttcttgaggcttaccagtctgggtgtgatcggtgctcttgtgaagccgcgccccgctcccaaattacctccacgcgccccatcgcgccctcctccccgcgcgctcaaatctcgccagccactgcctgccgtgatccactgctgcaaatccgccgccatcaacgaccaccttccatcgaccccgtgcctgccccgcgcgcccgtgcgtgagcctgcctgccctgtgccgccgtgcgagccccgtcccgcgggaataagcaagcgccctcggctaccaaagaggacgcgcgcgggcgcgactcgcgagagaagcggtcgcaagcacaatagcacaagtagcagccgacctcctcgaacgagccgagccctcgcccagtcgccgccgcccgcgcccctcccactccccaccgcgcttcagcttcagtcgaggcgccaccgcccggtgagcgagaaccaacgagccgccgggctgaagttgcgcgtcgcctcgccatccgccccagtgcgctcctgggccgccgtcgcagcggggcggagatccacagcgtacctcccacggcttccgtcggttcctggtaacgaatcaatccctagcctctgcgtgtggattgatgatgatgttgttgctgctgttctacgaccggttcctatcccgcgggatcttccctctccccttcgctctaaggcaaatctaagcctgaatccttttttactgggatcggtgggttcgcttgttgtgcatgtggagggtggacaacttgctgttgtcccaacaatttggggggccagcacactgcacgtctttgtgttccagaggagatttcgagtctgcgatcgaggcagcggcgtgttgataggagacggcgggaggcgctcgaccgacaacgaaatcattccaggaggaagtgaagaacctaaacccaaagccttcaccatgcctcagccaaccccacgcgcggtgcctccatcccgccatcaccggccaactatgcgcgccgcctacatcccaccatcactggccttccccaagcgccgaccttgcaccaagatgctaaatgcatacagcttgtttgaggtgagagtatctggtgatggaaattgtcagctcaaggaatgtaactccttatatgaaggttacattccaataaaatataaacattattgcaagaaaatgaagaagtatggtgaatggggtgaccatgtcacgctacaagcagctgctgacaagagactcaggatcagttctccaagtactcctgcacttggaaccatcaacaaagagtaa

SEQ ID NO: 37550 - DNA, 444 bp, Zea mays
  Peptide Sequence Number=SeqID_79329
atgcaggcgattcccctgccggggaatttacgatccattgttcggggcgacagctcccgccggtgggacctcgtgttcagcgtcgtgaagccgtccgtgatccagctgcgggggcccaccaaggtcagcgtcttcatcgccagcaacgacgccgagcaggcctgcaacttcaagatcaccggcatctaccacgacggtacaaaccttgcaccttcttcgactcttcccgtccgatttgactatctaaaactgttgtttctgattcggtgcgctggcgatctggtcgcccgcagggagttcgtgaagaagaactatggtgacatcaaggcccgcaacccctccctccccttccttgtccgcgagtgctccggtgtccagccccagctctgggcgcgctacggtacgcgtgcatctatttcgtcctctttctcctgctgtggctaa

SEQ ID NO: 37551 - DNA, 446 bp, Zea mays
  Peptide Sequence Number=SeqID_79330
agctggggctggacaccggagcactcgcggacaaggaaggggagggaggggttgcgggccttgatgcctgctcggcgtcgttgctggcgatgaagacgctgaccttggtgggcccccgcagctggatcacggacggcttcacgacgctgaacacgaggtcccaccggcgggagctgtcgccctggagccgggtttgccgaggcgaggcggcggcggcgctcgctgttggagatccatgggcgggcgcgaagggagcacgggagggagcggctgcggcgcggctgcgggatccgtgggggatgcgggatccgtggtgggggcgggggcgatgcgtggggggtgagagcgtgcgcatcggacggctgagagactctaaagcgtattggacggttgagatcgtcagaaggcagaaccaagcagagacagcctaccccttagagccttaa

SEQ ID NO: 37552 - DNA, 1294 bp, Zea mays
  Peptide Sequence Number=SeqID_79331
ctaccctgagctgacatccaaacccagatggtggtggagaactctagcttgtgtgccgtacttgctgccactgcacaacatgtggtcttatgccgacgtgatctaccagctgcacacttacttgcaggggttttcgctgttgtacaccttcatcgacaccatgactctgtgccctgggtggctctttctggtgatatttatgacagtgtacttcttcgttgtgaggcggaagtggtcgccgcactttctgaggttccatgtgatcctagcgatccttctagacactggctcccaagcagtggccaccatgtgtacctggatgccaagcatcgtttatcaggggaagccaatgcagtacttctggatgtctatcgcgttcatacagatcttcacagtgcttgagtgtttgcgctgcgctctttgtggaatgtatcctaatgtcccattcatatcccacaccgctttcattcactctgatctgaatctgttcagccgtccgatgcgcacgctctcaccccccacgcatcgccccgcccccaccacggatcccgcatcccccacggatcccgcagccgcgccgcagccgctccctcccgtgctcccttcgcgcccgcccatggatctccaacagcgagcgctgccgccgccgcctcgcctcggcaaacccggctccattggcgacagctcccgccggtgggacctcgtgttcagcgtcgtgaagccgtccgtgatccagctgcgggggcccaccaaggtcagcgtcttcatcgccagcaacgacggcagcgctcgctccctccgtaccatccaatggcccgccaaccgctccctccactcccgagatcgtggcccgacgccgtgccactcccgagaccgcgccacaaagtcgcggaacgtcctcaccgatgcaccgacgcgcccccgagcccgcttcccgacgccaccctcacacaacctgccccctgtcaccctctggacgggacgacacagctgcggcgggcgggtggctggcggcgtcgcatggcggacccgacgcccatacaacctccagggattgcttcctccccatggcgtggatctagatggtcttcacggcagaggaggaagaggtgccacagcagcttccgaagacatcgtcgacgtcccttaccacctcgattggccatggcatcgacagcccccagccactgcccgcgctaacggtggcgtggacctcactgtcttcaagcagttcgagcggatggagaggaaggcgaagatacgcaatggggctatagaggatggtccaccgtag

SEQ ID NO: 37553 - DNA, 513 bp, Zea mays
  Peptide Sequence Number=SeqID_79332
atggcacacagggttgttaatggtgtaatgcgtccccagactgttcagcatgagattgttgtctcagaagctgctgcccctgctgctccagtgatggacggtgatgcttgcaacatccattctaatgctttccaagattgtctcaacgactatggcagtgagatcagcaagtgccagttctaccttgacatgttgaacgagtgccgccgtggtggtgtctgcctgagcttttcctccaattgggattattcatggcatgcgcaggagttttgtaatgtgggtgatgatgcttgtcttattctgtgggatgctcgaactggcattgccccacctgttaaggttgagaaagctcacagtggagatgttcattgtgttgattggaatccccttgattttaactatatcttaattgagtatgatggtattaaggttcaattcggcataattgttgaaacaaattcgatctctatcagttccttatacgttcaagtaatgaatctttcaattgattaa

SEQ ID NO: 37554 - DNA, 303 bp, Zea mays
  Peptide Sequence Number=SeqID_79333
atgctctgcgtcggaaacttcggcgtctacctgctcatcgcgcgctgtgcgcaggagttttgtaatgtgggtgatgatgcttgtcttattctgtgggatgctcgaaccggcattgccccacctgttaaggttgagaaagctcacagtggagatgttcattgtgttgattggaatccccttgattttaactatatcttaattgagtatgatggtattaaggttcaattcggcataattgttgaaacaaattcgatctctatcagttccttatacgttcaagtaatgaatctttcaattgattaa

SEQ ID NO: 37555 - DNA, 846 bp, Zea mays
  Peptide Sequence Number=SeqID_79334
atggccgcggtggagacggcggacgacaagtcgcggcggcggccggcgagcgcgtggcgcctgtgcacggtgacgcaggtggaggagcttaagcgcatgctgcggctgctgccggtgtgggcgagcggcatcgtcttcgcggcggcgtacacgcagatgaccaccaccttcgtcctgcagggcgacacgctggacccgcacgtgggcggcggattccgcgtgccggccgccgcgctctccgtcttcgacaccctcagcgtcatgctgtgggtgccgctctacgaccgcctcgtggtcccgctagcgcgccgcgccacgggccaccgccgcggcttcacgcagctggcgcgcatgggcgccggcctcctcgtgctcgccgctgccatgctcgccgcgggggcgctggaggtggcgcggcgccgcgtcgtcgcgcgccacggcgtgtactacgacacccacacgggcgccggcggggacgcccgttacctgccgctctccatcttctggcaggtgccgcagtacgtggtggtgggcgcgtccgaggtgttcacgctcatcggccagatcgagttcttctacgaccaggcgcccgacgccgtgcggagcctctgctcgggcctctccatcacgtccttcgcgctagggaactacgtcagctccgcgctcgtcgccgtcgtcgcgcgcgccaccgcgcgggccggccgggatgatgggtggattcccgacgacatcaaccgcgcgcacctcgactacttcttctggctgctcgccatgctctgcgtcggaaacttcggcgtctacctgcttatcgcacgctggtacacgtacaagaagaccgtggattag

SEQ ID NO: 37556 - DNA, 243 bp, Zea mays
  Peptide Sequence Number=SeqID_79335
atgaacaagaacacaagagacacaagatttatcctgaggttcggtcacaccaccaaggtgccctacttcctcgttgaggcgcccacaaagagccgggtctctttcaaccctaatcctccctttgccgaccacaaagatcaagctctcacactaatctttgctcaaacgagcgggaccccagttgaagttgaagttcagctggagttgagaaagctcaactcaaatgaagttcagctcagctga

SEQ ID NO: 37557 - DNA, 210 bp, Zea mays
  Peptide Sequence Number=SeqID_79336
atgaacaagaacacaagagacacaagatttatcccaaggttcgatcacaccaccaaggtgccctacttcctcgttgaggcgcccaaaaagagccaggtctctttcaaccctaatcctccctttgctgaccacaaagctaaagacatagttgaagttgaagttcagctggagttgagaaagctcaactcagctgaagttcagctcagctga

SEQ ID NO: 37558 - DNA, 198 bp, Zea mays
  Peptide Sequence Number=SeqID_79337
atggctaagctgagcttttcagctgagctgaacttcagctgtgttgagctttctcaactccagctgaacttcaacttcaactggggtccaggcaggttcaaccgggatccagggcaagttcaaccggggtccaggaaaagttcagtcggggttttttccccggacctcactggtcaaaaccggttgaactggtcctag

SEQ ID NO: 37559 - DNA, 1094 bp, Zea mays
  Peptide Sequence Number=SeqID_79338
cgcgccaggtgttcgacggccacaacggcgtgtcggcggcggtctacagcaaggagcatctgctcgagcacgtcatgagtgcgctgccgccggacatcgaccgcgaagactggctgcaggcgctgccgcgcgcgctcgtcgccggctttgtcaaggccgacatcgatttccagcgcaagggggaggtgtcgggaaccacggcgacactggtggtcatcgatgggttcacggtcacggtggcgtcggtgggtgactcgcgctgcatcctggacacgcagggcggcgagttgcagctgctaaccgtggaccaccacctggaggagaatgcagaggagcgggagcacgtcacggccagtggtggggaagtaggccggctcaatctctttggcggccaggagacgacagccaatcgccaaaacggaaaggtgacagcgcttggagctgccggtgagttctcgtgctccgacaatgctggaccgattcccatctctgccttgtatgatgctgtggaagcttctcatgctgctgccgttgcggcctcggaggctagatgcgcggtatttgttgctgagaaggaggccaaggctgcggttcagttcgccgccattgccgtggacaaggttgaagcagttaaggcctcatcgaatgtggatcttgtcgacttcaagtatcatgtgaacataaagaattcgttgagatatgctattcaagaaatgaggaggcaatctaaactgttgcattcggttcaaaaattgtgttcgactattccagaggtacaaggtggcaagataggaaaggttcgcgggcatctagaacatgtgtgcaaggagctagacaaaacttcaattgtctgtgaagaagatttagaaactaagaatccaacttgggatctttacgacaacccttccgtagatgatgaacatcctctagatgatgatgaacttggtgatggctacagtacagaaggtccagagctatgggaaatggtttttgaagacttcaagtgggaagagattaaagctaatgtctcattcgaagagcactatcgtgtgataaactacaggttcgaagagataaacgaccgtaacatgtag

SEQ ID NO: 37560 - DNA, 1683 bp, Zea mays
  Peptide Sequence Number=SeqID_79339
atgaagctcttgctgagttccatggacgcctcgtcgacggtggtggggccggccctggcccccgcgaccccgcctcaggcgtcggcgggtagtgctgtggcggctgcattccccctcttcagctccggcggcgggcatccggcaagggaaagaaacaacgggcgccagtacaggagggggagcacaggaggtggcgaggtcaaggaagcgctccactggcactcggtgggcgaagtggggtggagaactggtcgtctggagactcgaaatcagaggagaaacggacgcaactcgacaacggctctgctgaatcgaataaaatattcaggtccggcacgccgccacgcgtccacgcgcgagtgctggagtgtccgtagagcgccagtggagcgcttccttgacctcgacacctcctgtcctccccctcccctactggcgactctcatcggcctggagctccacgcggggggctccgagcgcccggccctgcgctacgggcacgccggcttcgccaagcgtggcgaggactacttcctcgtcaagcccgactgcctccgcgtccccggggaccccgcatccgcgttctccgtcttcgccgtgttcgacggccacaacggcgtgtcggcggcggtctacagcaaggagcatctgctcgagcacgtcatgagtgcgctgccgccggacatcgaccgcgaagactggctgcaggcgctgccgcgcgcgctcgtcgccggctttgtcaaggccgacatcgatttccagcgcaagggggaggtgtcgggaaccacggcgacactggtggtcatcgatgggttcacggtcacggtggcgtcggtgggtgactcgcgctgcatcctggacacgcagggcggcgagttgcagctgctaaccgtggaccaccacctggaggagaatgcagaggagcgggagcacgtcacggccagtggtggggaagtaggccggctcaatctctttggcggccaggagacgacagccaatcgccaaaacggaaaggtgacagcgcttggagctgccggtgagttctcgtgctccgacaatgctggaccgattcccatctctgccttgtatgatgctgtggaagcttctcatgctgctgccgttgcggcctcggaggctagatgcgcggtatttgttgctgagaaggaggccaaggctgcggttcagttcgccgccattgccgtggacaaggttgaagcagttaaggcctcatcgaatgtggatcttgtcgacttcaagtatcatgtgaacataaagaattcgttgagatatgctattcaagaaatgaggaggcaatctaaactgttgcattcggttcaaaaattgtgttcgactattccagaggtacaaggtggcaagataggaaaggttcgcgggcatctagaacatgtgtgcaaggagctagacaaaacttcaattgtctgtgaagaagatttagaaactaagaatccaacttgggatctttacgacaacccttccgtagatgatgaacatcctctagatgatgatgaacttggtgatggctacagtacagaaggtccagagctatgggaaatggtttttgaagacttcaagtgggaagagattaaagctaatgtctcattcgaagagcactatcgtgtgataaactacaggttcgaagagataaacgaccgtaacatgtag

SEQ ID NO: 37561 - DNA, 336 bp, Zea mays
  Peptide Sequence Number=SeqID_79340
atgcagccgccacagcactacccgccgacgcctgaggcggagtcgcgggggccagggccggccccaccaccatcgacgaggcgtccatggaagtcagcaagagcttcatcaaggctctacagggatccggttggatttatgcttcatgatgatggcgcgggagctcaagaacctacgcccacaactctgcaccatctccgagtactgcgagaagtcctacctccacagcaagcagaagcaggactgagtcacgttccttctcctggaaagttgtccactggctataaagccttgtttgtttttaaccaaatactagaattaccttctggtcattaa

SEQ ID NO: 37562 - DNA, 324 bp, Zea mays
  Peptide Sequence Number=SeqID_79341
cgctcagtgcactgtaagcgaactagccctaagtggtttgcattcaggacaaatactgatataacttatgttttagatattttggtcacattaactgatttgaaacttttattcagatttgatggtgcagttcccgagccacgaaatgggattagaagtgggcatgtgcctgggagcaaatgtgttccgtttcctcaggttcttgacagctcacaaaagctattgcctccagatgagctccgtaaacggtttgagcaagaaggtggggaggactgcacagttcgcatttggagcatcaaaacaggcgagctctggagtgaatga

SEQ ID NO: 37563 - DNA, 351 bp, Zea mays
  Peptide Sequence Number=SeqID_79342
atggaggtgaaagagaacatcaagacccagacacatcaacttatagatgctcgatcaaaacctaggctacatgcatttggtagttcctatgactacttgaaaccgctcagtgcactattaactgatttgaaacttttattcagatttgatggtgcagttcccgagccacgaaatgggattagaagtgggcatgtgcctgggagcaaatgtgttccgtttcctcaggttcttgacagctcacaaaagctattgcctccagatgagctccgtaaacggtttgagcaagaaggtggggaggactgcacagttcgcatttggagcatcaaaacaggcgagctctggagtgaatga

SEQ ID NO: 37564 - DNA, 351 bp, Zea mays
  Peptide Sequence Number=SeqID_79343
atggaggtgaaagagaacatcaagacccagacacatcaacttatagatgctcgatcaaaacctaggctacatgcatttggtagtttctatgactacttgaaaccgctcagtgcactattaactgatttgaaacttttattcagatttgatggtgcagttcccgagccacgaaatgggattagaagtgggcatgtgcctgggagcaaatgtgttccgtttcctcaggttcttgacagctcacaaaagctattgcctccagatgagctccgtaaacggtttgagcaagaaggtggggaggactgcacagttcgcatttggagcatcaaaacaggcgagctctggagtgaatga

SEQ ID NO: 37565 - DNA, 225 bp, Zea mays
  Peptide Sequence Number=SeqID_79344
atggaggtgaaagagaacatcaagacccagacacatcaacttatagatgctcgatcaaaacctaggctacatgcatttggtagtttctatgactacttgaaaccgctcagtgcactattaactgatttgaaacttttattcagatttgatggtgcagttcccgagccacgaaatgggattagaagtgggcatgtgcttgggagcaaatgtgttccgtttcctcag

SEQ ID NO: 37566 - DNA, 228 bp, Zea mays
  Peptide Sequence Number=SeqID_79345
atggaggttggtccaaccacatttgaagcaaagttgcagcctcatcttctttggagtcttgatcaggtgaaagagaacatcaagacccagacacatcaacttatagatgctcgatcaaaacctaggctacatgcatttggtagtttctatgactgcttgaaaccgctcagtgcatactgtaagcgaactagccctaagtggtttgcattcagacaaatactgatataa

SEQ ID NO: 37567 - DNA, 354 bp, Zea mays
  Peptide Sequence Number=SeqID_79346
atggcggctgggattggagggcaggattggagagtaaggaatcgaggcggggcatggcttgcggccgtgattggaggcgagttgggcgcttggcgggcagctttctgcgcattcctggcggccgtgattggaggcggaggttggggtggcccaggaggctacgtttatcagaaggcctaccttgaattcttctgcgcaaaagagaagttgtacgaccagctaattgagaagatcaaagcattcccttctctcactttcattgcggtgaacaaggatggagaatcgttctccaatattgcaccgaacgccgtgaatgctgtcacgtggggtgggcttgcctggcaaggagattag

SEQ ID NO: 37568 - DNA, 1500 bp, Zea mays
  Peptide Sequence Number=SeqID_79347
atgaagatgggagatgaagaaacggcggcggctgtgtcccttggctcgagcggtgaaaagactgcccccgcccctgcccaacgcacagccccgcgcgaaacctccgcacgcccgcctgtcctccgcatccgccgcgaatctcgcacccctcaagcccgcacgccgcgaaacctccgctaccgaatcgatctcacgcccgcaagccagccctcgcgaaccccgccgccgccgcctgcgcaagaagctgaggagggcgttcacacctcacccctgcgcgaaccctactcgatctgctcgtcggagagggatgacgcgtccgagggggccgtcctcacccgttgcggcttctcgacgtgggcatccatgacggctctcgcgatgccctacaggcccgtgttgcggaggtccgggcgccccatctccttcgccgcgagttcggccaggtccgggcgccccatctccttcgccgcgagttcggccaggtcctccgcgttcgccacctccagcccgctgcggcttctcgacgtgggcgtccatgacggctctcgcgatgccctgcaggcccgcgttgcggaggtccgggcgccccatctccttcgccacgagttcggccagcgtgttggggacgtagtcggcgtgaagaagctggaagatgaggcagcggcgcccgacacagagctggtggatggctgttttgctgtaggcgccgctaaagctggggcgccactcgacgtccagcccgacgcgttcgcgtgccacccgcaccgcaggccggtgggcagtggtgaaggcgaagatgacagctatgagatggagattgggttgcccatggacgtgcagcatgtggcgcacatcacgttcgataggttccatggcctccatgctgtagcaaggttgttgtggagcgtcgaccacctcgacctacagctcaaaactattactctgtggccgctcctctacctgctcgactcgctctcctcgcagtaccgcgccgtcgccacggcttcatgcctcccaaatcttcccatcgccgccccaccatggaatgccacctcggggacggcgccgggcgccggtgcgccgtcgggcggcctggtgctggtctccaaggatccggacaacatccgcgagatcgccactggaatggttgtcaatccatgcccatttattgaactctggtctgctgctcctaaccatatagagaatgctttgagagatgagatgcttgttgaagctgagaaggcgaacctcgaggctgcgaagaaagcagtagtggctctgtcccgtgatgagcctacttctcagtcgacaactgggtcgtcctgcactcccggcgtcgagccaccgcgagtagagaataaggcaaggatcttcgagcagaatgccactgatagtgagtgcaaggtcgatcctaaagtgctctccaagctatatgatccgtgggtgatgccacataccaaggatgtcgaagttgagtacctcctgcgctgccttgactaa

SEQ ID NO: 37569 - DNA, 1782 bp, Zea mays
  Peptide Sequence Number=SeqID_79348
atgaagatgggagatgaagaaacggcggcggctgtgtcccttggctcgagcggtgaaaagactgcccccgcccctgcccaacgcacagccccgcgcgaaacctccgcacgcccgcctgtcctccgcatccgccgcgaatctcgcacccctcaagcccgcacgccgcgaaacctccgctaccgaatcgatctcacgcccgcaagccagccctcgcgaaccccgccgccgccgcctgcgcaagaagctgaggagggcgttcacacctcacccctgcgcgaaccctactcgatctgctcgtcggagagggatgacgcgtccgagggggccgtcctcacccgttgcggcttctcgacgtgggcatccatgacggctctcgcgatgccctacaggcccgtgttgcggaggtccgggcgccccatctccttcgccgcgagttcggccaggtccgggcgccccatctccttcgccgcgagttcggccaggtcctccgcgttcgccacctccagcccgctgcggcttctcgacgtgggcgtccatgacggctctcgcgatgccctgcaggcccgcgttgcggaggtccgggcgccccatctccttcgccacgagttcggccagcgtgttggggacgtagtcggcgtgaagaagctggaagatgaggcagcggcgcccgacacagagctggtggatggctgttttgctgtaggcgccgctaaagctggggcgccactcgacgtccagcccgacgcgttcgcgtgccacccgcaccgcaggccggtgggcagtggtgaaggcgaagatgacagctatgagatggagattgggttgcccatggacgtgcagcatgtggcgcacatcacgttcgataggttccatggcctccatgctgtagcaaggttgttgtggagcgtcgaccacctcgacctacagctcaaaactattactctgtggccgctcctctacctgctcgactcgctctcctcgcagtaccgcgccgtcgccacggcttcatgcctcccaaatcttcccatcgccgccccaccatggaatgccacctcggggacggcgccgggcgccgcgccgtcgggcggcctggtgctggtctccaaggatccggacaacatccgcgagatcgccactggaatggttgtcaatccatgcccatttattgaactctggtctgctgctcctaaccatatagagaatgctttgagagatgagatgcttgttgaagctgagaaggcgaacctcgaggctgcgaagaaagcagtagtggctctgtcccgtgattcacaccatttagcgaatgatggtctggactgcagtgcagtttctttgccattcaaactgagatcgtgttcttgccattctcgcacctcacctccgcctccaatcacggccgccaggaatgcgcagaaagctgcccgccaagcgcccaactcgcctccaatcacggccgcaagccatgccccgcctcgattccttactctccaatcctgccctccaatcccagccgccatcagcgccctccgtcaactcctaccaaaatcgagccctagccgtcatcagcgccctagccgctacatgccatgcgctgcttcgccgccagtgctccaaatctcggccgtcatcagcgcctccccaattggaggagctcagcatcagccacggccccaccgcctggcccccatccaccccccgaattggcaagaacacgatctcagcagagcctacttctcagtcgacaactgggtcgtcctgcactcccggcgtcgagccaccgcg

SEQ ID NO: 37570 - DNA, 477 bp, Zea mays
  Peptide Sequence Number=SeqID_79349
atggcacaccgtggcggcgctcacaatttggcagaaactgcgccgagctccggtcgccgaaaccccaagtcgtggccacgagcaccatcccaggttcatagtgaagcccaggactgcaatcgcatcgcgtatggctatgcaggcgaggatcatgcggaatccacggattctgttgaacagcctgatccgaacctcacgggtccgagctctcgtggggaagaagggacgacggccgagggggtcccacacggcgatgtcaggcgcgagggtgtaaatgggctggtcaaggccattttggcccagtcgcagaaggaggatggacagggacaagatgggctgaactgcattcggcccagaaacatgaaccttcggacatgggatgaagttgtacatgatatgaagagcgtggttcgagagaagcatgaaccagttccgaagccacctgtggaaaagcttcggcttagcggtggaaaatga

SEQ ID NO: 37571 - DNA, 372 bp, Zea mays
  Peptide Sequence Number=SeqID_79350
atggcaaagatgcgacggctgttgattccttcccccccccccccttggctgacctttgctggtattggtggcatgcgcccagttgccggtgcccgcggcgaggatcatgcggaatccacggattctgttgaacagcctgatccgaacctcacgggtccgagctctcatggggaagaagggacgacggccgagggggtcccacacggcgatgtcaggcgcgagggtgtaaatgggctggtcaaggccattttggcccagtcgcagaaggaggatggacagggacaagatgggctgaactgcattcggcccagaaacatgtttcttcttttctatttcccattttcagttttattccaagtctcaagttcgtaa

SEQ ID NO: 37572 - DNA, 327 bp, Zea mays
  Peptide Sequence Number=SeqID_79351
atggcagcgagcgcggttgggttcatggcggtggcgcttttccctccccctggcgaggatcatgcgggatccacggattctgttgaacagcctgatccgaacctcacggatccgagctctcgtggggaagaagggacgacggccgagagggtcccacacggcgatgtcaggcgcgagggtgtaaatgggctggtcaaggccattttggcccagtcgcagaaggaggatggacagggacaagatgggctgaattgcattcggcccagaaacatgtttcttcttttctatttcccattttcagttttattccaagtctcaagttcgtaa

SEQ ID NO: 37573 - DNA, 912 bp, Zea mays
  Peptide Sequence Number=SeqID_79352
atgaaggccgcgcgggggagacgctgggaaagccgcacctccgcgcccccatcaatcccgcccaccaccaagcttgccgcctaccaaacccgccagctccgcgcgagatccgccacagttatgccgcgcgagggagatggcgggatagccgctaggcagatccgcttgctcgcgagggagaggaaggaaggccgctccgggctaagcagatgcaagtcggtgcttgtcaagaacaaccggccatgcccggggttgccagggaagcccgtccacggtgtcgcaccattccccgcctcgaattcggggtctccaagcccggacgccatcagcacactccgtcagcgatttggaaaccgcgcagatccagaccatcaacgcctagggtggaggggattcttgcatgccgcgcagatccaggccattccccgcctaggtccatcgtttgaactccataagatttatcttcctggcaacccacgagtacatgggtgtatccttcttaatataatgagaatggagttttttgcgaatagctcaagcagaggaaatgttagtcggtcactctgtgtggattttttgttcacaaatgattttaaggctgttaagcaattttttagtcggcttctcattcatactgaactgtacatgtgcaacatgtttgcagctgaattttttcatgaccttcacgaagaggtaatggccactgcttctagaggacatggtttattgatccggttgcagcagttagaggcagaattttcaatggttgaaaaggctattgtatctcagacggggcactcaaattacccacatgatgatggattattcttcagatttgatgttgctgctggtgctggagcctcaaaaagaacctgtgaagctggttgctactgttcaacagttcagaattaa

SEQ ID NO: 37574 - DNA, 342 bp, Zea mays
  Peptide Sequence Number=SeqID_79353
atggtgcccttccttccccggcacccgcaacccgccagctccgcgcgagccaccggcgggatacccgcctcccccgcgcccccgccagctccgcgcgagccgccagctccgcgcgtccgccgcagttttgcgctccagctccgcgcgacccgccagctccgcgcgtccgccgtagtgatgccgcgcgatgaaggccgcgcgggggagacgctgggaaagccgcacctccgcgcccccatcaatcccgcccaccaccaagcttgccgcctaccaaacccgccagctccgcgcgagatccgccacagttatgccgcgcgagggagatggcgggatagccgctag

SEQ ID NO: 37575 - DNA, 1237 bp, Zea mays
  Peptide Sequence Number=SeqID_79354
atgtacgtgaaggtcagcatggacgacgcgccctacctcaagatggtggacatcaagatgtactccagctacgaggacctctccatggcgcttgagaagatgttcaactgcttcatcactggtgagtactgttcggttctatgcttctgtctaatgcatttccctcttgtaagtactgcgtcgtccaatgacatttctgccagagaattgtcaagctacagttttaccgagcaaaacttcaaacaagtcatctcggcaaactgggcgcccaacagctactaccgctccaacatccagtacgaggattttggctctgctgctggacaggctactggctctgctgttggactgcccggtaaagtctatcgctttgagcagcaccattttagccttggtgctggtttcaagagctgcttttgttttcccactatcctttctatcaaatttgacaaaaaaactccaaatggaaagatatcttttaggcaacaggttattgtttggtgggcgggtctcatgagaggtgttgtgtctattgcgttggcttacaataagataaatcttgtgtttggtctatctggtgttaatggttgctctctgaaaactaacgaaaatcttgaggttctacgaggcattcctgttgagaggttgatgatagaaacagattctccatattgtgacataataaatactcatgctggaagccaatatgtaaaatctgtctggccatccaagaagaaagaaaagtatgagccagattcaacagtaaaaggtcgcaatgagccttgtttagtcaggcaagttcttgaggtagtggctggaagaaaaggaatttctgacatagaaggcctgagtagaactctgtaccgtaacacatgtaggctcttctttcctcaggatcttgacgtgtctgctaatgcgcagcttgagagtgttatggcgatggaatcccaagcagaggcactcggccagttagcaactgatgatttattagaaggaaaggacgtggcagaacctggaacacctgtggagattctctttgtttctggtgtcttgctgaccattgggtcaaaaccaactgtgcagttcttcactaagcctaaggatcacaagtgtgactcatcggaacctgatttatgtgattcgggatgcaatggtgtgcagatgacgcgtccttcagtcatctccaaggctggtggccttgaaagagagaaggattaccgttacactgggagtgatg

SEQ ID NO: 37576 - DNA, 1335 bp, Zea mays
  Peptide Sequence Number=SeqID_79355
atgtacgtgaaggtcagcatggacgacgcgccctacctcaagatggtggacatcaagatgtactccagctacgaggacctctccatggcgcttgagaagatgttcaactgcttcatcactggtgagtactgttcggttctatgcttctgtctaatgcatttccctcttgtaagtactgcgtcgtccaatgacatttctgccagagaattgtcaagctacagttttaccgagcaaaacttcaaacaagtcatctcggcaaactgggcgcccaacagctactaccgctccaacatccagtacgaggattttggctctgctgctggacaggctactggctctgctgttggactgcccggtaaagtctatcgctttgagcagcaccattttagccttggtgctggtttcaagagctgcttttgttttcccactatcctttctatcaaatttgacaaaaaaactccaaatggaaagatatcttttaggcaacaggttattgtttggtgggcgggtctcatgagaggtgttgtgtctattgcgttggcttacaataagataaatcttgtgtttggtctatctggtgttaatggttgctctctgaaaactaacgaaaatcttgaggttctacgaggcattcctgttgagaggttgatgatagaaacagattctccatattgtgacataataaatactcatgctggaagccaatatgtaaaatctgtctggccatccaagaagaaagaaaagtatgagccagattcaacagtaaaaggtcgcaatgagccttgtttagtcaggcaagttcttgaggtagtggctggaagaaaaggaatttctgacatagaaggcctgagtagaactctgtaccgtaacacatgtaggctcttctttcctcaggatcttgacgtgtctgctaatgcgcagcttgagagtgttatggcgatggaatcccaagcagaggcactcggccagttagcaactgatgatttattagaaggaaaggacgtggcagaacctggaacacctgtggagattctctttgtttctggtgtcttgctgaccattgggtcaaaaccaactgtgcagttcttcactaagcctaaggatcacaagtgtgactcatcggaacctgatttatgtgattcgggatgcaatggtgtgcagatgacgcgtccttcagtcatctccaaggctggtggccttgaaagagagaaggattaccgttacactgggagtgatggtaaatgcaagtttgacaagtctaagattgttgcttcaattcagaacttcagtgttgtgtctgtggatgagggtcaaaatgttgctaacctcatataa

SEQ ID NO: 37577 - DNA, 381 bp, Zea mays
  Peptide Sequence Number=SeqID_79356
atgcgagcactgaagtcaggcggcaggcaccggcatgacactgaccagccgaacaccgatgagtggcaagttgggggacgaggagcgaggatatcagccgttgcggtgaaggtcgtgggagttgtgcagttcttcactaagcctaaggatcacaagtgtgactcatcggaacctgatttatgtgattcgggatgcaatggtgtgcagatgacgtgtccttcagtcatctccaaggctggtggccttgaaagagagaaggattaccgttacactgggagtgatggtaaatgcaagtttgacaagtctaagattattgcttcaattcagaacttcagtgttgtgtctgtggatgagggtcaaaatgttgctaacctcatataa

SEQ ID NO: 37578 - DNA, 261 bp, Zea mays
  Peptide Sequence Number=SeqID_79357
atgccctgccccaggcgcttcgacctccactgtgagcacgaggcgggcaagacggagccaccgctgccgcaggccaacgtcgtcgagctcaccgttcacgaccgcctctgtgacgcatgtcggctgcccccttcgttgctcattttgtgccacagggaagggagggtgttggccatcgaggagacgttcaaacacagggtgacaaatgttgtgttcatcgaggagacgttcaacccctctgtttttctgcatcaagaatga

SEQ ID NO: 37579 - DNA, 459 bp, Zea mays
  Peptide Sequence Number=SeqID_79358
gctttattcataactctaaagacaaagcattctacacctaagtatgggctcgtctaccttacatccttaattggcaaggcttctcaaaagcacaaggggaaaatctctctgtctctagctacaaaaactactcttgttatctattatgatggcaaggacaactccattgccactgagagtcaaatcaagttcttgaaggtagagaacttgggaaatcaattggttcaacaaaaaggaaagcccaagatagaagtgtatggaaaggacaagaagaagggtgatggggctttaacaactcatgctaggaggttcgtctccaccatgccctgccccaggcgcttcgacctccactgcgagcacgaggcgggcaagacggagccaccgctgccgcaggcccacgttgtcgagctcaccgttcacgaccgcctctgtgatgcatgtggcccgtcaatgtcatag

SEQ ID NO: 37580 - DNA, 654 bp, Zea mays
  Peptide Sequence Number=SeqID_79359
atggcggtatcggcgtttgagtttgccagccattgtggcgcatggatttatggaggttctgttgagctgaccatggagcacggatggcggaagtttgttggggaagagaaaaactcggctgacaaatcggctccacaagtcaaccacccacaacaacccgcacagccagcgaagaggctgacacagagggcccacgtgtcggtgacccaagcacggatcgcgggccacgcaggaatctcattgatgcagctaatatcgttgcattggcagcttttatctactttctggaggcctgaatgcacggttggtggggacgatggtcagcaagttacagtgcatgatcctgaggttagggatccacttcctcttacgatacaccatatgcccatagctgtaacatttgcatattttggtgaaggtaacatcgtggttcttgatcccacatacaaggaagaagcagtaatgggagggaggatgactgctatagttaactcaaatggggatgtttgtgccattcagaaagctggtggagagggtctcatgtcaagtgttaccatgcagtgtttaagaattgctccagtaaaggttgctgatataacaagcaaaataaagaaagcgctggaaaatgttcaccgatattacataagcatctga

SEQ ID NO: 37581 - DNA, 633 bp, Zea mays
  Peptide Sequence Number=SeqID_79360
atgtgtccagcagaaccatatgtcctatcaggaggaaaggacaaatctgttgtcttgtggagcatccaagaccatatatctgcccttggggattcctcgtcttctcctggagcatctggcagcaagcagtctgttaaaactgcaaatgaaaaggagagcccaaagttgatcctagagggtggcgagttcgatgctgtgaagcccctgaagcagagccgcgtgggattccggggccaggcatggttccatatcaacttctgggctcgcccccgcagcagcagcagtaataacaagacaatcaagcgcttctttgctgaggtgcactacaagccaacctcgatcagtagcccctcatcgtcttcgtcatcacttgcaataactgcagttcctatagttcaaatatgcatcattatcgaggaacctctatcccaatataggcgtagctgtgccttttgtcccagctaccgggacattttacaccctaagggctgccgtaaggtcgtctgtggaaatgacaaggacctgtttgaacagcgattggacccttgctgctgcactggtatggggattgggaagatgccattcactgcccgcccagacatgtctgcttttctcaacatcagtcctaagtag

SEQ ID NO: 37582 - DNA, 861 bp, Zea mays
  Peptide Sequence Number=SeqID_79361
atggcagggaggatgactgctatagttaactcaaatggggatgtttgtgccattcagaaagctggtggagagggtctcatgtcaagtgttaccatgcagtgtttaagaattgcttcggtaaaggctgctgatataacaagcaaaataaagaaagcaatattaacaggacataaggaaaatgaggaatttgcgcttgccatgtgtccagcagaaccatatgtcctatcaggagcatctggcagcaagcagtctgttaaaactgcaaatgaaaaggagagcccaaagttgatcctagaggtatatttcatggacatgacaacacagttgaagatgttcagttctacccttccagggatcagtgcaacttcttcaaaattccccaggttctccacgctctcgcccactacaatgccaggcaccctgtatggtggcgagttcgatgctgtgaagcccctgaagcagagccgcgtgggattccggggccaggcatggttccatatcaacttctgggctcgcccccgcagcagcagcagtaataacaagacaatcaagcgcttctttgctgaggtgcactacaagccaacctcgatcagtagcccctcatcgtcttcgtcatcacttgcaataactgcagttcctatagttcaaatatgcatcattatcgaggaacctctatcccaatataggcgtagctgtgccttttgtcccagctaccgggacattttacaccctaagggctgccgtaaggtcgtctgtggaaatgacaaggacctgtttgaacagcgattggacccttgctgctgcactgaaggaacaattttgggtcgaattcccacagttagggatatggtgatggtgtga

SEQ ID NO: 37583 - DNA, 417 bp, Zea mays
  Peptide Sequence Number=SeqID_79362
atggagagtcagccagagagacgcgtcggcagcattatggcaccatcaatggcgacgttaccagagagaataatggggaaaggaaacggatgtagtaatgctccagtaaatcgtgagacgaacggactgcggcacttgcgcttcgagtcgcgcggcgaggatgtgcgcagggcgcgtcggtcacggcgaggtggacgctcgaggaagggcaaggcggtcggcttggttcggctcccggggttgcgcgcctggggctcggtggatggcggcgcgaggcagtcgcgcctgggcgtcgcgggcgtgcaggtgcaggggcacggcagcgggtcctggcggcttcctagtgcggtcggacgcgggtggccgggtcgcggcacctgcgggtggggctgggtggctgcgcagctcggggcttga

SEQ ID NO: 37584 - DNA, 276 bp, Zea mays
  Peptide Sequence Number=SeqID_79363
atgcagcgccgccccgcccttgaagccgacccggccgcccgagctcaagccccgagctgcgcagccacccagccccacccgcaggtgccgcgacccggccacccgcgtccgaccgcactaggaagccgccaggacccgctgccgtgcccctgcacctgcacgcccgcgacgcccaggcgcgactgcctcgcgccgccatccaccgagccccaggcgcgcaaccccgggagccgaaccaagccgaccgccttgcccttcctcgacgcgcgaaactag

SEQ ID NO: 37585 - DNA, 411 bp, Zea mays
  Peptide Sequence Number=SeqID_79364
atgccgtcctcttcttcatttgctgccgatacgccgccggccggcgcatcgtccgaggacactttgagcaacgtggcggtggaggagttgcatcctggtgataccgtggagtttggcgtgtcgcggatttcctcggtccgtcgccgcccagcccttgaagccgacccggccgcccgagctcaagccccgagctgcgcagccacccagccccacccgcaggtgccgcgacccggccacccgcgtccgaccgcaccaggaagccgccaggacccgctgccgtgcccctgcacctgcacgcccgcgacgcccaggcgcgactgcctcgcgccgccatccgccgagccccaggcgcgcaaccccgggagccgaaccaagctgaccgccttgcccttcctcgacgcgcgaaactag

SEQ ID NO: 37586 - DNA, 1167 bp, Zea mays
  Peptide Sequence Number=SeqID_79365
atgcagcggctcacggggcgggacatgtgggacgtggaggagtgccagagcccgcgcatgggcagcgtcatcctcggcgtcgacggcggcgccagcaacaccgtctgcgtctgcatccccgccgccatgcccttcaacgacccgctccccgtcctctcccgcaccgtcgccggctgctccaaccacaactccgtcggagaggacagggcaagggagacgctggagagggtgatgtcgcaggcgctgctcaaggcgcgccggcgacggtcaaatgtctgcgccgtctgcttggccgtagcaggcgtcaaccatccagtcgatcagcagagaatgctggactggctcagggacatatttccaagccatgtcaagctgttcgtggagaacgacgcggtggcggcgctggccagtggaaccatgggcaagctgcacggatgtgtgctgatcgcagggacagggaccatagcgtatgggttcaccagtgatggtagggaagctcgagcagcaggtgcagggccagttctgggtgactggggcagtggctatgggatttctgcccaggcattgacagcagtggtgagagcttatgatggccgaggccccgaaacagtgcttaccaacaacatccttgacttccttggactggcatcgccagatgaattgatagggtggacatatgaagaccaatcatgggctcgtatcgctgaccttcttccagttgtggtagaatcagctgaaagtggtgatgaggtggcaaacaagatcctacacaattcagttggggaactagcttccagtgtcaaggctgtagtgcaaaggcttgaccttggtggtgaagatggcaagcatccatttccacttgttatggttggtaaagtccttgaggcaaacaaaaagtgggacattgggaaagaagtgatagattgtgttaccaagaattacccaggtgcctatccaatacatcccaagtttcaaactgacacatcttcatactacaaaatttgccaaattagtattcatgagtttctgtcatctgttgctcatcaaccaagcaatggcaacagccatacgtcaggcaacgacgtgcccgtgacatccggcgtgcgcgtgagcgcgctgaacgcgcccaagaggcaacagccaggctgggataaggctagagaataa

SEQ ID NO: 37587 - DNA, 750 bp, Zea mays
  Peptide Sequence Number=SeqID_79366
atgggcaagctgcacggatgtgtgctgatcgcagggacagggaccatagcgtatgggttcaccagtgatggtagggaagctcgagcagcaggtgcagggccagttctgggtgactggggcagtggctatgggatttctgcccaggcattgacagcagtggtgagagcttatgatggccgaggccccgaaacagtgcttaccaacaacatccttgacttccttggactggcatcgccagatgaattgatagggtggacatatgaagaccaatcatgggctcgtatcgctgaccttcttccagttgtggtagaatcagctgaaagtggtgatgaggtggcaaacaagatcctacacaattcagttggggaactagcttccagtgtcaaggctgtagtgcaaaggcttgaccttggtggtgaagatggcaagcatccatttccacttgttatggttggtaaagtccttgaggcaaacaaaaagtgggacattgggaaagaagtgatagattgtgttaccaagaattacccaggtgcctatccaatacatcccaagtttcaaactgacacatcttcatactacaaaatttgccaaattagtattcatgagtttctgtcatctgttgctcatcaaccaagcaatggcaacagccatacgtcaggcaacgacgtgcccgtgacatccggcgtgcgcgtgagcgcgctgaacgcgcccaagaggcaacagccaggctgggataaggctagagaataa

SEQ ID NO: 37588 - DNA, 618 bp, Zea mays
  Peptide Sequence Number=SeqID_79367
atggctaacctttcattgaaacctacccctttttacagcattggtgcgttctactggatagatcgtggttctcaagcttcacgagagaataaagggaaaacactgcaaagcatttttgaaagtgttgtccacgagttacgcaagattttgcaacttgaacctgcattggttttggtcacaaaggcatccgtttatggggaaggcaccacaacagcaaatgacttcaatcgggattcttcaaaatacatgctggaggatcctagcggtttgggatattcaagacgggaggaagaaagaactctctctaatcgggaatatatgccatcaatatggcagtcttttgtcacacacaggataaaccttcaagtagaagcagaagttccctctgtgctggaaagtgaggtgcttcctttgcatacttctgagtgggtgcaaccttgcctcaaaatgaaggagaagttttctattatggatctgcagcagtccaaacagctgcaacagtgtcggcttgtagccagccgaacacgcccaattgctattttgaagtttttgataggcttgcagtattatgagccaggtgctgtaaatcatgttttcatgatacttgaagattattaa

SEQ ID NO: 37589 - DNA, 1251 bp, Zea mays
  Peptide Sequence Number=SeqID_79368
atggccggagaggcgggaaaagacccccaagcgtggctagccgccaacgagacggcgtcggccttcctctcccgttcactctcctcgcggccccccatcaccctcccgccaccactgcaccgcgcgcctctccgcccgggcaacgtcgtcgagatcgccggcccgtccaactctggcaagtcccacctcctcctcatggctgcagtgcagtgcatattaccaaaggagtgggagggaatctactttggggggctggggagggcggtcatgtacttggacttggactgccgatttgatgtgctacggctggctcaaattctgaggaatcgtattgcagagggctgccgtttagcacaccttagaaatggagaccctgaaaatgatgtcactaaagatgagtttcagtgttctcttcaaaatacactgttttctgattgtatgcagcgcttcttgtatgctcgatgttgcaaaagtcctgaattcatagatgctttgaagtgggtcgtttctggatgttggagaaaattaatcactgcagtgccaaaagaaatgtgtaagggcctcagctccttgatgatcttggtggcgtgggaggtctggaaacaccgaaatgatagtgtgtttgagaatttgagtccaagtactcaggctgtgcttaggtcaactgtacagtctcaatcaaggagggaagtgtccggcgctggtatatattttgttatgatagacaggaaaacactgcaaagcatttttgaaagtgttgtccacgagttacgcaagattttgcaacttgaacctgcattggttttggtcacaaaggcatccgtttatggggaaggcaccacaacagcaaatgacttcaatcgggattcttcaaaatacatgctggaggatcctagcggtttgggatattcaagacgggaggaagaaagaactctctctaatcgggaatatatgccatcaatatggcagtcttttgtcacacacaggataaaccttcaagtagaagcagaagttccctctgtgctggaaagtgaggtgcttcctttgcatacttctgagtgggtgcaaccttgcctcaaaatgaaggagaagttttctattatggatctgcagcagtccaaacagctgcaacagtgtcggcttgtagccagccgaacacgcccaattgctattttgaagtttttgataggcttgcagtattatgagccaggtgctgtaaatcatgttttcatgatacttgaagattattaa

SEQ ID NO: 37590 - DNA, 399 bp, Zea mays
  Peptide Sequence Number=SeqID_79369
atggccggagaggcgggaaaagacccccaagcgtggctagccgccaacgagacggcgtcggccttcctctcccgttcactctcctcgcggccccccatcaccctcccgccaccactgcaccgcgcgcctctccgcccgggcaacgtcgtcgagatcgccggcccgtccaactctggcaagtcccacctcctcctcatggctgcagtgcagtgcatattaccaaaggagtgggagggaatctactttggggggctggggagggcggtcatgtacttggacttggactgccgatttgatgtgctacggctggctcaaattctgaggaatcgtattgcagagggctgcctgttgtatattgaagagcctgggttcaacctaaaccttttttatatattctag

SEQ ID NO: 37591 - DNA, 156 bp, Zea mays
  Peptide Sequence Number=SeqID_79370
atgaagtattatttgaggttggtattgtatctgaaggtaactgaagtattatttgaggttggtattgtatctgaagatgatgtgggttttataccttcagaggttttgttgacgcgagaagtgtatagaacccaatgtgggttgttcgaggaatga

SEQ ID NO: 37592 - DNA, 234 bp, Zea mays
  Peptide Sequence Number=SeqID_79371
atgaagtattatttgaggttggtattgtatctgaaggtaaatgaagtattatttgaggttggtattgtatctgaagtttgggtcgtgacctatgggtccgaccgtaccggtacaacttaccctcccagcttgcccgaggaagggttttcgttgacgcagggaagtgttatagaacctatgggtgggttgttcgaggaaatgagatgggtattgggttatattaaggactactga

SEQ ID NO: 37593 - DNA, 183 bp, Zea mays
  Peptide Sequence Number=SeqID_79372
atgaagtattatttgaggttggtattgtatctgaaggtaaatgaagtattatttgaggctggtattgtatctaaagatggtatggttttatactctaagaggtacttgattcatgttgggaatgagggaagtagcagcacgtccaccttcactgataataacgctgtccaagcacatccatga

SEQ ID NO: 37594 - DNA, 264 bp, Zea mays
  Peptide Sequence Number=SeqID_79373
atgaagtattatttgaggttggtattgtatctgaagatgatgtggttttatactctcagaggtgcttgttgctcatcaagggaagtgggaagtagcagcacatctgttggggcgaaggcaaagacgccacccttcgctcgaggccttcactgcagtcgctggtctgacagagacaaaacgggcagggatacccttcgctccattcggcgccagacgaagtcctgcggcgatgtcatcccgcggcacggcctcgtccagctctaa

SEQ ID NO: 37595 - DNA, 222 bp, Zea mays
  Peptide Sequence Number=SeqID_79374
atggcgcccaagcggaagaaccagaattctgctgcggtagtcattcctcccatcgaccccaacagccagttgccgttcacaggtaaaatgaagtattatttgaggttgatattgtatctgaaggtaaatgaagtattatttgaggttggtattgtatctgaagatgatgtggttttatactctcagaggtgcttgttgctcatcaagggaagtgggaagtag

SEQ ID NO: 37596 - DNA, 237 bp, Zea mays
  Peptide Sequence Number=SeqID_79375
atgccatacaagaggttcgcagaagcgattatcatggcctcaaagaaatataagattgcttacagcaagaaacattctggatgggtggaggatatttttaagtgggaacatacaattcggactggtgttccaattgacttaagagggcttaataccagctacctcattctacaagctatgaccatgtgggggaatgacatacgaatggaatttgttagggatgaaaagattctttga

SEQ ID NO: 37597 - DNA, 1068 bp, Zea mays
  Peptide Sequence Number=SeqID_79376
atggcacaaatatgtagcactgaacgaagggttttactttacctagaccatgacatggtgtttattccgataaacatccgagggacgcactggtatcttgtcgtgatcaatgcaaaaaaatatggagatacaagtgctcgattcacttgctcttcatgtggcctctttcttttgaactatatcgaatactggacaggggatgaactgtctgacagttttactcaggaaaaaatggctgctatattactatctttagacctgaataagagaaggggatgtctgttatacaaatatgaaaaagaagttgactctggaagcccatccgatgttgagatattagaaaacccaacaaattctaagaagaggaaactactccacgtgcttgatgatagcgaagtagtgtttgaagatgaggaaggccctattactcaagcagacttgcaaaggtggtttgatgatgatggggataaaagaactcctgtaaaagtctcgaccgatgggtgcaccaatgactttttaatggttggtctttccacaaaggacatgccagtgaccaaagctgattcatcaatagatgttttatgtgattatatcatggcaatagaagatgatacgacactagagatgacatgggtgcgaagtttcaatccttttaagatagaaatatctatcaaagacctgcaaaacatattaacgataaatcaagatatgactctaagatgttttgacatggctgttcgactgcttgccaataaagagtcatgtaggccgaaagaagaaatcataaagaatagaaagcattatacggacatgcgtttgtggatatatcatgttaaaaagcatgtgacttttatcgactttacaccgactcaagattggtgtaaacacatgccatacaagaggttcgcggaagcgattatcatggcctcaaagaaatataagattgcttacagcaagaaacgttctagatggacagaggatatttttaagtgggaacatacaattcggactggtgttccaattgacttaagagggtattttcttcgtaccatcttcgcagtaatttaa

SEQ ID NO: 37598 - DNA, 843 bp, Zea mays
  Peptide Sequence Number=SeqID_79377
atggacactggcctatcttatcttatgaatggcgatcttgccctcatcgattttattaaggaaatcccttgtgaaccaagggtagaagtcgtgcttattgatgatgcctttgttgaaagaaagtcgatggaatgtttatttcagctgaatgcatatctagatgacgaggttatagactgttacataaatttgataaaagctcaaaagcatctaaagtgccgatctggaggtcacgttctcatagaaaatgctttccagtttaatttcttgaagcgagatggcgatgttgaaattagaacaaaggagctatatccaattaaagacatggcacaaatatgtagcgctgaacgaagggtgttactttatttagaccatgacatggtgtttattccgataaacatccgagagacgcactggtatcttgtcgtgatccattcaagaaatatggagatacaagtactcgattcacttggtacttcacaacaagaccgcaaagacctcactgactgtattaaaggactccaaagacaaactgatatgatatatcaacgtaaggagttaaaagaccacaggtggccagacctccaagttgcttcttggccgctcaaagaaatagaaatggcatatgcaaagcagacatatagctcttcatgtggcctctttcttttgaattatatcgaatactggacaggggatgaactgtctgatagttttacccaggatgtaaagatttttcgaaggaactttgtgattgatctgttaagttatgaggacaattcgtgccgatatgccatctctgcaaacatacaacagagacttatcgatatcgctaaaaaggattag

SEQ ID NO: 37599 - DNA, 909 bp, Zea mays
  Peptide Sequence Number=SeqID_79378
atgggcataagaaagcgaatcgcgggcggtcgtgggattccccaccaaatcgcggcggtcgtgaggaatccgcggcagattcggtgccaggctcccgtcgcggacaaaaagctgcggcgcgcgagcggttcggtactggagggatgcgtgggtgcggatttcgcggcggctttgcagcagcggaggatgtttgaggaatgcttccaacagaggtggtacaggactgctgcttgctacatactggtcattgctaagctggagggccctgcagtcagccagtattgtgcactccgtttgctacaagtaattttcttacctccaccatgtggtggttttagcctgggcattagttgcctcagatgttccatctctcagtctcacctccatgtgactgttgctttccaggctacacttgatgagtctttgtatgagcttgctggggagttggttcgcttcttgctaagatctggaagagattttgagaatgccactccagactccgagaagctctctccaagatttctaggctattttctgttccgttcgccatataagaggcaatcttctgatttgagaagtaactcaatgaaagaacttagtccacatattgcttctgttatgaacattctagagcgtcatgctagctatttgatgtctggcaaggatctttctaaactcgttgcttttgtcaaggggactcaatttgatcttgtggaatatctacaacgagaaaggcaagggtctgctcgtctagagaattttgcttctgcactcgaactgattggacaaaagctccaaatggatacactgcaaagtcgacttgatgcagagttccttctagctcatatgtgttcagtcaagtttaaggaatggatcgtggtgctagctactttattgcggcgtgcagag

SEQ ID NO: 37600 - DNA, 1182 bp, Zea mays
  Peptide Sequence Number=SeqID_79379
atggggaatctgtggatctcggcggagggcgaagaaaaccttggagagcagggaagcggacgcgattcgcggatggagaggattgcgccaggaggagcgattcgtggatgtagagagcagggaatgggcataggaagcggaatccgcggcggtcgtggggtttcccaccaaattcgcggcggtcgtggggaatccgcggcgtatgaccatgataggatgtttgaggaatgcttccaacagaggtggtacaggactgctgcttgctacatactggtcattgctaagctggagggccctgcagtcagccagtattgtgcactccgtttgctacaagtaattttcttacctccaccatgtggtggttttagcctgggcattagttgcctcagatgttccatctctcagtctcacctccatgtgactgttgctttccaggctacacttgatgagtctttgtatgagcttgctggggagttggttcgcttcttgctaagatctggaagagattttgagaatgccactccagactccgagaagctctctccaagatttctaggctattttctgttccgttcgccatataagaggcaatcttctgatttgagaagtaactcaatgaaagaacttagtccacatattgcttctgttatgaacattctagagcgtcatgctagctatttgatgtctggcaaggagctttctaaactcgttgcttttgtcaaggggactcaatttgatcttgtggaatatctacaacgagaaaggcaagggtctgctcgtctagagaattttgcttctgcactcgaactgattggacaaaagctccaaatggatacactgcaaagtcgacttgatgcagagttccttctagctcatatgtgttcagtcaagtttaaggaatggatcgtggtgctagctactttattgcggcgtgcagagagagtcttctggatgtatggcttccatttaaatttgaggcagttgaacgactgcgagtggtgcagtgcgacgagcctggttttggtggatctctttaggcatgatttgcgattgtggaaagcatatagcattactctacagtcacatgatgtattcacagaatatcttgaccttcttaatatcttggaggaggagctttcatctgtctctgatcttacattgcaaaatggaccattgtcatga

SEQ ID NO: 37601 - DNA, 207 bp, Zea mays
  Peptide Sequence Number=SeqID_79380
atgaagcaaatcaaggaactggaattagagagaaattccctggttttggtggatctctttaggcatgatttgcgattgtggaaagcatatagcattactctacagtcacatgatgtattcacagaatatcttgaccttcttaatatcttggaggaggagctttcatctgtctctgatcttacattgcaaaatggaccattgtcatga

SEQ ID NO: 37602 - DNA, 432 bp, Zea mays
  Peptide Sequence Number=SeqID_79381
gccccacatgtcatacaagctgacccgaagcgcgaagaaggcgaatcgtcgcacagggagcgtgcaaccgccccgcggttatacgcccttccatcttcgccgcaaccagcagtcaaaaaggcgaaccgctgcacagggagtgtgcaaccgccctgcggttattcgcccttccatcttcaccataaccagcggtcaaggaggcgaaacgctgcacaaagagcatgcaaccgccccgcggttatgtgcccactcggcttcgaccgatggtccaacctctggcatgggggcccaggcccacatgacatgcactcggcgcaccagtttctgggtgcagaaaagtcgcaccgccactcgcgccaataccgcgcctcctcgaggccgtcgcagaaggctgagaagataaattttcaaatccaattgatagtcgcctag

SEQ ID NO: 37603 - DNA, 1587 bp, Zea mays
  Peptide Sequence Number=SeqID_79382
atggacacttgtctcctggggtggtccggagcccgtgtaaccgctcagcctggttccgtactgtgggcctgcacgctccaccactctgcgacgggcccaggtcctagtcaaggctacctcctgggggccatcgccaactctttcttaggtatgctggtctgtagcctcgacaaatcgagcctacgtcctaggggggccaggaatggactactctgcaccagcagggtcgcgttggaagctagctccgggcagcctcaccagcggcggcgaccacctctactccgagcggctcacctgcggaagcggccgcctctacaccaacggctcgccagcgacggcggccaccttcgcaccggtggcttgccggcaacggcggcccccacagtgcgtgcgaagaggtcatcaccctcgtcctcctacaggggtgaggacaagaccatcaaagaacgcgaccgccacctctacagcgtacgacgtcttgtacaaccccccggacggcatcggagcagtacggctggcggcgcaggggacgccacggatgtggcggacctgtgcacggcgcgatcgtcgcctgagcggtggatggacagccacgcctcgcttagcggtaggaggcagcgtcggaggcggcaccaaagccatcaaagccaaagagatggagccgcagcacggctcgcttcccacccccaaagagttggggcgcgagggatggagccatggctcagcccgctgcccaccttcacgaggctagtaatcatccttcccccgaatgctggaggaagaagcggaatggagcgtcacctccacggacatcccgcagaggtaggcgatgatggccgcctaaaagatgaagcagggcgccacggaaaggtcgtcgagaggagagacaccagcacaagtcctcccggcaaataccagcgtattccatccaagcaggcggtataccatttcgagcactcactcagtctgggtgtgctcgggatgaagtcacaaggccatggcaaactacgacaacgtgaagtagagaccttgaaggcaaaagggcgcagggagctcggaggtgaaaggacaccgcgagtgggagagaagcaagacatggctgctactcgaggggtgaacccctttttaaaggcagatttccccgctcgcgccccgaagcgtcacgggcaaggtctcccccgatgcgcaccagggttcccatcctatgacacgggggccaggcctcacatgtcatacaagctggcccgaagcgcgaagaaggcgaatcgtcgcacagggagcatgccaccgccccgcggtagcccacatgtcatgcccctggcgcgccagtttctgggtgcaaagaagtcacaccgccgctcgcgccaataccgcgtctcctcggggccgtcgcagaagactgagaagataaattttcaaaaccaatgcagcgactcgaggcaccccgcgcatggcccaacaaagacattaagtgcggaggtcacgggtcagtcagccgcggggacaggcgtggctgtcgacgtgaccatgggcagaccagcagtaattgcatcaacgggcgcgcagtggcagcgagccaatcgctaa

SEQ ID NO: 37604 - DNA, 435 bp, Zea mays
  Peptide Sequence Number=SeqID_79383
atggctaaagcacgaggacgaggactccctcatcaaacacagatgggaacccagggtcgggacctagtcctacggcaggttccaaaccaagaagggctccgcaactctcccccagctgggaaggacccttcaaggagggctcgacagcctgggggcggttctaaagaacggaagcccgttccatggggtggtctggagcctgtgtggccacttagcctagtcccatacccgaaagcctgcacactccaccactccgtgatgggtaccctagtatttggagttataagtcctatgggtccggcaacctggggtccggaactagagaatggacacttgtctcctggggtggtccggagcccgtgtagccgctcaacctggttccgtatcgtggacctgcacgctccaccactctgcgacgggtgtcctagtacctag

SEQ ID NO: 37605 - DNA, 459 bp, Zea mays
  Peptide Sequence Number=SeqID_79384
atggcggccagcgcgaggtcgagctggagcatgtgtgcagccatgggcgagcgcgagttgaagaaactggagaccagagatgagggagcaagttgcgctgatgcggcgtcgcatggtggagcagaggaaggggtgccgtgggttgaagggataaggagaggggttgaactagaggtgtcaatggggacctggggtttggtgcactgtcgtgctgggcttggtggtcggctctgccttaactcattcatacaaacaggacatgtgtatacgtatgaaatacccatgggtaatcgggttcggattattgcttcccaaacacatactcgtttacccaatgggtggagattttgtcccatatccatacccatggagacaatttttgtcccatacccatactctaatagggaaattccccatgggttagcgagtatcgggtccccattgacatctctagattga

SEQ ID NO: 37606 - DNA, 345 bp, Zea mays
  Peptide Sequence Number=SeqID_79385
atggggataatttttgtcccatacccgtaccctaataggggaattccccatgggttatcgggtatcgggtccccattgacatctctaggcctgactgcctgtcagcctcactctgtcaagtggcattgcagccggtgcggcgcaggtggcgctgtccttctgtcaggccgcgatttggtcagggttgcttcttggcgaagacagggcctcgggcaagccggaaatatgttcgtcgctggaaggggggcctcgggcgagatgaagatcctccggggtcggctgcccttgttcgaggctaggctcgggcgaggcgtgatcgagtccttcgaatggaccgatccctga

SEQ ID NO: 37607 - DNA, 555 bp, Zea mays
  Peptide Sequence Number=SeqID_79386
atgacttttggctgggctgctaaacgaagtgcaccccgggctcatcagcgaggtagtacacctagccgttgcacctctagatgtgctactcctctacatacatcttgttcgaggacactcacacaacatcaacaacaaccgtcgtcccagcgcacaagaatttatggccgcggtgtagccgctctggacctcgtccaagcgacggctgcgccggagcttgccgaacatagcgacgcatgcggccaagtaggactgcttccagaggtcgaactggcagttgccaagcttcttctcatcgtcgatgagcgacgccaacgcgagcgcctcctgccagtggtgtttgttcggggtttccaactaggcgtggggatgcacgtgggaatgggaatgagctttgcggggagaggaaatgagaaagacagtgcggggagggacacaattgggaatgggaaacgggtcaggacacagttgggaatgggaatgaaaacacagacagaactagagatgtcaatggggacccgatacccgataacccatggggaattcccctattag

SEQ ID NO: 37608 - DNA, 1984 bp, Zea mays
  Peptide Sequence Number=SeqID_79387
atggcaggtcttgttgcaacactgtcaggcacgattatggcgaggtttttgtgcatggaagatgacaatgaggtcactggagagtcacctgtggctgatgaatgggatatgttgtccctgacttcatcaatatatgctagcccattattccgaagaggatttgatccaattaatttgcctggatatgggaatgtgattaatattcaggaaggcacacaaactggattagtcatgtcagatggcttcgtgttccctccaagtgagcatgaaaatttgccaatagaaccagagcatgaggatttgccaatagaaccagggcatgatgaatcaaatacaaacagcgttgaaaaggaaagtagttgtgctggaaataacgatgatgactggtgtcatgtttcacctgaagaaatcgatgacgtaagtaatgaaaatctagctgacaacagtgacttgcctactgccagtgaagctacggtaccagattcccagcctacagaaataaatgctaagcgagagaaagatcataggacatgcaaggctgatcatacttgtgaaagatggtggaaaaagaaaaccacgtatctatttcatcatataaaaggagtgactacactctgctcagttgtggcagctggtgctgttgttggttttgttgtaatgggtcagaggtggcagcaggaccattggcaccttcatcaatttaagttcagtgtcagcggtgagctcatccgcgacggtcatccccggcggatatggggcggcgtttctctccatctgtgcctgtctctagtgctgcccctccgcgacggtcttctccggcggatgtggctggtagtgctggtgcggcgcagggcgatgcggggctatctgccatggatcgcggcggcatggtgggcaggtctcgtcgtcgccggcgtccgcggtatcggcggggtcatggtgcccatccgcgacggtcatccccggcggatatggggcggcgtttctctccatctgtgcctgtctctagtgctgcccctccgcgacagtcttctccggcggatgtggctggtagtgctggtgcggcgcagggcgatgcggggctatctgccatggatcgcggcggcatggtgggcaggtctcgtcgtcgccggcgtccgcggtatcggcggggtcatggtgatgcaaccagggcctgcccaggtgcctgttcgtggagatgtgcctcctccttgtatcatcgaatggagcgatcaggtggctagtggcgaggaggatctcgctaatgcggtcatggtttctgttatcagtgatgtgcccctggtctctgctggcgaggtggcggcggtgcttgcggccatgatcgatgttgccgcaagctctctggttctccgtcgggcctctccgtcgagcttcttgttggtccttccggacctggttctggttgagcgattgattggcattcagcaaccggtccgttctttgggtggcggtctcagtcttctgtgcaaacgttggaatcgtttggccggtgcccttggtcgtgtgctgccgtccttgattgatgtggagcttcgtggcatccctgcccatgtgtgggagacgtctactgctgatcgtcttttgtgcccttatgcctggatacagcaagtgcatcctgatacgctggggctgttggacctgtcaagtttcagatgtctggcttggtgttctgatctgtccaagcttccttcttccagggaactctgggtagttgaaccgccgtcgggcatcgttgaagtccctcctgtgaaacgggtgttatcctatccagttgagtttcggttctcggaggttcgcgctcctgctgcgcctagtcctcccgcgtctgatggcagagatgaggacgatggtggtgactcctccaggggtcgtcggcgtcggctccgctctccttcgcggccgcggcagtctgatccattggcggttacagcttctggcgtgggtggatcgcttcgggaactgg

SEQ ID NO: 37609 - DNA, 1776 bp, Zea mays
  Peptide Sequence Number=SeqID_79388
atggcaggtcttgttgcaacactgtcaggcacgattatggcgaggtttttgtgcatggaagatgacaatgaggtcactggagagtcacctgtggctgatgaatgggatatgttgtccctgacttcatcaatatatgctagcccattattccgaagaggatttgatccaattaatttgcctggatatgggaatgtgattaatattcaggaaggcacacaaactggattagtcatgtcagatggcttcgtgttccctccaagtgagcatgaaaatttgccaatagaaccagagcatgaggatttgccaatagaaccagggcatgatgaatcaaatacaaacagcgttgaaaaggaaagtagttgtgctggaaataacgatgatgactggtgtcatgtttcacctgaagaaatcgatgacgtaagtaatgaaaatctagctgacaacagtgacttgcctactgccagtgaagctacggtaccagattcccagcctacagaaataaatgctaagcgagagaaagatcataggacatgcaaggctgatcatacttgtgaaagatggtggaaaaagaaaaccacgtatctatttcatcatataaaaggagtgactacactctgctcagttgtggcagctggtgctgttgttggttttgttgtaatgggtcagaggtggcagcaggaccattggcaccttcatcaatttaagttcagtgtcagcggtgagctcatccgcgacggtcatccccggcggatatggggcggcgtttctctccatctgtgcctgtctctagtgctgcccctccgcgacggtcttctccggcggatgtggctggtagtgctggtgcggcgcagggcgatgcggggctatctgccatggatcgcggcggcatggtgggcaggtctcgtcgtcgccggcgtccgcggtatcggcggggtcatggtgcccatccgcgacggtcatccccggcggatatggggcggcgtttctctccatctgtgcctgtctctagtgctgcccctccgcgacagtcttctccggcggatgtggctggtagtgctggtgcggcgcagggcgatgcggggctatctgccatggatcgcggcggcatggtgggcaggtctcgtcgtcgccggcgtccgcggtatcggcggggtcatggtgatgcaaccagggcctgcccaggtgcctgttcgtggagatgtgcctcctccttgtatcatcgaatggagcgatcaggtggctagtggcgaggaggatctcgctaatgcggtcatggtttctgttatcagtgatgtgcccctggtctctgctggcgaggtggcggcggtgcttgcggccatgatcgatgttgccgcaagctctctggttctccgtcgggcctctccgtcgagcttcttgttggtccttccggacctggttctggttgagcgattgattggcattcagcaaccggtccgttctttgggtggcggtctcagtcttctgtgcaaacgttggaatcgtttggccggtgcccttggtcgtgtgctgccgtccttgattgatgtggagcttcgtggcatccctgcccatgtgtgggagacgtctactgctgatcgtcttttgtgcccttatgcctggatacagcaagtgcatcctgatacgctggggctgttggacctgtcaagtttcagatgtctggcttggtgttctgatctgtccaagcttccttcttccagggaactctgggtagttgaaccgccgtcgggcatcgttgaagtccctcctgtgaaacgg

SEQ ID NO: 37610 - DNA, 417 bp, Zea mays
  Peptide Sequence Number=SeqID_79389
atggcaggtcttgttgcaacactgtcaggcacgattatggcgaggtttttgtgcatggaagatgacaatgaggtcactggagagtcacctgtggctgatgaatgggatatgttgtccctgacttcatcaatatatgctagcccattattccgaagaggatttgatccaattaatttgcctggatatgggaatgtgattaatattcaggaaggcacacaaactggattagtcatgtcagatggcttcgtgttccctccaagtgagcatgaaaatttgccaatagaaccagagcatgaggatttgccaatagaaccagggcatgatgaatcaaatacaaacagcgttgaaaaggaaagtagttgtgctggaaataacgatgatgactggtgtcatgtttcacctgaagaaatcgatgac

SEQ ID NO: 37611 - DNA, 913 bp, Zea mays
  Peptide Sequence Number=SeqID_79390
gaacaaagcccttgcactctcaaaaggagtggaacaaatatgggggattggtgttgatttgggatggggaacgagatggaggttgggaactctgaggtgggtggtggaggaggagagcgagggaggacgacgaggctgcctggccgagccacgaggggaaggtgagcgtcacctgcaaggccacaaccttggtgagactgccaccatgagtgtgccccatggtcgccgccaggatctcgagctcgccatcgatgacttcgacgaggagttgatcgaccctgagctacgctactcgttccagcgcaacagcaagtccattcagcaaaccttggcgctcctcacctatcgcaacctcttcggcattgccatcagacttcctgtcatgctgctccgagataggcgtgcctgtttttccgacagggggcgcaaggagtggcgcgccttctctggctccttgcttcgctccaatggcgtcgaggtccacgtgccacttcatggagcggatgcagcacagttggctaggtgcttcatgaatcaatatttcttgttgatagcttgtctgcagctatggtcacttatcactcctgtaaatcctgcaagtacctggggcccacttatatttatctttgctgtttctgcaaccaaagaggcatgggatgactacaacaggcataacctgacttatgctctgatgacagtggttgtacaagtaacgagtttaaaggttgtgaacaacgaggggtgggagcgcctgtatggcgggcttatgctctctctcggtgtctactactacttctaccaaatattccggaacagggccgaggcaagggcccttgagcaatccaggagaaggcttggcgatgggtctgttgggatgctccagtctctcactatcgctgccctgtctgggtaa

SEQ ID NO: 37612 - DNA, 486 bp, Zea mays
  Peptide Sequence Number=SeqID_79391
atgacgacgcataccgcagaggagctcgccacccagatcgagcagcagaaactcgaggagcagaagaccgagcctaggaacaaagcccttgcactctcaaaaggagtggaacaaatatgggggattagtgttgatttgggatggggaacgagatggaggttgggaactctgaggtgggtggtggaggaggagagcgagggaggacgacgaggctgcctggccgagccacgaggggaaggtgagcgtcacctgcaaggccacaaccttggtgagactgccaccatgagtgtgccccacgatcgccgccaggatctcgagctcgccatcgatgacttcgacgaggagttgatcgaccctgagctacgctactcgttccagcgcaacagcaagtccattcagcaaaccttggcgctcctcacctatcgcaacctcttcggcattgccatcagacttcctgtcatgctgctccgagataggcgtgcctga

SEQ ID NO: 37613 - DNA, 516 bp, Zea mays
  Peptide Sequence Number=SeqID_79392
atggggggcgcacgttcgagccgcgggcacgccggggccgagccgaccgcgccagggcgcgcagggcctcaccaggcgcactatcgcgcgagaagggccgcggacggccacgccgagttgcacttcggggccgcgctgggttgcgcatgccgcgccgaccggctgcgaggccgcgcagggcacgggcagccgcgccacgagccgagccggacgaggagcggggcacaggccgaggagcgcgcgagcttcgccagcgactcgtcggggctgaccaagacactggttgcggggtgcggcggggtaggggtgaccggaacctcgccggtgtcgagcagggagagagagagagtcgagggccggaacagcgcggcggggctgctgtttgccgaagccagcggtcgggagcgtgcggtgggcgcaggccgagggggagagacgcatgggccacgagcgagaggtgatggcgagggggtgtcgggccgcgcaaggccaaacgggccggagaagcaggcctag

SEQ ID NO: 37614 - DNA, 245 bp, Zea mays
  Peptide Sequence Number=SeqID_79393
atggggggcgcgcgttcgagccgcgggcacgccggggccgagccggccgcgccagggcgcacagggcctcaccaggcgcactatcgcgcgagaagggccgcggacggccacgccgagttgcgcttcggggccgcgctgggttgcgcatgccgcgccgaccggctgcgaggccgcgcagggcacgggcagccgcaccacgggccgagccggacgaggagcggggcacaggccgaggagcgcgcgag

SEQ ID NO: 37615 - DNA, 576 bp, Zea mays
  Peptide Sequence Number=SeqID_79394
atggggggcgcacgttcgagccgcgggcacgccggggccgagccgaccgcgccagggcgcgcagggcctcaccaggcgcactatcgcgcgagaagggccgcggacggccacgccgagttgcacttcggggccgcgctgggttgcgcatgccgcgccgaccggctgcgaggccgcgcagggcacgggcagccgcgccacgagccgagccggacgaggagcggggcacaggccgaggagcgcgcgagaggttggaggttgccaaccgaacaggtgcaagaggaaaagatggtggtctttccttacaaaggggagactactctaaggccatcgaaaggcaaggggaatgataagacatggaggggagagaatgcaaccaaggtcaggataggtaaaacaccattctcaaatcgagatgggaaagatgatatttcaaaaggtaggcataggataagcatcatgaaaagatctagagattacaaagacaaaacttgcaaggcgtcgaagaagggggtgcaatcaatggtgaagtgggtgaggcattaccctcgaacagggacggaaaagaggagactttaa

SEQ ID NO: 37616 - DNA, 470 bp, Zea mays
  Peptide Sequence Number=SeqID_79395
tttatgcaaatatagtctgcgcatattacgtgaatcaggcccacgatcctgcccacgcgctcacaattatccagtcccacgccgtcactataaaaacacccccacgccgccagggattaggttttagcggcggcggcggttccatcgggcgtgcgagcaggcgcccgctggcggtgctccgcgcctacccgttccgcgtgcccgccaagggcgtcctcccgctggcgtacgtggcgcgcgcgcagggtgccccgctgggcgacgccggcagcgccgccatggaggccgcgctccgcgacggcgtggtgccgttccgggtggatggggaggcccggacgcgatggaaggtcgcggggatcatcggcgtcgaccagtggacgcgcctggcgtgccagctccgcttcttctggcccaacagcactgtgctccccttcagatgcatctccaagtccaagttcttgttcttctga

SEQ ID NO: 37617 - DNA, 645 bp, Zea mays
  Peptide Sequence Number=SeqID_79396
atgaaattggggtctaatgattgtggattctttgttatgagatatatgcagcactacgactacatggatggagctatgaatgcagtcattgatctggataattcagaggacattcgctctcttgtactgcagtacataatattctatcgattaaacagaaacaactccatgaaccctgggctctatttaactacaggaagccctgaccaggcgcccgtgagcaggagagccccgaccgccgcggcgctctccagccggcggattggcggtcgtggagggggcacgaggaggagcctcagcgtccgcggcgccccgcgtgccgtacgtggcggtgcgggcaggctggcggtgctccgcgcctacccgttccgcgtgcccgccaagggcgtcctcccgctggcgtacgtggcgcgcgcgcagggtgccccgctgggcgacgccggcagcgccgccatggaggccgcgctccgcgacggcgtggtgccgttccgggtggatggggaggcccggacgcgatggaaggtcgcggggatcatcggcgtcgaccagtggacgcgcctggcgtgccagctccgcttcttctggcccaacagcactgtgctccccttcagatgcatctccaagtccaagttcttgttcttctga

SEQ ID NO: 37618 - DNA, 2055 bp, Zea mays
  Peptide Sequence Number=SeqID_79397
atgggacgcacgttggtacggaacgtggctatacctggctggggcttcctggctgctgcttcaataatgcggaaggttgatcgacccccaaccaatccgaagcgtttaatcattgagtcaagtcaagaatgtttcagtgttgacattccacgctcgactgacatggcagaccctacaaatacgccgtctgatggtgatcctccgcagcatagaaagacgggtgttgcagcagctgctaaaaacattgctatgcctaatgtggatgatgatgactttgagccacctaaaaagaagtgcaatatctcaatggatgccccaaataagacgcagaagctcaacatcagatgcaacccaggagatgttcttgcgtccattcatatattgaatgaaaggcaacgtcaagctatagtcagaaaagaattttctagtattattgacatgacaattgatgcaattggatgtcgaacacttctttgttggctcatgcagaagctagaccccagggacatgactcttcgtattggtccagacaaagaactcaaaatcaccaagcagactgtccatcagatattgggtcttccaaatttgggtggtggaaagccacttaatgttaatgaagcgaacgctgcggcaacacttcgggcctcattgaatattagcaaggatgagtttgttatttcaaagctccaagacagattgaggctaggccaggatgatgatctttctatcagatgtttttttctcattctcttcaaccggctgctattcccaacaactagctggtctatttctttcaatgaggttgtacttacagaagaaatggagcgattccctcaaattgattggtgccatctaatttttagtgacttatgtgaggctgcccagagatggcacaacaggagcattaacaatgtgtcggcgacgatatatggctgttccatcattgttcttctgtattatttggatcatttgcatcatgttgctgctccaaacaacaaaaatggcactccacgcataaagtattttaataagaatattataagggcgttgtcaatggccgataagcggaagcctcgccagggtggtgaaccatttggtgtttgctcttttcgtagcagcagtgagacatgttacgtctcaaaatcgccaactacttgccagattgagaagttccaagctacgttgattgattatgacttagaggttggcaaaatatttgcctctatcaagcaatgtttgaatactattggtacaaagcagtccaatctagctgctacatttggagaattgattgatgaggttcttcgggccgatgaatctgttacaccatatactcaaggtcagacagtggtaggtggcacagttgacaatgattctggaccagtatttgacaagactcctattgggagtgtttctgcaccaggtctcttcttatctgaattagaatgtgctcgcgctcttcgggcatacttgtgttctaggttcattgaattggacagaaatataattgactttggtgaacatcgcgccaattgttgtgacatacaacaatcttttgctgatggcgcatgtctcgacaacgtgtttatgcaatgtttcattgagtgtgtccgcgatgactggtctaaacatattcctccactcaatgctcaccagctcattctagatgttaatgttgggattggacgcatacatgtgttagattccaacccttatggaccagagatgggtgggactatctggaaaaattaccattgtatatctatggatttgggtgataggaaggtttcatgggccaggttaatgatgagtaggctcaatctagctattcaaaatgctcgaccaagatcagctttccctgcttttttgaagtaccttattgaactcatgaataactgcccaacaatgaaattggggtctaatgattgtggattctttgtcatgagatatatgcagaactacgactacatggttggagctatgaatgcagtcattgatccggataattcagaggacattcgctctcttgtactgcattacctaatattccattga

SEQ ID NO: 37619 - DNA, 1110 bp, Zea mays
  Peptide Sequence Number=SeqID_79398
gctgaaaatgttggaccagaccctgtctctcaagttttactgccttttcccaatattcaagccaagaacttggcagctattagagcattcggcagtgaagggaaagtgaagggtcaaagtactgttctgccaattgaagttgttcaaccttctggagctcccccggagctgacattcttttcagcattgttgcccaaacctttggaaaaaggaaagactctgtacttggatgttctgactgtgttcacacactctcttcaaccattcccagaagaaatcactcaagccgaagcacaacttgttgtctatcaggatagtgctcactatctgtcaccttaccctgttaaggctcagacacttgctatcagattgcctggtggaagggttgaatcatacacaaggcatccaaacgcaaaacttgtggattcagaactgaaatatggaccatttcatgaccttcccccgttctcctacttacctgtgattgtgcattttgagaacaacaatccttttgcagttgcaaaggaagttataagggagattgagatatctcactggggaaatgtacagattacggaacactacaacattgctcatggtggtgccagactcaagggtgaattttccaggattgattatcaatctagaccttacgtaaggggtgtttcatcttttagacatcttattgcaaaactgcctccaagggcacactctatttattaccgagatgagattggtaatatttccacatcacatttgtggagtgattctatgaagacccaactggaaatagaaccaaggtttccattgtttggtgggtggcaaacaaccttcactgttggttatggtttaccacttgaagactttgttttctattctgatggaaagagatttctcaatatcacatttggttctccattggaggaaattctcattgaaaagcttatcgtaaaggttgttctacctgaagggtcaaaggatatcgaagtttcagctccctttccaacacagcagcagcaagagtcaattttcttcactgttatggagtgtgagactaaacagttatctatccatgtttctaaagccagtattccctggtgcaggttataa

SEQ ID NO: 37620 - DNA, 1671 bp, Zea mays
  Peptide Sequence Number=SeqID_79399
atggcgactccgccgccgccaatccgccccgccgccgcgctcctcctcctcgtcctcgctggcgtcctcgcctccgccgcgagcgccgatctcgtcatctccaaggcagatcggaggttgttcaaccttctggagctcccccgggagctgacattcttttcagcattgttgccccaaacctttggaaaaaggaaagactctgtacttggatgttctgactgtgttcacacactctcttcaaccattccccagaagaaatcactcaaagccgaagcacaacttgttgtctatcaggatagtgctcactatctgtcaccttaccctgttaaggctcagacacttgctatcagattgcctggtggaagggttgaatcatacacaaggcatccaaacgcaaaacttgtggattcagaactgaaatatggaccatttcatgaccttcccccgttctcctacttacctgtgattgtgcattttgagaacaacaatccttttgcagttgcaaaggaagttataagggagattgagatatctcactggggaaatgtacagattacggaacactacaacattgctcatggtggtgccagactcaagggtgaattttccaggattgattatcaatctagaccttacgtaaggggtgtttcatcttttagacatcttattgcaaaactgcctccaagggcacactctatttattaccgagatgagattggtaatatttccacatcacatttgtggagtgattctatgaagacccaactggaaatagaaccaaggtttccattgtttggtgggtggcaaacaaccttcactgttggttatggtttaccacttgaagactttgttttctattctgatggaaagagatttctcaatatcacatttggttctccattggaggaaattctcattgaaaagcttatcgtaaaggttgttctacctgaagggtcaaaggatatcgaagtttcagctccctttccaacacagcagcagcaagaggttaagtattcacaccttgacattgtcggaagaccagttgttgtcttggagaaacctgatgttattccagagcataatttgtatttccaggtttactacagattcaacaacatatccttgctcagagagccgttgatgctgattactggtttcttcctcctgtttgtggcctgtattgtttacatgcgtactgatatgtcaatatccaagagctctccttcctacttggccaagctgcaatgggatgaggtgcaagcaactgttcagaaaatccagggtatctttgagcaatgcttagcagttcatgataaactggaggcctcattgcgggatttgtctaggacaggagacattcagtcttgcaaggcagctcgtaaagctgctgacacgcagtttaaggagctatcgaaagatctgaagccactgttggcgactctacagtcatctccccagtcttatcagatattgccaaaggtagaggacttgatcgtaaaggagagagagatgcaggagaagctcatgacaaggcattccaccgttgtcgacagctttgagaagaagctgcgcgggcaagatgtagagaacaggattgctttgcagcagcagaaaattgctgccctgaggcaggaggttgaatctcttttagagtacattagtgagatttga

SEQ ID NO: 37621 - DNA, 246 bp, Zea mays
  Peptide Sequence Number=SeqID_79400
atggacagcgcagtgcagccactctggaccgcgtccaagcggcggctgcgccggagcttgccgtacacagcggcgcatgggccatgtaggactgcttccagaggtcgaactggcagtcgccaagtttcttctcgtcgtcgagtactccgaataatcgtttccgaagggaaaacaaagctgcttccatacttttctgtccctggtggtccgagcagacatgagagcaagtataacaatagattataa

SEQ ID NO: 37622 - DNA, 900 bp, Zea mays
  Peptide Sequence Number=SeqID_79401
atggacatcggccaccatgtgaatggcctgcgtaagcacccatccaacgaggtccggcaactggtgaagctgctcgttaggaaatggaaggaaatattggatgattgggtgaggctgcacaactcaggtggtgatggtagtggctccatcatatgtatggcgatggtgactcacctgacaaagtccaatccaagtaccatcaaaatactcatggagtcaaattcagaacctgaggagtgctactcagatcacctaaccaactcagttaaatccttttttatgaaagatttgaaagggacttggtattcctccgagcacggcttcaacgacggcaactgcgaccaggcacgcaggccgcaccgggtggtggtcgaatcgagggaggccatgcccctgtccttcgacaactccaccaccgaggattcagcggctgccgtgaagcctaagcccaaggtcagggtcaggaagaaccccatgaagcagtcatgcttcgacttcaccaaggtggacgtcgtgcttctccccatcgtcttcctcctcgtccgccccaatgttggcaagtcagccctcttcaacaggatcattgcgtctctgcgagctaatcagctctgtgagcgtctccctagccccaatggcgagtcaactgttgattgccatcagatctcaaagatgccaaatcttgcattcaccatagcaaataagactttcaccttaacaccagagcagtacatagtgaagctggagcaagcaggacaaactatctgcatcagtgggtttatggcatttgacgtaccgcctcctcgtggtcctctctggatacttggtgatgtttttatgagtgtctaccacactgtttttgacttcggcgagaacatgattgggtttgccaaatctgcatga

SEQ ID NO: 37623 - DNA, 426 bp, Zea mays
  Peptide Sequence Number=SeqID_79402
atgaagcagtcatgcttcgacttcaccaaggtggacgccgtgcttctccccatcgtcttcctcctcgtccgccccaatgttggcaagtcagccctcttcaacaggatcattgcgtctctgcgagctaatcagctctgtgagcgtctccctagccccaatggcgagtcaactgttgattgccatcagatctcaaagatgccaaatcttgcattcaccatagcaaataagactttcaccttaacaccagagcagtacatagtgaagctggagcaagcaggacaaactatctgcatcagtgggtttatgtcatttgatgtaccgcctcctcgtggtcctctctggatacttggtgatgtttttatgggtgtctaccacactgtttttgacttcggcgagaacatgattgggtttgccaaatctgcatga

SEQ ID NO: 37624 - DNA, 672 bp, Zea mays
  Peptide Sequence Number=SeqID_79403
atggctgggaggaccgcgcccgcctccctcccctccttctccctcacgcccgactccctcgctgcccctttatcctggatctcgtcatggacgctaccacgaccaacgattgatatcatgtccaagttcttcaagctgatggtggttctacaattaatgaatgatttgaacgaagtgttcaagatgccgctatctcttgtattgaggcttatagtgtgcttgaggttcttcgacctctctataattcccctaagatactggaacaaaaggatcattgcgtctctgcgagctaatcagttctgtgagcgtctccctagccccaatggcgagtcaactgttgattgtcatcagatctcaaagatgccaaatcttgcattcaccattgcaaacaagactttcaccttaacaccagagcagtacatagtgaagttggagcaagcaggacaaactatctgcatcaatgggtttatggcatttgacgtaccgcctcctcgtggtcctctctgctacgctaaacatatctgtactactcttaagtgtgcaatgagggcgtccaccgagggcatcaccgtgcccccgctcgccccctccacgcccgcgcctgtctgcatccgcccccttcgtctccccgcaatggccgcgtccctacctcatgtctacgacgacaactag

SEQ ID NO: 37625 - DNA, 303 bp, Zea mays
  Peptide Sequence Number=SeqID_79404
atgcctaataatggtggatctctggctaacatgtggggccgtgcatcagctaaacctaagcctccaagtaccactaattctacagctgtagaaagtgttgcagaagcagatggagatagcagcgatgatgaacagggaataaagtacaagagggaatccaccaatgcaaataacagaaagcgaagagcagtatttgatttttcggatgatgaggaagttgataatattataagcattgcatctcctgaggtaccaaaacagcataccccagaccctattattgaaactgctgaagacacttaa

SEQ ID NO: 37626 - DNA, 375 bp, Zea mays
  Peptide Sequence Number=SeqID_79405
atgcctaataatggtggatctctggctaacatgtggggccgtgcatcagctaaacctaagcctccaagtaccactaattctacagatgtagaaagtgttgcagctactcttgatgcacaaatatgtgcaaaggaagaagcagatggagatagcagcgatgatgaacagggaataaaccgcttcgacttcgtcgttctcgccttctcggcttctcggttcttccgttcttgccacaccggcacaccctcacgcctccggctgtccggcagtgggcagtctggcctccgtcgtgctgtattggatctcatagcgtccagccgtgcatctggacatccggtcgaaaatcatatgcgcctcgacatgtatgggaattga

SEQ ID NO: 37627 - DNA, 1125 bp, Zea mays
  Peptide Sequence Number=SeqID_79406
atgcatggtgatttattctacttgacaatcgtagaagctcccattctgggaaattccaaagtttgttacaaaggagcagtttgttactgctccgcagcaagatttgttactgctccgcagcaagatttgcttgtaagttcaaagcatggagcaggcaataagtctgagaaggataattccacatttttagataaagatggcaatgctcttgttgtcaaagaacaatcaattgatgcccatgcaagcaaaagtagagctcaaaatggaaagaccatgcctaataatggtggatctctggctaacatgtggggtcgtgcatcagctaaacctaagcctccaagtaccactaattctacagctgtagaaagtgttgcagctactcttgatgcacaaatatgtgcaaaggaagaagtagatggagatagcagcgatgatgagcagggaataaagtacaagggggaatccaccaatgcaaataacagaaagcgaagagcagtatttgatttttcggatgatgaggaagttgataatattataagcattgcatctcctgaggtaccaaaacagcataccccagaccctgttattgaaactgctgaagacactaaagtaaatcaaaagaacttggaaaataaagatgatctaccgaacactgaaaaaggttcctcaatgggggtggattctgacttcacttctgaatgtaaaaccaaaactgtcaatactatgaaccattctaggattactttaaaagaaaatagcagcgatcctcctgttagtaacaagaaacaggattccgcagttgagcctgcctccaccgcaccgaagagaagaaaggttttcaagacacgcatagatgagaggggaagggaagaagaaaaataccttcaaggagaccgtcgaggtggtgatggtcgaggagacgccgaggccgagcttgggctgtggtgcagcggcgcggcgttctggcggcggcgtgacggcgagctgggtggtggcggcaccgaggccgacgagattgggcagggcagcgacgcggcgaagctggcgaaaagaggagaaagggcgacggggcggcgagccagggcggtggcgcggcggcgcttttttgttgcggtggcacagtga

SEQ ID NO: 37628 - DNA, 255 bp, Zea mays
  Peptide Sequence Number=SeqID_79407
atgccgcggaaatctggcgagtccgcccacggctgcgctgaaatcgcgagttgggtgacggttctgagctaccgggtccaccagacagtgagttacacgcgggagagcacacacacatgggagactgcaggtgggccccagtcgtcagtggttcaggctcagtctgccagtcagactggcagtcaggtcgccaggggtgtcagggggcggttcaaccgccctggggggtggttcaaccggtcctggcctgtctga

SEQ ID NO: 37629 - DNA, 456 bp, Zea mays
  Peptide Sequence Number=SeqID_79408
atggagctcgcgattcagttggggaagggatggtggtggcaagtcagtcccatggtctttgacccggtgacgagtagctgggcacccaggccgcgcgtggaccaaaaccaagcttcctggcggctggcgaaggattcggttgtaggctccgagatgggcggcgaggtgtggtatagaaacaagggtacatcatgttttagctatttggtaagtcataatccctgtcatttaaaacagaggggttatgcaactatcgagtggttaagaataggtctcctattcctaaaagtcactttaggcacaggatttcaaagtgtgaaatccacatttgtctttagaaggataaggtttcgtcctacagtcaacattcctctgataccactactgtcacacccggatttaagggacaaagccgggtgcatctcatacatgcgccaaagaaggcaacatatataa

SEQ ID NO: 37630 - DNA, 462 bp, Zea mays
  Peptide Sequence Number=SeqID_79409
atggcgacagcaagtctcacctggttcgcggagagggatgagaggagggatgcaacacagttttataacctgggtgaaagggagccgagcccgggcaggtttcgttctacagtcaacattcctctgataccacttctgtcacacccgggtttcggagcaccaagactcgggcgcgaacataatcaccaggaagtgatcaaggacacaacttgcctgggacttgagattccaggtaaggcacaacaaatcacagccatccatgcaccgatcaacggccacgaacccatcaccttcacctcgcccacgctgacggcggcgccgcccctaccacggttgaccacctgtcggagccacgcggtccggccgatctgggctcccactacgtcaatagaaggtcctacacacaattcggacgacggcgaaacagacaagggactcaccgtaggcagagatggcacctag

SEQ ID NO: 37631 - DNA, 1041 bp, Zea mays
  Peptide Sequence Number=SeqID_79410
atgccgcggaaatcgggcgagtccgcccacggctgcgctgaaatcgcgagttgggtgacggttctgagctaccgggtccacgagacagtgagttacacgcgggagagcacacacacatgggagactgcaggtgggccccagtcgtcagtgattcaggctcagattaggtctcctattcctaaagtcactttaggcactggatttcaaagtgtgaaatccacatttgtctttagaagaaaaaggtttcgtcctacagtcaacattcctctgataccacttctgtcacacccgggtttcggggcaccaagacccgggtgcgaacataatcaccagtttataggaagctccaatgcaggaatccctcacatgaccgccatcgcagcaaaatcatcccaagggcctccctacactgaccactcccttactgcccttgccccttttgggaaaccaacggccaccgcacttcctggccgagccgcgctccaggccacatctccaccgtacggcgctggatcaacggcccacgatctctcttcctcccacagaccccaggacggcggcgcccccatccaacgctggagccacgccggcgaggcggtcccagggaacgccagggcgccattccccaattcgaagacttctacacgacgcctgaacgatagcgcatcgattaggggcacataccatggattcaagatggcagggagattcggtcacggtgcagagcgggttggtggcaaggaggtcgctccgacgagcaattcaggcggtccggagcatgacatcgcccaggaaaagacgctgtcgtgtccaacgcgacatggcgaagctccccggacaggttgcagagggcgtaatgacaccgaatcggggtctcccccgcgcggcggattccgcaattcttccttgccacggaggacggcgcaggacaagctcggtgttgacgcagtggaatctgagggcggaatcgtgggaggagatggcgacccggcgatgtgttctcggcttcccacaccaacggcacgacggcgctggccataa

SEQ ID NO: 37632 - DNA, 1080 bp, Zea mays
  Peptide Sequence Number=SeqID_79411
atgccgcggaaatcgggcgagtccgcccacggctgcgctgaaatcgcgagttgggtgacggttctgagctaccgggtccacgagacagtgagttacacgcgggagagcacacacacatgggagactgcaggtgggccccagtcgtcagtgattcaggctcagattaggtctcctattcctaaagtcactttaggcactggatttcaaagtgtgaaatccacatttgtctttagaagaaaaaggtttcgtcctacagtcaacattcctctgataccacttctgtcacacccgggtttcggggcaccaagacccgggtgcgaacataatcaccagtttataggaagctccaatgcaggaatccctcacatgaccgccatcgcagcaaaatcatcccaagggcctccctacactgaccactcccttactgcccttgccccttttgggaaaccaacggccaccgcacttcctggccgagccgcgctccaggccacatctccaccgtacggcgctggatcaacggcccacgatctctcttcctcccacagaccccaggacggcggcgcccccatccaacgctggagccacgccggcgaggcggtcccagggaacgccagggcgccattccccaattcgaagacttctacacgacgcctgaacgatagcgcatcgattaggggcacataccatggattcaagatggcagggagattcggtcacggtgcagagcgggttggtggcaaggaggtcgctccgacgagcaattcaggcggtccggagcatgacatcgcccaggaaaagacgctgtcgtgtccaacgcgacatggcgaagctccccggacaggttgcagagggcgtaatgacaccgaatcggggtctcccccgcgcggcggattccgcaattcttccttgccacggaggacggcgcaggacaagctcggtgttgacgcagtggaatctgagggcggaatcgtggaggagatggcgacccggcgatgtgttctcggcttcccacaccaacggcacgacggcgctggccataagtatgggtggcagcgctcttccttccatcgccgttgctga

SEQ ID NO: 37633 - DNA, 618 bp, Zea mays
  Peptide Sequence Number=SeqID_79412
atggcctccaacgacgcccttccttccccgactgccgagatgcgaccactgccgctccccgaggaggtggtgccgatgtacctacgacctgctccttccacctccccgcctttctatgagaacgccgccaacctgctcaacctggcaccgccgcctccatatcagccatctcccgcatgcttactctcccagtctaaagtgaattttgaagatttaatcattacaagtctcgtggaaatgtggaataccattgtgggttgcaccttctcacgtagaaggaaaccatggccccaaattacccagatcacaaacatagctgatgctgttgaaggccgtataaatgtgacatgcagtaatggcttgatgctcagatgtttgctgcgcgaaaatcttcctctcctttcaagctctcaggttgattcagaacgggaattttttagtcgtggtataaaaagagtttgtacaaagatccttcaacttgacatcacagcaatcgttgaggagagcctagacttttcaacggaggttatggatttggcagcagaggaactcttggagattgtgcctcttggaaaaggcttctttcttgccaactatcctatttcaaatttggattga

SEQ ID NO: 37634 - DNA, 414 bp, Zea mays
  Peptide Sequence Number=SeqID_79413
atggttcgtgccgatcgcacgagggacaatggacaagatttacaggggatatctatcccccacagcgactaccccaccaacggcaacgacgcccttcctcccccacatgctgcgcgcggccgagatcccgcgtggctcccccaccaacggtgcccttccttcccccggctgccgaggtgccacgcggccttcaacgccggatctcgccccatggcctccaacgacgcccttccttccccgactgccgagatgcgaccaccaccgctccccgaggaggtggtgccgatgtacctacgacctgctccttccacctcctcgcctttctatgagaacgccgccaacctgctcaacctggcaccgccgcctccatatcagccatctcccgcatggtgtctcgacgtcgtccctcgctga

SEQ ID NO: 37635 - DNA, 528 bp, Zea mays
  Peptide Sequence Number=SeqID_79414
atggagcataatgctgatcgcacaccattaatagacatatcaaacacaagcattacaggtgatcaaataggatcaaactcgcttggaccaatagacgatgctaatgaacgtaagaggcaaagggatagagaaagatatgccacgatgtccattgaacaaaagaatgagaaaaataggaagcgccgtgaagcacgtcaacgaaacaaaggactacccctaaagtctgagtcatctagaggtcctattaaaaacactccatcggctggtaattctatcgaacgaaagaggcaaagggatagagaaaggcgtgcaacaatgtcggttgaacaaaggaatgagtacaataacaagcgtcgtcaaatgcgtcaacgaaataagggacaaaatgtgatgcccgatgtttcaggagatggcgacaaaaaagaaaatgtggatccagatgatgatagcgactggctgcatcggaacgagacattccagtcaaacgactatgttgcaacgacagaccttctgccaccaggttcatga

SEQ ID NO: 37636 - DNA, 1048 bp, Zea mays
  Peptide Sequence Number=SeqID_79415
atgtccattgaacaaaagaatgagaaaaataggaagcgccgtgaagcacgtcaacgaaacaaaggactacccctaaagtctgagtcatctagaggtcctattaaaaacactccattggctggtaattctatcgaacgaaagaggcaaagggatagagaaaggcgtgcaacaatgtcggttgaacaaaggaatgagtacaataacaagcgtcgtcaaatgcgtcaacgaaataagggacaaaatgtgatgcccgatgtttcaggagatggcgacaaaaaagaaaatgtggatccagatgatgatagcgactggctgcatcggaacgagacattccagtcaaacgactatgtcgcaacgacagaccttctgccaccaggcagtgtgcatgaatctgttggtgtcattggggaaccgagtatcggcgttagggagtataggcttgaacgccttaggttgtataatcagacaccaaagcgaaaagaggcaaagatagagtacgtgagaaaacgtagagtgctacaggctgacactctgaatgttgcgtccatcgccatggaggacccaacatatacccctgaggttgtgcaccctgcaacggaaccttcaacagttaccacctgcgactgggttatccctgaattcattaggacacctttcctaccagctcaaacacagaccgaggatgtcggttcattcgatatgtctactgaagcaataagacataaacatcatgtgccgcgtggggaaagacaagctatcttagcccgtcgaaacaaacaatttcaagcatccattgcaaggaacgtgactactttgaatggggatactatcggtgacgccaacaacaatgatgatgatgatgatgatgaggctgtcatattcgaagaagatgatgacaacgacgagggatacatattcgctggccaatgtacttatgtcaatttttattatgattatgataccaaggcttatataaatacacatgtcttagtcgttgttttccaaaaaatatcagacgaggagactgacgaggacatcgaaatcgatg

SEQ ID NO: 37637 - DNA, 4408 bp, Zea mays
  Peptide Sequence Number=SeqID_79416
atggagcataatgctgatcgcacaccattaatagacatctcaaacacaagcgttacaggtgatcaaataggatcaaactcgcttggaccaatagacgatgctaatgaacgtaagaggcaaagggatagagaaagatatgccacgatgtccattgaacaaaagaatgagaaaaataggaagcgccgtgaagcacgtcaacgaaacaaaggactacccctaaagtctgagtcatctagaggtcctattaaaaacactccattggctggtaattctatcgaacgaaagaggcaaagggatagagaaaggcgtgcaacaatgtcggttgaacaaaggaatgagtacaataacaagcgtcgtcaaatgcgtcaacgaaataagggacaaaatgtgatgcccgatgtttcaggagatggcgacaaaaaagaaaatgtggatccagatgatgatagcgactggctgcatcggaacgagacattccagtcaaacgactatgtcgcaacgacagaccttctgccaccaggcagtgtgcatgaatctgttggtgtcattggggaaccgagtatcggcgttagggagtataggcttgaacgccttaggttgtataatcagacaccaaagcgaaaagaggcaaagatagagtacgtgagaaaacgtagagtgctacaggctgacactctgaatgttgcgtccatcgccatggaggacccaacatatacccctgaggttgtgcaccctgcaacggaaccttcaacagttaccacctgcgactgggttatccctgaattcattaggacacctttcctaccagctcaaacacagaccgaggatgtcggttcattcgatatgtctactgaagcaataagacataaacatcatgtgccgcgtggggaaagacaagctatcttagcccgtcgaaacaaacaatttcaagcatccattgcaaggaacgtgactactttgaatggggatactatcggtgacgccaacaacaatgatgatgatgatgatgatgaggctgtcatattcgaagaagatgatgacaacgacgagggatacatattcgctggccaatgtacttatgtcaatttttattatgattatgataccaaggcttatataaatacacatgtcttagtcgttgttttccaaaaaatatcagacgaggagactgacgaggacatcgaaatcgatggtactcaggatgaatctactggcactgatgtgcctgacccgtacgacaaggtatacagtaacctccctgaagaaacacatatgctgaagcctgttcctgactgcggttattgcactgcgaagaagtttgagtacgagccacctgggttttgctgtcgtggtgggaaggttgagctagcaccactcgatacccctccccagctcaggaggttgtgggatagtgcagactctgatgctaagcactttcgtgataacattaggttttttaatggccatttctctttcacttccctatactgttgcctcgatagtatgacaactaatgtgcgagattctggtatatacacgttccgggcacaaggcatgatgtaccacaatatcaagtcattcggtaaggaaggtgggtcggagcataaacatctagagctttacttttacgatgacgatcccagtctcgagcatcggtaccgtaagtgtcgtgaagaacagcttcagaaagacaaagatgttattaaacagatagttggcatactccatggaaacccgtactccgagcaccttaggagcatgggccatgttgagaaccttgatgactatcatatcgcattgaaccttgaccagactttgaaccagaagacatataacacgcctctcacttcggaggtggccgctgtatggatcgaggggagcgaacggcgaggccagttcagcaagagtgttatgttacatgggaaggataggtcaagccacggcatccgctcataccatggatgctacgatgcactatcgtatccactgttcttccctaaaggtgaacttggatggcatgcaaatatcccaaaggttggtgtatccatggatgaagtggatgcataccgtgcgacacatagggcaaataattcaaacgatgaagatgcagaatctcctacccatttatgtgtgtccgtacgtgactactactgctacaaattccagattcgtcccggggtatttaatccaatacttcatggaaagcggcttttccagcagttcgctgtcgacacgtacatcaagattgagagctctcgtttagatttcatacgtaagaatcaggatcgtttaagggcagacctataccagggcttggtggacagcatgttagatggagatatcagagcagaaaaggttgggaagcgaactgtgttgtctacgtcatttattggtggtcctcgtgacatgaaacgtcggtatatggatgctatggctctggtgcggaagtttggtaaaccggacatctttcttaccatgacatgtaaccccaactgggatgagataaggagagagcttctccctgggcaaacaccacaagatcgtcccgatcttgtagtgcgtgtctttcatgcgaagctacaggagttaaagcataggctgactaaacaggatattctcggtaaggtccgggcctacgtctatgtcgtggagtttcaaaagcggggtttgccacatgcccattttctactcatcatgcagaggaagtacaagctaacgtgccctgagcagtatgaccttttgatctcagccgagatcccacacaacaagtaccctgaactacgaaagatggttatcaagcatatgatgcatggcccgtgtgggtcgttaaaccctaactgcccatgcactaagggccatgtatcgtgcaagaatcattacccccggcctttcagtgacacaaccttgcaagggaaggactcatacccgatttacagacgtcgtgatgatgggcgtaaggaaaaggttcgagggtgcgaattggacaatagatgggttgtcccttacaacccttacctcctacgtctcttcaactgtcacatcaatgttgaggcgtgcgggagcatcaaggctgttaaataccttttcaagtacatatacaaaggccatgatcgtgcgtctgttgttatgagagatgcgagcaaggcagatgatgatgtagatgagatcaagcagtacagagatgcaaggtgggtgactcctccagaagcgttatggaggatatacggctttgagcttagtcagaactctccacctgtgatgcaattgcaactccatcttccaaacatgcacatggtggcgtttcacgaacgacaaatggtcgagcgagtcgtcaaccgtccaggtgctgataggtcaatgctcacggcatattttgaagcgaataggctacatgagggggctcgtggcatcctatatcgtgacttccctgagtggtacacttggcaaagtggtaagggcaaagtatggcaacggaggaagcgtgatacgggtggacaagtcggtagaatagtctctgctcatcccgctgagggggagcgctactatctccgtgttctcctaaaccatgtgacttgtgccacctcctatgtggatctaaggacagtagatggtgtcccgctaccaacttttcgtgaggcagcagagagaaggggactgcttgagtcggacaacacactggatgactgtctcactgaacgtgctcttttccagatgccattggcgctgcgacgactttttgccacaatactggtgtactgtgagccaagcgacatggcggtactctggcagaatcacctagatgttatgtcagaggactatcaacacaggagtcagggtaaaactcatgttgagcagatgtcaatgggaaaggacataaagacattccctcttcctcctatcatcgacgcatatgacgatgctattggtactgctagggaggtctacgaggaggaaagtatcgaaccagcagtgggagatgtggctctcaaagactctcttaacgaggaacagagggtcgcctatgataagattctatctgccgtggacactgataagggcggattgttctttgtggatggacctggtggcaccgggaagacttatctatatagagtgctgctcgcgacgctacgcagccagggcaagattgcagtggcaacagctacatctggcgttgcggcttccataatgcctggaggaagaaccgcccattcacgcttcaaaatacctctcactattgacgatggcgctgtatgtagcttcacgaagcagagtggaaccgcagagttgctacggaaagcatctctcattatctgggacgaggcttctatgaccaagagacaagccgttgaggcactggacaatagcatgcgcgatataatgggtcggcccgaactaccattcggtg

SEQ ID NO: 37638 - DNA, 615 bp, Zea mays
  Peptide Sequence Number=SeqID_79417
atggcgcgacgacggcccgggtcgacggtggcggacccctgcggcggcacggagggcggcggcgtgggggaggtgaaagagaggcctgctagtgcgcaaatgagggaggggggaagagggcgagtggggttctgggctcaagtggccgggggcggggcggttgcgagctccacgcgcgacgtgggcgcggagtccacggcagcgcgcagctcgggcgacgattgtgaccctcctacgctagcatgccctggctttgggggaattaaccgcggcaaaacggcagctgggaaactatctttgcctatctttgggctggcaccttacaaattacgtgcctccatttggacatctgacaaaacccaagaacgggaccgcgtcacctctctgatgcaggaggctgacagctggctccgcacaatacaagtgtccattgtcgaatcaaatcatattcttaatgaagtgaatacccacatccttccttcccacaatgatctcaccccaataactacaatagctggtggaagtgttgccaacacaatccgtgggctctcagctggttttggaatatcaactggggactattgtttgtcaacaatacgagctttagtggtgtag

SEQ ID NO: 37639 - DNA, 714 bp, Zea mays
  Peptide Sequence Number=SeqID_79418
atgacagacattgctgataagaacaacaagtgggcatcatatgttggacctggtggttggaatgacccagatatgctggaagtaggcaatggtggcatgaccttagcagagtatcgatcacattttagcatatgggctctcatgaagattaaggccaagacaatcagtgaaattcactctgaggcagaaaagaatcttggattatgccctggagcagcatctgtcattaggaatggccgtagctcaccaggagggcccctttcacctggagggggatttccaatgaatcggccaggaactagaggcatgatgcctgggatgcctggttcaagaaagatgcctggaatgcctgggttggacgatcagataaggagaaaattatgtaatatgcaggctgacattagaatacctgtaagtaacagagcgatagaactaaataatggcagctatgtttgtatctctatacgacttggaagctcagattgtgaccctcctacgctagcatgccctgactttgggggaattaaccacggcacgactgcagctgggaaactatctttgcctatctttgggctggcaccttacaaattacgtgcctccatttggacatctgacaaaacccaagaacgggaccgtgtcacctctctgatgcaggaggctgacagctggctccgcacaatacaagtacaacgtggagatgatctgtggctgtaa

SEQ ID NO: 37640 - DNA, 1653 bp, Zea mays
  Peptide Sequence Number=SeqID_79419
atggcgtttaacactaactacgagatagtctttctgatcataagtgggatgatgcgaactatctggagccccgatggcccaaacaaaattcacccggacgttgacctcaccgcgcccgacgccggtcgccccgacgacgaccctgcatggttctgcctacgagtcggttgcgaccagagccatgagcgggtcgaccctgaggccctggacaggagcttctttatgcgggtcatggcagcgagaagccccaacgtgaggctacagaaggctattgacaggaagaaccagagatttatagtcaggattctgattttgacgcagctcgatgctgaaatgctcgcactctgcgccgccgaagcgtccgagagctcgacagcgagggtcgaatgtcccagtgagaggaagaaggcactgactacgccgcagagcaaggtcgttcggccgaggcaggagctgttccacaacgtgaagcaccagaccgagtcgttggccgctgcagccaggaaagggacagtcgtcaagtctctgttcatgagcacgacgccaaaaaaggaaccggtccaaacgccggtggcagacaagagcaagggggcagtgtctgaggtctgttcaaagctgaggaagctgaacttggcgtgccgggaggtgccgagcaggtacatatctcagcctcaaccgaagaatacgaagactgccaagaagagtgaagagaccacggtggctaagagcgagaagcgggagctggaatccaagaccaatgccaagaagaaaattttaggacgctcagtgaagcgtgctaatgccggacctgacggagagaaccgaaatggttgcagcactgctgcagacgagaactcgcttgcagaaactgctggctcccatcaggaaaggaaggttgtgctgcaggaattgagaatcgaggtggatgcatcgcgacgtggcaatttagatgacaacaaggagaatgtgtccagtgctctgagtgaagaagcattggacaattcatcacattatggaagtgaaaacatactgttggagaacaatgagaatgttcctctgaaggagaatgttgctctgaaggtggccaaattgcagaagaaagtgcatcaagagcaggcaggaaagctcaagaaaaccaccaatcctagggtcttatgggatgggggccagtatgatccagccttatgggctagcaaagtgggtaatagttggcgtacaactgacgacataacagatacatggaaaagcatgacagacattgctgataagaacaacaagtgggcatcatatgctggacctggtggttggaatgacccagatatgctggaagtaggcaatggtggcatgaccttagcagagtatcgctcacattttagcatatgggctctcatgaagattaaggccaagacaatcagtgaaattcactctgaggcagaaaagaatcttggattatgccctggagcagcatctgtcattaggaatggccgtagctcaccaggagggcccctttcacctggagggggatttccaatgaatcggccaggaactagaggcatgatgcctgggatgcctggttcaagaaagatgcctggaatgcctgggttggacggtagatggtgtttgttattgtatttaatggtagatccaaaatag

SEQ ID NO: 37641 - DNA, 351 bp, Zea mays
  Peptide Sequence Number=SeqID_79420
atggtgcgccaaactgctatggttgtcaaatgtttactgctgatgtactataagaacagcagaggccgtagctatcgtaggcagggtcaaatgttgacgattgtggaatattttctacttttgtaccgtgcattattgcctacacctgtgtggtaccgttttttcctgaacaaggagtatggaagcctattttcgtctctaaccactggcttgtatctcactttcaagttgacatctgttgtggaaaagggcaatgggtgtaacttccctattggaaaaggatggtgcgtagctgcaaaagagaggacatcttgcttgtgtgctcgcaagaaggatgcaaaggatctgtga

SEQ ID NO: 37642 - DNA, 432 bp, Zea mays
  Peptide Sequence Number=SeqID_79421
atggtgcgccaaactgctatggttgtcaaatgtttactgctgatgtactataagaacagcagaggccgtagctatcgtaggcagggtcaaatgttgacgattgtggaatattttctacttttgtaccgtgcattattgcctacacctgtgtggtaccgttttttcctgaacaaggagtatggaagcctattttcgtctctaaccactggcttgtatctcactttcaagttgacatctgttgtggaaaagacgattgagaatgaacggattctgtatcatgtgtttcctctatacctcactatggttgttacttacatgtttgccttttggggcaatgggtgtaacttccctattggaaaaggatggtgcgtagctgcaaaagagaggacatcttgcttttgtgctcgcaagaaggatgcaaaggacctatga

SEQ ID NO: 37643 - DNA, 414 bp, Zea mays
  Peptide Sequence Number=SeqID_79422
atgggaatcagagaaaatttaactggaaaagattggctcgaagcagccaaaagtctgctcagtctgggtgcaccggactgtccggtggtgcgccaggctggctctggcgaactggctgctctcgggacttcgacggcggcgtacggctataaatcaccggactgtccgagcgagtttgagaaaattccaagatttgaatttttgggatgctacaaatctaccccacttaaaaggaatctcgtcctcgagattcggcttagaagggttatgggtatagctttacttcagctacatatcttcactttgcaactcttcgaggagatggaacttcaacaagatctggtcttgaggagcatctggttgccgattgcaaacgctgattctggctactcaagatcatcttcaggcttctag

SEQ ID NO: 37644 - DNA, 486 bp, Zea mays
  Peptide Sequence Number=SeqID_79423
atggcgcacagcgctgccgaggggacgctacggcgaggtggtaccggcgaggacgctggtcaaggggaggaggacggagcggtgccaaacttccctgtgcgacaggatggcagaggggaggacggaggcgacgaccggaggaactatgaacgaacggacgaacgatcgaatgatcggacgaacgaacgatcgaaattttggcagcataacggcaggacaaagagcgagtttgagaaaatttcaggatttgaatttttgggatgctacaaatctaccccacttaaaaggaatctcgtcctcgagattcggcttagaagggttatgggtatagctttacttcagctacatatcttcactttgcaactcttcgaggagatggaacttcaacaagatctggtctggcggagcatctggttgccgattgcaaatgctgattctggctactcaaagatcatcttcaggcttcagctttcgcttggtagctag

SEQ ID NO: 37645 - DNA, 1304 bp, Zea mays
  Peptide Sequence Number=SeqID_79424
gatcggaaggaggtgcgataaaggcatggccttgggaagcccttgctaagtgcctctcatctacaccagaagaaattcatgaggctgcctcgttggttgaaaaatcctatatcgaccttaggaaccatgctacagttggtaacatgtgctctttgcctactgctgatgtgaaacacatgctcgcagaccactgccgattgaaagtttggagtgtaactagcatgacatttgctctttgggatgctaagactagggagcttttaaaagtatttggcatcgatggccaagtcgacttagctcgtcctgaggccccagtaatgccggaacaattcatagaggaagagattaaagcaaaacccacaaaaaaggagaaactgcaaggttctttaagtttctttcggaaatctaggaatgccttgatgggcgcagctgatgctgtacgcagagttgcaacaaaagggacatttgtggaagataatcggcgaaccgaagcggtggctcaagcaatgaatgggactatttggtctggttgtacagatggttcaattattgtgtgggatggaaatgggaatagactgcaagaatttcattaccatagctcttctgttcaatgcatagaggcactcggagagaggatctgggtgggctatgcaagtggtactattcaagttatggatgttgaaggtaaccttcaggcaggatggattggtcatagctgcccagtcataagcatggcagtcggcgattcttacattttttctttggcacatcatggtggcattcgaggatggtctctaagttcccctagccctcttgatgatattctacgctatgaattggctagcagggagctgtcatacacaaggctagagaaccttaaaatactggttgggacttggaatgttgcacaagagaaagcttgtcctgaagcgctaaagtcatggttgggtggtgcatttttcgatgttgggttggtggtggttggtttgcaagaggtcgagatgggtgctggagttcttgccatggcagcagccaaagaaagtgtaagacttgagggcagtaccaatgggcaatggtggatagacagtattggcaaaacacttgatgaggggatatccttccacagggttggttcaaggcagttggcaggattacttattgctgcatgggcaaggaatgaccttaagccacatgttggtgatgttgatgctgctgcagtgccatgtggctttggacgtgctattggcaacaaggtaccaggtatcatctgtttggtctgtttattaccactaggcatcccctag

SEQ ID NO: 37646 - DNA, 3420 bp, Zea mays
  Peptide Sequence Number=SeqID_79425
atggacccggacgacgagtccgcggcgcagcggaaagccgccgacttgcacctgccgcgcgtcacggagcctgcctccgcgcccgcacgcaccttctgcgccgcgcagcgcgtgctcagctacggtgacggccctgtcgcctccgcctcggcgcagcgctgcgcgtcgttcccgcagcgccacgggcacgggcacggccacggcgaggcggcgctcgcccctgctgcgtccttcgccgcctgggtcgacggcggcccgacgccgccttcggcggtggcagcggcactggagcgggccatgtcgcagtacgacggcgcgggcgacgcgctgccggagttcgtcggcgccggcgggggcgagggcatcttccgcgtgccgctccgcgcggcggtgcacccggcccgcccgccgccgctcgaggtgcgtccccacccgctgcgggagacgcaggtgggcgccttcctgcggacgctggtgtgcgacccgcggcggcggaagctgtgggccggcgccgagtccggggtccgggtgtggtgcctcgacgaggtgttccgcgggtggtggccaggcgccgggccgcggcgccgcggcgacgaggaggccgcgcccttcagggactccgtgccggtcccgcccgcgctctgcgccgcggtcgacagcgccaacgggctggtgtggacgggacacagggagggcaggatcagggcgtggcgcgtggaccacgccgcgcccgccggaggagaccccaccggcagcgcggccatgttcaaggaggccttcgcgtggcaggcgttcagccgcacgccggtgctcgccatcgtcgtcacgccgtacggatcggaaggaggtgcgataaaggcatggccttgggaagcccttgctaagtgcctctcatctacaccagaagaaattcatgaggctgcctcgttggttgaaaaatcctatatcgaccttaggaaccatgctacagttggtaacatgtgctctttgcctactgctgatgtgaaacacatgctcgcagaccactgccgattgaaagtttggagtgtaactagcatgacatttgctctttgggatgctaagactagggagcttttaaaagtatttggcatcgatggccaagtcgacttagctcgtcctgaggccccagtaatgccggaacaattcatagaggaagagattaaagcaaaacccacaaaaaaggagaaactgcaaggttctttaagtttctttcggaaatctaggaatgccttgatgggcgcagctgatgctgtacgcagagttgcaacaaaagggacatttgtggaagataatcggcgaaccgaagcggtggctcaagcaatgaatgggactatttggtctggttgtacagatggttcaattattgtgtgggatggaaatgggaatagactgcaagaatttcattaccatagctcttctgttcaatgcatagaggcactcggagagaggatctgggtgggctatgcaagtggtactattcaagttatggatgttgaaggtaaccttcaggcaggatggattggtcatagctgcccagtcataagcatggcagtcggcgattcttacattttttctttggcacatcatggtggcattcgaggatggtctctaagttcccctagccctcttgatgatattctacgctatgaattggctagcagggagctgtcatacacaaggctagagaaccttaaaatactggttgggacttggaatgttgcacaagagaaagcttgtcctgaagcgctaaagtcatggttgggtggtgcatttttcgatgttgggttggtggtggttggtttgcaagaggtcgagatgggtgctggagttcttgccatggcagcagccaaagaaagtgtaggacttgagggcagtaccaatgggcaatggtggatagacagtattggcaaaacacttgatgaggggatatccttccacagggttggttcaaggcagttggcaggattacttattgctgcatgggcaaggaatgaccttaagccacatgttggtgatgttgatgctgctgcagtgccatgtggctttggacgtgctattggcaacaagggtggtgtaggattaagaataagagtctttgatcgcaggatatgttttgtaaacaatcattttgctgcacaccaagaaaatgttagccgccgtaatgctgattttgaccatatttatcggacaatgactttcaacaaaccccatggatctacagcttctgctacatctgtccaattgcataaagcagctaatgaaaaccaagccgatgaagataggcctgagctggcagaagctgacatggttgtctttcttggtgatttcaactaccgacttgatggcatcacctatgatgaagcaagggatatggtctctcagaggagctttgactggcttagagaaagggaccaacttcgagcggaaatggaggcaggaaatgtgtttcaaggaatgcgtgaaggtcgaatcaaatttcctccgacctacaaattccaacgacaccagatgggtctctcagggtacgattcaggcgagaagaagagaatacctgcttggtgcgatagaatactatatcgtgatagccgttctgtatcaatgcctgaatgctcattagagtgtcctgttgtcgctgcaattacagcgtacgaagcttgcatggatgtcacagatagtgatcataaaccagtgagatgtacatttagcgttgatattgcgagagtagacgagctgataagaaggcaagagtatggaaaaatagtcgagtctaacaaaagggtacactctttgcttcgggagttgcattttgttccggacactatcgtcagcacaaacaacattatattggaaaaccaagaagatgtcatcctccgaataactaataactgcgaaactagtaaggctgcatttgaaatcctgtgtgaaggccaatcaatcagaaagcaagatggaactaaatctgagccagtcataagggcatcctttggctttccactttggcttgaggtccagccatcatccggcctcatcggaccaggagacacaacggaagtcgccgtgcaccacgaagacttcttcacgcaagaagagttcgtcgacggggtgcagcagagctggtggtgcgagaccaccagagacatagaggtcgtcctgtcggtgaacgtcacgggcgtcgcctcgaccgaggccgccacgcacaggatcaccgtccggcactgctgcccggcgcctccagccccgccgtccgctaacccacgcggccccattaccgactcacctagcgacgctgtgccaggtcccaagagtagccagtcgaatcacttgctgcgttctgacttcgcaaacttcggcagctccgaggtgcgcgacctgtgcggcgtgcggaagcggaacctgtag

SEQ ID NO: 37647 - DNA, 2139 bp, Zea mays
  Peptide Sequence Number=SeqID_79426
atggacccggacgacgagtccgcggcgcagcggaaagccgccgacttgcacctgccgcgcgtcacggagcctgcctccgcgcccgcacgcaccttctgcgccgcgcagcgcgtgctcagctacggtgacggccctgtcgcctccgcctcggcgcagcgctgcgcgtcgttcccgcagcgccacgggcacgggcacggccacggcgaggcggcgctcgcccctgctgcgtccttcgccgcctgggtcgacggcggcccgacgccgccttcggcggtggcagcggcactggagcgggccatgtcgcagtacgacggcgcgggcgacgcgctgccggagttcgtcggcgccggcgggggcgagggcatcttccgcgtgccgctccgcgcggcggtgcacccggcccgcccgccgccgctcgaggtgcgtccccacccgctgcgggagacgcaggtgggcgccttcctgcggacgctggtgtgcgacccgcggcggcggaagctgtgggccggcgccgagtccggggtccgggtgtggtgcctcgacgaggtgttccgcgggtggtggccaggcgccgggccgcggcgccgcggcgacgaggaggccgcgcccttcagggactccgtgccggtcccgcccgcgctctgcgccgcggtcgacagcgccaacgggctggtgtggacgggacacagggagggcaggatcagggcgtggcgcgtggaccacgccgcgcccgccggaggagaccccaccggcagcgcggccatgttcaaggaggccttcgcgtggcaggcgttcagccgcacgccggtgctcgccatcgtcgtcacgccgtacggatcggaaggaggtgcgataaaggcatggccttgggaagcccttgctaagtgcctctcatctacaccagaagaaattcatgaggctgcctcgttggttgaaaaatcctatatcgaccttaggaaccatgctacagttggtaacatgtgctctttgcctactgctgatgtgaaacacatgctcgcagaccactgccgattgaaagtttggagtgtaactagcatgacatttgctctttgggatgctaagactagggagcttttaaaagtatttggcatcgatggccaagtcgacttagctcgtcctgaggccccagtaatgccggaacaattcatagaggaagagattaaagcaaaacccacaaaaaaggagaaactgcaaggttctttaagtttctttcggaaatctaggaatgccttgatgggcgcagctgatgctgtacgcagagttgcaacaaaagggacatttgtggaagataatcggcgaaccgaagcggtggctcaagcaatgaatgggactatttggtctggttgtacagatggttcaattattgtgtgggatggaaatgggaatagactgcaagaatttcattaccatagctcttctgttcaatgcatagaggcactcggagagaggatctgggtgggctatgcaagtggtactattcaagttatggatgttgaaggtaaccttcaggcaggatggattggtcatagctgcccagtcataagcatggcagtcggcgattcttacattttttctttggcacatcatggtggcattcgaggatggtctctaagttcccctagccctcttgatgatattctacgctatgaattggctagcagggagctgtcatacacaaggctagagaaccttaaaatactggttgggacttggaatgttgcacaagagaaagcttgtcctgaagcgctaaagtcatggttgggtggtgcatttttcgatgttgggttggtggtggttggtttgcaagaggtcgagatgggtgctggagttcttgccatggcagcagccaaagaaagtgtaggacttgagggcagtaccaatgggcaatggtggatagacagtattggcaaaacacttgatgaggggatatccttccacagggttggttcaaggcagttggcaggattacttattgctgcatgggcaaggaatgaccttaagccacatgttggtgatgttgatgctgctgcagtgccatgtggctttggacgtgctattggcaacaaggtaccaggtatcatctgtttggtctgtttattaccactaggcatcccctag

SEQ ID NO: 37648 - DNA, 438 bp, Zea mays
  Peptide Sequence Number=SeqID_79427
atgggggcggggctggaccctagcccgagcttcggcggctgctcggaccccgtgttggtggagctatccatgggcggggactactaccgcgcctgctgcggcgagcccgactccgatatccccgaggggcccaagctgccctgcgttggggacaagacttgcactgatctagtgcaaattctagtcgtggccgtctgtaccgctctggggggatcagacagtgcagcggcgcagttgagtgttggttacttggtgttcaagttgtgctggagcctctttcctcttcagcagccgagtttcagtctgggcagccccattttacaagagaaaattaaggaacacatcctagagagacaagacaaagctgaggttgatcacatcatggtaaaaattgaggaatgcaagaaagaagacactcctgtctcttggatatattga

SEQ ID NO: 37649 - DNA, 456 bp, Zea mays
  Peptide Sequence Number=SeqID_79428
atggcgctcgctcgggcgtacgagcggcgcacccagttctccgacgggtgtccccagccctctccgcgtctaccggttgcgccatcccctacgtcgaccgggccagcgacggcggcctccgccctggtagcaccaacgttcaagcgcctcaccccaacagagatggcggagcgacgccgccagggtctgtgctacaactgtgacaaaccgtttgtgcgaggccatcactggcaacgcctcttctaccttgaggtgtccaccgacgatgacggggtagctgctgcagaagatccccacccccgtaatcttgccttccagctagaggccaagctatttttggaggttgagcacatgttaaatgacagattactgaattttgttgacattgatttgcatgatgtgaaggatgctcataagcgctttgacaaggctagcctctcatatgaccagacctag

SEQ ID NO: 37650 - DNA, 420 bp, Zea mays
  Peptide Sequence Number=SeqID_79429
atacagtcacttgaggagagtgctgaattgttgagagagagatgtttgaagttccataaaaggttgcctgaagggctaggggaagcatacgatggagatattgcatttgccagctcacttgaaacatttggaggaggccacaatgatccaattagtgttgcttttggtgggcctgtaatgaccaaatttacaattgccttacgagaaattggaacatacaaggaagtcctgcgctcccaggttgagcacatgttaaatgacagattactgaattttgttgacattgatttgcatgatgtgaaggatgctcataagcgctttgacaaggctagcctctcatatgaccagattcgtgagaagtacctatcattgaagaaaggtcacttcactttcccatgtcgaggcaaagaagagatatga

SEQ ID NO: 37651 - DNA, 3432 bp, Zea mays
  Peptide Sequence Number=SeqID_79430
atgggggcggggctggaccctagcccgagcttcggcggctgctcggaccccgtgttggtggagctatccatgggcggggactactaccgcgcctgctgcggcgagcccgactccgatatccccgaggggcccaagctgccctgcgttggggacaagacttgcactgatctagtgcaaattctagtcgtggccgtctgtaccgctctggggggatcagacagtgcagcggcgcagttgagtgttggttacttggtgttcaagttgtgctgtgaaggactaggggaagcatacgatggagatattgcatttgccagctcacttgaaacatttggaggaggccacaatgatccaatgagtgtcgcttttggtgggcctgtaatgaccaaatttacaattgccttaagagaaattggaacatacaaggaagtcctgcgctcccagcggcaggtgcaggactcccagacattgatcatcaaccacctgtcggcggtggccgcccagttggtggcgatcgaggtccaactcgcgtcggcctcgtccgtgatcgatccttcatcgtcatcccacgtcttcccctctactgcgcaagattacccctacggccttcctgacaatgggggcatccccaccgcgcccgctccggtgcccttcttgcccatggcactgcctccatccgccacccctgcccttgtgcccacgacctcccacgccgccgccgccccatcgtccaccgttgtccttgtctccacagcgtcaatccacccttctgccccctgcccatccaccgaattcccttcccccactccccatccccaaccccaggctttcccgacctccaccatagtgcatacctcccacaacagcaccctcacaacttgcaccaccataaccttttcttcccaacttcgatggcaaggaagatcctgttggctgggttgtcccgctgtgagagcttcttctacaatcaggggacaccgaagatggacaaagtctggttggctacgtaccatctcacgggcattgcacaacagtggtcctttatgctgcggcgcgacgatcccacattgtactggccgcgcttcaaagctttgtgccaacaacgttttgggtctcccctacgcagcaatacgttgggcgaggtggcacgcctgccgttccgaccagaatcgattcctggctctcctatgccacactgagcctatgccaccaccgcaccaacaagcgcaactcttcaccactggacttttcgggcatctccgaatggacgtcgaactgtgcgcgcccgacgaccttcagcaggacatggcgctcgctcgggcgtacgagcggcgcacccagttctccgacgggtgtccccagccctctccgcgtctaccggttgcgccatcccctacgtcgaccgggccagcgacggcggcctccgccctggtagcaccaacgttcaagcgcctcaccccaacagagatggcggagcgacgccgccagggtctgtgctacaactgtgacaaaccgtttgtgcgaggccatcactggcaacgcctcttctaccttgaggtgtccaccgacgatgacggggtagctgctgcagaagatccccacccccgtaatcttgccttccagctagaggccaagctatttttggaggttgagcacatgttaaatgacagattactgaattttgttgacattgatttgcatgatgtgaaggatgctcataagcgctttgacaaggctagcctctcatatgaccagattcgtgaaaagtacctatcattgaagaaaggtacccgaccggacataacaacagcaattgaagatgagcttcacagtgctagatcttcatttgagcaagctcgtttcaacctggtcacttcactttcccatgtcgaggcaaagaagagatttgaatttttggaggctgttagtgcgacaatggattcacatcttcgttattttaaacaaattcttgcttatgcacagcaatcacgagaaagagcaaacaaggaacaagcttctctcgtagagaggatgcatgagtacaaaaggcagatagaccgggaaagtcggtcttctataaatggtttgaatgattcttataatggtgatcgaatgcagacaattggcagaagttcacataaacagatcgaggcagttatgcagtcaacttcaaaaggcaaggcagagagtgcagtagatcagatggactggattgaaaagataactggtgttattgcctctttactgagctcacaatcgccagaacagtgttttatgtcaagccctaagggcagtggtcatgataggagtaccagtgatggaagctcctttacaagttcagtggaatttgaaccttccgtaatcgatgatttagtactggagaagtactctggaaatgggcagcatgatgtaataagaggcacacatcatcacagaaccagcatgaaacctgaaaaaccaattgacttgcttaggaaagttgatggcaataatatgtgtgctgactgtggtgctttggaacctgattgggcatcattaaaccttggcgcacttctatgcatagagtgttctggggtgcaccgaaatcttggagtgcatatatcaaaggttagatctctgacacttgatgtcagagtttgggagccatcagtaatcaatctctttcagtcattaggcaacatgtttgtcaacaatatttgggaagacatgttgccagatgataattcaagtgctgatggatcagacacatcacagtacctctctgttagcaagcctaaacacaaagatgtattctctgccaaggagaagtttattcatgccaagtatgtagacaaagagtttatacggaagcgtagcatggatgagaatcaattagctgagcagatgtggaatagtgtagctgcaaatgacaagaaaacagcatacagtctcattgtgagatcacgtgccaatgtaaatttagtttacggagagatgccttctagcccatttttgactcttggaaaggcacttcagcaagagcaaccggtttcaccgcctgatggaagtcctaaatttttcgattgcaattcacatgacaagatttctcctcgggagcccctttcccctgctagcacgagttcacgcacagatgacatggaggacggttgcgaaggtctttccttgctccatcttgcatgccgtgttgcagacgttgggatggttgaattacttttgcagtatggtgctagtgtaaatatgaatgattctaggggtcggacaccccttcatcactgcattttgaaaggaagacatcggcatgcaaagcttctcctctccagaggggctgattcacaagccatggatcgagatggtaggacagcattgcagtatgcaatcgatggtggaacaagcgacgaagacattcttgcattgttagaggatcatagtagatga

SEQ ID NO: 37652 - DNA, 652 bp, Zea mays
  Peptide Sequence Number=SeqID_79431
atggaattaccactagacgcgcagagcagcggaagacgtctcgatgtagacgaacgcgtcgagcagtgccgtgcagtcgccggcgtccttcacgtcctcgcacggtccgtccaagtgctccagatgcagcacctccgaggtgaggagggtgagagttctggtggtggtgaagtgcgggagatgccaaatgttttaattcttccgcggagtgcagactacagtaaagaagtgtggatggaaataagagagaaagcaataactatgttacagtcctttttcttcgatggtgttcttccaagtagtgcaatttctgatgaagatgaggaaataagtgaagctaaaaatgaagatgactatctaggcccacaggcaaaggatagccagtcacagatttttgatgctgaaatagatgaaagccacataacgctggagtctgaaaagaaaagagccatatcccaccataaagagcctcaggcgtctggaaagtctgtaaacattggctcccgatctgaagggaggcgtagtcgttctggaaagaaagggaaaaagaggcctgcccatcgcagacctcaacagaaaccagatgacttatctgatgttgaatctatctttaaatgcttcaaaattatcttgaatagtataaactcaatgg

SEQ ID NO: 37653 - DNA, 2103 bp, Zea mays
  Peptide Sequence Number=SeqID_79432
atggcccattcgccggcgcccagcggcggcggcggcggggggccgctgccgctactggtgtcgctcaactgcctcgacgacctctcgctggagcaggaggggctggcgggcgtggccgcggtggagcaccgccggctgcggccctggcagctgctgctctgtctcggctccgcggaccgcgcggccgacgcggcggcggccgccgacctgggcctccgcctcgtccacgtcgacgccaaccgcgccgaggaggtcgccgacaccgtcatggcgctcatcctcggcctgctccgccggacccacctcctctcgtgccacgcctcgtcggtcccggccgccggctggctcggctccgtccagcccatgtgccgcggcatgcggcgctgccgcggtctcgtgctcggtatcattggccggtccgcggccgcccgctgcctcgccactcgtagtctcgcgtttcggatgagcgtgctctacttcgatccgcgctacgtgggactgttgtataggctaagtaattttagtactacaattactactaagggggtgtttggaaacacagtttttcaaaaccacggtatttcaaataccacagtatacaaatgccatgacatgatctcagttttcaataccacagttttagaataccacggttttgaatacatggaggtgtttgggaacaaagcaagtgggaaaacaaagcggccttctattgttttcccttctgcagcaaggagaatggacactctcaatgatttattagcagcgagtgaccttatttcgctgcattgcggattaacaaatgaaaccatgcatatacttaatgctgactgcctgcagcacataaaacctggagctttcatagtcaatactggtagttgccagcttatagatgactgtgctctcaaacagctcttgattgatggtaccatagctggttgcgcattggatggtgctgaaggtccacagtggatggaagcatgggtgcgggagatgccaaatgttttaattcttccgcggagtgcagactacagcgaagaagtgtggatggaaataagagagaaagcaataactatgttacagtcctttttcttcgatggtgttcttccaagtagtgcaatttctgatgaagatgaggaaataagtgaagctaaaaatgaagatgactatctaggcccacaggcaaaggatagccagtcacagatttttgatactgaaatagatgaaagccacataacgctggagtctgaaaagaaaagagccatatcccaccataaagagcctcaggcgtctggaaagtctgtaaacattggctcccgatctgaagggaggcgtagtcgttctggaaagaaagggaaaaagaggcctgcccatcgcagacctcaacagaaaccagatgacttatctgctgttgagagtgacagtaactattcctcccggagagatgatgacactgcaatgagtagcagggaccaggttgtaagttccagttcacgatttgcctctcctgaggacccaaaatacaagcataaatctctttctgaatccccgatggaaataacatccgagaagaaggtgcctgtactactcagtagaaagtaccctgataaactaaaagatggatttattgtagctttgagagcaagagataattcagggtaccatgttgcaagacagagagtagttggtggtggtggctggattcttgatgttgtctcaaatgctacaaacagggaccccgctgctcagttccttgttactttcaaaaacaagattaataggaagatggagtttgtgtttgcaagccattcttttgatgtttgggagagctggatgctggacggttccttgctggaggttatggtggttgaggtcgtgctcgctggcggtggtggatcaatgctagtccgcttggaggtcaaggtctcgacatgctcgaggggatggcctcacctggaggaggctagaggagtcatcatcggagccgagcgcgggaagcacgggaaaaggagcaccgtcaccgactcaccgtccgaagacgtgcggtcgcatgagatgagaaagatttcactgtttcacggatggaaagagatcggagactaa

SEQ ID NO: 37654 - DNA, 648 bp, Zea mays
  Peptide Sequence Number=SeqID_79433
atgatgttacaatgcaagcgtcagttgtacaggaaggagaagaaggtctactcaacggcgatactagagaggaaaaggtcaatgaaccgccttgtcgtcgacgaggccaccaacgacgataactccgtcgtcgcactgcaccctgacagaggctgcactcttccgcggcgatactgtgctcctcaagaaattgagtatgctgaggcggtgaggtgccaggatgtgaaatatgggaagcgtgtgcacattcttccaattgatgatacagttgaaggcattacagggaacctatttgatgccttcttgaaacatactgaaatattttgtgatggggagcctattaagagagaggatgaggagcgtcttgatgaagttggttattatgatgttggagttagaaagcaaatggcccaaatcagagagcttgttgagcttccactacgccatcctcaacttttcaaatctattggtgtgaagccaccaaagggcatattgctatataggccacctagttctggaaaaactcttattgctcgtgctgttgcagacgatactggagcctttttctttctaatcaatggtccagagatcacaaaatttatatgtatagataggatcaccaatggattacaaatttttttctcataa

SEQ ID NO: 37655 - DNA, 657 bp, Zea mays
  Peptide Sequence Number=SeqID_79434
atgggatgtgaagtatctatgatatttcaagaaaaattgcaaagactgtacgatgatggttacaagctggtcatattcaccaatgagtcaaatattgagcgctggaagaacaagcgacaacaagctgttgactccaaagttggccgccttgataactttattcaatgtgttaaagcccctattcagaaatgcatttggattttccatgaattccagtctttcacatacccatctacttgctatcctgctactggacgagaggatataatcaagatgttgaagaaaaagaatcttggaggtaagaacccccaaggaggaggcggaggcgctgcctttgcccggagccggtgctcgtggcgacaacttgagtatgctgaggcagtgaggggtaagaagaggaaagacactatttgcattgtccttgcagatgaaacctgtgaggagccaaaggttcagatgaacaaggttgtccgccagaacctgagggttaggcttggtgatgtggtttctgtccaccagtgcgaggatgtgaaatatgggaagcgtgtgcacattcttccaattgatgatacaattgaaggcattacagggaacctatttgatgccttcttgaaaccatggctccatggcacttatttctcatgtaacttcaactga

SEQ ID NO: 37656 - DNA, 240 bp, Zea mays
  Peptide Sequence Number=SeqID_79435
atggctgaaaggtaccctcggactaaagtcggcattgcagcagaccggaataatacgaagcttgatacagggccgaaggtgaacagtatccccgtactgttcacgctgactgggcattcgctttttgcgtcacgcttgtactgtcatttccttccgattgaaggtatgaccttcatcaccttcgtccgcaagtcattatatcctaagggaaataatacttcggaggacgaaggatattaa

SEQ ID NO: 37657 - DNA, 339 bp, Zea mays
  Peptide Sequence Number=SeqID_79436
atgggccgattggttctttcatctttaagtcggtgcatctggaagtacgctacaaagctccctgattggaccttcggcgacgaagcagacccccaacagaggctcgggctgtttcccgagtacttctctataaagatatgttcgttggatgacaacctgggaaaacaatgcatccatgagggtggtatgtccttcgtaaccttcgtccgcaagccattacatcctaagggaaataatgcttcggaggacgaaggactttcacaattgacattttctatgttgccttgttctcaactcatagcacttgaggacaagtccccaacagaacttaaggtgtag

SEQ ID NO: 37658 - DNA, 486 bp, Zea mays
  Peptide Sequence Number=SeqID_79437
atgtcgcgcgctgctagggcggcgttcgtgttctggggcggtcctgcctttgcaccgtatttggacttttttgtcggtaacggaatcgcttgtgcgagcgagagttgcttctcacggaaggtgatgagtgaggtatccgtatcccggaggtgtaggagtccctcggctcggtcagccttgccgcttacgcgcactcttacccgtccttggggttatgttaccgacgcagtcaagaaggctcgaagaatcgcttcggcagaagagcttccgaatgtgaagacttgttcggtccgcgggatcgcttatccgaacgtgagttacttatcgcagaaggtgatgagtgaggtatccatatcccggaggcataggagtccctcggctcggtcagccttggctgcttacgtgtactccgtcgtttttaggatctgttggggacttgttctcaagtgctatgagttaagaacaaggcaacatagaaaatgttaa

SEQ ID NO: 37659 - DNA, 544 bp, Zea mays
  Peptide Sequence Number=SeqID_79438
atgctcgagaccaattgatgcagttcttgaggatctcctggacctgtgggttaggacccacacatgcttccgctgcgccactccgatcttgttggttgatgttgatcgcattgtcttcattggggtcttgactgatttggaggagttggaggttgccaaatggataggtgcaagtggaaagaatagcgagaaaagacaaaacccgcaaggcatcaaagaagggggagcaatcaatgatgaaatagatgaggcattatccccaaacaggaatggaaaagatggggcttcaaagggtaggttcaaggtaatggtgatagcaaataaagacacagcacaggatggaattaagacaaaacttgtaaggcgacaaggaggagaaagaaatcaagggagagataggtggaatgtctcaatatcacaagggtcagaggcggtaatagacaagggcataagggaaaagacgaaagcacagaagagccagtggtatacgtacaacaaagaatggaggtatgtcaaggcttacgcggtaaagaagaggatatag

SEQ ID NO: 37660 - DNA, 309 bp, Zea mays
  Peptide Sequence Number=SeqID_79439
atggaggtttctcaccggggaagaagaccctcgccggagccgaggagaaatccgtcgattgccggagattcggggatccaatcgatgaaacgaacgcgctgcgacgaagccttcgacgagacgaacgcagcggtaccctcggattccgcagacgatgcacggattgggaggttagcggctaaccctcttaacaagagcattgatacacacttgatgaagatgttgccgactctgatcttgactgatttggaggagttggaggttgccaacaggacaggtgtaagaggaaagaataacgagaaaaggtaa

SEQ ID NO: 37661 - DNA, 477 bp, Zea mays
  Peptide Sequence Number=SeqID_79440
atggaagagagaggaggggaagggggctgcgcaagggaggacgagaccgggccggccgggggcgggcgcggccgcaccgggcgcgcggggcgcggccacagccgccggggaggggtgcgcgcgggcgcgggagcacgggacgcgggcgccaccgccgccgccgccggggagggagaaaggggcgccgtcgaggaggggaaacagagggggggaggggcgccgccaccggggaaggtgaggggagagtgggagaggctctgcacggacgggaaaacgaagaaacgaagaaaccctaggtgcaacaatggaggtttctcaccggggaagaagaccctcgccggagccgaggagaaatccgtcgattgccggagatttggggatccaatcgatgaaccgaacgcgctacgacgaagccttcgacgagacgaacgcagcggtaccctcggattccgcagacgatgcacggattgggagtaa

SEQ ID NO: 37662 - DNA, 1968 bp, Zea mays
  Peptide Sequence Number=SeqID_79441
atggcgcgaaacggcagccatatggaactcagcgctctcagtgcctgtctcgcagctgttgtctgttcttcacagcaaccacctctccggccactcggtagtgccgctggtgatgggacctctctgataattaaagctgtgctggatagagcgaccgagctactggcggatgcccattccgcagccaactacatcagatcagcacgttcgctttggcatgcgtcatttgatgctttctttggactgttgacgaggtactgtgacagcaagtatgaaagtatcatgcagaggtttgccatgcagggatccaactccatgggaggacctgaaaccaccaaagcagtcagcagggagatgcccgttgagctgttacgtgcgagtcttcctcatactaatgagcagcatcgtcagacactgctagattttgctcggaaatctacgcatctgcctggtttcagtcctactgctaaccgtggacttgtcaattctgaatcagttccagtgctgaacataacatctgttgaatttggagattatatttgcacgcagggtgatcttgcactcatcgattggattaaagaaatcccttgtgaaccaagggtagaagtcgtgcttattgatgatgcttttgtggaaaggaagtggatggaatgcctatttcaaccggacgcatatctaggtgatgaggtgatagactgttacataaatttaataaaagctcaagagcatctaaaatgccgatctggaggtcgtgtacacatagaaaatgcttttcagttcaactttctaaagcgagacggtgatgttgaaactaaaacagatgagttatatccaagtaaagacatggcacaaatatctagcgctgaaagaagagttttactttatctagaccatgacatggtgtttattccaataaatatccgagaaatgcactggtatcttgctgtgatcaatgcaagaaatatggagatacaagtgctcgactcacttggtacatcatccggtcgcaatgacctcattgacactataaaaggactccaaagacaaattgatatggtatctcagcgtaaggagttaaaagatcataggtggccagacctccgagttgcttcttggccacttagagaaatagaaatggaatatgcaaagcaaacagatagctcctcgtgtggcctctttctactaaactatatcgagtactggacaggggatgaactatctgataattttacccaggacgacatgtcacactttaggaaaaaattggctgctatattactatcttcagatataaacaagagaaaggggtgtccgttatacaagtatgacaaagaagtcgatgctggatgctcctctgatgttcagatattagatagtcccacaaatcctaagaagaggaaactaccttgtgtatctgaagaaaacgaagtattgatggaagatgatgatggccccatcactcaagcagacttagaaaggtggtttgttcatgattgggataaaagaactcctataaaaatcccgaccgatgagtgcactaatgagtttttactgagtggcctttccacaaaggacatgccagtgaccaaagccgatttaatagatgttctatgtgattacatcatgacaatccaagatgatacgacattagagatgacatgggtgcgaagtttcaacccttttaagatagaaatatctgtcaaagacctgcaaaacgtattaagggtaaatctagatatgactctaaaatgttttgacatggctgttcgattgttggccattaaagaatcacatatgtcgaaagatgaaatgataaaggataaaaaacattatatggacatgcgcttctggagaatggttggttttggtaaacttccaaagtaccatcaggatctgaaagggaaatgtgcccttgggccatttctaagtattttggtgattgagtgcaaacacaagtgcttaatgtga

SEQ ID NO: 37663 - DNA, 948 bp, Zea mays
  Peptide Sequence Number=SeqID_79442
atggaagacaaggatccatcttcactaactgagaagcttgataaaacattctcaaatgaaacaacatatttgatcctggacatataccaagctggatcacggaaccggcaattcatcccaggctaccctgcagctgatggtttactcaagaagacaattacagaaggcaaggttggtggaagacaaggaaagagagtaggaatcgacccatcagattgtgcggatttggtaaagggagccaaggacaagcatttgagggttaagagacttgtcaggatccctactaaggacgacatgtcacactttaggaaaaaattggctgctatattactatcttcagatataaacaagagaaaggggtgtccgttatacaagtatgacaaagaagtcgatgctggatgctcctctgatgttcagatattagatagtcccacaaatcctaagaagaggaaactaccttgtgtatctgaagaaaacgaagtattgatggaagatgatgatggccccatcactcaagcagacttagaaaggtggtttgttcatgattgggataaaagaactcctataaaaatcccgaccgatgagtgcactaatgagtttttactgagtggcctttccacaaaggacatgccagtgaccaaagccgatttaatagatgttctatgtgattacatcatgacaatccaagatgatacgacattagagatgacatgggtgcgaagtttcaacccttttaagatagaaatatctgtcaaagacctgcaaaacgtattaagggtaaatctatatatgactctaaaatgttttgacatggctgttcgattgttggccattaaagagtcacatatgtcgaaagatgaaatgataaaggataaaaacattatatggacatgcgcttctgggttcttatgccatggaaattcaacggatgctacgcacttttcataa

SEQ ID NO: 37664 - DNA, 1287 bp, Zea mays
  Peptide Sequence Number=SeqID_79443
atggaatatgcaaagcaaacagatagctcctcgtgtggcctctttctactaaactatatcgagtactggacaggggatgaactatctgataattttacccaggacgacatgtcacactttaggaaaaaattggctgctatattactatcctcagatataaacaagagaaaggggtgtccgttatacaagtatgacaaagaagtcgatgctggatgctcctctgatgttcagatattagatagtcccacaaatcctaagaagaggaaactaccttgtgtatctgaagaaaacgaagtattgatggaagatggtgatggccccatcactcaagcagacttagaaaggtggtttgttcatgattgggataaaagaactcctataaaaatcccgaccgatgagtgcactaatgagtttttactgagtggcctttccacaaaggacatgccagtgaccaaagccgatttaatagatgttctatgtgattacatcatgacaatccaagatgatacgacattagagatgacatgggtgcgaagttttaacccttttaagatagaaatatctgtcaaagacctgcaaaacgtattaagggtaaatctagatatgactctaaaatgttttgacatggctgttcgattgttggccattaaagagtcacatatgtcgaaagatgaaatgataaaggataaaaaacattatatggacatgcgcttctggagaatggttggttttggtaaacttgcaaagtaccatcaggatcctacagcagaagagttagccaaaacactcgactgttggccttcattgaactattatatcactggttgtaaatatgttcttatgccatggaaattcaacggatgctacgcacttttcataatcgatcatggtaaaaagcacgtaacttttatggacttcacacccactgaagattggtgtaaacacatgccatacaagaggtttgcagaagcaattatcatggcctctaagaaatataagattgcctacaataagaaacgttctggatgggcacatgatatttttaagtgggaacatacaattcggtctggtcttccattggacttaaaaggggttaatacaagctacttcgttctacaagctatggtcatgtgggggagtggtagacgaatggaatttaatagggatacaaagattcttcgaaggaactttgtaattgatctattaagttacgaggagaattcatgccgctatgctatccctccaaacatacaacaacgacttatcagtatcgctaaaaaagattag

SEQ ID NO: 37665 - DNA, 693 bp, Zea mays
  Peptide Sequence Number=SeqID_79444
atgacccgccatcccaccacgacggcgtgcagcacccccacgtccgccaagaccgcccccgcgccgggctacggcctcgaacagcgccttccgaatggcagcagcaagaagggaacgccgcggtcggcgtcgcagcggtggatgccggacaagccacggacgccgagcagccggaggacgtactcgatcggcgagccgggcaagctgacgaccggcttctcgcggtccgcgcggatggggaacctgaaccctagggatcgggcgttcgcgtcgctgagcaacatcgccgacctcaagtccgtggcggacgcggcgacggaggacttggacgacgagttcgaccacatcgacgagagccactacgttgacacggaggactccacgaagcacaagaagaagagcccgatattccgcagatgcggcgagcttgcggtgccccttaccctccccctcacctacgatagcgatccctccccctccccctcctcctcccccgatcggttccccttcggtcgccgctacgacgtcgggccaatagttcttatcttcctcctgctcgtgctcattgtcacatcacagtttgagtggaagcagcatattggtgaggctgaggcgaatccaacagctacacgaaggaggcaacaggcgcttggaagggaggatgctgttaaagagaaagtcgtcctattgtag

SEQ ID NO: 37666 - DNA, 894 bp, Zea mays
  Peptide Sequence Number=SeqID_79445
atgaattttaggccaatagttcttatcttcctcctgctcgtgctcattgtcacatcacagtttgagtggaagcagcatattggtgaggctgaggcgaatccaacagctacacgaaggaggcaacaggcgcttggaagggaggatgctgttaaagagaaactagatcctggacatgttggcactgtttacttttcttcggtaaacttcctggcactcctgctcgagctcttcgagtattctctccctttcactctgctcttgcccaacttcatcccatatcatctaagaaccaatgcagagtttagtaagaactggagcacggacgacgcgtgcgcggggcgatgggcgggcgtgggctgctcggcggacggccgccccgtcacctcgctgaccctgccgtcgctggacttgcgcagcccgctcgacctgctgtcccacctggcggagctgcgcgcgctggacctgcgcgagaaccgcctcaacggcacgctggacggagttgagaacgccggcgaggtcagcgccgcgaacgccaccgatgactgcaggaggttgccgtttggcacagcgagcatcgtcagcgacggcgtgagcgctgcagaccttgtggtgaagcaactagacgagctatccatcgttgacttgaagaaccttgctgatattgagtccccggagtttggcatggaacctgaaccagagatggaggaggaggaggtgcccccaccatcgacgtctgcggggccgccatgccatcagtggggctgcacggcaaggaggttgggtatttgggggagtatcggcgaagcatcatggctcccgacgaagcagggggctgcgacccgcgcgctggacgttgctgggggccgtctgatgctggcggcggctgctgcctag

SEQ ID NO: 37667 - DNA, 498 bp, Zea mays
  Peptide Sequence Number=SeqID_79446
atgcagcagctgcaaccgaagcagatgcactgggtgagggccgactcctccgacttcgggggcgaccgtcccgccccccgcagtcaccagcgccacgacgcctcttgcgaagaggacgatttgtacgggtatgggggcatcgtcaatgagtggggcacgattgggctgttgctgctcgaggcggcagccgagcggatcgtcggggatggggccctcgagacatggggtgtcgcagataaggccactcgtgtgaagctctgcatgttgggtgtccctgtgggggtccagcgcgagggagatcacacgcgtcgcgccgcgccgcgcggaacgtgttcgaggagcgccagctccatagccacctccatcgtgttgtcgtggctgccctctccattcagttgtggccttccttctgaagcgggtccgacagaatggagggccccaaccatagcaggtgctcctattgcaaccaactcagatgtgagtccattcagggtgtag

SEQ ID NO: 37668 - DNA, 1326 bp, Zea mays
  Peptide Sequence Number=SeqID_79447
atggcgcccatcgtgggaggcagggtatcccgcggcgaccccgcgctcccatccatctcgccgctgatggcgcccatcgtgggaggcagggccggcgtgccgtgcctgggccgcgtctgcggcacgtgggccgatcgggcacggcccgattatgtgtcgggcctaacgggcccgtgccgggccgcccgtttgggcaactccagccttaaggctggagcgagggcgtccaccaacctgaccgtgcccccgctccagcccccgcccacgctgtcttccttcctgcaatcccgcccccgcccgcgccgtcttccctgcatcccgccctcaaccgcgccgacttccttccctgcatcccgcggcgaccccgcgctcccatccatctcgccgctgatggcgcccatcgtgggaggcagggtgggcgaggtcgcgcgtgtgtctccggtcgtggtcgtttcgtttgggccaaccgtggggcgctactgtttccatcctcctactctgacttctctgcttcatctgatcccctctcccccacctgccagactccccgccgtccaccgctcgccgccctcggccgccatccagccgccggtacagggctcatcctcccggtcgcagccgtgtccagttccttcacgaagagaggcgcgtagactggggagttggagcgaggacaaggagacgagggaaaggatgcagcagctgcaaccgaagcagatgcactgggtgaggaccgactcctccgacttcgggggcgaccgtcccgccccccgcagcgggcacactgcggttatctatcgtcacatgcacccaccgccgcggctcctcctccgatgcttgcctctgactccccgattactccatgcgacttcttccatgcaacattcatcgccccctatgtggcctcccagtcaccagcgccacgacgcctcttgcgaagaggacgatttgtacgggtatgggggcatcgtcaatgagtggggcacgattgggctgttgctgctcgaggcggcagccgagcggatcgtcggggatggggccctcgagacatggggtgtcggggataaggccactcgtgtgaagctctgcatgttgggtgtccctgtgggggtccagcgcgagggagatcacacgcgccgcgccgcgccgcgcggaacgtgttcgaggagcgccagctccatagccacctccatcgtgttgtcgtggctgccctctccattcagttgtggccttccttctgaagcgggtccgacagaatggagggccccaaccatagcaggtgctcctattgcaaccaactcagatgtgagtccattcagggtgtag

SEQ ID NO: 37669 - DNA, 219 bp, Zea mays
  Peptide Sequence Number=SeqID_79448
atgggcgccatcagcggcgagatggatgggagcgcggggtcgccgcgggatgcagggaaggaagtcggcgcggttgagggcgggatgcagggaagacggcgcgggcgggggcgggattgcaggaaggaagacagcgtgggcgggggccggagcgggggcacggtcaggtacctcacctcccacgccaccatgaaaggtcttccgggagcacagggatga

SEQ ID NO: 37670 - DNA, 849 bp, Zea mays
  Peptide Sequence Number=SeqID_79449
atgaacagtaaccccgtactgttcacgttgacttgtattcgcttgtgtgtcacgcttgtacttttaccttctatcaagccgaaggataatatgatgggaatgaattaccttctatcaagccgaaggtacatcgttgtgtatcctcgcgtagccagatgtctccatgccatccgcgacaccggccatctccgcgccatctgggacctcgggtggcggcggtggcagctgcaacccgaggaaattcttcattggatggctcccgggacaccacagatggtagatgaatttatcaaggtggacattagcggtgtgaacaagcgcgtgataaggctgtccaacacatatgaccctgagacatataatgacaaggtcatcggagcgctctgtgtgttccaccacattctggcgtcaccttcgtctgatcctggaggctattggagccgctgcaagtcggatcctggtggatgcagcgcaacacagatcgcaaccctccaaggactgagaagtggaatgtttacatctctgagacagtctgaaagcaaaccgaaggcaggggtgttcatcaactcctgcttcgcgcattgccagagtggtgctttggctaacattgtagagttccagaaaattgcagaggtggtaggtgattggtactttgaaagaggagctgccgtggagattgactgcgcctatccctgtgattcacagtcttgtcgcaaccttataccaattgataaggctgaccaccctagattaaacttcaaagaccggtaccctaagccatacagagattctcatccgactgcccctgttgttgtgccatggatgtcaggtgtcattactgcaatgtag

SEQ ID NO: 37671 - DNA, 339 bp, Zea mays
  Peptide Sequence Number=SeqID_79450
atgagttccgccacattctggcatcgccttcgtctgatcctggaggccattggagccgctgcaagtcagatcttggtggatgcagcgcaacacagatcgcaaccctccaaggttaactctctgcacacgagctgtattttagccttaggtggtgctttggctaacattgtagagttccagaaaattgcagaggtgtcttgtcgcaaccttataccaattgataaggctgaccaccctagattaaacttcaaagaccggtaccctgagctatacagagattctcatccaactgcccctgttgttgtgccatggatgtcaggtgtcattactgcaatgtag

SEQ ID NO: 37672 - DNA, 585 bp, Zea mays
  Peptide Sequence Number=SeqID_79451
atggccgcaaaagcggggatccacctgctgggcatctcctcgacctgcgacagcaatgagggattcacgatggctaagtcgaaggaccacatggcacataaccagtcgtacaaggcgcacaagaacaacatcaagaaacccacgcgcggctgccagacctccaccaaggggttctgttcaccgattcgccgcagttctactcatctcataaataaggctgaccaccctagattaaacttcaaagaccggtaccctgagccatacagagattctcatccacaactgaaaatgggtttcgtcacgaagccagagacactgaccgatgggatagtgaagctgatgatttggcaccgcaccatccccagcatgcaaggtctaatgccattaaattttgagggtagcgatattgttttcaccctattgaatagggtatatgatgatattggcaagcgctggagtagtctttctgatcataagtgggatgatgcgaactatctggagcccaaacagatcaacagacgtttggtcttttcaatgccaaaccaaggggtgtcattgattttggtgatttcatccgagatgtaa

SEQ ID NO: 37673 - DNA, 546 bp, Zea mays
  Peptide Sequence Number=SeqID_79452
atggaggttaccagcagacacgacgtgaagcactcggtgcggggcgagtcgcgaatggcggcgaggttggccagtcaacaagcaattcccccgattgcagctggtgcccctccaattggatcttcccccagctgccgcgagagtagaacaacgcccgaatgtcttcgctggcgcttgaatctagccggcggcgagtttctgcggcagcgctcctactgccacctcccttcactcggcgtcacgcgattctctctctgctacggcggtggttgcgagggcagggagaggaggatggcgaggcgaaccagagggttcacgaggtcgacggagaagtggagaggggcacagggggcaccaatttatccccccgcaaaccctggcacggattggaggaaggccgcccacgcccgcgaggatcacggcggtgttctgttgcgcccgcacgcgagtcccacggagaagaagacccgtcagcgagggggccccacacggcagcgtaccacggcgatgaccaagcgcgggcggaacgtagctggaggcggctga

SEQ ID NO: 37674 - DNA, 510 bp, Zea mays
  Peptide Sequence Number=SeqID_79453
atggaggttaccagcagacacgacgtgaagcactcggtgcggggcgagtcgcgaatggcggcgaggttggccagtcagcaagcaattcccccgattgcagctggtgcccctccaattggatcttcccccagctgccgcgagagtagaacaacgcccgaatgtcttcgctggcgcttgaatctagccggcggcgagtttctgcggcagcgctcctactgccacctcccttcactcggcggcacgcgattctctctctgctacggcggtggttgcgagggcagggagaggaggatggcgaggcgaactagagggttcacgaggtcgacggagaagtggagaggggcacagggggcaccaatttatccccccgcaaaccctggcacggattggaggaaggccgcccacgcccgcgaggatcacggtggtgttctgttgcgcccgcacgcgagtcccacggagaagaagacccgtcagcgagggggcccacacggcagcgtaccacggcgatga

SEQ ID NO: 37675 - DNA, 1551 bp, Zea mays
  misc_feature (41)..(41): n is a, c, g, or t
  misc_feature (306)..(306): n is a, c, g, or t
  Peptide Sequence Number=SeqID_79454
  unsure (1)..(1551): unsure at all n locations
atggaggttaccagcagacacgacgtgaagcactcggtgcngggcgagtcgcgaatggcggcgaggttggccagtcagcaagcaattcccccgattgcagctggtgcccctccaattggatcttcccccagctgccgcgagagtagaacaacgcccgaatgtcttcgctggcgcttgaatctagccggcggcgagtttctgcggcagcgctcctacggccacctcccttcactcggcggcacgcgattctctctctgctacggcggtggttgcgagggcagggagaggaggatggcgaggcgaacnagagggttcacgaggtcgacggagaagtggagaggggcacagggggcaccaatttatccccccgcaaaccctggcacggattggaggaaggccgcccacgcccgcgaggatcacggtggtgttctgttgcgcccgcacgcgagtcccacggagaagaagaccctgtctgctggggactatggtttacaaaatggacccaaatcctttgccccaaactccgacaccctagtcaggcatcaagtccaggttgcatccttgcacaaagacttagttttggaagatcccaatactcgtatcatggatcctgagaccaaggaactttactttagatcacaatcacaaggggacgagatcttgttgcttcgcaagaaaattgctgaggcatctctcaaggagctgagattactgggtgaaaaacatattctggagaggaggctcacagacttgaggatggctgttgacgagaagcaggaagaagctatatctggtgctttgcaacaattgaaccagaagaaaacccatcttgaggacaatatgagactggcaaatgaactaaaacgtttgtaccaacagatgcatttgaagctcagatctttaaatgattcaaataggaacactcttcaacagtatgctcaaggtccaagtgaccgacatatggatcaaatggatactggcggtactactccctctaattattttgagggagacagaagagtagatggtgactcacagttataccaacctgatggtgacgctttacctggtattgaggggtttcaaattgctggtgaacctagaccaggatttcaattaacagcatgcggttttcctactaatggtactaccctttgcaatttccagtgggttcgccatcttgaaaatggtaccagacagtctatcgaaggtgccacgatgtatgactatgtggtcactgcagatgatgttggtacttttcttgctgtagactgtacacctatggatgataatggccgccagcaggcttattctcctgaggagtgggaattggctacattggtgctaacacgacctaactatcagattaagttcaaaaagaccggtgaagctataattgatgagaagtactcacaaagtctacagatgaaaattccaaatgggcgcacaactcaatttgttttagtaactgcgggtgcaactctcccatttaacacacagggaatatcagagccaaacaatgaggattacgatgttaggtatcaactgtga

SEQ ID NO: 37676 - DNA, 279 bp, Zea mays
  Peptide Sequence Number=SeqID_79455
atgggcctgttgaggatttgtggactcaagtggtcctatgacaatcgtcagcttgcatccggaggaaatgacaatggagtttttgtccagctgtttgtttggaatccacattcagtacaaccagtactaaagtatactgagcacacagcagctatcaaagctattgcctgcttgccatgtcacgaatttgatcgctcatgggtcatggctccaggttacctggtccaaatcatcgttcagccggagcataatgcttatgagcctactgctcatatataa

SEQ ID NO: 37677 - DNA, 1692 bp, Zea mays
  Peptide Sequence Number=SeqID_79456
atggagaactcggcgtcctcgaagccgccgacgccggcgtccacgcccaactcgcgcctcgcatcggcgccgtcaccccgccactccgccacgccgccgcacgcgtccgcgccggcgtccgccccggcgccggcctcgcgcaccgtctacagcgaccgcttcatccccagccgcgccggatccaacctcgcgctcttcgacctcggcccctcgccctcgcccgccgccgccgccgcctcctcgtcctcctcccacgaggccggccccgcggcctcgtccggatctgcgcccgccgcggcgtcgccctactgcgcgctcctccgcgccgcgctcttcgggcccgacacgcccgaccgggtcgcgtcctcggccgccgcgtgctcgtcctcctcctcctccccggggctctcgcctgtgggcacccccgccaccgggaacatcttcagattcaagacggaggtgcgccggaacgccaagagggcgcttttttccggaggggaggaggaggaggacgccctgttccccggcattttcaccaccaggggcgcgggaccaaggaaggtcccgaggtcgccctacaaggtgctggatgcgcctgcgttgcaggacgacttctacctcaacctcgtcgattggtcttcacataacgtcctcgctgttgggttgggcaattgcgtttacctgtggaatgcatgcagcagcaaggtcaccaagctttgcgatttgggggtggatgacaacgtttgttctgtggggtgggcgcagcgcggcactcaccttgcagtaggaacaaatcaaggaaaagttcagatctgggatgcaactcgctgtaaaagaataaggacaatggaaagccatcgcatgcgtgtaggtgctcttgcatggagttcttcgttgctttcttctggaagccgtgacaagagcatcctccaccatgatatccgtgctcaagaagatcatgttagcaagcttaccgggcataaatctgaggtttgtggactcaagtggtcttatgacaatcgtcagcttgcatcgggtggcaatgacaacagactttttgtttggaatccacattcagtacagccagtactgaagtatactgagcacacagcagctgtcaaagctattgcctggtcacctcatctccatgggctgcttgcatctggtggaggaactgcagatagatgcatacgattttggaatacgaccacaaatgcacacttgagctgtgtggacactggcagccaggtctgcaatctcgcgtggtcaaagaatgtaaatgagcttgttagcacccacggctactctcagaaccaaataattgtttggagatatccaacaatgtcgaagcttgccactttgacagggcatacatacagagtattgtacttagctatttcccctgatggccagaccatagttactggtgctggtgatgaaacgctccggttttggaacgtgttcccctctccaaagtcccagcacatgttgatgaccatcaacatcactccatttgcatcaaccatcaaaggtagcccactttttgagatggcgcgatacagtttggtgaaccggcttgcgaatccaggcatggctctttttgctaggagtgtacatatttatcagagcaacggctttataggagtggacatagaggaggggggcttcaagcatcagcattgtcccaactga

SEQ ID NO: 37678 - DNA, 1110 bp, Zea mays
  Peptide Sequence Number=SeqID_79457
gtgctggatgcgcctgcgttgcaggacgacttctacctcaacctcgtcgattggtcttcacataacgtcctcgctgttgggttgggcaattgcgtttacctgtggaatgcatgcagcagcaaggtcaccaagctttgcgatttgggggtggatgacaacgtttgttctgtggggtgggcgcagcgcggcactcaccttgcagtaggaacaaatcaaggaaaagttcagatctgggatgcaactcgctgtaaaagaataaggacaatggaaagccatcgcatgcgtgtaggtgctcttgcatggagttcttcgttgctttcttctggaagccgtgacaagagcatcctccaccatgatatccgtgctcaagaagatcatgttagcaagcttaccgggcataaatctgaggtttgtggactcaagtggtcttatgacaatcgtcagcttgcatcgggtggcaatgacaacagactttttgtttggaatccacattcagtacagccagtactgaagtatactgagcacacagcagctgtcaaagctattgcctggtcacctcatctccatgggctgcttgcatctggtggaggaactgcagatagatgcatacgattttggaatacgaccacaaatgcacacttgagctgtgtggacactggcagccaggtctgcaatctcgcgtggtcaaagaatgtaaatgagcttgttagcacccacggctactctcagaaccaaataattgtttggagatatccaacaatgtcgaagcttgccactttgacagggcatacatacagagtattgtacttagctatttcccctgatggccagaccatagttactggtgctggtgatgaaacgctccggttttggaacgtgttcccctctccaaagtcccagcacatgttgatgaccatcaacatcactccatttgcatcaaccatcaaaggtagcccactttttgagatggcgcgatacagtttggtgaaccggcttgcgaatccaggcatggctctttttgctaggagtgtacatatttatcagagcaacggctttataggagtggacatagaggaggggggcttcaagcatcagcattgtcccaactga

SEQ ID NO: 37679 - DNA, 166 bp, Zea mays
  Peptide Sequence Number=SeqID_79458
atggcgaacgggccaaaaacggatttttggccacggccgcgaaaacgggcacgtggaagggcacaggaccctcccgtggtcaccccgcgtgagacgtggaagttcgggtccacccgtgagggaaaacggaactccccgaagtcctgggagggggtatgcccctcag

SEQ ID NO: 37680 - DNA, 246 bp, Zea mays
  Peptide Sequence Number=SeqID_79459
atggcgaacgggccaaaaacggatttttggccacggccgcgaaaacgggcacgtggaagggcacaggaccctcccgtggtcaccccgcgtgagacgtggaagttcgggtccacccgtgagggaaaacgggtctcctcggccgagccccgcaccccctcgcggcctagccgtggccggtcggcaccctaccgcacccagctccggctggcgctgttggctgcctggccggccgtggttcggccgtga

SEQ ID NO: 37681 - DNA, 258 bp, Zea mays
  Peptide Sequence Number=SeqID_79460
atggcgaacgggccaaaaacggatttttggccacggccgcgaaaacgggcacgtggaagggcacaggaccctcccgtggtcaccccgcgtgagacgtggaagttcgggtccacccgtgagggaaaacggaactccccgaagtcctgggagggggtctcctcggccgagccccgcaccccctcgcggcctagccgtggccggtcggcaccctaccgcgcccagctccggctggcgctgttggctgcctggccggccgtg

SEQ ID NO: 37682 - DNA, 480 bp, Zea mays
  Peptide Sequence Number=SeqID_79461
atggcggaaaatcctgttgaacacagccgcacaaagcacattgacatccggcatcactttttgagagaccaccagcaaaagggagatatcgaagtgtttcatgttagcaccgagaaccagctagccgatatctttaccaagcctctagatgagaagaccttttgcaggtaccttgctgagttcaagtctggtgcagagaggaaggatgctgcggagagcaccatgaatgcctacaaagctgctcaggacattgctcttgcagatctggctccaacccaccccatcaggcttggccttgctctcaacttctcagtgttctactacgagatcctgaactcccctgatcgtgcctgcaaccttgcaaaacaggcatttgaagaggatatcccaccaagccaatattactacccaggtgtgaagagaaaattaactatgactcaagctgccatctcaagggaagctggacctcccaggttatga

SEQ ID NO: 37683 - DNA, 1047 bp, Zea mays
  Peptide Sequence Number=SeqID_79462
atggggttatttttgtgtcgtgggtatgggtatggggtagtaatacccggtgggtatttacccattgccatctctatgcgcagtactcaaaaggttttctataaaaggtccctgtaccttgctgagttcaagtctggtgcagagaggaaggatgctgcggagagcaccatgaatgcctacaaagctgctcaggacattgctcttgcagatctggctccaacccaccccatcaggcttggccttgctctcaacttctcagtgttctactacaagatcctgaactcccctgatcgtgcctgcaaccttgcaaaacaggcactgtataaaccagatgcagatacaaatgacatgatttctgaaaagttgatggtacaaattaatcttaacgaaggcattgaagaggatatcccaccaagccaatatactaccaggtgtgaagagaaattaactatgactcaagctgccatctcaagggaagctggacctccaggttatgatcctggagaaaactttcttcaggtcagttcaatgattactagctgtgagcagagtgtgataatggctcctagcgctatcgcaagaggagttggtccaccaggatatacgcctggagaacaccagggcaatggggctccatggaatacaagctatgagcgaagagcgtttacgagtcctgcgactagctcaagagaagtcagacctccaggatatgggcctgaagaaaaccaaggcagtggcatttcctgtaatacaagcagagagcaaatattgtttatgagccctacaaccatctcgagagaacttggtccaccaggatatttgcccagagaaaaccagcgcagtgacacttcatggaatacaagctgtgagtcgggactatttatgagtcctgcgaccacctcaatagaacatggtccaccaggatatgggcctgaagtcttgatgcttgctttattgtgtatactatttagtataaatagctgtatatattatttttgtcctgaaatatttaggatgactatatgtacgagttacaattatgactag

SEQ ID NO: 37684 - DNA, 1734 bp, Zea mays
  Peptide Sequence Number=SeqID_79463
atggccgaatcaccgcacgcctcgaagccaaggggggagctcttcgtggaggagcgcaacctgctgtccgtcgcctacaagaacgtcatcggcgcccgcagggcctcgtggcggatcatctcctccatcgagcagaaggaggagggccgcgggaacgaggcgcacgccgccaccatccgcgcctaccgctccaagatcgagaccgagctcgcccgcatctgcgacggcatcctcgccctgctcgactcccacctcgtcccatccgccggcggcgccgagtccaaggtcttctacctcaagatgaagggtgactaccacaggtaccttgctgagttcaagtctggtgcagagaggaaggatgctgcggagagcaccatgaatgcctacaaagctgctcaggacattgctcttgcagatctggctccaacccaccccatcaggcttggcattgctctcaacttctcagtgttctactacaagatcctgaactcccctgatcgtgcctgcaaccttgcaaaacaggcactgtataaaccagatgcagatacaaatgacatgatttctgaaaagttgatggtacaaattaatcttaacgaaggcattgaagaggatatcccaccaagccaatatactaccaggtgtgaagagaaattaactatgactcaagctgccatctcaagggaagctggacctccaggttatgatcctggagaaaactttcttcaggtcagttcaatgattactagctgtgagcagagtgtgataatggctcctagcgctatcgcaagaggagttggtccaccaggatatacgcctggagaacaccagggcaatggggctccatggaatacaagctatgagcgaagaccgtttacgagtcctgcgactagctcaagagaagtcagacctccaggatatgggcctgaagaaaaccaaggcagtggcatttcctgtaatacaagcagagagcaaatattgtttatgagccctacaaccatctcgagagaacttggtccaccaggatattttcccagagaaaaccagcgcagtgacacttcatggaatacaagctgtgagtcgggactatttatgagtcctgcgaccacctcaatagaacatgaaatagcgcagtcattttcacaacaaaggaaaaaaagagagggcggtggtcctacatatcatgaaacttttgcttatgctcaagggccgtttgcttgtgtacctgaagcttacgttctaagcctgggcatttatctgcttcccaacagagagtgcacgaggactttgttcacgtgtggcatccccacaatcaaaatgtgggagcaacaggttctggaaataagtgctatggtgccccctccatcaacatctgctgatcgtctgggacctgtattacttggttgtatacgagacgtcttgtggcacggccatttcttaaggtatctcttgatattggaccgcacgaactggaagaccaacatgctgacaactctcttggttccttacattttcttcactctgcctaatgtgctgttttctctgatcagaggagaggtggggaaatggattgcgattattgctgttattctgcgcctattttttccgcgccacttcccagagcacatcagggcgtcagatggacttaggaacgccttcaggaagggcaatggcgtgtccaactccattggcatcctcctgctcttcatctaccctgtctggaccggggtgctgtga

SEQ ID NO: 37685 - DNA, 366 bp, Zea mays
  Peptide Sequence Number=SeqID_79464
atggcgcccgcttcgtctgctagaggtgtcgcgtgccctgccagggagttaatgcgacagtacaggcgattcacggggcatctgttgcgcgtgcgcgagtcgttcgaggaacggaacacgggtgcgtcgtctttatgctgtgggagagggctctcctgccgcttcaagggaggatgcgagcctggaggtgggaccagggagcgcgacctcgtgggggttggcgctcttcagtcatcgctcggcttcaaggattttcatcatgcagcccggctgcagtccccggccggcggtcacccaggcgtcagccttgtggtggggaagagcgagccgggtcgtggcctctcccttgccctcagcttcaagtag

SEQ ID NO: 37686 - DNA, 930 bp, Zea mays
  Peptide Sequence Number=SeqID_79465
atggcaataccgtcgggtggccagctgcagcacctaccagtgttcccacaaccacatcacttcccacttccaggggcgaatgcaaggggtgggcaaggtgggccatggccccacctcaatttttttaaccccttatatctaggtttagcagccgccgtcggctctcctcccacgcacagccgccacccagccctggaccagccgccgccccccgggaggctcatccttccctcccgggggcggcctccctcctcccagccgctgcagcagagcccctcgcgccgccgggcctcggccaagtcttcttccacctctaaccttcaagcggcggccgctcgtcgctccctgtccgcagccgccgagccgccggcgccgccgcgtccccaagcgggctcgggcgctgctcctctggtcgggggcggccctggcgcggggcgcgtccaggcggctgtgctcgggcagcaccggcgtggaggcacgggcgcaggcagccccgacgcgggcgcgctgtgccggctaggcgcggctgcggccacggcccgccggcgagctcctgcccccatggacgccggccacctctcctacgcgaccgccgccgccgcaccaaggggatccggagccgccgccgccggggagcgctccttcttccaccgtcggtcgccggagccgcccacaccctccttggctcggcgccccctgctacgcggcccctgccgcgaccctccctggcgcggcgcccccaagccgccgccgttggtctgctgccctctcctttccctcatgccggccaggccctcccctttcggccagcccctccccttccctggctgcacgcatgccgcctcactggccgtgggcgcggccctccccttccccggcctcccaagccgccgccatcggctccgcgcgcccctgtgtctgcgtcgctag

SEQ ID NO: 37687 - DNA, 695 bp, Zea mays
  Peptide Sequence Number=SeqID_79466
atggtgtccgtgcccgcggcagaaaagaaggggaatgtcggatccggccgggaaggccacggcagcgacggatccgaacgggaagatgcgatccagccaaagggacggcggatcgagccggaaaggtcgcagcaacgtggatccggccgggaaggccgcggcagcgacggatccaacgaaggtgatgaaggggtgggcggcggggcgggtccagccgggcaggggcctgcgccggacctggcaaggggtgttggcagcaccggcgacgggagaagttcgaagggtggtgctacttggtgctgctggtcgagacacaggggcgcgcggagccgatggcggcggcttgggaggccggggaaggggagggccgcgcccacggccagtgaggcggcatgcgtgcagccagggaaggggaggggctggccgaaaggggagggcctggccggcatgagggaaaggagagggcagcagaccaacggcggcggcttgggggcgccgcgccagggagggtcgcggcaggggccgcgtagcatggggcgccgagccaaggagggtgtgggcggctccggcgaccgacggtggaagaaggagcgctccccggcggcggcggctccggatccccttggtgcggcggcggcggtcgcgtatgagaggtggccggcgtccatggtgggcaggagctcgccggcgggccg

SEQ ID NO: 37688 - DNA, 315 bp, Zea mays
  Peptide Sequence Number=SeqID_79467
atggtgtccgtgcccgcggcagaaaagaaggggaatgtcggatccggccgggaaggccacggcagcgacggatccgaacgggaagatgcgatccagccaaagggacggcggatcgagccggaaaggtcgcagcaacgtggatccggccgggaaggccgcggcagcgacggatccaacgaaggtgatgaaggggtgggcggcggggcgggtccagccgggcaggggcctgcgccggacctggcaaggggtgttggcagcaccggcgacgggagaagttcgaagggtggtgctacttggtgctgctggtcgaggtga

SEQ ID NO: 37689 - DNA, 948 bp, Zea mays
  Peptide Sequence Number=SeqID_79468
atgaaaaaggagcattatgtaaagcgtctgccattagctttcgaggcagtacaattggtagagaacggtgagaactggagcgtgggccagcgccagctcgtgtgccttggcagggtgatcctgaaacggagcaaggttcttgttctggacgaagccactgcctcggtggacactgcaaccgacggcttgatccagagaacgctgaggcggcagttcaaggagaccaccgtcatcacgatagcgcacaggatcacgtcggttcttgacagccacatggtgctgctccttgacaacggcgtggccgtcgagcacgacaggccggacaagttgctggaggacaagtcgtctctgttctcaaagctcgtagcagaatacaccatgcgcacgaaccatcgagctacaatcggtaacaccgtcctactccaaaaagcacctcgagccctcgtggggcaacctcagactctgacctgcccccagttgaaagggaaatgtgccattgggacatttccaagtattttggtgattgagtgccaacacaagtgcttaagtgctaatctatgccaattgatggacaaagtgcaaatcaagaggaaagtgctagaaacagggaaagaccaatttggaaaagacttggctaagcagccaagactctgcgcagtctgggtgcaccggacagtgtccggacagtgtccggtgcgccaatggctctggatcttcaacggtcggctgcgccacagaaggaaagaaatctgcaccggacagtgtccggtgcgccaggcgacagaaggcaagaattgtcttcctggaatgctctcaacggctcctagctgccttggggctataaaagggacccctaggcgcatggaggagtacatcaagcattctctaagcattcctaagcaccaagactccaattccgcgcattcgattctttgtgatagcaactag

SEQ ID NO: 37690 - DNA, 5718 bp, Zea mays
  Peptide Sequence Number=SeqID_79469
atggcggcgcaaggggcaggaagggcggtttcctcttctctggctaagtctctcgggttgcgaaaacctaagagggaggcaggaagcggagcaaagaaccgtcaccagaccctctcccgggagaagcgggcgacgcttcgccttcgccataataaccgcgtcagtaaaggaaggaaccaggctccgagcctccctactgatcagaggttcgaaggctggccccctgaagggttcgacagccgcctcagatcgcgtgggccctacacccactactggctgtcccccgaaggggttcacagccgcctcagacgccgagcgagggatgaccatgggtacgttcgatacataaccaaggctcgggctgcgctcccgagctcaccggagacaccatgttcggcgcccatcgagggcaacatggcgctttccccctcctccttgcggaaaggcgacgcaggggcggctcggactcgggctcagccccagaagacgacgaactccgctccgcccgacccagggctcggactcgggctcagccccagaagacgacgaactccgctccgcccgacccagggctcggactcgggctcagccccagaagacgacgaactccgcttcgcccgaccccagggctcggactccgccccggcctctgccgacgacctccgcctcgcccgacccaggggctcggactcggcctcggccatggaagacagactcgacctcggcttcggaggagcctccacatcacccaacctagggtgcaggccagccacgtcaacaggaggcgccatcatcaccctaccccgagctgactcgggccgcagggaacaagacccgggccctcttagagagggttggccgcgcggggacgaggacgagacaggcgctcgcttggaagccgctcgctccctcatccgcgtggacgcttgtaaccgcctactgcaagcgcacccgacctgggcgcgggacgaacacgaaggccgcgggattcccacctctctcacgccggtctccgaccgcctcgctctccccccttcgcgctcgccctcgcgctcgacccatctgggctggggcacgcggcgacactcactcgtcggcctaagggacccccggtctcgaaacgccgacagtcgccctgggccaaggaaggaaccgggcacccgccactcctttgaccgccatggccgcgtcgccgtcacgacgactgacgccatgtgccaccgcctttgtcgcccctgtataaaagtccgcacatgtcagtcacgggcctctgccgctgcagcgatggcagcaacaccggcctgggactgggaggaatcgcttgtattcttcctgcagccgttcttcctccacggcgtgagcgccgcggcccaccttatcctggcgctcgccgtcgcgggacgcttgctctttcgccgcctctccgccagccggaccaaggacggggaggtgggcggaggagatgctagccgcggcgttggccggtttcggtactggtacggggtctctgtctgcaccacgtgggctatgggtgcgttcgaggtcctcctcgccgtctactcatggtacgcgaacggcggcgccgggtggtcgcgcgacgcggtcgttgaacaggtggacgcggccgcgcgcgcggtgtcgtggctgctgctcgccgcgtacctgcagttcgatttctggtggcgtcggcagcgccaggagcggttccccgtggcgctcaggctttggttggcgctcttcatgctgctctccgtagtcaccgtcggcgttcacgcggcgatgatcctcgacgggtcccttgtgcccggtcgatcgtgggcgctcgacgcagtctctgttactgcagcagcggttctactctcagtctcagctgggttcttcggaaggaaggagggagagggaggcggccatgcttccgaggcgcatgaacctctgctgaacggcgcgcacgaggggtccggtgacgacgacgagaacagcagcagcgccgccgacgcatccttgttcactggcgccggctttcttagcgtgctcaccttctcttggatgacgcccctgctcggcgtgggtcacaggaagaccctcgtcccggaggatgtcccgggcctcgaaccaggcgacagcgttgctggcgtcctcccgcccttcaaggccaaccttgaggcgctcaccggcgacggcggcaggtcgagccggaaggccgtcactgcgttcaagctcaccaaggccctgttgcgcaccctacggtggcacgtcgcggtgaccgcgttctacacgctggtctactgcgtcgccgtctacgtcgggccgtacctcatagactccctggtccagtacctgtacctcaacggcgacgagaggtacgcgagcaaggggcagctcctcgtactcgccttcgtcgtggccaaggtgctcgagtgcctgtcgcagcggcacttgttcttccggttgcagcaagcggggatacgagcgcggtcggcgctcgtcgcagtcctgtaccagaagagcctcgcgctttccagccagtcgaggcggagccacacgagcggagagatgatcaacatcgtcagcgtcgacgccgaccgcgtcggcatcttctcatggtacctgcacgaggtctggcaggtaccgctgcaagtagtcatggcgatgttcatcctgtactccaccctcggggtggcctcgctcgccgcgctcggtgccaccgtggccaccggcctcgccaccgtgcccctgggaagaatgcaggagcggttccaggagaagctgatggacagcaaggacgggaggatgaaggcgacgtcggagatcctgcacagcatgaggatcctgaagctgcaggggtgggagatgaggttcctgtccaagatcatcgagctgaggaagacagaggcgaactggctaaagagatacctctacacgtcggccaccatgaccttcatcttctggggcaccccaaccttcgtcgccgtggtgaccttcggagcctgcatgctcatggggatccccttggagacggggaagatgctgtcagcactggccacgttccgcgtgctggaggaacccatatacgaacttccgggcactatcgcgatggtgatcaagaccaaggtgtctcttgacaggatagcatcgttcctgtgcctcgacgagctacccagtgacgccgtgcagaggcttccacgtggaagctctgccgacttcgcagtcagcgtcggcaacgggtgcttctcatgggaagcctcgcctgatgctccaacactgaaggacctcaacttccaagctaggccaggcatgcgcgtcgcggtctgtgggacagttggctccggcaagtccagcctgctatcctgcattctcggcgagattccgaagttgtcgggagaggtccggacctgtgggacgacagcgtacgtcagccagtcggcgtggatacagagcggcaaaattcaggagaacatactgttcggtatggagatggacagagacaagtacgacagggtgctcgagtcgtgcgcgctcaagaaagacttggagaacctgccgtttggcgaccagacagtcatcggcgagcgaggcatcaacctcagtggaggccagaagcagaggatccagatagcacgcgctctgtatcaggacgccgacgtctatctgttcgacgatccgttcagcgcagtcgatgcgcatacaggatcccacattttcaaggtcatgaaagatgggaggatagcacaggcaggaagatacgacgaaatactgggttcaggcgaagagttcatggagctggtgggtgcccacgaggagtctctaacagcactggatgtggtcgatgccatgaacgagaacgaagccaacgtgtcatcctctcccagcagcaggatagagacgccgaacctgtccagatccctgtcgttagctgagaagaaacatggcgccaccaacgaggctgaaggggacgacgacgatgctcggagcgggcagctggtgcaggaggaagaaagggagaaaggcagggtggggttctgggtctactgggagtacctcacgcaagcctacaagggcgccctcgtgccgttggtgttgctggcgcagacgctctttcagatcatgcagattgccagtaactactggatggcttgggctactccggcgtcgaaggatgccgagcctccggtgagcgcgcccacgctgctcttcgtctacgtcgtgctggctctcggaagctcgctgtgcatcctcgcttcaactgatcaaagcgaggtggacaccaacatcgctgaccagatgggcaccgttgcattctccatcatccagctcgtcggaattactgcggtgatgtctcaggtcgcatggcaggtctttgtggttttcgtccctgtatttgctgcatgtgtctggtaccagcggtactacattgacacggcaagggagctgcaaaggctagtaggagtgtgcagagctccaatcatacagcacttcgcagagtcgatagcggggtcgagcaccatcagaagtttcggcaaggaagaccagttcgtgtcgactaacagccgtctaacagatgcctactcccggcccaagttctacaacgccggagcgagggagtggctttgctttcgcttggacgtgctgtcctctcttgcgttcgccttctccctgatctttctgatcaacctaccggccggtctcatcgatccaggcattgctggccttgcgatcacgtacgggcttactctgaacacgctgcaagcacaggttgtctggagcatgtgcactttggagaacaagatcatatcagtagagagaatcctacagtacatgggcgttcctgcagagcccccgcttgtcatgccagaaaacaagttggctcagagctggccatcgaatggagaaatccagcttcagaatctccatgtgaaatatgcgccgcagctgccgttcgttctgaagggccttacggtcgcttttccgggcggcgtgaagactggcattgtcggaagaacagggagcgggaaatcaaccctaatccagtccctcttccgcatcgtcgaccctgctgtcggccagatagtgatagacggcatcgacatccgcacggttgggctgcatgatctgaggtccaggctgagcatcattccacaggagccgacgatgttcgaaggaactgtcaggagcaaccttgaccctcttggggagtactccgacgatcagatctgggaggcttttggattgctgtcagctaggggacgaagtcaggaagcaggagctgaagctcgactcaccaggtctgaatctgatacactcggcgccatagatcttggcgccgagctcggtgccacgtcgacgccgcgtcagctcgtggacgacagcgcggcagtggtagagaacggtgagaactggagcgtgggccagcgccagctcgtgtgccttggcagggtgatcctgaaacggagcaaggttcttgttctggacgaagccactgcctcggtggacactgcaaccgacggcttgatccagagaacgctgaggcggcagttcaaggagaccaccgtcatcacgatagcgcacaggatcacgtcggttcttgacagccacatggtgctgctccttgacaacggcgtggccgtcgagcacgacaggccggacaagttgctggaggacaagtcgtctctgttctcaaagctcgtagcagaatacaccatgcggtcggtgcttacatag

SEQ ID NO: 37691 - DNA, 573 bp, Zea mays
  Peptide Sequence Number=SeqID_79470
atggcggcgcaaggggcaggaagggcggtttcctcttctctggctaagtctctcgggttgcgaaaacctaagagggaggcaggaagcggagcaaagaaccgtcaccagaccctctcccgggagaagcgggcgacgcttcgccttcgccataataaccgcgtcagtaaaggaaggaaccaggctccgagcctccctactgatcagaggttcgaaggctggccccctgaagggttcgacagccgcctcagatcgcgtgggccctacacccactactggtcagagctcaccggagacaccatgttcggcgcccatcgagggcaacatggcgctttccccctcctccttgcggaaaggcgacgcaggggcgtatgtaaaaaagccgagtctgtccctgatcgccctctcgccctgtgcagaggctcgggggctgctctcgcaaacccggctccggccgaaccgttgacagcgtcaacataccagcccgagaacttgggacccgaccgtacacccgagctacggccagctcgcatgagggaacaaccagaccagccgaagcattacacaaggcattaa

SEQ ID NO: 37692 - DNA, 579 bp, Zea mays
  Peptide Sequence Number=SeqID_79471
atgaggcggaaagacggcgggtatcccccatccgggggcttggaaggtggaaaaacacgatgcatgagggagcgcgaagacatggtctacttccaagggggtcaccctccttttaaaggcgactatccctacttgcgtccccagccgtcacgggctaagtcatctccaacacgctccaaggccctcccctgcggcgcgggggctgggtctcacacgtcatgcaaaccggctcagagcagaagaagccaaaccgccgcgcgcgggaccgggaaaggaggataccccgaaaaggatccttccccaggaaggaaccaggctccgagcctccctactgatcagaggttcgaaggctggccccccgaatggttcgacaaccgcctcagatcgcgtgggccctacacccactactgtcagggatcagtccattcgagcgactcgatcacgcctcgcccgagcctagcctcggacaagggcagccgaccccggaggattttcgtctcgcccgaggccccccccaacggcgaacatatttccggctcgcccgaggccctgccttcgctaagaagcaaccctgactaa

SEQ ID NO: 37693 - DNA, 960 bp, Zea mays
  Peptide Sequence Number=SeqID_79472
atgcaaccgagaaaggctggtccccttgcaaaaaagtgcgacgaaagcctccaagcgagtgctaacactcccttcgaggctcgggggctactgtcggggaccataattagggggatcagtccattcgagcgactcgatcacgcctcgcccgagcctagcctcggacaagggcagccgacccccggaggatttccgtctcgcccgaggcccccctccgacggcgaacatatctccggctcgcccgaggccctgccttcgctgtcaggcgctcttagagagggttggccgcgcggggacgaggacgagacaggcgctctcttggggccgctcgcttccctctcccgcgtggacgcttgtaaccccctactgcaagcgcacccgacctgggcgcgggacgaacacgaaggccgcgggattcccacctctctcacgccggtctccggccgcctcgcttctcccccttcgcgctcgccctcgcgctcgacccatctgggctggggcacgcgacgacactcactcgtcggcccaagggaccccctgtctcggaacgccgacaccgattgcattgacacttttagaaagaaagaaaacatacctgttatcgacggcgcacaaaatgctagaggtggggcagcaaaaacctggcacaatcagtctatgatgacccatgttggctgttttaaaaattctaaggtcctcgacaccgctgctgccgggagctccgcgccagttcacggcgtcgccgcactgttccgggcagcacacaatagtagagctagaacagtcaactctgtaagcttcactgacctttggagaacttggaacaaggattacacgggcaatcgggcatgcgactccctggaaatctctggccacagcgaggtgggtgaatcggctgcgtggtcaccagacaaagggaaaacaccacaggatacaggagctgaccaactaagtggttga

SEQ ID NO: 37694 - DNA, 429 bp, Zea mays
  Peptide Sequence Number=SeqID_79473
atgaagcttgactggactacgatctcgttgttcctgttcacctacaaccttgcgtggggctcggacgaggcggagactgtcgttatggggaggtgggacctcggccgagacaatgattctcccgagaacacaccctgtccgacgcctatgggtattgtaccaaagtggaagagcaatggctggagagtgtctttgattaggggaaaaggccgattcacccacctcgctgtggccagagatttccagggagtcgcatgcccgattgcccgtgtaatccttgttccaagttctccaaagtgcggcgacgccgtgaactggcgctgcagaccgcctctgcgtcgacccgttcacccgtgccgtcctcggtcggtttcacgcgcacaccgtagccttgttaggtcgttgaagctctccgcgccattggtttga

SEQ ID NO: 37695 - DNA, 180 bp, Zea mays
  Peptide Sequence Number=SeqID_79474
atgtacagttctaaggatccacaaaaatacagaatactgccacgaatgataacacaaggatatctgaacgtgtactatgtattgggtattccaaaatctctgatgagtgaagtgggttgcgaaccaatgaaccttgatgttggacgtgctgaccagtgcgcaggtgcctatgtggtgtga

SEQ ID NO: 37696 - DNA, 1284 bp, Zea mays
  Peptide Sequence Number=SeqID_79475
atggaagcagccccgccatgcccctcccaccacaaccacgcagcaccgtcccccgcggagccggagacgagcgaattggcggtggaggcgatgccactgggcgacggcgcggaggcggtagacttcgtgctgccggacaagctcctggcggcgctgccacgggacacctacgagcagctggatctggcacgctgcatcaccgcactggcggtgtccgggtgggagaccaacgccaggctccgctcccccatgctcacgatggcagaccttctccaagcgatggagactttcacccaggagcatgtcattggaattccattgacttcgtttgcatatgccgatgaggaaagacaaggaaaatcttcatgttctaccatggttcataaaaaaataaccatgggaccaaaaatttcagaaactataaaagggaaactaagcttcggtgcaaaggttctccaagctggcggtattgataaagtcttcagagaatactttgcagttgagaaagatgagaaactacggaaggctttccagtgctatctttcaaccacagctggtccaatagctggaatgcttttcatctcaactaagaagattgctttccatagtgataggcctttgagtttcacgtctcctaaaggaggcagtacaagggtgccttacaaggtgttaatccccacagagaggatgaaaagtgcttcagtgcgggaaaatttatacaatccagatgagaagtatattgatgtagtcactgttgatggctttgatttttggttcatgggctttgtcagctatgagaaatctcaatggtggcctaaagccctgaagagctttgcaagtaggatacaacatttcctgaagatccttggaactagagaggaaaactggaagaagccttttgacatgagagccagggaaaaaataagtggcagaggccgttcttatgatgggaggttgcactcaagatcacctgggttgaacgattctcctaggggtagatcacggtcccaaagccgaagctactcgccaacacttaagcaaaagcactattcaaggtccccggctcctcgacctcgggagagatctttgtcgcgttccccagctgtcaacagatcaaggagtgcaagccccattgttagcagcaccctcgtgtgtactctaggatatctgaacgtgtactatgtattgggtattccaaaatctctgatgagtgaagtgggttgtgaaccaatgaaccttgatgttggacgtgctgaccagtgcgcaggtgcctatgtggtgtga

SEQ ID NO: 37697 - DNA, 1863 bp, Zea mays
  Peptide Sequence Number=SeqID_79476
atgaccgaaggagtagacggtgggaagcagcacttgacatcttcgactattacctccaatgaggatgctgatgagactgtactttttaaagaagatgatgatgatgaagaaggatacctattcgctgggcaagatggtgaatccggtgaggatattgagattgatgaaacccaagatgcctttactgtcaaccctgacgtacctgacttgtacgacaaggtgtatagtaacatacctgaagaaacacatttgctgagcactgttgctgactgcgattactgcaaagcgaagaagtttcagtatgaaccacctggattttgttgtcgtaatggacagattaatttagccgcattcgagacaccgctccagcttaggaggttgtgggagtctgcagatgctgatgcgaggcactttcgtgataacattcgattttttaacggccatttctcgttcacttctctgtactgttgccttgacagtatgactacaaacatggattgtggtatctatacgtttcgtgcacatggcatgatgtaccacaacgtaaggtcgttcggtagggaagttggggcagaacataaacaccttgaactctacttctatgatgatgatcccagcctcgagcatagatatcgtaaatgtcgtcaacaacaatttgagaaagataaggcagttattaaacaattggttgaaatacttaagggaaatccatactctgagcaccttaggagtatggggcacgttgataacattgaagactaccacatcgccttgaaccttgaccaaacgctgaaccaaaagttatataattcacccattacttcggaggtagctgcaatttggattgaggggagtgaacgtcgaggtcaattcagtaatagtgttatgctacatgggaaggatagatcaagccacggcatccgttcatatcatggatgctatgatgcactatcatatccattgttcttccctaaaggtgaacttggatggcatgccaatattcctaagtccaatgtttccatggacgaagtagacgcgtaccgcgatcaacataggagaagtgatgcaaacaatgatgatacagaacgacctagccatctatgcgtgtctgtacgtgactattactgctacagattccaaattcgtccaagtatattcaatccaatacttcatgggaagcggcttttccaacagttcgcggttgacacctacatcaagattatgagctctcgtttggatttcatacgtaaaaaccaagacagattaagggcggatctatacaagggtttggtagatagcttgcatgaaggcgagaacagagcagacaaaattggaaagcgaaccgtgctgtctacatcatttatcggtggtcctcgtgacatgagacgtcggtatatggatgctatggcccttgtgcggaagtttgggaagccagacatattcctcactatgacgtgcaaccccaattgggatgaaataaccagagagcttctccctatgcagtcaccacaggatcgtccggaccttgttgttcgcatattccgtgcaaaactagaggaactgaagaagcgattgactaagcatcatattcttggaaaaatccgagcttatgtctatgtcgtggagttccagaagcgaggtttgcctcatgtccatttcctactcatcatgcagagaaagtacaagctaacttgtcctgatcagtatgatcaccttatctccgctgagatccctgacaagaagaagtaccctgaactatacaagatggttatcaagcatatgatgcatggaccgtgcgggttgctaaaacctaaatgcccatgcactaagggtcgtgcttcatgcctttttcctttatcctaa

SEQ ID NO: 37698 - DNA, 4728 bp, Zea mays
  Peptide Sequence Number=SeqID_79477
atgagtgatgaaacaaaaaatgaattgaagaaacgtcgtgcgtcacgcaacaaagaaaatgttgtacaccatgagtattcaaaagtgttagatcccaaggaacgtaagagaatccgagaaagagctcgatgtgcaactcaaactaaggaacaaaggacgttgcgtaatatgaaaccatgtcaaaagagagcaaggggaaactatagaataagacaacaagttatgctaagtcaggactcaatcgccattgagaaccctacttttaccccggagcttgtgtggagttcaacagatgctcaagcacctactgggtctctatttagctccgagctcatggctattcctgaattgatcccaactccatttgttcctactccatcggtgactgaggatgttgagacaaagatactgacaaagtctcctagacgacaaagacatccgtgtacagtccctgccacaaatagtgacaaaatgaccgaaggagtagacgttgggaagcagcacttgacatcttcgactattaccaccaatgaggatgctgatgagactgtactttttaaagaagatgatgatgatgaagaaggatacctattcgctgggcaagatggtgaatccggtgaggatattgagattgatgaaacccaagatgcctttactgtcaaccctgacgtacctgacttgtacgacaaggtgtatagtaacatacctgaagaaacacatttgctgagcactgttgctgactgcgattactgcaaagcgaagaagtttcagtatgaaccacctggattttgttgtcgtaatggacagattaatttagccgcattcgagacaccgctccagcttaggaggttgtgggagtctgcagatgctgatgcgaggcactttcgtgataacattcgattttttaacggccatttctcgttcacttctctgtactgttgccttgacagtatgactacaaacatggattgtggtatctatacgtttcgtgcacatggcatgatgtaccacaacgtaaggtcgttcggtagggaagttggggcagaacataaacaccttgaactctacttctatgatgatgatcccagcctcgagcatagatatcgtaaatgtcgtcaacaacaatttgagaaagataaggcagttattaaacaattggttgaaatacttaagggaaatccatactctgagcaccttaggagtatggggcacgttgataacattgaagactaccacatcgccttgaaccttgaccaaacgctgaaccaaaagttatataattcacccattacttcggaggtagctgcaatttggattgaggggagtgaacgtcgaggtcaattcagtaatagtgttatgctacatgggaaggatagatcaagccacggcatccgttcatatcatggatgctatgatgcactatcatatccattgttcttccctaaaggtgaacttggatggcatgccaatattcctaagtccaatgtttccatggacgaagtagacgcgtaccgcgatcaacataggagaagtgatgcaaacaatgatgatacagaacgacctagccatctatgcgtgtctgtacgtgactattactgctacagattccaaattcgtccaagtatattcaatccaatacttcatgggaagcggcttttccaacagttcgcggttgacacctacatcaagattatgagctctcgtttggatttcatacgtaaaaaccaagacagattaagggcggatctatacaagggtttggtagatagcttgcatgaaggcgagaacagagcagacaaaattggaaagcgaaccgtgctgtctacatcatttatcggtggtcctcgtgacatgagacgtcggtatatggatgctatggcccttgtgcggaagtttgggaagccagacatattcctcactatgacgtgcaaccccaattgggatgaaataaccagagagcttctccctatgcagtcaccacaggatcgtccggaccttgttgttcgcatattccgtgcaaaactagaggaactgaagaagcgattgactaagcatcatattcttggaaaaatccgagcttatgtctatgtcgtggagttccagaagcgaggtttgcctcatgtccatttcctactcatcatgcagagaaagtacaagctaacttgtcctgatcagtatgatcaccttatctccgctgagatccctgacaagaagaagtaccctgaactatacaagatggttatcaagcatatgatgcatggaccgtgcgggttgctaaatcctaaatgcccatgcactaagggtcgtgcttcatgcaaaaaccattatcctagagcttttagcaatgcaacgtctcaaggaaaggattcatatcctatttataggcgtcgtgatgatgggcgtaaggaaacggttcgaggttgtgaattggacaacagatgggtcgtcccttacaacccttacctcctccagctcttcaactgtcacatcaatgttgaggcgtgcgggagcatcaaggctgtcaaatacttgttcaaatacatatacaaaggccacgatcgtgcgtctgtggctgtgacagacgcaaacaaggctgatggtgacgttgatgagatcaagcagtatagagatgctaggtgggtgacccctccagaagccctttggaggatattcagctttgatctaagtcaaaactctccaccagtgatgcaactgcagctccatcttgaaaacatgcatatggtgtcatttcacgagcgtgctaaagtaaatcatgttgtccaacgtccaggtgccgataggtcaatgcttacggcatattttgaggcaaataggctacacgaagaggctcggggcatcctttaccgtgattttcctgagtggtacactttgcagcagggcaaggtgtggcaaaggaggaaacgaaacacgggtggacaggttggtagaatagtctctgctcatccagctgagagggagcgcttttatcttcgacttctcttaaaccatgtgacgggtgctacctcctatgcggatctaaggacagtagatggtgacacactaccaacttttcgtgaggcagcacaaaggaggggactgtttgaagcagacgacacaatagatgagtgtctcaacgaagccgctatttaccaaatgccgtcagcactacgaaggttgtttgcaacaatactggtatactgcgagccgaacgatgtggcagaattatggcagagacaccttgactcaatgtcagaggactatcaccgtagtactcaaagcaaaatccatgtgcagcagatggtcttgattgacattagaaacattttgcagtcaatgggtaaagacataaagacattccctctccctgctatcattgatagatatgacgatttacatggtactgatagagagatttatgaggaggaaacactacgcagtcaggacaagattgcagttgcaacagctacatctggtgttgcggcttctatattgcctggggggaggactgcccattcgcgcttcaagataccacttactattgatgatggtgctgtatgtagcttcacgaaacaaagcgggacatcaaagttgctacaaaaagcatcgctcattatctgggacgaggcatcaatgactaagagacaagcaattgaggcgctagacaatagcatgcgtgatataatgggacagtctaggttgccctttggtgggaagactgttgtgttcgggggtgatttcagacaagtacttcctgttgtacgcaaggggtcaagggctcagatagttgctgcctctctacggagttcttacctctgggaatccatgtgccacctaaagctgtttcaaaacatgagggcacagagcgacccatggtttgcagaatatttgttgcgcgtcggtggtggaactgaggaagcgaacaacgatggtgatgttcgtcttccagatgaggtatgtgtgccatatactggtaatgaccgcgaccttgatagactgatagatgacatttaccccaatctaaatgaaaacatgtctaacacaagctacatcacttcaagagcaatattgtctacacggaatgactgggtggatatgataaatatgaggatgattgatcgtttccaaggggagcagatgatgtaccatagttttgacaccgcggtggatgatcctaataactattacccatcagagtttctaaacacgctgactcctaatggactacccccgcatgttctgaagctcaaagttggatgcccaatcatgttgcttaggaatatagaccctgctaatggactttgcaatggcacgaggttggtggttcgtggtttccaaaaaaacagtattgatgctgaaattgtccttggtcaacatgctggaatgcgaattttcttgcctcgtatacccctgtgcccctctgatgatgagatgttccctttccagtttaaaaggaagcagtttccgataagactaagttttgccatgacagttaacaaggcccagggccagacgattcctaatgttggtgtgtacttgccggaaccagtgttctctcatggtcaactttatgttgctctatcaagggccaccgctcgatcgaaagtgaagatacttgccattccagtccacgatgagaaaaagaagaagaagggggttgaaaggaactcagcgataaatggcgcaacatacacaaagaatatcgtttataaggaggtccttacgccgtaa

SEQ ID NO: 37699 - DNA, 236 bp, Zea mays
  Peptide Sequence Number=SeqID_79478
atgtccgctctctccgccctcccatccggactccctcgcgaaaccttgatctgggccgctataaatggtgaccgtgacctccccttctacttcaccttcaccgcgcatggcacccatccaaatccaccacgaggaagcagagggatcaagctaggccaatggctcgacggagcaattggcaccgctgtggaatcgctccgcgccgtggccgagggccaccccaacttcaaccactg

SEQ ID NO: 37700 - DNA, 273 bp, Zea mays
  Peptide Sequence Number=SeqID_79479
atggctcgacggagcaattggcgccgctgtggatcgctccgcgccggggccgagggccaccccaacttcaaccactgcctttggcgcctgatcgagtggatggggtttgagatcgtctggaaccgtggatgccgcatccaagggttgtgggtaattcctgttcactttaggggggatctaatcccgtcgattgatgggcgatcggacggctctgggtccccggtacctcttcgccgttgccgagttgctaaagagcctctggaacctttataa

SEQ ID NO: 37701 - DNA, 444 bp, Zea mays
  Peptide Sequence Number=SeqID_79480
atggggcgccatggtccgccgtggactgattttcgtccacgcccgtgccagggcttcgattgtgaccaggtagcttcgcagtgtcgtggggaagcgattcctaccactgaatcgtcgtgtgggtggccggagctaggccaatggctcgacggagcaattggcgccgctgtggatcgctccgcgccgtggccgagggccaacccaacttcaaccactggtaagccacctcgattcagatcactcggatttcctccttgcgttgcaccgacctcgagagcgaatagggtagtggatagcggtggcacagccgccgtcaacctgagcgccgccgcggttgggcaaggcaccgcccagctcgggctgagaaagaagataagcgccttgccgttggatcgatcgccagcggctaggattagaaccccgaatcccctttcgcgtgagtaa

SEQ ID NO: 37702 - DNA, 1224 bp, Zea mays
  Peptide Sequence Number=SeqID_79481
atgaccgccatcgcagcaaaatcatcccaaggacctccctacactgatcactcccctactgcccttgcccctttcaggtgccaacttggtctttggatgacacgtgtcctcactgctaaacgtagcaatacagacaaacatggcgccaaaggcttggattcaatgcgcgaaggggtaaatgctacttttaatcccagccgtccattcgcggaatcaacgccccaaggtgcttcttctacctcaaaggatgccgtcgggtggtacccacagctccgccgcggcagacccgacgaccagctctcgccaccgctatccactaccctattcgctcccgaggtcggtgcaacgcaaggagggaatccgagtgatctgaatcgaggtggcttaccagtggttgaagttggggtggccctcggccccggcgcggagcgatccacagcggcgccaattgctccgtcgagccattggcctagctccggccacccactcgatgattcagtgccgcccaagacggaggtcgttgtcgcgctgctggtgcagtggccgccggcgagccacctggagtttgttatcccgcaggccttctggtcgggacaaccgccgagggcgttgccgacgtctaagtctaggtaccattgttaccccaaaatcatttatccgagcgtgagctacctttcgtggaaggtgacgagtgagcgcagagggggcttcctcctttctagacctgaggcgaccgcttgggccgggaccctcgcgaagggtctggctgtggtcgtcgggtctgcccggtctgcccgagccatggcctcacagcagcgtgaccgggccgaagggtttgagacggctcttgacgaggtcgtaaagaactgcaaggcgcttgccgaggcggctgagcagaaggaggccgaccgtgtggccatgtccgaggctatctcggccttttgccaggccttcggcctcgacggcgtctcctcgggtagctcccccagagtcatctgcgggccttgggcggccataggcttgatgcggctgtcgagggcccgagtgcggctggcttcctcctttgaggtggagatccttccgcctgtgtcgcctccgaggccgggccagattctgccgagggtggaaatgacgccgagcgtgctgctcctccccctgctgatgtttgagcctgcaagaacagtttctaagtatgcgtatgtttttgcggtcgctgaggcctaa

SEQ ID NO: 37703 - DNA, 1082 bp, Zea mays
  Peptide Sequence Number=SeqID_79482
gcgccaaaggcttggattcaatgcgcgaaggggtaaatgctacttttaatcccagccgtccattcgcggaatcaacgccccaaggtgcttcttctacctcaaaggatgccgtcgggtggtacccacagctccgccgcggcagacccgacgaccagctctcgccaccgctatccactaccctattcgctcccgaggtcggtgcaacgcaaggagggaatccgagtgatctgaatcgaggtggcttaccagtggttgaagttggggtggccctcggccccggcgcggagcgatccacagcggcgccaattgctccgtcgagccattggcctagctccggccacccactcgatgattcagtgccgcccaagacggaggtcgttgtcgcgctgctggtgcagtggccgccggcgagccacctggagtttgttatcccgcaggccttctggtcgggacaaccgccgagggcgttgccgacgtctaagtctaggtaccattgttaccccaaaatcatttatccgagcgtgagctacctttcgtggaaggtgacgagtgagcgcagagggggcttcctcctttctagacctgaggcgaccgcttgggccgggaccctcgcgaagggtctggctgtggtcgtcgggtctgcccggtctgcccgagccatggcctcacagcagcgtgaccgggccgaagggtttgagacggctcttgacgaggtcgtaaagaactgcaaggcgcttgccgaggcggctgagcagaaggaggccgaccgtgtggccatgtccgaggctatctcggccttttgccaggccttcggcctcgacggcgtctcctcgggtagctcccccagagtcatctgcgggccttgggcggccataggcttgatgcggctgtcgagggcccgagtgcggctggcttcctcctttgaggtggagatccttccgcctgtgtcgcctccgaggccgggccagattctgccgagggtggaaatgacgccgagcgtgctgctcctccccctgctgatgtttgagcctgcaagaacagtttctaagtatgcgtatgtttttgcggtcgctgaggcctaa

SEQ ID NO: 37704 - DNA, 912 bp, Zea mays
  Peptide Sequence Number=SeqID_79483
atgactgtgagactgtttgaaattgtgaatctgtttgaaattatggttccattatgtgtgggtcctactgaggatgttgagcgcaaatttcagcatatggcaagttcagtgcataaggtagggatggtgcttgattcagtgcaaaccgacgttatgcagctaaacagagccatgaaggaagccacactagattctggaagcatacagcaaaagattgttctcctagacgctttgctgcagaaaaatcttaagggacaagatgatctcaaagctcttgttgagagcaacaccaaaagcatctccgatcagctgactgttctgaactcctactccaacaaactggatgagatatcctcaaccctttcaatcttgccaaaacaaatagaaacaaatttgaagcaacagcagagtgacaccttccgaatttttagaaaagacatggaggagattgttagagctgttagatctctcaacaataagattgatgcaatccaaatgccaacagaccagagctgcacaaccaatggaaggcccctgatgaaccaactgccagtcgatagaaatgaaaggccccaggtgaaccaaacaccagaggtaacccgggtgagccaaacaccggtagcaaccatggcgaaccaaagaccagtagcaaaaggaaggcacctggtgagccaaacaccagcagcaaatgggaaacctctgacgaaccaaacatcagtagcaaatggaagatccctgatgagccaagtaccagcagcaaatgggaaacctctgacgaaccaaatagcagtgccaaagggaagacccatgatgaggcagaaaacagcagaaggaggaaggccccagatgaaccaaatacctgtagcagatggatggccccatacaaacaaaatacacgcgccggaagtgtaa

SEQ ID NO: 37705 - DNA, 1038 bp, Zea mays
  Peptide Sequence Number=SeqID_79484
atgactgtgagactgtttgaaattgtgaatctgtttgaaattatggttccattatgtgtgggtcctactgaggatgttgagcgcaaatttcagcatatggcaagttcagtgcataaggtagggatggtgcttgattcagtgcaaaccgacgttatgcagctaaacagagccatgaaggaagccacactagattctggaagcatacagcaaaagattgttctcctagacgctttgctgcagaaaaatcttaagggacaagatgatctcaaagctcttgttgagagcaacaccaaaagcatctccgatcagctgactgttctgaactcctactccaacaaactggatgagatatcctcaaccctttcaatcttgccaaaacaaatagaaacaaatttgaagcaacagcagagtgacaccttccgaatttttagaaaagacatggaggagattgttagagctgttagatctctcaacaataagattgatgcaatccaaatgccaacagaccagagctgcacaaccaatggaaggcccctgatgaaccaactgccagtcgatagaaatgaaaggccccaggtgaaccaaacaccagaggctgcttcgtttctcattacgtctggcttgcctactgatgacaggcggcatcccgtacctttggtgtgccctgcagcaggcccgaggccgaaggtagaggagggaaagctgagagcggttccccaaaagctaactggttgtagatccagggtgacacctaaacaggaagaggcggcgacgaatacaaaggtcgtcgtcggccgggcagcggcaactgagaaggtggtgatattcatcgacgacgactccgacgatggcggcagcgaggcccttgcttcctgcgtgatcctgaggccggcgcccctggggtcaggtgcaggtgagtgcgacctggtgaaggtgggcgcggaggagagccaggagatcctgaggagggccaggaagcggaggagaagagaaatgcaggccattgtggcctgcatgccgcctgagcttgggtactag

SEQ ID NO: 37706 - DNA, 648 bp, Zea mays
  Peptide Sequence Number=SeqID_79485
atgagccccaagccttttttacaagaggaaaagatgattcccgtcccccggacgctaaatgaagacctacccgtggatactcctcaacaggacaatggagcgacgagtactaccgtcatcgggtgccgggaagcggcaactgaaaaggtggtgatattcatcgacgacgactccgacgatggcggcaacgaggcccttgcttcctgcgtgatcctgaggccggcgcccctggggtcaggtgcaggtgagtgcgacctggtgaaggtgggcgcggaggagagccaggagatcctgaggagggccaggaagcggaggagaagagaaatgcaggccattgtggcctgcatgccgcctgagcttggaaatcgcaagaaaatggggaagagaagccagaagcgccttattcgacgccaccaggacggcagcataggctgcatggcaggcctcatccgcatgttctattcccgccatgacgccaataagctcctgttggacaggaagcagccagggagtagaaggcacagtttcagtgccttttctggacgaaggggccactcaagaaagaattccaaggacttggacgaaatagatgaatacggcgattatgcatgcgtgtacttcaatatctcccacagataccggttctag

SEQ ID NO: 37707 - DNA, 369 bp, Zea mays
  Peptide Sequence Number=SeqID_79486
atggcgatgtgcgggtcactgtcgggaatggtcggagtcggctggtccacgtgcgcaggcggagatgctcgtcggcggctaggaatccggcctactcacgacgcgattgtccaattgaaccggtcagagagcttcgccagaggtcaagaaggacagtgtggcgggcaactgaaatccggcgagggtgaatccgcctctccggtgaggcaatgcctcggctcaagcttggagaagcttcacgacttcacggggaagtggtccaggggctggggcgaggatgggggtcaacagaaggggctggccacaatggccgtgctcatgcagagatggcgggcggtggtgctcgctttccacggcgaactccggtga

SEQ ID NO: 37708 - DNA, 1026 bp, Zea mays
  Peptide Sequence Number=SeqID_79487
atgcctcgactcaagcttggagaagcttcacggggaagtggtccaggggctggggcgaggctgagggtcaacagaaggggctggccacaatggccgtgctcgggcagagatggcgggcggtggtgctcgctttccacggcgaactctggtgatcactggctcgggcggggctctaggtgcagctttgtcgtttatgtggtggaagtcgagcggtttggggctgtgtacagagagttgtcatgtcgctacggtgacagtgtcacaatgtcgagtcccaagatggcctgtatcaggtgcactgcacgtaagtctgtgatcccctttttgccttcccgcctagcagagcgtcccctgcgtcacacggtgccaggtcagtccagtcacctagagagactgcattgtcgcctgcacgaggagcaggagtgccgacgccaggagcaggagcaacaggactcttccccctcgcctcggcgggaggtggagtctgagaggccgccttcccctgcacctcagctagagatgccccctgcaccacctcagggcatcccggctgctggaggagaccctgatggagacggagacaacgacgacgccggtggcagttcgagccacgacacggagctttcggaggagccagagccggagggatggatcgctagacccatcactcgtgacgccgctcgcggcggggtagctgatggccttgacctgaagtactacccacgccgtttgaccggcagtgctggaggtgtgattgcctcgccagttggtgagggcaatcccaggctgaacaacatggtcaacttggctgccgtgctcaacacagagttggaccatgcccttgacgagttgggcaaggttcgggcagaggttgtggaattgcgtgctgagtgcgcagcacgccactatttggatggtggttctcccgcccctgtcgagattcagcacccttaccattcaccgccccgtggtcgcttcgactatggtaccccagactgtaggacccggatagatttggatccctag

SEQ ID NO: 37709 - DNA, 972 bp, Zea mays
  Peptide Sequence Number=SeqID_79488
atgcctcgactcaagcttggagaagcttcacggggaagtggtccaggggctggggcgaggctgagggtcaacagaaggggctggccacaatggccgtgctcgggcagagatggcgggcggtggtgctcgctttccacggcgaactctggtgatcactggctcgggcggggctctagagagttgtcatgtcgctacggtgacagtgtcacaatgtcgagtcccaagatggcctgtatcaggtgcactgcacgtaagtctgtgatcccctttttgccttcccgcctagcagagcgtcccctgcgtcacacggtgccaggtcagtccagtcacctagagagactgcattgtcgcctgcacgaggagcaggagtgccgacgccaggagcaggagcaacaggactcttccccctcgcctcggcgggaggtggagtctgagaggccgccttcccctgcacctcagctagagatgccccctgcaccacctcagggcatcccggctgctggaggagaccctgatggagacggagacaacgacgacgccggtggcagttcgagccacgacacggagctttcggaggagccagagccggagggatggatcgctagacccatcactcgtgacgccgctcgcggcggggtagctgatggccttgacctgaagtactacccacgccgtttgaccggcagtgctggaggtgtgattgcctcgccagttggtgagggcaatcccaggctgaacaacatggtcaacttggctgccgtgctcaacacagagttggaccatgcccttgacgagttgggcaaggttcgggcagaggttgtggaattgcgtgctgagtgcgcagcacgccactatttggatggtggttctcccgcccctgtcgagattcagcacccttaccattcaccgccccgtggtcgcttcgactatggtaccccagactgtaggacccggatagatttggatccctag

SEQ ID NO: 37710 - DNA, 369 bp, Zea mays
  Peptide Sequence Number=SeqID_79489
atggcagcgcccaatacaaattctttttgtgattcaaactttagagtcgtcgcctgggagttcattgccagtggaagtgtagatggtttatatgggagaaaagaacaggaaggcttattaaaatgcttgcaggggatcgagcagtctcatcccctcgactgtgcagttgcaacaagcggaattgataacacaataaaggcaactgaagagtatggagatgttgatgtcttcgttgccaacttgaggcccctcaaggccactctgtctggactacctgatcgtgtattgatgaagattcttgtgtgcgctacgtcaaacaaagttgtaggagtgcacatgtgtggtgatgatgcacctgagataattcag

SEQ ID NO: 37711 - DNA, 1599 bp, Zea mays
  Peptide Sequence Number=SeqID_79490
atgggggcggtgaacgacggggtcggtgaaggagacgttgtcatcatgaattccggtgccgtcgttgatgagtgggcgtacgatggaattggtgatggtgatggtggcatggagttgaggttgaagttggcaatcctaacgcagtgtggagtgcaagtgaggatgcttgatctacggtgtggagcaaagaagtctttagctgatctacccaaacatccattggcactgaagtcttgtgacattagctctgtctgttcccatcaaatccttgttggtgggagcgatgcatttgctaggttgtacgatagaagaatgcttccaccattgagctcgtgtcaaaccaaaaggaagccaccaccatgtgttaaaatgttctgcccattgcatcttgctgacagtaagaagacatattcacaccttacacatgttgcattcagcccaaatgggaaggaggttcttttaagttacagtggtgaacatgtttatctgttcgatgttgacccagatggtatgagttctagatacacagcagactatgtagatatgtgcaagaaatttatgcaagtcgcaacaagatctctggagacagggatcatagaatttgatctacagaggaaatggaaaaatgatgtttacatggcgattcgagattgcaatagaacgtggaagattgatgtcacatcgtatcaagcacacttgcatatggctgaggcactattgcagttaggaagactgaaggaggcatctgagcatgcagaggtggcaaatggtcttcttccacctcattgtccattgagggagcaggtggatgatttcaagcaacgcatcgcttcagctgagcttgagaagaacagagcggataaaaatgggagctcaaaagctgatactcatggaaaattacgctcattgagtgagatactctttagacctgatgttggtggttcatcacaggagggacgagaagattcagattatgatgatgatacggaaatggactatgaaacaacggtatctggtcatgaaagccgagagaatgatcaaggtgtcttccggggtagtttaagtttccaatttcatcaaagagaggatcaaaccaatgtacacactgatgagaatgggtcagttgagtcccctcgaaaagatgattatgcttttcagtcagatgttgccattgatatgaaacaaagatatgttgcacactgcaatgtagggacagatataaaacaagccagttttcttggtgagcaaggggagttcattgccagtggaagtgatgatggtagatggttcatatgggagaagagaacaggaaggcttattaaaatgcttgcaggggacggagctgttgtgaactgcatacagtctcatcccttcgactgtgccgttgcaacaagcggaatcgataacacaataaagctatggacacccgatgcaaatgctacatcaatggtttctggacctgaacttgatgtattgagtgccatagagaataatcagcagaagttatgtcggaaccgtcactttgtactgccttctgaatttttagaacgatttcagatgcatgagttttcagaaggtttcgagtgtgcccagagctga

SEQ ID NO: 37712 - DNA, 1563 bp, Zea mays
  Peptide Sequence Number=SeqID_79491
atgaaggcttcaatggttgccacagagcacgtgagagtggcgaagttgttggtgatgatggttgaagttggcaatcctaacgcagtgtggagtgcaagtgaggatggtactctgagacaacatgattttcgggagtgtagttcctgtcctcgtgcaggatctgctaaccaggaatgccgtaatgtgcttcttgatctacggtgtggagcaaagaagtctttagctgatctacccaaacatccattggcactgaagtcttgtgacattagctctgtctgttcccatcaaatccttgttggtgggagcgatgcatttgctaggttgtacgatagaagaatgcttccaccattgagctcgtgtcaaaccaaaaggaagccaccaccatgtgttaaaatgttctgcccattgcatcttgctgacagtaagaagacatattcacaccttacacatgttgcattcagcccaaatgggaaggaggttcttttaagttacagtggtgaacatgtttatctgttcgatgttgacccagatggtatgagttctagatacacagcagactatgtagatatgtgcaagaaatttatgcaagtcgcaacaagatctctggagacagggatcatagaatttgatctacagaggaaatggaaaaatgatgtttacatggcgattcgagattgcaatagaacgtggaagattgatgtcacatcgtatcaagcacacttgcatatggctgaggcactattgcagttaggaagactgaaggaggcatctgagcatgcagaggtggcaaatggtcttcttccacctcattgtccattgagggagcaggtggatgatttcaagcaacgcatcgcttcagctgagcttgagaagaacagagcggataaaaatgggagctcaaaagctgatactcatggaaaattacgctcattgagtgagatactctttagacctgatgttggtggttcatcacaggagggacgagaagattcagattatgatgatgatacggaaatggactatgaaacaacggtatctggtcatgaaagccgagagaatgatcaaggtgtcttccggggtagtttaagtttccaatttcatcaaagagaggatcaaaccaatgtacacactgatgagaatgggtcagttgagtcccctcgaaaagatgattatgcttttcagtcagatgttgccattgatatgaaacaaagatatgttgcacactgcaatgtagggacagatataaaacaagccagttttcttggtgagcaaggggagttcattgccagtggaagtgatgatggtagatggttcatatgggagaagagaacaggaaggcttattaaaatgcttgcaggggacggagctgttgtgaactgcatacagtctcatcccttcgactgtgccgttgcaacaagcggaatcgataacacaataaagctatggacacccgatgcaaatgctacatcaatggtttctggacctgaacttgatgtattgagtgccatagagaataatcagcagaagttatgtcggaacccgtcactttgtactgccttctga

SEQ ID NO: 37713 - DNA, 1182 bp, Zea mays
  Peptide Sequence Number=SeqID_79492
atgtcttcttcctcccttaagcgtcgggtcttcccgtcttccaagcctccggatggggggaacgcaactccatgggagctggtacctctcagccatcgttcggcttcaaggattttcatcacgcagcccggtcgcaccccttcaccggcggtcacccgagatggcgacctccagcttgatggtgggggaaagcgagccgggctgcggcctctgccccttcctcagcctcaaggattttcatcaccaaggccggggaggggagagtgccgagttggggtcggcccctgcgtgggcggtggcccgctcctttactcagtgatggggggagaagcgggcattgcccgtggcgtccggcagctgcagcgtgcctggtcttcagccgcgagtggcttcggggtcacctgcggcgtcggcgtctgccacggcagccggaagaggttcttccgccggcgcggcggctgggaccggccacgggctgacctccaacttctacggccttctgcccgtccttgcctcacgagttttggcacgggcgggggcctcctggcagcggcatccaccctgaggtcagcgttgccgctgttcggccccccggagcagaagtcgccgtcgtcgccactgctggacactaggtctcgcctgtttgattatctgaaccgctttaccaagcatgagttgccccgtgtcaaggtgacgggtgaggccgggggtagcgatatcagtatgaacagaggcggagttggctcgagaatgggaacctggggtaaccggttgagccgcctgctcgggccggattcccggaggagcccctggaccgcggcgccgcccgaggctgggtcgggctttgctgaagacgtcgtcgatgccgagggtgctacagctcccttcagcgtgaagacccgagcctgcaggatccgatcatcttgtagcgtgtgcttcctgtggccgccgaggccagaagaaaacaccctcgctgcacttgcgaagctgcgccttttttcctcctgtttcgagcatctggacttcgtcggtaacagggatgtttgtgtgagcaagagctgcttttcgcggaagggacgagtgaggtatccgtatcccagaggcgtgggaatccctcggctcggtcggccttgccgcttacgcgtactttcacccgtccatgaggccctgtccccgacttag

SEQ ID NO: 37714 - DNA, 1326 bp, Zea mays
  Peptide Sequence Number=SeqID_79493
atggggggctcggagcccggttccttcgcggagaaggatccctttcgggcaactggcgtgccggttgctcgacgcgtgggcctgggttccaggctggcgtgtcaggagtcggagaagcgcgtccatctggcgcggttgcatgccgcctgcatggctgcccgccccttctgcctgttggtctgggcgaaaatggggggtcgcctgaacgcaactccatgggagctggtacctctcagccatcgttcggcttcaaggattttcatcacgcagcccggtcgcaccccttcaccggcggtcacccgagatggcgacctccagcttgatggtgggggaaagcgagccgggctgcggcctctgccccttcctcagcctcaaggattttcatcaccaaggccggggaggggagagtgccgagttggggtcggcccctgcgtgggcggtggcccgctccttcactcagtgatggggggagaagcgggcattgcccgtggcgtccggcagctgcagcgtgcctggtcttcagccgcgagtggcttcggggccacttgcggcgtcggcgtctgccacggcagccggaagaggttcttccgccggcgcggcggccgggaccggccacgggctgacctccaacttctacggccttctgcccgtccttgcctcacgagttttggcacgggcgggggcctcctggcagcggcatccaccctgaggtcagcgttgccgctgttcggccccccggagcagaagtcgccgtcgtcgccactgctggacactaggtctcgcctgtttgattatctgaaccgctttaccaagcatgagttgccccgtgtcaaggtgacgggtgaggccgggggtagcgatatcagtatgaacagaggcggagttggctcgagaatgggaacctggggtaaccggttgagccgcctgctcgggccggattcccggaggagcccctggaccgcggcgccgcccgaggctgggtcgggctttgctgaagacgtcgtcgatgccgagggtgctacagctcccttcggcgtgaagacccgagcctgcaggatccgatcatcttgtagcgtgtgcttcctgcggccgccgaggccagaagaaaacaccctcgctgcacttgcgaagctgcgccttttttcctcctgtttcgagcatctggacttcgtcggtaacagggatgtttgtgtgagcaagagctgcttttcgcggaagggacgagtgaggtatccgtatcccagaggcgtgggaatccctcggctcggtcggccttgccgcttacgcgtactttcacccgtccatgaggccctgtccccgacttag

SEQ ID NO: 37715 - DNA, 1370 bp, Zea mays
  Peptide Sequence Number=SeqID_79494
caactggcgtgccggttgctcgacgcgtgggcctgggttccaggctggcgtgtcggaagtcggagaagcgcgtccatctggcgcggttgcatgccgcctgcatggctgcccgccccttccgcccgttggtctgggcgaaaatggggggtcgcctcttgcatgacgtgcgggacccagcccccgagtcgcaggggagggccttggagcgtgttggagaagactcggcccgcggcgcttgggggcgcacgaacgcaactccatgggagctggtacctctcagccatcgttcggcttcaaggattttcatcacgcagcccggtcgcaccccttcaccggcggtcacccgagatggcgacctccagcttgatggtgggggaaagcgagccgggctgcggcctctgccccttcctcagcctcaaggattttcatcaccaaggccggggaggggagagtgccgagttggggtcggcccctgcgtgggcggtggcccgctcctttactcagtgatggggggagaagcgggcattgcccgtggcgtccggcagctgcagcgtgcctggtcttcagccgcgagtggcttcggggtcacctgcggcgtcggcgtctgccacggcagccggaagaggttcttccgccggcgcggcggctgggaccggccacgggctgacctccaacttctacggccttctgcccgtccttgcctcacgagttttggcacgggcgggggcctcctggcagcggcatccaccctgaggtcagcgttgccgctgttcggccccccggagcagaagtcgccgtcgtcgccactgctggacactaggtctcgcctgtttgattatctgaaccgctttaccaagcatgagttgccccgtgtcaaggtgacgggtgaggccgggggtagcgatatcagtatgaacagaggcggagttggctcgagaatgggaacctggggtaaccggttgagccgcctgctcgggccggattcccggaggagcccctggaccgcggcgccgcccgaggctgggtcgggctttgctgaagacgtcgtcgatgccgagggtgctacagctcccttcagcgtgaagacccgagcctgcaggatccgatcatcttgtagcgtgtgcttcctgtggccgccgaggccagaagaaaacaccctcgctgcacttgcgaagctgcgccttttttcctcctgtttcgagcatctggacttcgtcggtaacagggatgtttgtgtgagcaagagctgcttttcgcggaagggacgagtgaggtatccgtatcccagaggcgtgggaatccctcggctcggtcggccttgccgcttacgcgtactttcacccgtccatgaggccctgtccccgacttag

SEQ ID NO: 37716 - DNA, 501 bp, Zea mays
  Peptide Sequence Number=SeqID_79495
atgctgatgctggtgtttcattgcgcggttttcaggtggcttggcgttcttgcccggcactgcccactaaccattcgacgcaatgccgcaaaggggttccttcctgccttcggtgggttttccttcaccatttcgccaggttgtccttcacagcggaatccttcctgggccaacaaggttttgccatgccattgtcggcatgtcagatcgtcgcacggatgtctactgatggttctcaagtccaccaatgctgacaacgccgatctcaggggtgctcttcatcggttcgctgtccacatggatgatgatattatcctcatggtcctccagaagcagcggtccaactggcaggtcgccctggcgttcttcaactgggcggcaaccctgccagggtatgcccacgggtcgagggcctacaccgagatgttggacattcttgggcggatgaagaaggtcaggcacatgagccagctgtttgacgagattcctgaggagcggtga

SEQ ID NO: 37717 - DNA, 879 bp, Zea mays
  Peptide Sequence Number=SeqID_79496
atgtcagattgtcgcacggatgtctacgtcaatgaagtactgatggttctcaagtccaccaaggctgacaacgccgatctcaggggtgctcttcgtcggttcgctgtccacatggatgatgatattatcctcatggtcctccagaagcagcggtccaactgggcctacaccgagatgttggacattcttgggcggatgaagaaggttaggcacatgaggcagctgtttgacgagattcctgaggagcgagggatcattaagggacccgtcgtgcggcaaagggatgataggcaccaatccctactactattaagacaccagtgtgggcgctggcgcgaccaatgcccccgcctcgactccacctacgcgcagcttgccgacttccatgtggacccacctcgacaacacatattcctactgccaactggacccacctcggctatccctcagcgcacatgcccgaccagccatgccaggcttgccagcgcagccgctcgactagccaggcccccgcaaagccttcccggctcccctatgtgcaccagcgaccaatcctttggaagccacgacaatggcgcccagatctgctttgccttcccctacgcgctgcacccacaaatttggcaggcgcgacaatggcgcccaagaccccgcatcgccttcccctacgcgctacacccacaaatttggaagcttggtcaatggcgcctagccccagcatcgtgttcccctacgtgctctaggctccagcattgccttctcctatgcgatgcacccacaaatttggaaagcacaatctacgtcaccaaattggaaagcacgatctcggtcaagcaatcacaacaactatcccccaaatttcgcgctcgccctcattaa

SEQ ID NO: 37718 - DNA, 417 bp, Zea mays
  Peptide Sequence Number=SeqID_79497
atgcacccacaaatttggaaagcacaatctacgtcaccaaattggaaagcacgatctcggtcaagcaatcacaacaactatcccccaaatttcgcgctcgccctcattaaaaaggtcgccattccatccagcgcccaccatcgaccgttgactccattctgcacccaccaacgtccaggagactactcctcatttgccccacttcatggaaaatattctagagaaacaagagtgagcttttcttgtaaggttgcacaccatggtatattgtggacctgtaggaaaaaacaatcattcaactttcattcgtactatctcctaagcatagtgatagcatgccaccagacaaaagctaatggtgttgtattcttgaactttaaaaccctgaacaaactcagtattctaagagattcatag

SEQ ID NO: 37719 - DNA, 510 bp, Zea mays
  Peptide Sequence Number=SeqID_79498
atggccaggaatgcccatggcgcgcaatggcagggcacgaacggagatttctgggttgcaatggaggcaacaagcaccgtcaacgaagcgcctgtgagagactccacggcgcctaggtccaccctgtacgcgcgatggcaccaacttggttcccggcgtgcccaggaggatgcccagaccgtggacgaggtctgtgagacggctgccaggaacccaacacggcgggcaatggatttgcggcggtgccggagtagtagaattcgcacgcatgcccgaatcgatgagccccgcactgagggtcctgattttcttgacgcccgagaggcgcctggccttggtcggcgcggccgggaagcggcgcaccgtgacggcgggcggggcagcgtgcagagcagacgcttgtgtgcgagccgaggtggctatggcggcgcaagaagggaggtagtaagagagatatcaggcttgacttttatgcaccatggtggagtccgcgtggggaaaatcgtctag

SEQ ID NO: 37720 - DNA, 450 bp, Zea mays
  Peptide Sequence Number=SeqID_79499
atggaggcaacaagcaccgtcaacgaagcgcctgtgagagactccacggcgcctaggtccaccctgtacgcgcgatggcaccaacttggttcccggcgtgcccaggaggatgcccagaccgtggacgaggtctgtgagacggctgccaggaacccaacacggcgggcaatggatttgcagcggtgccggagtagtagaattcgcacgcatgcccgaatcgatgagccccgcactgagggtcctgattttcttgacgcccgagaggcgcctggccttggtcggggcggccgggaagcggcgcaccgtgacggcgggcggggcagcgtgcagagcagacgcttgtgtgcgagccgaggtggctatggcggcgcaagaagggaggtagtaagagagatatcaggcttgacttttatgcaccatggtggagtccgcgtggggaaaatcgtctag

SEQ ID NO: 37721 - DNA, 273 bp, Zea mays
  Peptide Sequence Number=SeqID_79500
atggcgcgcaatggcaggtgccgcacgacacccggagactaccaggctttagatcacggtttctatgcgtctagaaaacatgagggagttgaacagagggcttttttttgttaccagggcacgaacggagatttctgggttgcaatggaggcaacaagcaccgtcaacgaagcgcctgtgagagactccacggcgcctaggtccaccctgtacgcgcgatggcaccaacttggttcccggcgtgcccaggaggatgcccagaccgtggacgag

SEQ ID NO: 37722 - DNA, 606 bp, Zea mays
  Peptide Sequence Number=SeqID_79501
atgtccggcttcatctcgtcgagcccgttccagaacacaaaacgtttcccccaaatccaatccctagctcccggtattgctcgccgaagttcggggcggttccaactccggcgacaactccgacgagcaattactcccaatccgtgcatcgtctgccgaatccgagggtaccgctgcgttcgtctcgtcgagggcttcgtcgcagcggttcggttcgtcgattggatccccgaatctccggcaatcgacggatttggcttcggctccggcgagggtcttcttccccgacatctcccactctcccctcaccttccccggcggcggcgcccttccccctccgtttccctccccggcgacgcccctttttcccctccccggcggtggcggcggtggccggcggcggcgctcgcgctccccgcgtcccacgcccgcacgcacccctccccggcagcgtggccacgccccctcgcgctccgtgcggccgcgcccacccccggccggcccaaacctcgtcctcccctgcgcagccccctccccttcctctcctctctcttccatggatgggaggaagaagatgaagagaggaagaagatgacaattctgtaa

SEQ ID NO: 37723 - DNA, 432 bp, Zea mays
  Peptide Sequence Number=SeqID_79502
atggatgatgttggtgaagaacgccaccgcctgctcggacctgatgctgttcaggggtcggacctcgatccacttggagaatttgtcgatggcgaccagcaggtgcgtgtagcccccgggtgccttctgcaaggggccgacgaggtccagaccccacaccgcaaaaggccaggtgatgggtatcgtctgcagagcctgagcgggcagagcatctcccactctcccctcaccttccccggcggcggcgccccttccccctccgtttctctccccgcgacgccccttttccactccccggcggtggcggcggtggctggcgcgcctccgcccggtcccacgaccgcacgcacccctcccggcaacgtgggcgcccctccgcatctgtacgcgcgaccaccccctgccggaccagcttcgagaggaagaagatga

SEQ ID NO: 37724 - DNA, 276 bp, Zea mays
  Peptide Sequence Number=SeqID_79503
atggagggggaagggccgccgccgccggggaaggtgaggggagagtgggagaggctctgcacggatgggaaaacgaagaaacgaagaaaccctaggtgcaacaatggaggtttctcaccggggaagaagaccctcgccggagccgagaagaaatccgtcgattgccggagattcggggatccaatcgacgaaccgaacgcgctgcaacgaagccttcgacgagacgaacgcagcggtaccctcggattccgcagacaatgcacggattgggagtaa

SEQ ID NO: 37725 - DNA, 240 bp, Zea mays
  Peptide Sequence Number=SeqID_79504
atggaggtttctcaccggggaagaagaccctcgccggagccgaggagaaatccgtcgattgccggagattcggggatccaatcgacgaaccgaacgcgctgcgacgaagccttcgacgagacgaacgcagcggtaccctcggattccgcagacgatgcacggattgggagtaattgctcgccggagttgtcgccggagttggaaccgccccgaacttcggcgagcaataccgggagctag

SEQ ID NO: 37726 - DNA, 240 bp, Zea mays
  Peptide Sequence Number=SeqID_79505
atggaggtttctcaccggggaagaagaccctcgccggagccgaggagaaatccgtcgattgccggagattcggggatccaatcgacgaaccgaacgcgctgcgacgaagccctcgacgagacgaacgcagcggtaccctcggattcagcagacgatgcacggattgggagtaattgctcgccggagttgtcgccggagttggaaccgccccgaacttcggcgagcaataccgagagctag

SEQ ID NO: 37727 - DNA, 1077 bp, Zea mays
  Peptide Sequence Number=SeqID_79506
atggaggagctgggatactctcagggccctcgcaccgatgcagtcggcgcacactgccgcgagttcatgatggctatgaagtttcagatggaaaaccataatccattacattctcagattgctgaagtgaaaatggacatctcagcatcagcttctgttgcagcagggaacaaattttgcaagggtgctgcctgttatttctttgattccacaacaccgcaacagtcatatgggttcttctggattgagattcttggtgccttggtctccattcggcttatatggctacttgttggcatactgttatatgaggctatttcggcggcgcatctggtgtctgatgcggctgagatttctctgcgtgcgagttcttgcaggacggagtacgaccgcggggtgaacaccttctctccggaggggcggctgttccaggtcgagtacgccatcgaggccatcaagttgggatccactgcgatcggtttgaagacaaaggatggtgttgtactcgccgttgagaaacgtgtgacctcaccactgctggaaccaagcagtgtggaaaaaataatggaaattgatgagcacataggctgtgccatgagtggacttattgctgatgctagaacactagtggaacatgctcgtgttgaaactcagaatcataggttctcatacggagagccaatgactgtagaatcttcgacacaagctatctgtgacttagctctgcgttttggcgaaggtgacgaagagtcaatgtcacggccatttggagtctctctcctaattgctggacatgatgagaatggacctagcctgtactacactgacccatctggtacattttggcaatgcaacgcaaaggcaattggatcaggttctgagggagctgatagttccttgcaggaacagtacaacaaggaattgaccctccaggaggcggagaccatagccctttctatcctgaagcaggttatggaagagaaggtgaccccaaacaacgtcgatattgccaaggttgcccccaagtaccacctctacacccctgccgaggtggaagccgtcatcgcgaggctgtga

SEQ ID NO: 37728 - DNA, 543 bp, Zea mays
  Peptide Sequence Number=SeqID_79507
atggaggagctgggatactctcagggccctcgcaccgatgcagtcggcgcacactgccgcgagttcatgatggctatgaagtttcagatggaaaaccataatccattacattctcagattgctgaagtgaaaatggacatctcagcatcagcttctgttgcagcagggaacaaattttgcaagggtgctgcctgttatttctttgattccacaacaccgcaacagtcatatgggttcttctggattgagattcttggtgccttggtctccattcggcttatatggctacttgttggcatactgttatatgaggctatttcggcggcgcatctggtgtctgatgcggctgagatttctctgcgtgcgagttcttgcaggacggagtacgaccgcggggtgaacaccttctctccggaggggcggctgttccaggtcgagtacgccatcgaggccatcaagttgcaaatggttacagagataccttttgaaactcagtcgacaattcgaaggtacaaacgttatttatcttcagaggctgagtga

SEQ ID NO: 37729 - DNA, 1203 bp, Zea mays
  Peptide Sequence Number=SeqID_79508
atgcctactacaacgctgcttgtgtttggtgtttcttgcaatgcatctacattcaatgagataggtaataggcaaggttgttgtggagcatcgaccacctcgacctacagctcaaagaaagcggaccatattcagaaacccagtactctgtggccactcctctacctgctcgactcgctctcctcgcagtaccgtgccgtcgccgcggcttcgtgcctcccaaatcttcccatcgccgccccactgcggaatgccacctcggggacggcgccgagcgccggtggttggccgggctcacgggcgcacgaagcaccgccgggtggcctggtgctggtctccaaggatccggacaacatctgcgagatcgccactggaatggttgtcaatccacgcccatttattgaagtccggtctgctgctcctaaccatatagagaatgctttgagagatgtagtggttcctatggtatgcataaaatcttattgttctgggtcatccacaccttacagtttattagaattttggtatataaatgactcctacttttgcaggttggtgggcgtaacacggttcttgagtgagcctttgcacacaatggtggtggcatcaatggactggcctgaaatcactaagtacagaggtctgatggaaaaccataatccattacattctcatattgctgaagtgaaaatggacatctcagcatcagcttctattgcaatacagaacaaattttgcaagggtgttgcctgttatttctctgattccagtaactcctcgaaagatgccaaggagagatccacgtccatgaggaagcttataatcgcagttatcctttgcatcatatttatgacgatggaagtggtcgggggcatcaaagcaaacaatcttgccatcttaactgatgcggcacaccttctttctgatgtggcaacatttgccatatcgttattctctctctgggttgctggatgggaagcaacaccacaacagtcatatgggttcttctggattgagattcttggtgccttggtctccattcagctcatatggctacttgctggcatactgttatatgaggctattgtaaggctcattaacgagagtggcgatgtgcagggctccctcatctttaacgagagtggtgatgattcctgggattgcacgagggggaggacgggcagaaccacggtgcacttatga

SEQ ID NO: 37730 - DNA, 1053 bp, Zea mays
  Peptide Sequence Number=SeqID_79509
atggttgatccgagcctgaggtcgggcgaggcagcgactcctccgaggccgaggctggggccgagacccagggttgggcgaggacgtgattcttcccgaggccgaggccgaggccgagccctggggtcgggcgaggcggagcttcttgttgcgcccgaggctgaactcgaccgttgtcggtttcgcccgggtggttggcacagcagccggagcagggcgggcgacgctgttttcctgtcagatcggataaggtgtcaggcgaccccagcattaagtgcgcatgcaacacggtcggctggtaagacgatttggccaaagtcgcttgcacgacaaggcttgtattttgcggaaccgagggtgcactcactgtccgaagagaccctcgggcgaggcgtggactcgtccgggaccactgttctgcctgaggccgggctcaggcgagaaaacagcaggggctaccacgaaaaatgtcctaagactcagactgacactgctgcggactgtgggttctatttcaaaaagtacatggtcttattaacaaaaagtctccgcgaagggggcggttggatcggcgatccacggccccagtcccgcctgcgcgcggtcgactctccaccgcgcgatcgctatccaacggtggagcgctatcgctatcacatcatcaaatccgggccgatcattcacgcatcaacgacccacgcattctccccaatcctacaattgaatacggcggcgccgctcgactacgcccggtggaggatgatcggagctagcccggcacggcgcccgctgacccgatgccaaaacaacgagctacaatgcgttaaggaggactcgccgaacacgagggtcgattacttaccggcgatggcgtgcccagggagtcggtctgcggcagagtgcggtcccgcggtggcccttcaactacggcgagaaattggggccgccctgaagatcaatcccaccagatactaccagggacgtttccctggtgacgctacgaagctccacgacccttcaccaagacccaaacggcgacgtagccgaagctag

SEQ ID NO: 37731 - DNA, 165 bp, Zea mays
  Peptide Sequence Number=SeqID_79510
atggcgccttgtcgctccggcgcacatgcatggcgctcgcggcacgcctttgcgacgccaccaccaccacgcgtccacgcccgcccaatgccggagagagggtctggtctgtcagtcttcgcatcccgccacccggtgttccgtccaagttgctgcacaggatga

SEQ ID NO: 37732 - DNA, 822 bp, Zea mays
  Peptide Sequence Number=SeqID_79511
atgaaccaccactgcttgatcgaagtggagtccgtccagcgtggggttgtttcttcacagatgccaaccaaatacaaagcgcaggcgaacacgagctctggtttgcctgtggagtgtggagaactgcagtgccacatcaaatacgtaagtggtccactccagtctatatatacgatgcactccactccagaaatacgcggccgcagcgcaacagtctatatatacgatgcactctactccagaaatatgctggcatctgctactgctagccctctcagcaagcagacttgtgatcgagtttctgtctgtgcttctttctttgtagtcgcagcgtgtcttactccggacggaggatcatgcatgcatgcattcatgcctcagacagagcagtggggcgctgctccgtccgtcaggatatgttttctgaaggaaaacgacgagaggggcagggcaggcaacaagcgcagcgcggcgcggcacagggctcgctcgctttctgatctgaagagggggaaaaaaagttcagattggggtagacgattctcgctagcgctggctctggcgatgccgatgccgccaccggcaggagctaggcagctagctagccaagccgcccatggcgccttgtcgctccggcgcacatgcatggcgctcgcggcacgcctttgcgacgccaccaccaccacgcgtccacgcccgcccaatgccggagagagggtctggtctgtcagggtcgtggagcttcgtagcgtcaccagggaaacgtccctggtagtatctggtgggattgatcttcagggcggccccaatttctcgccgtag

SEQ ID NO: 37733 - DNA, 231 bp, Zea mays
  Peptide Sequence Number=SeqID_79512
atggccatgatgggttcaacatcggaaaagatgtacctctgccaggtgaagaagcgacaaacttttgttgcttctgttcaaaggtggtaccaaaggaagagcaccaggagtaaagctgcgggaggaaaggatcctccagaaaacttttgtttaaaactgatcgggaggggtttttgcctcccatggtttgtaataatactctgcactcgtatattatgttctggtctataa

SEQ ID NO: 37734 - DNA, 222 bp, Zea mays
  Peptide Sequence Number=SeqID_79513
atggccatgatgggttcaacatcggaaaagatgtacctctgccaggtgaagaagcggcaaacttttgttgcttctgttcaaaggtggtaccaaaggaagagcaccaggagtaaagctgcgggaggaaaggatcctccgaaaaacttttgtttaatacttatcaggaggggtttttgcctcccatggtgtaacacccctggtgttactattactaaaacttga

SEQ ID NO: 37735 - DNA, 327 bp, Zea mays
  Peptide Sequence Number=SeqID_79514
atggccgaaaacgaggaagaagttgaagtagaagaagagaagacttcgccaccaccacctgcggaacatcaggcaggaaattgtttttattttgacatctgcggatccgagcctgactcacctataaacgaaggcaagccggtgcatttgccaggtaccaaaaataaacttgatgatggagccatcaaggccttgatgggttcaacatcggaaaagatgtacctctgccaggtgaagaagcgacaaaattttgttgcttctgttctaaggtggtaccgaaggaagaacaccaggagtaaagctgcgggaggaaaggatcctccataa

SEQ ID NO: 37736 - DNA, 714 bp, Zea mays
  Peptide Sequence Number=SeqID_79515
atggacgcgctttgggcccatttcaaccgcctcgttattcttaatctctactacaccttaagactggagcgagcgtccaccaacctgaccgtgcccccgctccagcccccgcccgcgctgtcttccttcctgcaatctcgcccccgcccacgccgtcttccctgcatcccgccctcaaccgcgccgacttccttccctgcatcccgcggcgaccccgcgctcccatccatctcgccgctgatggcgcccatcgtgggaggcagggtgggcgaggtcgcgcgtgtgtctccggtcgtggtcgtttcgtttgggccgaccgtggggcgctactgtttccatcctcctgctctgacttctctgcttcatctgatcccctctcccccacctgccagactccccgccgtccaccgctcgccgcccccggccgccatccagccgccggtacagggctcatcctcccggtcgcagccgtgtccagttccttcacgaagagaggcgcgtagactggggagctggagcgaggacaaggagacgagggaaaggatgcagcagctgcaaccgaagcagatgcactgggtgagggccgactcctccgacttcggggggcgaccgtcccgccccccgcaggtgtccttgtgggggtccagcgcgagggagatcacacgcgtcgcgtcgcgccgcgcggaacgtgttcgaggagcgccagctccatag

SEQ ID NO: 37737 - DNA, 123 bp, Zea mays
  Peptide Sequence Number=SeqID_79516
atgaagcgtttcaaggcttacacaaaggagatttggcattctagagtaattcagtactggaagcacttgaagttcgagatacaaaaggattcctttcgatacgttatgggatatgagtgctag

SEQ ID NO: 37738 - DNA, 162 bp, Zea mays
  Peptide Sequence Number=SeqID_79517
atggaccgcatcctaaggacttatggttacgccatcatcagagacaaagttgatgtcgttacctacatcaagaaacttttaccagcgctaaggtgggacgactggacgtttgagatgaggcctaagaaagatgcgctcacgacaggagatttggcattctag

SEQ ID NO: 37739 - DNA, 1893 bp, Zea mays
  Peptide Sequence Number=SeqID_79518
atggcgcccatcgtgggaggcagggtgggcgaggtcgcgcgtgtgtctccggtcgtggtcgtttcgtttgggccgaccgtggggcgctactgtttccatcctcctgctctgacttctctgcttcatctgatcccctctcccccacctgccagactccccgccgtccaccgctcgccgcccccggccgccatccagccgccggtacagggctcatcctcccggtcgcagccgtgtccagttccttcacgaagagaggcgcgtagactggggagctggagcgaggacaaggagacgagggaaaggatgcagcagctgcaaccgaagcagatgcactgggtgagggccgactcctccgacttcgggggcgaccgtcccgccccccgcagtcaccagcgccacgacgcctcttgcgaagaggacgatttgtacgggtatgggggcatcgtcaatgagtggggcacgattgggctgttgctgctcgaggcggcagccgagcggatcgtcggggatggggccctcgagacatggggtgtcacggataaggccactcgtgtgaagctctgcatgtgtccttgtgggggtccagcgcgagggagatcacacgcgtcgcgtcgcgccgcgcggaacgtgttcgaggagcgccagctccatagccacctccatcgtgttgtcgtggctgccctctccattcaggagatttggcattctagagtaattcagtactggaagcacttgaagttcgagatacaaaaggattcctttcgatacgttatggatatgagtgctagccttggtggatttgcagcatctctgaagaaaaagaatgtctgggttatgaatgtagttcctttcacggaatcgggaaagctgaaaattatatatgatcgtggtttaatggggactacccatgactggtgtgaatcattctcgacatacccgggcacctacgacctccttcacgcctggctcctgttttctgagatagagaagcagggatgtagcctggaggatcttctgatcgagatggaccgcatcctaaggacttatggttacgccatcatcagagacaaagttgatgtcgttacctacatcaagaaacttttaccagcgctaaggtgggacgactggacgtttgagatgaggcctaagaaagatgcgctcacgacaggaaacatacaattcatgccttggggtattgacgctgtagataaacgctacggtgtgcagattggaccaagggaaaactcagactgcctttacatcataccttggggactgtacaaagctgtcacctacgtcaaggagaagtacggcaaccccacaagtccacaatgtttcatgtctgagaacaatgtgtatcttgctaaaacattcatgttgatatttgggatgggtctctactgtctcttcgtcagcaacgcttccgcggatgttcgttctaaggcaccggactgtccggtgtgccagcggagcaacgactactttgcgccaacggtcgtctgcgaaggcattaaatgcgctacagtgcgcgcctgcgcgcgcagaagtcagagcaggcgccagaaggcgcaccggacagtctacaggacctgtccggtgcaccaccagactgtccggtggccccacaagtcagagctccaacggtcgaaccctaacggccaggtgatgtggctggcgcaccggactgtccggtgcgccatacgacagcagcctccaccaacggctactttggtggttgaggctataaatacccccaaccacccaccattcattgcatccaagttttcagcattctcacctcttacaagagctatagcattcaatacaaggcacaaccaaagagatcaaatcctctcccaagtccggaatcactccaaacaaataagtgactag

SEQ ID NO: 37740 - DNA, 1590 bp, Zea mays
  Peptide Sequence Number=SeqID_79519
atgcagcagctgcaaccgaagcagatgcactgggtgagggccgactcctccgacttcgggggcgaccgtcccgccccccgcagtcaccagcgccacgacgcctcttgcgaagaggacgatttgtacgggtatgggggcatcgtcaatgagtggggcacgattgggctgttgctgctcgaggcggcagccgagcggatcgtcggggatggggccctcgagacatggggtgtcacggataaggccactcgtgtgaagctctgcatgtgtccttgtgggggtccagcgcgagggagatcacacgcgtcgcgtcgcgccgcgcggaacgtgttcgaggagcgccagctccatagccacctccatcgtgttgtcgtggctgccctctccattcaggagatttggcattctagagtaattcagtactggaagcacttgaagttcgagatacaaaaggattcctttcgatacgttatggatatgagtgctagccttggtggatttgcagcatctctgaagaaaaagaatgtctgggttatgaatgtagttcctttcacggaatcgggaaagctgaaaattatatatgatcgtggtttaatggggactacccatgactggtgtgaatcattctcgacatacccgggcacctacgacctccttcacgcctggctcctgttttctgagatagagaagcagggatgtagcctggaggatcttctgatcgagatggaccgcatcctaaggacttatggttacgccatcatcagagacaaagttgatgtcgttacctacatcaagaaacttttaccagcgctaaggtgggacgactggacgtttgagatgaggcctaagaaagatgcgctcacgacaggaaacatacaattcatgccttggggtattgacgctgtagataaacgctacggtgtgcagattggaccaagggaaaactcagactgcctttacatcataccttggggactgtacaaagctgtcacctacgtcaaggagaagtacggcaaccccacaagtccacaatgtttcatgtctgagaacaatgtgtatcttgctaaaacattcatgttgatatttgggatgggtctctactgtctcttcgtcagcaacgcttccgcggatgttcgttctaaggcaccggactgtccggtgtgccagcggagcaacgactactttgcgccaacggtcgtctgcgaaggcattaaatgcgctacagtgcgcgcctgcgcgcgcagaagtcagagcaggcgccagaaggcgcaccggacagtctacaggacctgtccggtgcaccaccagactgtccggtggccccacaagtcagagctccaacggtcgaaccctaacggccaggtgatgtggctggcgcaccggactgtccggtgcgccatacgacagcagcctccaccaacggctactttggtggttgaggctataaatacccccaaccacccaccattcattgcatccaagttttcagcattctcacctcttacaagagctatagcattcaatacaaggcacaaccaaagagatcaaatcctctcccaagtccggaatcactccaaacaaataagtgactag

SEQ ID NO: 37741 - DNA, 192 bp, Zea mays
  Peptide Sequence Number=SeqID_79520
atggacccatcggtcagtgcgtggggttcacatgtcagcgaagggagagctgaggcgcgtgcaagaggggctggcatgcgggcccgggttgtcggcgccaggttgcgggtgagcgcgcgtgagaggcgagtttgggccgcgcggcgtgcctttccggagatgggccaaattccagattccaaacttcattaa

SEQ ID NO: 37742 - DNA, 231 bp, Zea mays
  Peptide Sequence Number=SeqID_79521
atggacccatcggtcagtgcgtggggttcacatgtcagcgaagggagagctgaggcgcgtgcaagaggggctggcatgcgggcccgggttgtcggcgccaggttgcgggtgagcgcgcgtgagaggcgagtttgggccgcgcggcgtgcctttctggagatgggccaaattccagattggggtaaccagttgtataaggtcgagttgttgtgtatggccaagttgatataa

SEQ ID NO: 37743 - DNA, 1026 bp, Zea mays
  Peptide Sequence Number=SeqID_79522
atggcgaggaggactcagtccacggtgaggcgcggaatcacggctccgatgagcaatccggtgttcgagggacgaagacaagcccgggagatccctgcaacggcttcaagggatcacggaggcacgaggatctcggccggttggttagaaggtcgattcacggactccgatggttggccggcgagtatatcgcacgcacttctgttgagctcggccgcggagtccgggaggaagacggctgacgagatggacccatcggtcagtgcgtggggttcacatgtcagcgaagggagagctgaggcgcgtgcaagaggggctggcatgcgggcccgggttgtcggcgccaggttgcgggtgagcgcgcgtgagaggcgagtttgggccgcgcggcgtgcctttccggagatgggccaaattccagaagatgcagagaagcgcaaccgtcagctccatgtggatctcaccacagctcaagcccgtgtagctgccttggaaagtcgtgaagtcattgttgttgaagccctgaagcaagccaaggatgagcatgtccagaagttgatggaggcatacttggtaacccgtaaccaacgtagagccctgcggatccaagagcccgcttcatccaacccagtacaacccatgagagctgaagatccccagatttttgaaggtcacccggtctctatcagaggagagaagaagacttgggaactcccaaaaggagccatagtcttggaaggaattccagtcttccctcaggctatgaataagcaagagcaccccaagtcctcccaagaccccccgccagagttgtttgagcccctcaccatgaagaagattccaacaccgtcccgtgagatcaaagaagaagttgcaagcaccccagcatcgccgccctctgaggagctacaagagccagtcgtgcttgaagaagagttcgaccccgtcttaccatctcaatcaccgccagaagaagtcatcaacatcagctccctcttaacccatccaggagatgtctcagattga

SEQ ID NO: 37744 - DNA, 840 bp, Zea mays
  Peptide Sequence Number=SeqID_79523
atggactccccgaacaggaagcagggcaggcccgcgtgctcctccctcaccctgacggcgcggctggttggtgtcgggttacttctcttctcatctgatagtaggaggaggctaggagcggccagtgcccagcgggcggacggaactgggagccttgccaccgggtcgatggagacgtcggttgctgatgttaatttggatggagctaatttggctgttgggacaacaaatggtctggtgcgcatctataaactccgagaacacaatgggggttcaagcttcaattttgtgagtgaatttaagcaagatcatagtgttgacaccaatactcgagaaatactagaaatccttgtactgtggtttttcttcaacctgctttggtggcagggtaccattttaggagcatatatgaggtggctgaagttttttgagatttggttaacaggaaacaatgcgtatgattgttacttgatcttcttcagtgagaccattgttgaggttgagaagaaaactgagctggaagaggaggcagatgttctatctgagatagaggaggaaaaacttgaatctgaattagacgcaggagaagggagttctgagcggagtgatggtccaagagggattcaccaagccttttcagtcatgagcacttcttttatgaagagcggagtgttggtccaagagggattcactaagccttttcagtcatgccaggagcatcatgtacgccctcaaggagaaggggatcgacatggtaattgcttctcgctccccacctcggacatagccaaggtgttccaagacaagttggagctccagccaggtttgtcgcccaagtaa

SEQ ID NO: 37745 - DNA, 1404 bp, Zea mays
  Peptide Sequence Number=SeqID_79524
atgggagcgacgaggaccgcccccgcccatggactccccgaacaggaagcagggcaggcccgcgtgctcctccctcaccctgacggcgcggcgccgtcgcccttccggatctgtcgtcctttcgccggcgccgtgatggacccaagcgatttcaactccgccgcaggaagcagggcagggcccgcgtgctcctccctcaccctgacggcgcggctggttggtgtcgggttacttctcttctcatctgatagtaggaggaggctaggagcggccagtgcccagcgggcggacggaactgggagccttgccaccgggtcgatggagacgtcggttgctgatgttaatttggatggagctaatttggctgttgggacaacaaatggtctggtgcgcatctataaactccgagaacacaatgggggttcaagcttcaattttgtgagtgaatttaagcaagatcatagtgttgacaccaatactcgagaaatactagaaatccttgtactgtggtttttcttcaacctgctttggtggcagggtaccattttaggagcatatatgaggtggctgaagttttttgagatttggttaacaggaaacaatgcgtatgattgttacttgatcttcttcagtgagaccattgttgaggttgagaagaaaactgagctggaagaggaggcagatgttctatctgagatagaggaggaaaaacttgaatctgaattagacgcaggagaagggagttctgagcggagtgatggtccaagagggattcaccaagccttttcagtcatgagcacttcttttatgaagagcggagtgttggtccaagagggattcactaagccttttcagtcatgccaggagcatcatgtacgccctcaaggagaaggggatcgacatggtaattgcttctcgctccccacctcggacatagccaaggagtatttgcacttcttttgtaaccctccactttgccatagggacatcaaatcgagcaacattcttttatatgagcatttcgttgcgaaggtccagaacatctgcactaggctgcctaaaaagaagtcttacaaagatttgtactggctcaactggaggttcttgctgtgcgcgctctgggtctactcctgcatggccttggcattcttcttgattaagaagtacgagggggccagttcaccggacagcaatggcgatgacggtggagacagagaagaggcgttaccacgtgtcagacctggtgttgtttatcttgaagattgctggaagacatgccttgagggtatccaccctggctggctgctggcatttcgcgttgtggccttcttcgttttggcttcactgctcgtggtcgacatcattactgatggatggagtatcttcctatactacactcagtga

SEQ ID NO: 37746 - DNA, 477 bp, Zea mays
  Peptide Sequence Number=SeqID_79525
atggccttggcattcttcttgattaagaagtacgagggggccagttcaccggacagcaatggcgatgacggtggagacagagaagaggcgttaccacgtgtcagacctggtgttgtttatcttgaagattgctggaagacatgccttgagggtatccaccctggctggctgctggcatttcgcgttgtggccttcttcgttttggcttcactgctcgtggtcgacatcattactgatggatggagtatcttcctatactacactcagacgggcaaatgtcgtatctttaccttttgcgtggggtacccaggccgaccaggttgcggcatagttcaatatggccagcagctccagcagggtgagaaagatcgtcatcaggttctaaaggatttctcaaagttgcttgatgatcaggctttaggacagcagtggctacctgtcaaaaaaaaagaatgccgtctttgtatggacatctaa

SEQ ID NO: 37747 - DNA, 534 bp, Zea mays
  Peptide Sequence Number=SeqID_79526
atggccttggcattcttcttgattaagaagtacgagggggccagttcaccggacagcaatggcgatgacggtggagacagagaagaggcgttaccacgtgtcagacctggtgttgtttatcttgaagattgctggaagacatgccttgagggtatccaccctggctggctgctggcatttcgcgttgtggccttcttcgttttggcttcactgctcgtggtcgacatcattactgatggatggagtatcttcctatactacactcagacgggcaaatgtcgtatctttaccttttgcgtggggtacccaggccgaccaggttgcggcatagttcaatatggccagcagctccagcagggtgagaaagatcgtcatcaggttctaaaggatttctcaaagttgcttgatgatcagccttgtgttcggcttcagtgttggctcaacccaacttcgctaaaccattcgatcaccattgaaacagatgcatcgggcagcggtgctgttgcaggatcaccatccattagcttacattag

SEQ ID NO: 37748 - DNA, 1089 bp, Zea mays
  Peptide Sequence Number=SeqID_79527
atgaggaggaggaacatcgggcctgggcgacacgagcacctcgtggcccgggtgcgcgacgacgagggacccgctctgctccaaccagttcaatatggccagcagctccagcagggtgagaaagatcgtcatcaggttctaaaggatttctcaaagttgcttgatgatcagatatttgccccgaattgtttctctaggacagcagtggctacctgtaaaaaaaacagggcgctgctccggaagctctccttggttgacctagcgggcgtctccttggtcggtgcaatggatacgacttctgtgtatgtggggatcccgtgtgacatccccttcaacagcggctgcaatgttgggcttatggatgagggaatagtggctgcaatggcttatcctattattcatgcgacttgtgaacaagatattgctaaaggaggtgctcgcacggaggaggacctcaatgtgtcggatgagatgatcttcgaggccagggtgcgatccgagcagcaagctgttatagggatttttctaaaccggttaccatctatttcacacttcattccttttacactagactattttgtgctatacgagatgctgaatgatcaaatagctagcaaggggaagagcaatcgaggaaggaagttcaaagatgtctccaaacaaccagaagacatggacgatagctttggtagcaggatgaagccctacttacagattggaagcagcagttggaagcagctcgcacgacaggtggatctcagcgctaggcagaggttcttgggcagctcagacaccagctcgtcgtcgagctccccgaggcttgccgccgcgctgctgcagcatggcgactgcagtgccaaggacgatggtgtgcaagatcctatggccgaaattgtgagactgaccagttgcaatgtcaatgagttagagtatttaagggcagaagatatgaaggaacaaccctatgaggcaaaacgtgagttgacaaaagaccccgaactctactgcactgattctgtgtcacccttgctgggcttaggtaccttgctacatctctttaattcaaatttctatatggatataaattga

SEQ ID NO: 37749 - DNA, 540 bp, Zea mays
  Peptide Sequence Number=SeqID_79528
atggcccgctatgaccgcgccatcactgtcttcaaccccgatggacacctcttccaggtggagtacgctctccaggccgtccgcaagggcaacaccgtcgtcggcgttcggggcacggacaccattgtcctcagcgttgagaagaaatgtgcatcccacatcgcgacaaactaccacatgttggcacctaatacaaagcggggatgtgtgtgccattttattgtgaagcgcttgattgttgaaccatctatggacaagatggctgtagggacaaaggcaatgtttgcaccatacatatctgatgagttgcgtcttcaagttatgtctttgctctatgttggcattccagtggagaccataatgcagaggcatactaaaatggttgaaaagcaggaggtccatcaaacagggacgatcttcttactcatagatatgttaggagactggaaaggaaaatatgtcgttctgtttatgagcttgatgatgatgacactattagtattggcttatgggttgaaaataaccaggattgtagtttaa

SEQ ID NO: 37750 - DNA, 228 bp, Zea mays
  Peptide Sequence Number=SeqID_79529
atggcccgctatgaccgcgccatcactgtcttctcccccgacggacacctcttccaggtggagtacgctctcgaggccgtccgcaagggcaacatcgtcgtcggcgttcggggcatggacaccattgtcctcagcgttgagaagaaatttttcagatacagacacctttgtcttgggcatccagacagattggcagctatagcaaatgattcagtttggcagccatag

SEQ ID NO: 37751 - DNA, 303 bp, Zea mays
  Peptide Sequence Number=SeqID_79530
atgccgccgcgcgaaccacccgcacgccgcctgccagccgccataccctcaccctcacctccccgtaccccgccccacacgccaccaccatcggtcgggaagcaagctcaaaccctaaccgccggcgatgccagcacgatggcccgctatgaccgcgccatcactgtcttcaaccccgatggacacctcttccaggtggagtacgctctccaggccgtccgcaagggcaacaccgtcgtcggcgttcggggcacggacaccattgtcctcagcgttgagaagaagtccacacccaagctctag

SEQ ID NO: 37752 - DNA, 399 bp, Zea mays
  Peptide Sequence Number=SeqID_79531
atggtctccttggtgagggacagaacaagcttgattatgtgctttgccctcactgttgagaactttctccagcgccgcctccagaccatcgtcttcaagaatggcatggccaagtccatccaccatgctcgtgttctgatcagattgacagacaagttacagtttagcaacttggatttatgggacttttgtcaccaaggggtcctaaaacattttcacagggtggggaggcagcccgtcaacattccctcgttcatggtcagggtcgagtcagagaagcacatcgacttctccctcaccagtcctctgggtggtggtcctgctggaagggtgaagcgcaagaaccagaaggcctctggcggcggtggcggcggcgatggcgaggaggacgacgagtag

SEQ ID NO: 37753 - DNA, 774 bp, Zea mays
  Peptide Sequence Number=SeqID_79532
atgacggctgcctcagcgcgtccagcaagacgacgggtatcttgtattgggcttgcgaacacgacggcacagtctgataattccagcttcgacatcgtcttggcctatttccgcagcctttacatcttccatcagaactccatccggctgctgcacttcgtcaacatgttggctcacatgttgtctgctgacaagcgcctagatgctgagttgaagctggttggtgagtatggcctccgctgcaagcgtgagctgtggcgcgtgcagtatgccctgagccgtatcaggaatgcagccagggagctgctcaccctggatgagaagaacccacgccgtatctttgagggcgaggcactcctccgccgcatgaaccgatatggtctccttggcgagggacagaacaagcttgattatgtgcttgccctcactgttgagaactttctccagcgccgcctccagaccatcgtcttcaagaatggcatggccaagtccatccaccatgctcgtgttctgatcagattgacagacaagttacagtttagcaacttggatttatgggacttttgtcaccaaggggtcctaaaacattttcacagggtggggaggcagcccgtcaacattccctcgttcatggtcagggtcgagtcagagaagcacatcgacttctccctcaccagtcctctgggtggtggtcctgctggaagggtgaagcgcaagaaccagaaggcctctggcggcggtggcggcggcgatggcgaggaggacgacgagtag

SEQ ID NO: 37754 - DNA, 570 bp, Zea mays
  Peptide Sequence Number=SeqID_79533
atgacggctgcctcagcgcgtccagcaagacgacgggtatcttgtattgggcttgcgaacacgacggcacagtctgataattccagcttcgacatcgtcttggcctatttccgcagcctttacatcttccatcagaactccatccggctgctgcacttcgtcaacatgttggctcacatgttgtctgctgacaagcgcctagatgctgagttgaagctggttggtgagtatggcctccgctgcaagcgtgagctgtggcgcgtgcagtatgccctgagccgtatcaggaatgcagccagggagctgctcaccctggatgagaagaacccacgccgtatctttgagggcgaggcactcctccgccgcatgaaccgatatggtctccttggcgagggacagaacaagcttgattatgtgcttgccctcactgttgagaactttctccagcgccgcctccagaccatcgtcttcaagaatggcatggccaagtccatccaccatgctcgtgttctgatcagtggaaaaatgaataatcttggtgacaagacactgaacgtttggaatgtttga

SEQ ID NO: 37755 - DNA, 153 bp, Zea mays
  Peptide Sequence Number=SeqID_79534
atgcaccacggctatcccaaagaaacactggtgcgtttccttaaggctagagagtggaatgtagcaaaggctcataaaatgattgtagaatgtttgaattggaggattcaaaatgaaattgatagtgtgctcgagcaataccactctcaataa

SEQ ID NO: 37756 - DNA, 279 bp, Zea mays
  Peptide Sequence Number=SeqID_79535
atgcaccagggctatcccaaagaaacacttgtgcgtttccttaaggctagagagtggaatgtagcaaaggctcataaaatgattgtagaatgtttgaattggaggattcaaaatgaaattgatagtgtgctcgagaggcctatagccccagtagatttatacaaatcaatacgtgattcacaacttattggcctgtcacgatacacaaaggagattcttctgtacaacttcgatggtggtacaatttgttcagtggttattttgaaaggtttggactga

SEQ ID NO: 37757 - DNA, 723 bp, Zea mays
  Peptide Sequence Number=SeqID_79536
atggggttagggatggcaatgggtcgggttcggatcgggtatggacccgcgggtaaaatgttaaacccgtacccgacccgattttatcacgggtcgggtatggataagacccgcgggttaaatttcgtacccgaacccgaaaccgacgggtcggatatccgtggatatccgaacccgcggaatatgcaccacggctatcccaaagaaacactggtgcgtttccttaaggctagagagtggaatgtagcaaaggctcataaaatgattgtagaatgtttgaattggaggattcaaaatgaaattgatagtgtgctcgagaggcctataaccccagtagatttatacagatcaatatgtgattcacaacttattggcctgtcaggatacacaaaggagggtctcccaatttttggcattggtgttgggcatagcacatatgacaaagcttcggctacaactacagccaaaatcataaaagtgtctggtttgaagctatcggcactaagccaaataaagatgttgacttccatatcggcagttgatgatctaaattaccctgaagggttaagaacgtgggtacccacgttcttaaggcgtgggtaccgtcgaacttattgtgcagtcctcgcagacccacgcagggttaagaacgtgggtaccgtcgaacttattgttcagtccacgcagatctccgcaggacacataagttcgacggccacgtga

SEQ ID NO: 37758 - DNA, 537 bp, Zea mays
  Peptide Sequence Number=SeqID_79537
atggcgggcgcgcggatttcacgcgatccgttgtggcatcccggccacgtccgcgcccttataggtagcaggaccgggcttacctctccctcttgccttcctactcttgcgaccgccactgtagtggagatagagtcgggagcgaaacagagagtgggggagattgcccctcgcggccgccggcggtggaacccttacctcgcccacgccgcgtctctggtttgcttcctgagtgcatcgctgagacattgggaagacgctcgtgcccccgggaaagagaaggtggccgtggggtgtgggaaattgctcaccggagtccgagggttaccgccgagccgcctgaacgtgtgggcagggccgtcaccgcttcataccgaggcttatgcttcggaggtcagcattttgctctatagaacttcaaaattcattgggtgcaccgaagaaatcagcatcctgcctcttggggatgatgattcgttgggtgcaccgaaggtgcacccaatgggtgtagcccccgagcttcgagtggatttttga

SEQ ID NO: 37759 - DNA, 408 bp, Zea mays
  Peptide Sequence Number=SeqID_79538
atggcgggcgcgcggatttcacgcgatccgttgtggcatcccggccacgtccgcgcccttataggtagcaggaccgggcttacctctccctcttgccttcctactcttgcgaccgccactgtagtggagatagagtcgggagcgaaacagagagtgggggagattgcccctcgcggccgccggcggtggaacccttacctcgcccacgccgcgtctctggtttgcttcctgagtgcatcgctgagacattgggaagacgctcgtgcccccgggaaagagaaggtggccgtggggtgtgggaaattgctcaccggagtccgagggttactgccgagccgcctgaacgtgtgggcagggccgtcaccgcttcataccgaggtaatgcgcccaccaactgattcgccttga

SEQ ID NO: 37760 - DNA, 552 bp, Zea mays
  Peptide Sequence Number=SeqID_79539
atgtctcagcgatgcactcaggaagcaaaccagagacgcggcgtgggcgaggtaagggttccaccgccggcggtcgcgaggggcaatctcccccactctctgtttcgctcccgactctatctccactacggtggcggtcgcaagagtaggaaggcaagagggagaggtaagcccggtcctgctacctataagggcgcggacgtggccgggatgccacaacggatcgcgcgaaatccgcgcgcccgccatgctcggacgtacgttgacggagatggagctgacacaggggggtccaccagccagcggcagaaggcgcgagtccgcgcttcacgtgagggagacggagcaagcgcgggtggtgaccggccagtgggcccagtattacacaccgcctctcgtgcattagcacgaaccatcgagctacagtcggtaacaccgtcctactccaaaaagcacctcagaggcaaccccgggtgcgcggtcagacccaaaacaccgatagtaggcgacgggcccaaaaagatccatgtgaagaagctccagtggtcttga

SEQ ID NO: 37761 - DNA, 342 bp, Zea mays
  Peptide Sequence Number=SeqID_79540
atgccacaacggatcgcgcgaaatccgcgcgcccgccatgctcggacgtacgttgacggagatggagctgacacaggggggtccaccagccagcggcagaaggcgcgagtccgcgcttcacgtgagggagacggagcaagcgcgggtggtgaccggccagtgggcccagtattacacaccgcctctcgtgcattagcacgaaccatcgagctacagtcggtaacaccgtcctactccaaaaagcacctcagaggcaaccccgggtgcgcggtcagacccaaaacaccgatagtaggcgacgggcccaaaaagatccatgtgaagaagctccagtggtcttga

SEQ ID NO: 37762 - DNA, 234 bp, Zea mays
  Peptide Sequence Number=SeqID_79541
atggagctgacacaggggggtccaccagccagcggcagaaggcgcgagtccgcgcttcacgtattacacaccgcctctcgtgcattagcacgaaccatcgagctacagtcggtaacaccgtcctactccaaaaagcacctcagaggcaaccccgggtgcgcggtcagacccaaaacaccgatagtaggcgacgggcccaaaaagatccatgtgaagaagctccagtggtcttga

SEQ ID NO: 37763 - DNA, 351 bp, Zea mays
  Peptide Sequence Number=SeqID_79542
atggagactttgtgggccctttttgctttctcccccattggtacaaataatcgactcgaaggtcttcatttcaagtcttctcagaaatcacttttatcttccacttgtgctttttcagaagtcagcctggtcttagtttcgccttatgctttagagacttatacctcatcggctatatttggctttcatctgatatctgttggtatcttccttctgtctcgaggtattcattgtgtatactgtatggatgtgactgcttgggaaaatctattgaaaattcttggacatccccccaatgggtgtaggcaagggacagcttggtgcgctgagcgtttagcaaactgcttctga

SEQ ID NO: 37764 - DNA, 483 bp, Zea mays
  Peptide Sequence Number=SeqID_79543
atgaggcctttacaaagttccactagcttcagaaaacccgctacagtttctgagaagggcaatataggaatccctcgtttgaaaagccatcgcagcatgatggacccgagaacctcagtatacgtagctcctctaccgccattgcccctttcgggtagaacaatagcaaaactacccaaaagttcagtggtaaacaaggaacattattgggtaaagagaaaagtgatcaagggcagaacttgccttagacttgagatcctcagccgacccatcctcgctcagttccgatgtacgtggcccctgcgcgggaaggttcatgcttcagaggtcagcattttgcactgtagaaatttgaagttcattgggtgcaccgaagataatccactcgaaggtcttcatttcaagtcttctcagaaattacttttatcttccacatgtgctttttcagaggtgcacacaatgggtgtagcccccgagctttga

SEQ ID NO: 37765 - DNA, 336 bp, Zea mays
  Peptide Sequence Number=SeqID_79544
atgaggcctttacaaagttccactagcttcaaaaaaaccgctacggtttctgagaagggcaatataggaatccctcgtccgaaaagccatcacaacatggtcgaccttgccccttttggattgacaaatgagggtggagagatcgaaaccagtgagacagcaccaatttcggaggttatgagacgttctggattggttattcaagagggagaaggatcttttctagagaaagacagtgttaataccgaagctgaaaatgttgatgccgaagctggtagtgatgatgaggaagacgatggtatcttgagtccaagcaactcactccaaatgccatag

SEQ ID NO: 37766 - DNA, 1347 bp, Zea mays
  Peptide Sequence Number=SeqID_79545
atggaaggtccgccgcctgccgctctgttcttcgcgcgcaatccgccagcgcgcagacctttccatccgcgcccgcgccaaatccgccgcccctgcgccaaatccgccgccacgcccctgctcgccgatggaaggaccacaccgcccaagccgtcgagcaaatccgcgctgtgcaagtggtggcacagcctcgcgcccgccctgctcgccgccgcactggcggtcacggtggccgcgctgcggccgacgacggagcacgcggacgccaaggggcggccgcctctgtggttcggaccaggaggagtgttcaaagtggccctgttcgcggacctgcattatggcgaggacgcgtggacggactggggccccgcgcaggacgccgcgtccgaccgcgtcatggccgccgtcctcgacgccgagaacccaggtgcgtgcctgcgcacgctctccttttgctctcctggaccctttcccttttcctccgaaagaatcaaagaactaaaacggaactccctctctgcctcatggtctctgcggcggcggaatccgatccacacatcttcgctcagacttggtggtgtacgagcagccatagatgtgcagacatccctattggaagaagatctgaacaagaattatcaagaagacaaaagacaatatacacctcttgttaagaatggagaggtaggagatgatcctggaggcagcatacatggcgtacttcctgttatggtgcctgaaattggcatgaagtttcaggatgaggttgccaaggatccatcagggaaggacatcaatgcacttgagcagcacatcaagaacctcctaagcccttccaccccatttttcttcaatactctgtacgacccttaccgtgttggcgccgattttgttcgtgggtacccctacagccttcgtgagggtgtcccaactgttgtttctcacgggctttggctcaacattccagactacgatgcccctacccagcttcttaagccccttgagagaaacaccaggtatgtggatgctattcttacgatcccaaagggcaccctctttcctatgtgtggaatgaaccttgcatttgaccgtgagctcattggtcctgcaatcaacttccctctccctctcttccacctctcttccatctccccttgccctaggtgggattctggtgagcggttgccgccgatcgtcgagccccgaggtgatgatgaggataatgatggttttgattatggttatgactatgattatggtctctggtattatttccgtttgaaaaagagagaagatgaagtcgtggtggaggatttccaggagttccaagagtatgaggagttctag

SEQ ID NO: 37767 - DNA, 1213 bp, Zea mays
  Peptide Sequence Number=SeqID_79546
gaccacaccgcccaagccgtcgagcaaatccgcgctgtgcaagtggtggcacagcctcgcgcccgccctgctcgccgccgcactggcggtcacggtggccgcgctgcggccgacgacggagcacgcggacgccaaggggcggccgcctctgtggttcggaccaggaggagtgttcaaagtggccctgttcgcggacctgcattatggcgaggacgcgtggacggactggggccccgcgcaggacgccgcgtccgaccgcgtcatggccgccgtcctcgacgccgagaacccaggtgcgtgcctgcgcacgctctccttttgctctcctggaccctttcccttttcctccgaaagaatcaaagaactaaaacggaactccctctctgcctcatggtctctgcggcggcggaatccgatccacacatcttcgctcagacttggtggtgtacgagcagccatagatgtgcagacatccctattggaagaagatctgaacaagaattatcaagaagacaaaagacaatatacacctcttgttaagaatggagaggtaggagatgatcctggaggcagcatacatggcgtacttcctgttatggtgcctgaaattggcatgaagtttcaggatgaggttgccaaggatccatcagggaaggacatcaatgcacttgagcagcacatcaagaacctcctaagcccttccaccccatttttcttcaatactctgtacgacccttaccgtgttggcgccgattttgttcgtgggtacccctacagccttcgtgagggtgtcccaactgttgtttctcacgggctttggctcaacattccagactacgatgcccctacccagcttcttaagccccttgagagaaacaccaggtatgtggatgctattcttacgatcccaaagggcaccctctttcctatgtgtggaatgaaccttgcatttgaccgtgagctcattggtcctgcaatcaacttccctctccctctcttccacctctcttccatctccccttgccctaggtgggattctggtgagcggttgccgccgatcgtcgagccccgaggtgatgatgaggataatgatggttttgattatggttatgactatgattatggtctctggtattatttccgtttgaaaaagagagaagatgaagtcgtggtggaggatttccaggagttccaagagtatgaggagttctag

SEQ ID NO: 37768 - DNA, 582 bp, Zea mays
  Peptide Sequence Number=SeqID_79547
gttgccaaggatccatcagggaaggacatcaatgcacttgagcagcacatcaagaacctcctaagcccttccaccccatttttcttcaatactctgtacgacccttaccgtgttggcgccgattttgttcgtgggtacccctacagccttcgtgagggtgtcccaactgttgtttctcacgggctttggctcaacattccagactacgatgcccctacccagcttcttaagccccttgagagaaacaccaggtatgtggatgctattcttacgatcccaaagggcaccctctttcctatgtgtggaatgaaccttgcatttgaccgtgagctcattggtcctgcaatcaacttccctctccctctcttccacctctcttccatctccccttgccctaggtgggattctggtgagcggttgccgccgatcgtcgagccccgaggtgatgatgaggataatgatggttttgattatggttatgactatgattatggtctctggtattatttccgtttgaaaaagagagaagatgaagtcgtggtggaggatttccaggagttccaagagtatgaggagttctag

SEQ ID NO: 37769 - DNA, 228 bp, Zea mays
  Peptide Sequence Number=SeqID_79548
atggcctggcatggctgggcgctgctcctgcgctcctgcccacgcgcacgctgggagcgagcgaccgcggccgtagtgcctacctggccgagtgggccaagggagcggaccgggaagtggggcgccaggtgggccggagggtggagaggcgcgctgggctaccgagcaggccaagggaaactaggccacgcgaggaggagggggtgtgggccggctgagaggggctaa

SEQ ID NO: 37770 - DNA, 609 bp, Zea mays
  Peptide Sequence Number=SeqID_79549
tttcccttggcctgctcggcagcccagcgcgcctctccaccctctggcccacctggcgccccacttcccggtccgctcccttggcccactcggccaggcaggcactacggccgcggtcgctcgctcccagcgtgcgcgtgggcaggagcgcaggagcagcgcccagccatgccaggccatggacccacctgtcagctgagtgcagggccccacttgtcaagactatttttcctcaaccgcccactcttgtttctcctggtcgttcgctcccagcgccgcattttcttcgtgcctgggcgttcccaggtgccatgcgagtagattcggcaaactactccatcctcctctccctacctggccatcgtgcagcagccgtgttgagcctctgccgccctctctctggccactcgcgtgagcccctgctggtcggctgcccggacacgacggctatggccgagcccagcgcgaagtcatcctccaggactgagcccctgtgcagccactaccgccggcaggcctcggtgtccggtcgtgcttcgacaagtcacgcgcctccgacaaacctcgcgtccgtcgtgttcttgcctctacgtcaatcgacacgcatag

SEQ ID NO: 37771 - DNA, 279 bp, Zea mays
  Peptide Sequence Number=SeqID_79550
atggctatggccgagcccagcgcacagtcgtcctccaggactgagcccctgtgcagccactaccgccggcaggcctcggtgtccggtcgtgcttcgacaagtcacgcgcctccgacaaaccttgtgcccgtcgtgttcttgcctctacgtcaatcgacacgcataggtgagaatcctcttccctctctttctctgtattgcaatgagtgtgtccagatcggatcccagagatcctcagcgatggcgatctttggacccctctttgtggcttcgatctga

SEQ ID NO: 37772 - DNA, 675 bp, Zea mays
  Peptide Sequence Number=SeqID_79551
atggccacggggaggctgctacgcgctgtccttgggaggcagtcgcggcaaggaaatgctcgcggccatggagaaatggagctgcgcattttgtcgagcacctacggcgcgtcgatttggtggggctgcggggaaaaggagataggggcgctgcttcttgctgctcaagccatggagcagaagggggcgctgggaggggatgagctgctgttggaattcctgggcgccgtggacagggagctgggcgaccatggaagtcgaatagggagctgcacggctgggaaaacaggggcgcaagggggatctcgcgcagcgtccattgccgagggtgaagctcgcgcccatgggagggaagatggcagggagggcgctggagaacagggaagggcgccatggctgttgggggcgcctgctccatggaagtggagggaggaagaagacctgctcaccggcctaggggagaagggcatcgccgagcaggaccagggggacaacgaccggatgtggggaagaaggactttgctgctgcgccatggagcaaggaggagagagttgtgcgtgtgggagaggaggaagaagagagtggcggctggaaaaagtggaggggctccaaaactggttgtttctcgtgatcgattaactccgaattcggtgaacttccatgagaaagcctga

SEQ ID NO: 37773 - DNA, 606 bp, Zea mays
  Peptide Sequence Number=SeqID_79552
atgccggctacggatcgagagctcgcaggcacaggagggctcaacatcaccactggcatgcggcgagggggacacgacgtcacaacagctggtaggggccatgacaagaactaccccgaggtcgtcgtcgatgtcgtcgaggacgagcgcagggctgggcgaggactctccatcgctagtgttagcattgtgagcgttgggcatggcctcgccaccgcgaacctcgtaatggcaagggctgggcacggcctcgcaaccgcgagcactaggtgcggcaatggctccacgagtgcagggcatggtgtcgccacacaggaccaagctacagatcgtgtcgcagatgttatttccagacatgaaaagtgtgacaccccaggtgtctatttcgcgtcatgtcgggagattaatcctaatctcggatgctcagtaaaaatttctatttctcgatcgtgcctttctctgtttatcaggctttctcttggaagttcaccgaattcagagttaatcgatcgcgagaaacaaccgattttggagcctgttaaaaacttttattctcagcacgaatgcaaactcgaaaatcattctcgaattataaatctcatctga

SEQ ID NO: 37774 - DNA, 414 bp, Zea mays
  Peptide Sequence Number=SeqID_79553
atgagggcacggccgccgccgtcacctggctttggggtggacgaaggccccactgccaccattgtgttaattggatcatggagcttaactagagataataatgctaccccaagggtggaatgggacacccttggccaagtaattaggaaagctagggagagatcaccttacccgaaaggggcaagcggggaggcatcgctgctagagtatagggaggttctcgggtcgaactgctgcgatggcagttcagatgagggattcctatgcttccttcgtcctgaaaccgtagtgggtattcttgaactaggagaactttggaaaggcctcgtagtgttaccctgcctcgcttccttggtagaggtttatggggtccgtacaaccctgtggcaaatgggtaacacgacttgtgggtaa

SEQ ID NO: 37775 - DNA, 3069 bp, Zea mays
  Peptide Sequence Number=SeqID_79554
atggcgggggcggcatctccgcctcaggccctacccccggccccgaccctccaggcctccttcctctgctccctcgcgctcgccttcctccgggccggccgcctctccgctgcctctcacgtcgtctcctcactccccgctccgcctcccgcccgcctcctccgccgcctcatccccgcgctcgcctcctcgggcctcgtcgccgccgcctcccgcttccgccccgtcccaggtgacccgctcaccctcaactccatcatcctctcctactgcagcctccacgcgctccggcccgcgcttagcctgctccgttcctcctcggggccccagccgcaggtcgcggccgacaccgtcagctacaacatcttcctcgctggcctctccgagcagggacacgggaggctcgcgccgcccgtgctctccgagatgtgcaagcgcggcgtgccctgggacggggtcaccatgagcacggcgctcgtggggctgagcaggaccggacttgtcggcgaggccgcggcgttggcggagatgctggtccgaggccgaggaattgatggcttgggtgtggtgggatggaatgctctcattgacggctactgtaaagtccaggacatggccgcagcattggcggtggtggagaggatgactacacaagggctgtcgcttgatgtggtggggtacaataccctggttgccgggtttttctactccggcgatgctgatgctgcatgggaggtagcggagaggatgaaggcggatggggtggagccgagtgtggtcacacacacgacgctcattggggagtattgtaagatgaagcggatcgaggaggcgttcactctgtacgagggtatggtcaggtcgggtgtgctgcctgatgtggtcacccttagtgctcttgttgatggcctatgcagggatggccggttctcagaggcatatgcacttttcagggagatggacaagattggagtcgctccaaaccatgtgacatattgtacatttatcgattcattagcgaaagtgcagagggtgaacgagtcactgggtctattgggagagatggtctcaaggggcgtggccatggatctggtcatgtatacaactgtgatggaccgtttaggtaaggaagggaagattgaggaagctaaggatgtgcttcggcatgctttgtcggataatattactcccaattgtgtaacttacactgtactggtcgatgcacactgcagagctggcaatatcgatggcgcagagcagatgctgttgcaaatggaggagaaatccgttagccccaatgttgtcacattctcatcaatcctcaatggtcttgttaaaagaggatgcatcgccaaagcagctggctatatgaggaagatgaaggacagtggcattgctcctaatgttgttacttacggaacgcttatcgacggcttcttcaagtgccaggggcaagaagcagctcttgatgtgtaccgtgatatgttgcatgagggtgttgaggcaaacaactttattgttgactcactggtgaatggtttgagaaagaatgggaatatagaggaagctgaagcattatttaaagatatgggtgaacgtggtctgttgctagaccatgtcaactatgccaccttaatggatgggctttttaaaacaggaaacatgccagctgctcttaaggttggtcaggagttgatggagagaaatctgtcacctgatgctgttgtctataatgtgtttatcaattgcctttgcaggcttggcaagttcagtgaagcaaaatcttttttgaaagagatgagaaatacgggcttagaacctgatcaagcaacatataacactatgatttctgcacagtgtcgggaagggaatacctcaaaagctctaaagctactgaatgaaatgaagtggagttcaataaagcctaatctcatcacatatactacacttgttgtgggccttcttgaggctggggttgtggagaaggcaaaatatttactaaatgagatggcttctgctggattcactccaacccctctgacttatcgaagggtgctgcaagcatgttctggaagcaggagcccgtacgtgattttggaagttcatgaattgatgatgggtgctggtcttcatgctgatatcactgtctataatacactcgtgcatgttttgtgttgccatggaatgacaagaaaagctacaattgttttggatgaaatgttggggagaggaattgcaccagacactatcacattcaatgctctcattcttggccattgtaagagcagtcatctagataatgcatttgcaacgtatgctcagatgcttcatcaaggactctcaccaaatatagctacattcaacacacttctgggtggccttgagtccgctggaagaattggagaggcagatactgttatctgtgagatgaagaagatgggccttgaacccaataatctcacctatgatatactggtgacaggatatgcaaagaaaagcaacaaagttgaagcactgaggctgtattgtgagatggtgagtaaaggctttattcccaaagcaagcacatataattcactcataagtgactttgctaaagctggaatgatgaatcaagctaaagagttgttcagtgagatgaaaaggagaggagttttacatacgtcctcaacttatgatatccttttgaatggatggtcaaagcttagaaatggaactgagccactagcagcttctccctctccttccccgcatttctacttcttcctgcacgtcgttgtgcctaagagggtgggccgccgctgcttgagagggagcaagtgcgccgccgaggccgcgcccgtgcggagctgctccacccacgcgctgcgtgccgccagggagcaccttcgcaatggaaggggactcctcatggaagatcactcggttcctatgaagccaaaggtaccatgccccaaggatgatagcactgttgaagcccttcttcttgtctttgtggatctgattgatcactcctccccaccactccacaaaggaggcctccacaggactaggaataaggtgtcctag

SEQ ID NO: 37776 - DNA, 1350 bp, Zea mays
  Peptide Sequence Number=SeqID_79555
atggaagatcactcggttcttatgaagccaaaggcaccatgccccaaggatgatagcactgttgaagcccttcttcttgtctttgtggatctgattgatcactccttcccaccactccacaaaggaggcctccacaggactaggaataaggtatcagacaatgcgccactatatggtgtttgtctgcatgttcaggaaatagttcaaaaggcacctgttctaaggatgtggtggtgtgtctattctatgaacagcattattgcacaggagaggcttgacagaataacacagtttgctagtgaaattactctagctgagccagttcctcgtcctattaaagaacaagatggagtagacggtgattttgattcctcaaatgggattccatatattgactggacagaatatgctgtacctgtcaacagtatatcaggtctcatttcttcatccagtattccatcagaaagggacatgtcttcatatttgttcaggagctgggagcctaattcttctcaaagtatatctggtagtgagatttcagattctagttatgtaagagaagttgaggaggcaaggcatagtttccagcattatgaagattgtatagtagagaacttggaaccacgttgtgatagctttgggagagcaagttacatgtatgataatgggcatacttccccagatcttctgtccatgcattctcctgcctctagcagattagagcgtgcacaaagtgtggagtctttagaaagttcagtcaaaggtgcaacatcagatgaagaatatgaagtaaatgtgaagcatgaagtgattgttgatgatgaaaaagttgtaggatgggctaaggcacacaataacgaacctctacagattgtgtgtggttaccatgctcttcatctgccacctcgtggtggtgaacttgtattccgcccccttgaacatctccaacctgtgaaatactcccggcctggattacccttgttgggttttggagaggagattttggacaatgctttgactagggcagaaaaaaataagttattattttctcctgaaggtgctaggcttattcactggagttttgctggagaagcaaattgtggtaatatgcccaaatctgggtgttctgtcagcaattcttttgtctattataccgatgataaggccgttccagtggcaaagtctgttgcttccggatctctagttgagttgattaggtggtctgagcagcagtcctcaggtcctgagttcgactccacatgtctaagacccatcactgatcgtggtcgttctcacatcggctacgatgcctgtggggcagggatttcgggttttctcgacctgtgtaag

SEQ ID NO: 37777 - DNA, 2037 bp, Zea mays
  Peptide Sequence Number=SeqID_79556
atggaagatcactcggttcctatgaagccaaaggcaccatgccccaaggatgatagcactgttgaagcccttcttcttgtctttgtggatctgattgatcactccttcccaccactccacaaaggaggcctccacaggactaggaataaggtatcagacaatgcgccactatatggtgtttgtctgcatgttcaggaaatagttcaaaaggcacctgttctaaggatgtggtggtgtgtctattctatgaacagcattattgcacaggagaggcttgacagaataacacagtttgctagtgaaattactctagctgagccagttcctcgtcctattaaagaacaagatggagtagacggtgattttgattcctcaaatgggattccatatattgactggacagaatatgctgtacctgtcaacagtatatcaggtctcatttcttcatccagtattccatcagaaagggacatgtcttcatatttgttcaggagctgggagcctaattcttctcaaagtatatctggtagtgagatttcagattctagttatgtaagagaagttgaggaggcaaggcatagtttccagcattatgaagattgtatagtagagaacttggaaccacgttgtgatagctttgggagagcaagttacatgtatgataatgggcatacttccccagatcttctgtccatgcattctcctgcctctagcagattagagcgtgcacaaagtgtggagtctttagaaagttcagtcaaaggtgcaacatcagatgaagaatatgaagtaaatgtgaagcatgaagtgattgttgatgatgaaaaagttgtaggatgggctaaggcacacaataacgaacctctacagattgtgtgtggttaccatgctcttcatctgccacctcgtggtggtgaacttgtattccgcccccttgaacatctccaacctgtgaaatactcccggcctggattacccttgttgggttttggagaggagattttggacaatgctttgactagggcagaaaaaaataagttattattttctcctgaaggtgctaggcttattcactggagttttgctggagaagcaaattgtggtaatatgcccaaatctgggtgttctgtcagcaattcttttgtctattataccgatgataaggccgttccagtggcaaagtctgttgcttccggatctctagttgagttgattaggtggtctgagcagcagtcctcaggtcctgagttcgactccacatgtctaagacccatcactgatcgtggtcgttctcacatcggctacgatgcctgtggggcagggatttcgggttttctcgacctgtgtttctttgaccatagcaattgtgtccttaagctcggctacctcgacatcgtcacaaagggctacctcgacatcgtcaccttcttctccaatgacagcatgcgcggtgcatcacccgtgatggctgcaggggatattagcttgtcagtttctccaatctcactgtttgtagtgttccgctgtgactgtggggatgttaaaattcttccgaggaaattgattgattttcttgatgcccctgtacctttcattgctggtgtacaacataaaccccctgatatcaagatgaaaggatctagtcttgtcagggtcaatgtccagaaagatcaggcaagtccaaggcatgttcactgcctcgacttccacattacaaggagctcgtttctaatctcggtccacttcatgccagactatcgtgctgatgtagcttggaagttcttaaatataatgagaacctacttggaatcactttgctctgacctgcgctttcataccattacaaatgtacagtcaaataatgacagggtttctttgcttctgaaagacagtttcattgattcgttcccctcaaatgatagaccatttataaaggggattgggaagataaaaacaaggcacgtcgcgtggagtgcggaggatttcgattttgccgaagccacatcactaattagaagtgttctgaaaagtatctag

SEQ ID NO: 37778 - DNA, 663 bp, Zea mays
  Peptide Sequence Number=SeqID_79557
atgggcggacatggccacccttactcgccggcggagctgcagctgccggggttcgtgccgcagcggctgtcgcaggcccagatcgtcgcgcctttcgcgggcaccgccgtgttggccgtgctcggcgcctggctcgtctccgggagatgcggcggcggcggcagactatccaggaccgaccgcttgctcatgggctggtggctcttcaccgcgttgacccacctcgtcttcgagccacccttcctcttcaccccggacttcttcagcaaggagaacccaaactacttcgatgacctcttcaaggagtacagcaaaggtgactccagatacgccgctagggacaccgccatcgtcgcgcttgaagcgataaccgtcgggctcaaaggccctgcatcgctcctcgcagtctatgcgatcgcatcccggaagccgtacggccacatcctgcagttcgcagtctcgttaggccagctctacgggtgcctgttctacttcgtcaccgcgtacctggacggcttcagcttctgggcgagcccgttctacttctgggcgtatttcgtcggcaacaacagtttgtgggtggtcataccgacgctcgtcgccacgaggagctggaagaagatctcggcagcgtttcaggctgacaaggtcaagaccagatga

SEQ ID NO: 37779 - DNA, 1002 bp, Zea mays
  Peptide Sequence Number=SeqID_79558
atggggaccctccctggcgggttctttgccgagtgtcccacgtggcactcggcaaagatggaatttttgccgagtgctgcctggaagacactcggcaaagctaacttctttgccgccgccgtctccgtcacccggcgccgtaacgaccgcttttctttgccgagtgctgtctggcactcagcaaagagctttgccgagtgcccgagaaaaagcactcggcaaagaaggctttgccgatgcactgttcgccaagccttctttgccgagtgtaacactcgggcctcggcaaagcctttgccgagtgtttttaaggattcgccgaaacacgaggcggcggctatgggcggacatggccacccttactcgccggcggagctgcagctgccggggttcgtgccgcagcggctgtcgcaggcccagatcgtcgcgcctttcgcgggcaccgccgtgttggccgtgctcggcgcctggctcgtctccgggagatgcggcggcggcggcagactatccaggaccgaccgcttgctcatgggctggtggctcttcaccgcgttgacccacctcgtcttcgagccacccttcctcttcaccccggacttcttcagcaaggagaacccaaactacttcgatgacctcttcaaggagtacagcaaaggtgactccagatacgccgctagggacaccgccatcgtcgcgcttgaagcgataaccgtcgggctcaaaggccctgcatcgctcctcgcagtctatgcgatcgcatcccggaagccgtacggccacatcctgcagttcgcagtctcgttaggccagctctacgggtgcctgttctacttcgtcaccgcgtacctggacggcttcagcttctgggcgagcccgttctacttctgggcgtatttcgtcggcaacaacagtttgtgggtggtcataccgacgctcgtcgccacgaggagctggaagaagatctcggcagcgtttcaggctgacaaggtcaagaccagatga

SEQ ID NO: 37780 - DNA, 1005 bp, Zea mays
  Peptide Sequence Number=SeqID_79559
atggggaccctccctggcgggttctttgccgagtgtcccacgtggcactcggcaaagatggaatttttgccgagtgctgcctggaagacactcggcaaagctaacttctttgccgccgccgtctccgtcacccggcgccgtaacgaccgcttttctttgccgagtgctgtctggcactcagcaaagagctttgccgagtgcccgagaaaaagcactcggcaaagaaggctttgccgatgcactgttcgccaagccttctttgccgagtgtaacactcgggcctcggcaaagcctttgccgagtgtttttaaggattcgccgaaacacgaggcggcggctatgggcggacatggccacccttactcgccggcggagctgcagctgccggggttcgtgccgcagcggctgtcgcaggcccagatcgtcgcgcctttcgcgggcaccgccgtgttggccgtgctcggcgcctggctcgtctccggtacgagatgcggcggcggcggcagactatccaggaccgaccgcttgctcatgggctggtggctcttcaccgcgttgacccacctcgtcttcgagccacccttcctcttcaccccggacttcttcagcaaggagaacccaaactacttcgatgacctcttcaaggagtacagcaaaggtgactccagatacgccgctagggacaccgccatcgtcgcgcttgaagcgataaccgtcgggctcaaaggccctgcatcgctcctcgcagtctatgcgatcgcatcccggaagccgtacggccacatcctgcagttcgcagtctcgttaggccagctctacgggtgcctgttctacttcgtcaccgcgtacctggacggcttcagcttctgggcgagcccgttctacttctgggcgtatttcgtcggcaacaacagtttgtgggtggtcataccgacgctcgtcgccacgaggagctggaagaagatctcggcagcgtttcaggctgacaaggtcaagaccagatga

SEQ ID NO: 37781 - DNA, 825 bp, Zea mays
  Peptide Sequence Number=SeqID_79560
atgaatgtgaagacgcgcgtagcccagaggcgtcatgccaggttcctcccgttggcttatgtcgtgcgtagtatgtcacgtggcagcatcgggtctccgcctgagcggggagcaggagtgtatgcgaataggtccggatcccaccagaccagggctggacacgtgtcggctccggacccccggtcttggttaaggcccgggcgtccacaattcttagtggcgcacggttctgccatccctccgccctcccgcactccctccgtgctgcatcaacgcccgcaggttctgcctctccctatcactgcgccgcctgcccccaccgcacccctccccatcgccaggggcggcgccgcgccgcgccgcctcctcggcctcaccgacgactcatcctgctccgacctcctcccgttgttcccagtccccggcggccacaccgccttcctcctctgcgacctgccgccgccgtcgcctctgacgccgcggatccccgcctctgagagctgcctgtcgcccgctgccgtcagcagcgtcttcagcgagtttcgcgacccggcaccgtctcctacgacccctgacgacgctgtggcggcgcatgacgagcccagggatcttggcttcgacgatgacgacagtttcgacgccgattctattctgtgcagcgtcaaccagagcgcggccgagggcatcgatggcatcatgggtaagctctctatggaaaacaatgaggcgtccggatcaagctcaagcgttgactccaatatgctcggatctaagatgcacccctacctcaggaaccttatggtgctcgggctcagcttccggtag

SEQ ID NO: 37782 - DNA, 705 bp, Zea mays
  Peptide Sequence Number=SeqID_79561
atgggtctgggtcgagtctcttatggtttagagagggaggaagaggcttatatagtcatccccgaatcagatatctggcggcgtccacaattcttagtggcgcacggttctgccatccctccgccctcccgcactccctccgtgctgcatcaacgcccgcaggttctgcctctccctatcactgcgccgcctgcccccaccgcacccctccccatcgccaggggcggcgccgcgccgcgccgcctcctcggcctcaccgacgactcatcctgctccgacctcctcccgttgttcccagtccccggcggccacaccgccttcctcctctgcgacctgccgccgccgtcgcctctgacgccgcggatccccgcctctgagagctgcctgtcgcccgctgccgtcagcagcgtcttcagcgagtttcgcgacccggcaccgtctcctacgacccctgacgacgctgtggcggcgcatgacgagcccagggatcttggcttcgacgatgacgacagtttcgacgccgattctattctgtgcagcgtcaaccagagcgcggccgagggcatcgatggcatcatgggtaagctctctatggaaaacaatgaggcgtccggatcaagctcaagcgttgactccaatatgctcggatctaagatgcacccctacctcaggaaccttatggtgctcgggctcagcttccggtag

SEQ ID NO: 37783 - DNA, 603 bp, Zea mays
  Peptide Sequence Number=SeqID_79562
atggggcggatcctcggccaccttccatcgatggcttggctgccatggcatgtgatggggaagaggggtaggagatcctcggatccatgggtgagggctcggtcgccttccatcgacagggctgggttgtggcggagaggggcgaggaccaccgggatgtgcgagcgaggggaggacagaggcatagcgtctatggcatggacaagtattgcgggggcagggcggagggggcagctaggggcgtcggatggaggcagggccgcgtgggtacctgtcgtggtgggtgaggcgagcggaggcctcgcgagcgtggcggagaggggcgaggaccaccgcgagagcgtgccgagaccgggcaagcgggcgagatccaagcgcggtggaggcgtgcatcatgggcgagatccgcgggtgggttccatgcgcggacacagggaggtggagcacaggcagagggaaaggcggtgtggggaggagggtaggggatccgcggcaccttccatcggcggcaagaggaccttccatccgcgtggcataggcagaatcgtgcaccactcaattgtggacgcctacactctcctcttaaggagtagtagagaataa

SEQ ID NO: 37784 - DNA, 729 bp, Zea mays
  Peptide Sequence Number=SeqID_79563
atggcggagcagagtggaggacgacgcgatggggcggatcctcggccaccttccatcgatggcttggctgccatggcatgtgatggggaaggtaagggaggaggttgttccgtgcgagcgccatcacgagcggggggagcggacggatggcagcaatctcgagcagagggaggagcggatccgatgcagaggggtaggagatcctcggatccatgggtgagggctcggtcgccttccatcgacagggctgggttgtggcggagaggggcgaggaccaccgggatgtgcgagcgaggggaggacagaggcatagcgtctatggcatggacaagtattgcgggggcagggcggagggggcagctaggggcgtcggatggaggcagggccgcgtgggtacctgtcgtggtgggtgaggcgagcggaggcctcgcgagcgtggcggagaggggcgaggaccaccgcgagagcgtgccgagaccgggcaagcgggcgagatccaagcgcggtggaggcgtgcatcatgggcgagatccgcgggtgggttccatgcgcggacacagggaggtggagcacaggcagagggaaaggcggtgtggggaggagggtaggggatccgcggcaccttccatcggcggcaagaggaccttccatccgcgtggcataggcagaatcgtgcaccactcaattgtggacgcctacactctcctcttaaggagtagtagagaataa

SEQ ID NO: 37785 - DNA, 201 bp, Zea mays
  Peptide Sequence Number=SeqID_79564
atggggagtcatgatccccgggcaaaatgggaatcacggctcatgggtaaaccaaacggggcatttgctgagtacgttgatgtgcactcatccttgctttaccacaaaacaccaggttgtccacattgcaacctctactcaggagaagacgaagtcatggaaggagacttccaggagttccaagactacgacgagttctag

SEQ ID NO: 37786 - DNA, 243 bp, Zea mays
  Peptide Sequence Number=SeqID_79565
atggggtccacaggcacagtgcttgctctgccgaggctgagtgccgaggttctttcgttttgctttttgttagtcaccctcctgcggggagagccaaacggggcatttgctgagtacgttgatgtgtactcatccttgctttaccacaaaacactaggttgtccacattgtaaccactactcaggagaagacgaagccgtggaaggagacttccaggagttccaagactacgacgagttctag

SEQ ID NO: 37787 - DNA, 330 bp, Zea mays
  Peptide Sequence Number=SeqID_79566
atggttgacaaagccatccaggcaaactctggcgatagtgatgatgaaaaggtatgcatgttgaatcaagtgacaggatgtgtaggctcatattcttgtggcatgcaacttccatctgacctgatatcaaactgccccacaacggttcatccaatgaaggcaatttcttccgtgctattgatgcttatacattggtcttctctgtgttgtgtcttacctggaggggctgaaccatcattgtcggagaaagatcagaaggaaagggttcaaatgagcaaattcgtccgagggcttgtgctctcgacaatatttgatgatgataacttgtaa

SEQ ID NO: 37788 - DNA, 195 bp, Zea mays
  Peptide Sequence Number=SeqID_79567
atgccgatgtgtggcgtcgatttcaagtggacaggcagatggttgacaaagccatccaggcaaactctggcgatagtgatgatgaaaagggctgaaccatcattgtcggagaaagatcagaaggaaagggttcaaatgagcaaattcgtccgagggcttgtgctctcgacaatatttgatgatgataacttgtaa

SEQ ID NO: 37789 - DNA, 255 bp, Zea mays
  Peptide Sequence Number=SeqID_79568
atgggtttgggattcattgcagagaaggccaatattcatggcctccagatttttaataccaaggccagcatctcacaagtcacaagatggacaggcagatggttgacaaagccatccaggcaaactctggcgatagtgatgatgaaaagggctgaaccatcattgtcggagaaagatcagaaggaaagggttcaaaggagcaaattcgtccgagggcttgtgctctcgacaaaatttgatgatgataacttgtaa

SEQ ID NO: 37790 - DNA, 483 bp, Zea mays
  Peptide Sequence Number=SeqID_79569
atgttcgccgcgtcgctggtgtacctgatgcggcggtggcgggagaagatccgcgcctccacgccgctccacgtggtctccctcgccgagatcttcgccatctgcggcgtcgtggcatgtctcatctacctcctcagcttcttcgggatcgccttcgtgcagtccgtcgtctccaacagtgacgacgaggaggacttcatcatcgactcccgccacggacaggctagctggctaggcggccgagtccgttcggtgctgccttcggcccttaacaagagaacgaagaccatgccgatgtgtggcgtcgatttcaagtggacaggcagatggttgacaaagccatccaggcaaactctggcgatagtgatgatgaaaagggctgaaccatcattgtcggagaaagatcagaaggaaagggttcaaatgagcaaattcgtccgagggcttgtgctctcgacaatatttgatgatgataacttgtaa

SEQ ID NO: 37791 - DNA, 1062 bp, Zea mays
  Peptide Sequence Number=SeqID_79570
atgtggcagcctagtgattcagacaccaggctcgaaggaaatggcacaactctgggtctggggccaagactggggacgctcaaaaatgccaaattcacagagtggcagacaaatgcagctcgctttccgggcgttggctcagagcccacgatgatcactgatcagtccatcggggacgggctgggcctgggcgtcgccaccaccgctccgtgcgtgtggtgtttgggctcctggtccatttcagtcgctcagtgggacattgagagtgatgatgaggaccttgatgatgaggttgatgatggagctgaggatgaggacctttgcttatattataccgaatccttctacaaggaatgggaattcatggccaacatcagtggtccttgcaggtttattagcaacactcaagatggttcgtgcgtggtccggcccgaggagattccgaaggtcttggaaatcagcggcaagagcagcctcatcgacaacttcttcttctcctaccacggttccgccgccgcacgggagctccctacggcgccagcaggcgaccgacggcgaggggcagcaggtgcgtgtgcaggcgggggacgcgctgccgatccggcacacgaacctcatcttctcggcgctggggacgcgctgccgctgccgatccggcacacgaacctcatcttctcggtgatgttcgccgcgtcgctggtgtacctgatgcggcggtggcgggagaagatccgcgcctccacgccgctccacgtggtctccctcgccgagatcttcgccatctgcggcgtcgtggcatgtctcatctacctcctcagcttcttcgggatcgccttcgtgcagtccgtcgtctccaacagtgacgacgaggaggacttcatcatcgactcccgccacggacaggctagctggctaggcggccgagtccgttcggtgctgccgtgcgggagcgcttgctgtctccgattccgtcccgtttgctttcgtggactggttcggaaatcggaaggcgttgcgatgagatgctgcggaggcggcgagaagctcactcctcggcgatga

SEQ ID NO: 37792 - DNA, 258 bp, Zea mays
  Peptide Sequence Number=SeqID_79571
atggggagaagcaagccgggctgcggcccccgcctctccctcagcttcaaggatgcttaccatccttgctggggcggagagcaagttaaaggaacccctcggccgctcttcgacgagccgaagccaggggtagcggtgtcagcacagacagaggcagagttggctcaaaaagaagacttggtcggccagagcctggccgggtcgtccactggcgagactgacgccagaatgagttgccgaggcctcgggccgggctga

SEQ ID NO: 37793 - DNA, 624 bp, Zea mays
  Peptide Sequence Number=SeqID_79572
atgaacaaaagaccggcattcaaggtgccattacaaacggaactccggttccgtccccgcgggtatgaacaacctccacaccggggagcctgcggagcgacaagttccgggcgactcgccagcgacctctgcagcagcagctatggtcccaagacggacgcggccaccggaaggctctcgttcgcgtccccactcaagggacgcgaaccagacatcaaagccaaagagccgggggtcggcctcaccgacaacggcgtccgcctctccaccaacgccgcactggcaaacgcgggccgctccaaagcgcaccagcaggtcctcgctcccgtcctcgccacaaaaacaaggaagagggcggaatgttgcatcctagctgggcagcaacagttcgccttccccggcatggctggaggacgcctcctccacagagctgggggatggttccaccaccagaagctggaagaggaggtggccagtcgacccgtgcgagaggtagagccccggttcgcctcgccctccatcccagcaaggatggtaagcatccttgaagctgagggaggggcgggggccgcagcccggcttgcctctccccatccatgggctggtggtcaccgtcctaggtga

SEQ ID NO: 37794 - DNA, 789 bp, Zea mays
  Peptide Sequence Number=SeqID_79573
atgaccgtgagcacggctagtataccagttttacactctgcagaggttgcacatctttacccacaagtcatgttacccatctgccaagggatcacgacttcccatacacctctaccgaggaggcgaggcaaggtaacactacgaggcctttacaaagttccactagcttcagaaaacccgctacagtttataggaagctccaatgcagggttcttacctgaccgccatcgcagcaaaatcaaccaaggacctccctacactgaccactcccctactgctcttgcccctttcgggtgccaaaggttcatctacaactatactaattcgactgtccggaataccgtagattattccggacaggagaagctttttggaaaaacaggccaagcgcggaccgtccgggcctttgcggcggaccgtccgcgacacgaggatgcccctcggacagaaccaatgcaaaaatacaagtatccactacagactgtccggaggaaaagcaaagaccgtctgagcccttgcgcggaccgtccggcctcaggcgcggaccgtccgccgttgatctataggggcggaccgtccggacctggcacgcggaccgtccgcgctcagcagaatggagcaacggctaggaggtggttggtggctataaatacaaccccaaccacctccattcacttcatccaagcattccaaccttcaacattcaatacaagagctagcaatccattccaagacacattcaaagcctccatctctccaagtttcactattgaggaaagagatcattag

SEQ ID NO: 37795 - DNA, 182 bp, Zea mays
  Peptide Sequence Number=SeqID_79574
atggaggctttgaatgtgtcttggaatggattgctagctcttgtattgaatgttgaaggttggaatgcttggatgaagctcgggtgctggatccggggctacctcctgagcagctccttgctccggcacgaggatgtactctccgtcagcaaggttacagtctatcgaattgcaatgaacat

SEQ ID NO: 37796 - DNA, 513 bp, Zea mays
  Peptide Sequence Number=SeqID_79575
atgctgccactaccaccatttcctctgttcccagtgttcattttttttctgaatcctttgtttcagggtctaagggaaaggttttcacattgcaactcaaacatggacatgggccagctaaatcataatccaacagggcaacaagatagcttgctcactgtctggttacgaagggtgcagggtgttctgcatgacgatcaaactgaattgtgtctaatgcatagaatcaaggcagccatcatccgtgggagttccttcgacgcagactgcacaatcataggtattcatccctcctcgaacaacctacctgcaccacatgactctgagagaatttctaaccaaggtagtgcagcagcaccagaagtgtcagtcctaaaaacgagaatacaaccaaatgatgaagctcaacaggaagtgcagactcggtctattcctgatccaagggaggttgcaggatgtctgttgcatatgttgctccaacaaagtcgtcctatgctatgtctcatcctgtga

SEQ ID NO: 37797 - DNA, 474 bp, Zea mays
  Peptide Sequence Number=SeqID_79576
atgccacgtggtcagggtcctcgcgctccgtcgccaaactttggcacgctgcgcaatcgggatcgcctcagcaagaagcagcagaagaaggacgccaggaaggcggagaaggctgagacagtggcgcagccccaacaacagcatctgttcaacaccgaagacctattcgcggccaactatggtgatgttgccgtcgaggagattcagttaaaggccatctccgaccgcttgtggtcccaaatcagcgacctcgacgactccgctgcgggctgcaagcaggggcggacccagcgggtggtttatgtttctgatgcaattcaaccactatcattcggcaattctagatatgcaagggtgcaagaactgtgctacgtgtgttctaaggtcttccagattgaagaagatttcagacaggcaagagtttatgaccaagtaggcaacacagaactgattcaagaagccattaatttgtga

SEQ ID NO: 37798 - DNA, 756 bp, Zea mays
  Peptide Sequence Number=SeqID_79577
atggcatggtctaaggaaaaggttttcacattgcaactcaaacatggacgcgggccaggggcgccgcacgatcgggatcgcctcagcaagaagcagcagaagaaggacgccaggaaggcggagaaggctgagacggtggcgcagccccagcagcagcatctgttcaacaccgaagacctattcgcggccaactatggtgatgccaccatcgagctaaatcataatccaacagggcaacaagatagcctgctcactgtctggttacgaagggtgcagggtgttctgcatgacaatcaaactgaattgtatctaatgcatagaatcaaggcagccatcatccatgggagttccttcgacacagactgcacaatcataggtattcatccctcctcgaacaacctacctgcaccacatgactctgagagaatttctaaccaaggtagtgcagcagcaccagaagtgtcagtcctaaaaacgagaatacaaccaaatgatgaagctcaacaggaagtgcagactcggtctattcctgatccaagggaggttgcaggatgtctgttgcatatgttgctccaacaaagtcgtcctatgctatgtctcatccttctttccaccgtgtatcagcttgtgactcaatatggaaggataccagtataccacacattctgtggaggattctggaattattttagcttggatttgcaaaagatcaagttgaggaagtgcctagcatcagagtcgatggaaggtgaataa

SEQ ID NO: 37799 - DNA, 372 bp, Zea mays
  Peptide Sequence Number=SeqID_79578
atgacgagccacgcggacgacagcacgacacgcccaacagccggagccgaaggccaagaggatgaagacgttcaacatcaccggcccttcatcacggggttcgccatcactggcttcatcgtcatcaagatgacgactaacttcaccgaggaggacctcaagaactccaaaaaagttatggttgggagagatccttttgtttttaggcaactcgaatgggcgccgcgcgatcgggatcgcctcagcaagaagcagcagaagaaggatgccaggaaggcggagaaggctgagacggtggcgcagccccagcaacagcatctgttcaacaccgaagacctattcgcggccaactatggtgatgtcaccgtcgag

SEQ ID NO: 37800 - DNA, 411 bp, Zea mays
  Peptide Sequence Number=SeqID_79579
atgtcatgcgttggtgaggcaccaactcccatccttctcggcgctctcctaggaagactacagccagacttatcacttatcagtcctcacagtgttgctatttgtattttgtttctgaaaatttttacgggttgcttgcctaactgtttatgtgcatctgttcgatctgtggcttctcggcgctctcccaggcacctaggcaccagcccgaggatgacgagccacgcggacgacagcacgacacgcccaacagccggagccgaaggccaagaggatgaagacgttcaacatcaccggcccttcatcacggggttcgccatcactggcttcatcgtcatcaagatgacgactaacttcaccgaggaggacctcaagaactccaagttcatccaggagcacaagagacgctga

SEQ ID NO: 37801 - DNA, 3582 bp, Zea mays
  Peptide Sequence Number=SeqID_79580
atgcaaaagcagattcattcagctggaaaacgtggatttttttctaaaaagtctgttgggccacaaactcgcgagaagttcactttggaagatatgctgtgctttcaaaaggattctattccaacttcattactaaagataagcaatgaccttgtaagccgctcgattaagttgttccatgtcatactaaagtacatgggcatcgattcaccagcaataattagtttggaggagagaatagaatttgttgagaagctctacaagcatacgttaaagcgttctgaacttcgagatgaactctttgcacagatttcaaaacaaacacgtaacaatcctgataggggttggtcaataagagcttgggagcttatgtacctgtgtgcatcatccatgccaccaagcaaagatattggggcatacttgtctgagtatattcactttgttgcccatggagccacaactgatgctgatgttcgagttctagcactgaacacactaaatgcattaaaacgatcagtcaaggcgggtcctaggattacaattcctgcatgggaggaaatagaagctctcttaacaagccggaagcttacaacaattgtatttttcttggatgaaacatttgaagagatcacctatgacatggcaacaactgttgctgatgctgttgaggaacttgctggcattatcaaactttcagtgtattctagcttcagcctatttgaatgtcggaaggttgttaatggatcgaagtcttcagagattggcaatgaggaatacattggattagatgataacaaatatattggtgacttgctatctgaattcaaatcagctaaggatcgcaacaaaggagaaattcttcattgcaaactggtattcaagaaacgtctcttccgtgagtcggatgaggctgtgactgatccaatgtttgttcagctatcatatgtccagttgcaacatgattacattttgggaaactatcctgtcggcagggatgatgcttcacaactctctgctcttcagatcttggttgagattggattcattgataatcctgagtcctgtgttgaatggatatcacttttagagagatttcttcctagacaagtggcgattaccagagcaaagcgagactgggagcttgacatcatttcacgctttcagttaatggaacacttatcaaaggacgatgcacggcaacaatttctcagaatcttaaggactcttccatatgggaactctgttttcttcagtgttcggaagattgatgatccaataggattgctacctggaaaaattattttggggatcaacaaacgaggggttcactttttccgcccggttcccaaggaatatcttcattctgcagaactaagagacatcatgcaatttggtagcagcaatactgctgtcttctttaaaatgcgggttgctggtgttcttcatatctttcaatttgaaacaaagcagggcgaggaaatatgtgtagcacttcaaacacatataaatgatgtcatgctccgcagatattcaaaagcacgctctggtaatagtgttacatcacaaaatgatgttaaccaagcatataagccaccaaatatcgaaatgtttgaaaaacgtgtccaagaactgacaaaaacagccgaggattctcagaagaaagcagatcagttgcgagaagatttacagttgaagacaaaacaagaaacagagatgcaagaagagttggaagggctaagagataccttgcaatctgaacgacaaagttccaaagacataaaaaatgagcttgataagctaaaatctctatgtgatgagaaagaatctgctttgcaggctgccctgatggaaaaaagtagacttgaaaccagattaactagtggccagggccgtgagagagatacattgacaactgtaggcagcatcaataatgacattgagatgcttgccaagcttgaggaggagttgaaatcataccaaaaagagcttgatgcatcaaaagaggtctcaaagaagctaatgttggaaaagaatattcttgaccagaaagttcaaaggcttgaaagaatgaaaaatgaagagaaaagcgcaatggaaaaggtttatgcggatgaatgctgtaaactgaaatctcagattgctgaattggagcagaaattggaagttgctacacgatccttaaatgtggctgaatcaaatcttgctgtaagaaatgctgaggttgatagcttgcaaaatagtctgaaagaacttgatgagctaagagagttcaaagcggatgttgacagaaagaatcaacagactgttgagattcttaaaaggcaaggagcacaattggtggaacttgagaatctttataagcaagaacaggttctacgaaagcgttactataatacaattgaagatatgaaaggaaaaataagagttttttgtcgcttgcgccctctaagcgacaaggaactttcttttgaggagaaaaatatagtttgcagtcctgatgaatttacaatttcacatccatggaaagatgaaaagtcaaagcaacatatatatgatcgtgtttttgatgcaaacacaagtcaagaagaagtctttgaggatactaagtatctggtacaatcagctgttgatggatataatgtctgtatatttgcgtatggccaaactggttctggaaagactttcactatttatggttcagaaaacaatcctggtcttactccaagggccacatctgaactttttagggtgataaagcgcgatggaaacaaatattcattttctttgaaggcatatatggtggagctttatcaagataatcttgtggacctgttattgcccagaaatgcaaagcagctgaagttagagataaaaaaagattccaagggtgttgttaccgttgaaaatgtaacagttgtgagcatttcaagtattgaggaactgagggctataatctcaagaggttctgagaggaggcacactgctggaacgaatatgaatgatgagagttcaaggtctcatttaattctttcaatcattattgaaagtacaaatctccaaactcaatcatatgcaagaggcaagggaagaattgacagtgtttctctgtttgaacagctaagttttgtggaccttgctggttctgagagggtgaaaaaatcaggttcagcaggaaagcaattgaaagaagcgcaaagtataaataaatctctttctgctttggctgatgttattggtgctttatcttctgatggacaacatataccttaccggaaccataagttaacaatgcttatgagtgattctctcggaggcaatgcgaagaccttgatgtttgtgaatgtttcaccagctgagtctaacttggaggagacttacaactcgctaatgtatgcttcacgggttcgttgcattgttaatgatacgagcaagcatgttgccccaaaagaaatcatgaggttgaagaagttgatcgcctactggaaggagcaagcaggcaagcggagtgatgaggacgaactagaggagatacaggaagagaggatctcaaaagagagatcagacaatcgcatgactagctga

SEQ ID NO: 37802 - DNA, 303 bp, Zea mays
  Peptide Sequence Number=SeqID_79581
atgtcaaatgctatagatgtaaaaatcaaagagaagccaagactcagctcagtctggcacaccggactgtccggtggtgcactggacagtgtctggtgcgccaggctgaactctgccgcggtttttgttgtaacccaactcaacatagtgaaaggctctatctgtcatactgacagatctgagcaaacagaggaaggagttgaaacagactccaagcccaggatattcttaagacaggaacttcaattccgcggcaacctactcgaagggttcttcactccactgcgatccttcttcgagtag

SEQ ID NO: 37803 - DNA, 1270 bp, Zea mays
  Peptide Sequence Number=SeqID_79582
ccacttggagaggctgcaccaccgcctgcatgaggagcaggaacatcgacggcaggagcaggaacaacagggctcttccttctcgctccagcaggagatagagtcagtgaggagctgctcccccgtgcttcccctggaggcgccccctgcaccaccactgggcgccccagcccctagagtagctgctggaggagacccagacgacggaggtggcgacgacagctcgagccacgacgccgacttccctgctggccaggagccggaaggatgggttgctcgacccatcactctcgtcgttgctcacgggtgtcacttccacaatgcgctcgacaccctgctacgtcgggcacttaaccgcgtacttggtctatcgagtatcgctgtgtggtctaccagcatagtcgcggggtctactcggaccgctgggagctcggagacaactgatcaagccaaggacagaggcaagaagagcttcgaggtaccaagtgcacgggagaaggtcaaggaggctgaggaacccaaagccaagggtgaagaagaaggcttgcaaagtcaagggttgaactccggtgaacaggccgctctcgggagaagtctggcgacgtacggctataattcaccggactgtccggtggtgcaccggactgtccgccgtggttctgttgtaacccaactcaacatagtgaaaggctctatctgtcatactgacagatctgagcaaacggaggaaggagttgaaatagactccaagcccaggatctccgattccgctgcaacctactcgaagagtcttctcactccactgcgtattaagtcttcgagtagaatcctgttcccgggtcaaagggaactttcagagcgggactcagctgaggcggccatgcaagatgtcgcacggcgtgcgcttttgcactactgctcggttctcgatggggtagctgacggtctcgacctgaagtattacccccgccgtccatctggcagcacaggaggcgtgattgtctcacctgttggtgacgacaatcctaggttgagcagcacagtcaacctagccgccgtgctaaacacggagctggaccatgcgctagacgagctgagtagggctcgtgctgagatctccctgctgcgggctgagcgcgcggagcgtcgtcacctggacgatggttcccccactcccgtcgggactcagcacccgtaccgctcacctcggcgtggacaccggtcttatggcaaccccgactgcaagaccaagataaatttagaaccatag

SEQ ID NO: 37804 - DNA, 249 bp, Zea mays
  Peptide Sequence Number=SeqID_79583
atgacgagcagagagcttcgcgcgcgcaggaagctgggagcttgtgcaaggctgagcagagggcacatctacacgcgcaagcagggagaagggcaccgcggcaagcgcaggggagcagcgcggtcaaccatggaagtcggggcaagccaggagctaggagggagatggggctgggcgcgcacggccaccagagcacggtgcaaggaggctgagcggcacatcatcacggccgggacaacgacgccatga

SEQ ID NO: 37805 - DNA, 213 bp, Zea mays
  Peptide Sequence Number=SeqID_79584
atgacgagcagagagcttcgcgcgcgcaggaagctgggagcttgtgcaaggctgagcagagggcacatctacacgcgcaagcagggagaaagggcaccgcggcaagcgcaggggagcagcgcggtcaaccatggaagtcggggcaagccaggagctaggagggagatggggctgggcgcgcacggccaccagagcacggtgcaaggaggctga

SEQ ID NO: 37806 - DNA, 1641 bp, Zea mays
  Peptide Sequence Number=SeqID_79585
atgcatgtggtcgatgacttcctgaagtgccggatcatgccgttgcagaggaggccgcgcctgtgctgttggttcactggcccgaatgatattggcaggatccagcgtgggccggggctgcgaacggcgatcctggccacgctgccgaccctcgacgacagcggcgtggcggtttgtcagaccggcggtcgggaccccttccgtgggatccagatccctggtgtaccggctgggggtctccagcccgccggcacggccccttgtgccggtcctgccgcggcccccagccccttggaaaagggcaaaggggctgcaagcagcgtctccgccccaggtggcaccggggggtcggaggaagagaggcgacgccggctgcgtcgcgccgacgggtcaattgtttcggacacccctagaagcgtcagaggactgctggtggggccgaggaggccggctcccaggcccagggcgcgtagaggcgcgtcaatcctccgggcttcctcctccaccgctcctaaggccacaccccctccaccaggcaccaggcccaccgatgggtccggctctcagcagcaggaatctgctgagagtggtgccggcggtccgcctccagccgctgctcagacagcgccagcggcttctcatgccccagccgggggtccggcggcagtggcgccagcatcaagcggcgtcgcagcaacagaggaggtccctgctaggggatccgcgcctgcctccgacatcgcacccactcctgacgttgggggtgacaccggagccgcgtccagctccaaccccacacctgcaccggaggagatggaggtggtgttcgggcgacggctccggtcaggtgccgaggaagaagctgcgccaatccccctcccccgcatgttgtcccgcgcccaccagctggaggagctcactaggacggtgtcccgccaattcatctccgagcggtcccaacttgagtgggaccataaggagtacaataaggacctccagaaggtgtatgctagggagctggaggcgcaccagagggagaagatggtggccaggagggaggaggtcgtgtctcagcgggaggccctcgtgacagagttccgggccaagctgagtgccctggaccagatcctggaagagcagcgggaagaaatgctgacccggcgaggcgagatgctggccgagcacgagctcgaggcagagaagaaagaaaaagagctggaggagcggatccgacagttccaggcgacgcaggcggcactgggcctccaggcggtggaggccaccaggaaggccctcgaggatcttcaggcggagcaccacaccgagatccagcgcatcgctgcatgggccggtaaggcaagctcgacactggtgccgctagggatgagccctatcccggtgttggagctgccgacgtctatctctgacgcgctcccgatgctggactccaccgccgatcgcctccgacgcctagaccagattcttggcgcccgcctggaggcagaaggtggcaagctctgccgggtgccggtgatcgctggtccggtggccgacactgaagacgccgcccgggagggcatacaagatgccatggagctggtggtcgagcgcttccagcgggatcctgctgatgacgagtag

SEQ ID NO: 37807 - DNA, 1092 bp, Zea mays
  Peptide Sequence Number=SeqID_79586
atgggtccggctctcagcagcaggaatctgctgagagtggtgccggcggtccgcctccagccgctgctcagacagcgccagcggcttctcatgcccccagccgggggtccggcggcagtggcgccagcatcaagcggcgtcgcagcaacagaggaggtccctgctaggggatccgcgcctgcctccgacatcgcacccactcctgacgttgggggtgacaccggagccgcgtccagctccaaccccacacctgcaccggaggagatggaggtggtgttcgggcgacggctccggtcaggtgccgaggaagaagctgcgccaatccccctcccccgcatgttgtcccgcgcccaccagctggaggagctcactaggacggtgtcccgccaattcatctccgagcggtcccaacttgagtgggaccataaggagtacaataaggacctccagaaggtgtatgctagggagctggaggcgcaccagagggagaagatggtggccaggagggaggaggtcgtgtctcagcgggaggccctcgtgacagagttccgggccaagctgagtgccctggaccagatcctggaagagcagcgggaagaaatgctgacccggcgaggcgagatgctggccgagcacgagctcgaggcagagaagaaagaaaaagagctggaggagcggatccgacagttccaggcgacgcaggcggcactgggcctccaggcggtggaggccaccaggaaggccctcgaggatcttcaggcggagcaccacaccgagatccagcgcatcgctgcatgggccggtaaggcaagctcgacactggtgccgctagggatgagccctatcccggtgttggagctgccgacgtctatctctgacgcgctcccgatgctggactccaccgccgatcgcctccgacgcctagaccagattcttggcgcccgcctggaggcagaaggtggcaagctctgccgggtgccggtgatcgctggtccggtggccgacactgaagacgccgcccgggagggcatacaagatgccatggagctggtggtcgagcgcttccagcgggatcctgctgatgacgagtag

SEQ ID NO: 37808 - DNA, 309 bp, Zea mays
  Peptide Sequence Number=SeqID_79587
atgaggcaagaaatggttgctgcccttgctgttgtagcacaacagagcaaccgtgaaagcaccactccaatcgatccttcttccattgtccctactaaacctcctgaattcatcccagctgattctcctgcacctgcaccaagtagtgcaaacaacgttcgtacaccagacacaaacaataagaaagacaatatgccagcaaactatattagctcttacactctaaggaatgctgtgacaagacgtgtgcaggcaaggggcaacaaaagaagcgaatgtgtatggaatgcaaatgttcttgtattatga

SEQ ID NO: 37809 - DNA, 528 bp, Zea mays
  Peptide Sequence Number=SeqID_79588
atggagtttttaaggacagaagacatttcatatacgattgaaattataaatggtaacaattatatggactcgcaagtcgcggcggtggcggcacgcagggagaagagagatgtggggagggagaaggagagctggggggggaaggagaaggagaaccaggtggctgaggggatcgtacggctgagagggaagttgcagtggctatctagatggaggctgagggaggtagagtctgtctcctgccactgcagggtagatggaggtcttaaaaccgttgtaagtgctaggaagtttgtccccggtgcaaagctgtgcatgcaacctgatatcataccaaacaagcgcaagtcaaggagctcacgcaaggagagatccaaaactcaatcaccactgctgcctgggcttcctgatgaactggctatttcctgtctcatgcgggctgctcggatcgaacacccaaatatgcggttagtctgtaaacgatggaacccgacttttgtctggaaattattattactccttgcgtaa

SEQ ID NO: 37810 - DNA, 1638 bp, Zea mays
  Peptide Sequence Number=SeqID_79589
atgccgcgtgcgccgtggcaagtggttcggagttggtcggtgtatgggtccacgctgtcagtgggccagatcattgtgggcaacgtggagcgaggaccgaaagatgaaggtcacccggggcccacaggaccccacctgtcagggcgttgtgtcagggggaaaccttcgtggagactgaagaggaaggccaagttcgagggtgttcctcgtccactcttctcgatccgcaatgcgtgcggccgccggagacgccccgccgcggcgtgcgggggggagaagagagatgtggggagggagaaggagagctggggggggaaggagaaggagaaccaggtggctgaggggatcgtacggctgagagggaagttgcagtggctatctagatggaggctgagggaggtagagtctgtctcctgccactgcagggtagatggaggtcttaaaaccgttgtaagtgctaggaagtttgtccccggtgcaaagctgtgcatgcaacctgatatcataccaaacaagcgcaagtcaaggagctcacgcaaggagagatccaaaactcaatcaccactgctgcctgggcttcctgatgaactggctatttcctgtctcatgcgggctgctcggatcgaacacccaaatatgcggttagtctgtaaacgatggaaccgacttttgtctggaaattattattactccttgcgtaagaaattcggcatggcagaagaatggatctatgtcttcaaaagggaccgtgatcagaagctatcttggtatgcgtttgatcctgtaaaccagctctggaagtcattgcctccagttccaccagagtattctgaagctgttggttttggtagtgctgttctcaacggatgctatctgtacttatttggcggcaaagacccagtacatggatctatgaggcgcgttgtattttacaatgctcggataaacaaatggctacgagctccagatatgctgcaaaaacggcacttctttggttcttgtgtcataaacaactgcctttatgttgctggtggagagtgtgtagggatacagagaattctaagatccgctgaggtatatgatccgaacaggaatagatggtctagcattgctgaaatgagcacaggaatggtgccctctattggagtagtacatgatggcaagtggtatctaaaaggtctaaattctcatcgccaggtcgtgagtgaggtctatcttccagcatccaaaatgtggtcagccaccggtaatgaaatggtaacgggctggcggaatccaagcatttccctcaatgggcatctttattctgctgattgtcgtgatggctgtaagcttcgagtttataatagagagatgggatcatggacaaggttcattgacaccagacaccatatgggaagctcacggtctctcgaagccgcagcctttgtctcccttaatgggaagctctgcatcatccgtaacaatatgagtatcactattgttgatatattggacccaacaacagctactgaggtcgacagtgcgcgcatgtgggaggcttttgctcgaaaggggcagcacagatcatcattcatggcaaacctatggttaatcatcacaggtcgtaatctgaagacagacattatgcattgtcag

SEQ ID NO: 37811 - DNA, 600 bp, Zea mays
  Peptide Sequence Number=SeqID_79590
atggatcccatgaacgtagacaacggcggctgcggcggccttgacgcgcagatcgagcagctgatgcagtgccgcccgctcgccgagcaggagggcacgcttagggtttctcgccttctcttcggtgcactgtttggttggaagtgtgatccggtgttccggtggtttgggggatatttgaacctcttttggtatctggttaaggccctgtgcgagaaggccaaggagatattgatggaggaaagcaacgttcagcctgtcaagagtccagttacaatatgtggtgatatacatggacaattccatgatcttgtagagcttttccgaattggtgggaagtgtccagacaccaattacttatttatgggggattatgtagatcgtggctactattctgttgagactgtcactctgctagtagcactaaaagtgaggtacccacatcgaattacaatccttcgtggaaaccatgagagtcggcagatcacacaggtgtatggattctatgacgaatgtctacgcaagtatggcaatgcaaatgtatggaagacatttacggatctttttgattattttcctctgacagctctggcaacatag

SEQ ID NO: 37812 - DNA, 1401 bp, Zea mays
  Peptide Sequence Number=SeqID_79591
atggatcccatgaacgtagacaacggcggctgcggcggccttgacgcgcagatcgagcagctgatgcagtgccgcccgctcgccgagcaggagggcacgcttagggtttctcgccttctcttcggtgcactgtttggttggaagtgtgatccggtgttccggtggtttgggggatatttgaacctcttttggtatctggttaaggccctgtgcgagaaggccaaggagatattgatggaggaaagcaacgttcagcctgtcaagagtccagttacaatatgtggtgatatacatggacaattccatgatcttgtagagcttttccgaattggtgggaagtgtccagacaccaattacttatttatgggggattatgtagatcgtggctactattctgttgagactgtcactctgctagtagcactaaaagtgaggtacccacatcgaattacaatccttcgtggaaaccatgagagtcggcagatcacacaggtgtatggattctatgacgaatgtctacgcaagtatggcaatgcaaatgtatggaagacatttacggatctttttgattattttcctctgacagctctggtggaatctgagattttctgccttcatggtggcttatccccatcaattgaaaatcttgatagtgtgcgcagcttagatcgagtccaagaggttcctcatgagggacctatgtgcgatcttttatggtcagatccggacgatcgatgtggttggggcatatccccacgtggtgctggctacacttttggccaggacatatcggagcagtttaatcacacaaacaatctcaaacttgtagctcgggctcatcaattagttatggagggatataactgggctcatgaacagaaggttgtcaccatattcagtgctccaaactattgctaccgatgcggcaatatggcatccattttggaagttgacgactgcaatagtcacacattcatacagggccagacagaaataacaggggaataccaaagcactatgcgaaacttgaggtcctcattgccattggtcagtgcaagagatgtctgcaatcctgagagaaagcaattgtgccaagccatgcccgagtttcagccttttcagaggccgaagagggtccgtatcgtccgtagatcggaaatccaatggctagagcggtttaatgcgggggagaggtttcagaccgtagatcttggatcggtcggtcgcctgcgcatatcggttggggcaactgtggatctaatcagaaccatcggttttgaatctgacggctcatatccaccaataccccttcgcgcggctcaattgcaaacgaaccctggtttatcttcaaatcaacccaccacctaccctctcataaagataacagcaaataggtcctga

SEQ ID NO: 37813 - DNA, 330 bp, Zea mays
  Peptide Sequence Number=SeqID_79592
atggcactcggcaaagaaggaaacctgggaaccggcaaagacatctttgccgagtgccattgccaaggcactcggcaaagggactggcaaaggggcccactggaggggactggcagtggggcccactgggtcagtctttgccgagggcctctcgagcaaacactcggcaacattgacctctttgccgagtgccacagacggcactcggcaaaggatccgtcaccgttacttggcgccgtgacgggattgaggaatcgagggcgagtgggcgactgggctgtggcctgtgggccggtggcatggggatattttgatgggctagtaaattaa

SEQ ID NO: 37814 - DNA, 390 bp, Zea mays
  Peptide Sequence Number=SeqID_79593
atggcactcggcaaagaaggaaacctgggaaccggcaaagacatctttgctgagtgccattgccaaggcactcgacaaagggactggcaaaggggcccactggagggttctttgccgagtacctgtccaacagacactcggcaaagaagcctcctttgccgagtgcctactagagctctcggcacagggactagcagtggggcccactgggtcagtctttgccgagggcctctcgagcaaacactcggcaacattgacctctttgccgagtgccacagacggcactcggcaaaggatccgtcaccgttacttggcgccgtgacggtgacttttctttacggagtgccatttggcactcggcaaagtctttgccgagtgcccgacaaatag

SEQ ID NO: 37815 - DNA, 537 bp, Zea mays
  Peptide Sequence Number=SeqID_79594
atgctcctcctcgacggcgaccttgtcctctcctcctccggaagcaccggcgctgcctctcgcacgagcgacagcgggagggagctcgtggcggcgctcttggagagccccgggatccgccacgcggtcgaccggctgaaggtcgcgccggagaggcggatctcggcagggcaggagggggcgccgaagcacgtctacgtgttccagcgggagtacgccacggtggatccggcgcgcgtcgagttagttggcacagatgaggctactacatgcattggtgttgtaattcgcaacaacaagactggaatgatgccagattgggccgatatagcgtcctcactcaaccagctctcggactccgaagtcctgctgcggtgctccacctctccagccgcagaaccacctcacttcgtggaaaacgaaagaaggatctggaaatacctgatcgataacccggactgggaagagacgttcccaaaacacaagccccgggtgttccatagggcaagcgacggaagctggtcaaggtactcgtag

SEQ ID NO: 37816 - DNA, 795 bp, Zea mays
  Peptide Sequence Number=SeqID_79595
atgctcctcctcgacggcgaccttgtcctctcctcctccggaagcaccggcgctgcctctcgcacgagcgacagcgggagggagctcgtggcggcgctcttggagagccccgggatccgccacgcggtcgaccggctgaaggtcgcgccggagaggcggatctcggcagggcaggagggggcgccgaagcacgtctacgtgttccagcgggagtacgccacggtggatccggcgcgcgtcgaggtgaacttcgttttcctgtctaaatcatcactgttgctgtcgagacaaagggctcagttagttggcacagatgaggctactacatgcattggtgttgtaattcgcaacaacaagactggaatgacctctgttagccatatggattttccagaaattgtggagggagggatcaagcagatgttagaattacttggtgatgacaatgcaccatttgatgtttgtatctttaactgtggtttcaatatggggtgtactttatgcacctttcaggcattctcactagttgttcgttcctctggaaagaaacacatcaaacaggaagggtattcctatccactatgttgcaaaatagttgaagtgctgcataagtcccagctacaattccaccttcgatcattttgtgtccttgagaataacacgaagagtgactcatttggaaatgcgctacctataattggtggatttgtggttgaaacctcatctggagttgtgataccagcaacctttgatatggattcaaggtgcccagatgaagttgtcaggagaattcgt

SEQ ID NO: 37817 - DNA, 291 bp, Zea mays
  Peptide Sequence Number=SeqID_79596
atggcgacacgcgccgacatctccgggagaggcgctggcatccggtggccggggcccacgcctgtgcctgctccaacgcggttgcagctcctccgcctgcgtcttcgtcgtcgtcggtgcctcacagtcgctgccagatccgaaaaacatggcagtcgcatgcatgtggttatacagatccaaaaattatggcaaaataatagaaatgacattaaattacaagtgtaccttcggcttgaaagagatcaaaagtacaagtgtgacgcaaaagcaaatgccaagtcagcgtga

SEQ ID NO: 37818 - DNA, 303 bp, Zea mays
  Peptide Sequence Number=SeqID_79597
atggaagaaatgactaccaaagacgaccctaaggcaagaaagatgttcatcggtgggctaccaccatctcttactgaagagaaggacttgatcgtgctggcgaagacggggttcgggagaacgggcgcgttcgtgttgcccattctacaagagctgcccattctacaagttaaatattctcgatgcttgttttcggaaagccttgtaactgagagtttttatctgacaaaaatagtatgcctacctaataagaacagtgaatggattggattcagacgttcaacttctacatgtactatctaa

SEQ ID NO: 37819 - DNA, 768 bp, Zea mays
  Peptide Sequence Number=SeqID_79598
atgcagttgcgtccatggctagctctcgtgaccctcggttgtccgcctcgccgttgtcgacgtcgtgcccttcacgttccccgtcgagaaggttcgaccttctctgatctccatcctgcccctagcaagctcgtcactgccattccgagcgtgggcgctggggctcgactcctgcgtcgtactcatcttcctcaacacttcgcctacgcccaccaggttggggtcaagaggacagtctcgatggaagaaatgactaccaaagacgaccctaaggcaagaaagatgttcatcggtgggctaccaccatctcttactgaagagaaggacttgatcgtgctggcgaagacggggttcgggagaacgggcgcgttcgtgttgcccattctacaagagctgcccattctacaagttaaatattctcgatgcttgttttcggcaagccttgtaattgagagtttttatctgacaaaaatagtatgcctacctaataagaacagtgaatggattgggttcagacgttcaacttctacatgcttcaactactcgaaaagtgaagatgaccttaaacagtttcatttggcctttattaccagaatacttgctgcgatactaaatccatgggatttggatctcactacctttccaaataggatctgtagtccttattaccagaattctttggatctcactacttgctgcgatactaaatccatggccttattaccagaattctttgaactgagtagagtggaaggcaacttcacctaa

SEQ ID NO: 37820 - DNA, 456 bp, Zea mays
  Peptide Sequence Number=SeqID_79599
atggccaccgagtgttttgaatgccactcgcgtagtggcgtggcgtggcgaaggatgctggagtgtgctgtgccgcccgcctatcagctggatcatgtctaccgtttcattaagggcctgttcgtttttcacggattgaagtgtcgatggggtcgagtggggaatttcagtggccgtgttttagaaaacttgtgcaccgtgaggctcggcgacgggaggaaagggagagcaagggcggaggagcgggcgcgctgggtcgaagccggggttgtccgggaggctcgctcgccatggcacaagggcagggaggacgcgcgccgcgagttccggagagtgctggagtcgcggcccgaggactggcaggctgtcgtctccgctttcgagcggattcccaaggtggtggcctctttgatcgatcacctcagcattagtattacccgaccttacacatgctga

SEQ ID NO: 37821 - DNA, 306 bp, Zea mays
  Peptide Sequence Number=SeqID_79600
atgcctcacacccacaggacgttcgacattatgcctgaccgcggcatggactcgtggcacaccatgatcgatggctactcggtcaatgggctcggggacgaggcgttgcggctgtttgagctaatgaaggagtgtatggcgcccatggtcaattcggaggccattttgaggtcatctattgtgtctagctatagcctgagtgactacaaaagctatgatgtatggaaaatactaaaatttgaacggcttgtgatgaagatgattattttccgtatgactatcactgatttgacaggcgccgcccat

SEQ ID NO: 37822 - DNA, 813 bp, Zea mays
  Peptide Sequence Number=SeqID_79601
atggccaccgagtgttttgaatgccactcgcgtagtggcgtggcgtggcgaaggatgctggagtgtgctgtgccgcccgcctatcagctggatcatgtctaccgtttcattaagggcctgttcgtttttcacggattgaagtgtcgatggggtcgagtggggaatttcagtggccgtgttttagaaaacttgtgcaccgtgaggctcggcgacgggaggaaagggagagcaagggcggaggagcgggcgcgctgggtcgaagccggggttgtccgggaggctcgctcgccatggcacaagggcagggaggacgcgcgccgcgagttccggagagtgctggagtcgcggcccgaggactggcaggctgtcgtctccgctttcgagcggattcccaagtggatactagctgtgaggggtgctttaaatagcagacaacaccaacaaaatatgcttagagcattgccagaaatagctcaaaagattacacggttggagaatgaagataccttgcttgattcttctggcgagctgctggaggagctcaggaaggtgcacagattcttcctccgctcacccttctgcgccgaccttcgagtcaacaacaagctgctgcagatgtacgccaagtgcgtagccatgcctcacacccacaggacgttcgacattatgcctgaccgcggcatggactcgtggcacaccatgatcgatggctactcggtcaatgggctcggggacgaggcgttgcggctgtttgagctaatgaaggagtgtatggcgcccatggtcaattcggaggccattttgaggttataa

SEQ ID NO: 37823 - DNA, 357 bp, Zea mays
  Peptide Sequence Number=SeqID_79602
gcattgccagaaatagctcaaaagattacacggttggagaatgaagataccttgcttgattcttctggcgagctgctggaggagctcaggaaggtgcacagattcttcctccgctcacccttctgcgccgaccttcgagtcaacaacaagctgctgcagatgtacgccaagtgcgtagccatgcctcacacccacaggacgttcgacattatgcctgaccgcggcatggactcgtggcacaccatgatcgatggctactcggtcaatgggctcggggacgaggcgttgcggctgtttgagctaatgaaggagtgtatggcgcccatggtcaattcggaggccattttgaggttataa

SEQ ID NO: 37824 - DNA, 294 bp, Zea mays
  Peptide Sequence Number=SeqID_79603
atgcctcacacccacaggacgttcgacattatgcctgaccgcggcatggactcgtggcacaccatgatcgatggctactcggtcaatgggctcggggacgaggcgttgcggctgtttgagctaatgaaggagtgtatggcgcccatggtcaattcggaggccattttgaggtcatctattgtgtctagctatagcctgagtgactacaaaagctatgatgtatggaaaatactaaaatttgaacggttgaggatctttctaggatgtacagactcttctccaaatctcccatag

SEQ ID NO: 37825 - DNA, 273 bp, Zea mays
  Peptide Sequence Number=SeqID_79604
atggatacaccatctggtgtgaagggttctattcttgcatgcatcaagttctgtgaaggttccaggtcatctattgtgcctagctatagcctgagtgactacaaagctatgatgtatgggaaataccgaaattccaacggctgcgatgtggagtatttacttttctgggatttagtaccccatggatgtgtatgggtatacagacatgggaatactaagaagtgtaatgtacttgtaacgacgcacctacgctcaggtaagaaggtacactaa

SEQ ID NO: 37826 - DNA, 303 bp, Zea mays
  Peptide Sequence Number=SeqID_79605
atgtggcgtatttactttttcgggaattcagtaccccatggatgtgtatgggtatacagacatgggaatactgagaagtgtaatgtacttgtaacgacgcacctacgctcaggtacactaacctcgaaaacgtggagtatctcttcgtatattgtcacccttgctcaatctattgatgtggtgcgagatttcttattggttacgtatggactgtgccactcgtcggatgctggtatcaaggtctctggtcatgatccattgtggaactaccctgatggttatcttacgtggaccttcccttga

SEQ ID NO: 37827 - DNA, 255 bp, Zea mays
  Peptide Sequence Number=SeqID_79606
atggccaatccccgcgtcatggagctcttgcaactgacaaggaccaactacgatgagtgctccttggtgatgcagtgtcactgcatcgagactcgcggcggccatacaaacttgaagaaagaagggaagttgaggaagaagggaaggaggaagacatgggattatgggaatactgagaagtgtaatgtacttgtaaacgacgcacctacgctcaggtacactaacctcgaaaacgtatgtgtagttgacgattag

SEQ ID NO: 37828 - DNA, 327 bp, Zea mays
  Peptide Sequence Number=SeqID_79607
atggcgcagtggcttacccggtctacgttcgccggcggtcggagggattccggcgaccgtggactggcctctccggtgaagcagacttcgattcctcgctcggggagcttcaccgaggtgtgctcagtcgtctccgagggtcggacgaggatgggaaaggctgggctggcctgtctacggcggcagtggctcgggtggccgcggacacgccgtgcacgggcaaacgacgtaccccatggatgtgtatgggtatacagacatgggaatactgagaagtgtaatttacttgtaacgacgcacctacgctcaggtaagaaggtacactaa

SEQ ID NO: 37829 - DNA, 189 bp, Zea mays
  Peptide Sequence Number=SeqID_79608
atggcgagggtagcgtgtaccctccgtggcaagaggctggacaatggtgtatctgtgctctcggttggcgtgaacctgacctggaattcagtaccccatggatgtgtatgggtatacagacatgggaatactaagaagtgtaatgtacttgtaacgacgcacctacgctcaggtaagaaggtacactaa

SEQ ID NO: 37830 - DNA, 543 bp, Zea mays
  Peptide Sequence Number=SeqID_79609
atggccatgatgggttcaacatcggaaaagatgtacctctgccagtttaaaaccactaacccacaaccgggggtattgcatacatgtgtattgttatttttgaggccattcagttctgaatggatcgacgctcaggtaaggaattcagtaccccatggatgtgtatgggcatacagacatgggaatactgagaagtgtaatgtacttgtaacgacgcacctacgctcaggtacactaacctcgaaaacatatcatctctattggtggacatttctaaattgggttaagtcaatacatgttatgtccactagagaaaacaatatcctgagacacccgcctttgtttggaaatgtctcacgattatcgctgatatggatatgggttacgtgcttcttcactcttaaaggtctttcgctccgaatctcgggacgagattcttttaagggggagggctgtaacacccctggtgtttatattccgctcgacaacgagtatggaattaagcacgttatatcagtgaatgaaacagatactaaaatttaa

SEQ ID NO: 37831 - DNA, 393 bp, Zea mays
  Peptide Sequence Number=SeqID_79610
atggcggtgcgaggggctggaagggcggtttttcctcttctctggctaagtatctcgggttgcaaaaacctaagaggaaggcaggaagcggagcgaagaaccgtcaccagaccctctcccgggtatataaagaccgaggcaaggccggttccaacgttccgcccggaccggacgcaggattcaaaaatacgaagcgaaacagccgttcctcgaacggctcgtgcacgcgcaacggccgccccgccgaccactcgcctcgtcgcattaactccgcggcaggacaggcggcgcttctggcaagagaagcaggcgacgcttcgccttcgccgaaataaccgcgccaaaaaagggaccgggaaagggggataccccgaaaaggatccttccccgtga

SEQ ID NO: 37832 - DNA, 717 bp, Zea mays
  Peptide Sequence Number=SeqID_79611
atggcggtgcgaggggctggaagggcggtttttcctcttctctggctaagtatctcgggttgcaaaaacctaagaggaaggcaggaagcggagcgaagaaccgtcaccagaccctctcccgggtatataaagaccgaggcaaggccggttccaacgttccgcccggaccggacgcaggattcaaaaatacgaagcgaaacagccgttcctcgaacggctcgtgcacgcgcaacggccgccccgccgaccactcgcctcgtcgcattaactccgcggcaggacaggcggcgcttctggcaagagaagcaggcgacgcttcgccttcgccgaaataaccgcgccaaaaaaggggttcgaaggctggcccctgaagggttcacagtcgcctcagacaccgagcgagggatgaccaggggggaccgggtccggcagatcacccgcaggtacttttgggcgtgcctctgggcccctagccaacccctaacgaacggggcacggatgtccactcagattacccacttgcagctcaccggagacaccatgttcggtgcccatcaaggaggctcgggggctgctctcgcaaacccggctccggccaaaccgttgacagcgtcaacataccagcccgagaacttgggccccgactgtacacccgggctacggccagttcgcatgagggaacaaccagaccagccgaagcgttacgcaaggcattaa

SEQ ID NO: 37833 - DNA, 240 bp, Zea mays
  Peptide Sequence Number=SeqID_79612
atggcgtctgggtcccctgcgccatggacagtagcgctcggtgcccctccctgggccgacctcggcatcaactgggtgtatgcccatggcgcgcatggagcacctgggtgttttgcctccattcctgccggcactagatgttgccgcggcgtcttgcgcgatgcatgttttggtgaagcccctaaaccgtggactcatgtgcaacccgagtccgagtttgacaggttgatagacttatga

SEQ ID NO: 37834 - DNA, 255 bp, Zea mays
  Peptide Sequence Number=SeqID_79613
atggccggcgctcaagctccactcctccccatggcgccacccccctgcagtttcccctctgcctcggcgcccctccctgggccgacctcggcctcgaccaggtatatgcccatggcgcgcatggagcacctgggtgttttgcctccattcccgccagcagggagctcgctgacccagcccgagtgccgccatcacctacacatcttccctccatacatcactgccagcagcgagccccttcctctttttccctag

SEQ ID NO: 37835 - DNA, 876 bp, Zea mays
  Peptide Sequence Number=SeqID_79614
atgaagaacgtagcaaaatgcgatacctggtgtgaattgcagaatcccgcgaaccatcgagtttttgaacgcaagttgcgcccgaagccttctggcggagggcacgtctgcctgggcgtcacgccaaaagacactcccaacacccccccgcggggcgagggacgtggcgtctggccccccgcgccgcacggcgaggtgggccgaagcaggggctgccggcgaaccgcgccgggcgcagcacgtggtgggcgacatcaagttgttgttctcggtgcagcgtcccggcgcgcggccggccattcggccctaaggacccttcgagcgacccgagcttgccctcggaccgcgaccccggaggcgtcctcagcgacggaccgggcccaagttctctggaaagggacgcctgggagggtgagagccccgtccggcccggaccctgtcgcaccacgaggcgccgtcaacgagtcgggttgtttgggaatgcagcccaaatcgggcggtaaactccgtccaaggctaaatacaggcgagagaccgatagcgaacaaagtaccgcgagggaaagatgaaaaggactttgaaaagagagtcaaagagtgcttgaaattgccgggagggaagcggatgggggctggcgacgcgcaccggccgtatgcggaaacggctcctgctgggttcgagttggagcacgcctgtcgggacccgaaagatggtgaactatgcctgagcggggcgaagccagaggaaactctggtggaggctcgaagcgatactgacgatagctggagcccacacgagttctatcgggtaaagccaatgattagaggcatcgggggcgcaacgccctcgacctattctcaaactttaaataggtag

SEQ ID NO: 37836 - DNA, 702 bp, Zea mays
  Peptide Sequence Number=SeqID_79615
atgaagaacgtagcaaaatgcgatacctggtgtgaattgcagaatcccgcgaaccatcgagtttttgaacgcaagttgcgcccgaagccttctggcggagggcacgtctgcctgggcgtcacgccaaaagacactcccaacacccccccgcggggcgagggacgtggcgtctggcccccccgcgccgcacggcgaggtgggccgaagcaggggctgccggcgaaccgcgccgggcgcagcacgtggtgggcgacatcaagttgttgttctcggtgcagcgtcccggcgcgcggccggccattcggccctaaggacccatcgagcgaccgagcttgccctcggaccgcgaccccagaggcgtcctcagcgacggaccgggcccaagttctctggaaagggacgcctgggagggtgagagccccgtccggcccggaccctgtcgcaccacgaggcgccgtcaacgagtcgggttgtttgggaatgcagcccaaatcgggcgggttcgagttggagcacgcctgtcgggacccgaaagatggtgaactatgcctgagcggggcgaagccagaggaaactctggtggaggctcgaagcgatactgacgatagctggagcccacacgagttctatcgggtaaagccaatgattagaggcatcgggggcgcaacgccctcgacctattctcaaactttaaataggtag

SEQ ID NO: 37837 - DNA, 423 bp, Zea mays
  Peptide Sequence Number=SeqID_79616
atgcaggatgttgcatggcgtgcactttcacagtactatttattgtttagtggggtggctgatggtctcgacctgaagtacaacccctaccgcttgactggcagtactggaggtgtgattgtctcacccgttggtgagggcaatcccagattgagcagcatggtcaacatggtcgtcgtgctcaacaccgagctggaccacgcccttgatgagttgggcaaggctcggtcggagattgcggaactgcgtgctgagcgagcggagcgccacgatcaggaggatggttcccccgcccctgttgggactcagcacccttaccgctcgccgccccatagtcgttatgcttatggcaccccgactgcagaacctgaacatttttggagccttagatcgctagagttagagtttgtaattaatgtttaa

SEQ ID NO: 37838 - DNA, 612 bp, Zea mays
  Peptide Sequence Number=SeqID_79617
atgatggtgacagttcaagccgtagcacagagctttcggaggagcaggagccggaaggatggccgcgggttatacccagaccaatgggaagctacctgtttggtgtgtcgtttggatgatgatatccagggtgcagaggcctactcagagcattgttctatcactgagcgggacactgccgaggcagccatgcaggatgttgcatggcgtgcactttcacagtactatttattgtttagtggggtggctgatggtctcgacctgaagtacaacccctaccgcttgactggcagtactggaggtgtgattgtctcacccgttggtgagggcaatcccagattgagcagcatggtcaacatggtcgtcgtgctcaacaccgagctggaccacgcccttgatgagttgggcaaggctcggtcggagattgcggaactgcgtgctgagcgagcggagcgccacgatcaggaggatggttcccccgcccctgttgggactcagcacccttaccgctcgccgccccatagtcgttatgcttatggcaccccgactgcagaacctgaacatttttggagccttagatcgctagagttagagtttgtaattaatgtttaa

SEQ ID NO: 37839 - DNA, 2196 bp, Zea mays
  Peptide Sequence Number=SeqID_79618
atgactctcgacgtcaagctcatcctcgacgagttcaacaggagagtccgtgtaccagaactacaaggagttggagtcagagttcctcacctcccttgtcgcccatgctccctcgcccgaggaggcaatggttgcgatgccgtgaatgcggggggcttcgtgaggttcgacccgccctcaccgcttgacccctacgacgacatcgctgccgcccaggccctcttctccgagttcaatgccgtccctgcggacgcgcttgcgctcttcgctcgccacgaggacgatcgtgctaccatctccaacaactccttcagcagatcagcgacaacctcctcagcctcgtccatgacttccccgacctccgctccacctcaggatggtgttcccgtcctctccatcttcaccgccgctgtggatcctaagcacaacgtcacgccggacacggatgtgagctctagcaagccactgatgtcttcttcttcagcatcagccaccgtcgccaccagcaagctggcgtcacccttgatttggacaggcatcacccttgatttggactggagtcacccttcatcaatgactcccacgccatcacagaaggttgtcctcacccttgatttggacaggcgacacagtatgcagaagggcgcttgcaacctattggatgaatccatcaccggcggaggcgagatcgagctggatgccaccaccatcctcgacgtgctgcccggcgcgcacacagtgggcaaggcgcgatgcgcctcctacgccgaccgcctctatgcctccgcctcctgcaccacacctgaccaggcgctcaacggccactacactgataagctgctgatgctctgctccagcaacatcaccaacaccatgcccacaaggtgttcgacgctcgttccaactccgacacctatgcccgaaatcgttgacggcacacacccacagtgccaggcccctcctagcgtcagtgcagcggctcgcaagactcccgatgatctcgagctcggcctcctcgactactacggcgccgggtgccggcactcgctcaccagccgcgtcgtcactctctcgtaccacgtgcctgagctgctgctgagttccaatagcctagaggccaaggcgctcctggaggcagctcttatggaagctaacaaggagcggaagaagaacatcacgggcaccttgacaaccaaacccaacgacgacgacgaccttgacaaggacgacgacaagttatgcctgcgtggcatctgcctggagttggcatgcaccatggaggtgcaggactgcgggcaccagatgtacgtcgctttcatgctagcgctgtgcttcaacatttccatgcctatcacgatcgctccttcagccatgttgaaaatggctcagccggatggagagctgcttgtttctgttggtgtccctggtaatgctcttgtgctcaagatttcaattcagggtgttgtggctgcctttcatagggaaacacttcaaagcacaagtctgaatgaagagcagatgaagaaggatagcgtcacagacaattgccatcgccaactaaacaagattcttgctgacttggatcaagatcacatcattgtcaggtcgagctgcttggatttagactcttcaggagaatcaagggactatggttttgttcagtttgagatggatgaatctgctcagtcggccattgataaactctatggactggaaaatgcctggaacagtatcaaattcagtaatgtgtatgtgaagaatctgtccgatactgttactgatgatgagttgaaggagatgtttgaaaaatatggaaccataacaagtgatgttgttatgcgggataatgttggaaattctaggtgttttggatttgtcatttttgaaaatgcagatgctgctgctcaggctgttcaagagttgaatgggaagatattcaatgataaggaactatatgttggaagagtccaacaacctatgatgcctggaaatctatatgcaaagagatgtgatgagattttccaactagccgcttcttttctggggttcaagattaagaatcagagaagtatcttgcacttgcaatgggatcccggtggaattgatgtcatgtatcagcttgagggcaagcctaattttaagaaggggagaatgttagggactgtcggcccaaacagcccatgccagcccaagtag

SEQ ID NO: 37840 - DNA, 2250 bp, Zea mays
  Peptide Sequence Number=SeqID_79619
atgactctcgacgtcaagctcatcctcgacgagttcaacaggagagtccgtgtaccagaactacaaggagttggagtcagagttcctcacctcccttgtcgcccatgctccctcgcccgaggaggcaatggttgcgatgccgtgaatgcggggggcttcgtgaggttcgacccgccctcaccgcttgacccctacgacgacatcgctgccgcccaggccctcttctccgagttcaatgccgtccctgcggacgcgcttgcgctcttcgctcgccacgaggacgatcgtgctaccatctccaacaactccttcagcagatcagcgacaacctcctcagcctcgtccatgacttccccgacctccgctccacctcaggatggtgttcccgtcctctccatcttcaccgccgctgtggatcctaagcacaacgtcacgccggacacggatgtgagctctagcaagccactgatgtcttcttcttcagcatcagccaccgtcgccaccagcaagctggcgtcacccttgatttggacaggcatcacccttgatttggactggagtcacccttcatcaatgactcccacgccatcacagaaggttgtcctcacccttgatttggacaggcgacacagtatgcagaagggcgcttgcaacctattggatgaatccatcaccggcggaggcgagatcgagctggatgccaccaccatcctcgacgtgctgcccggcgcgcacacagtgggcaaggcgcgatgcgcctcctacgccgaccgcctctatgcctccgcctcctgcaccacacctgaccaggcgctcaacggccactacactgataagctgctgatgctctgctccagcaacatcaccaacaccatgcccacaaggtgttcgacgctcgttccaactccgacacctatgcccgaaatcgttgacggcacacacccacagtgccaggcccctcctagcgtcagtgcagcggctcgcaagactcccgatgatctcgagctcggcctcctcgactactacggcgccgggtgccggcactcgctcaccagccgcgtcgtcactctctcgtaccacgtgcctgagctgctgctgagttccaatagcctagaggccaaggcgctcctggaggcagctcttatggaagctaacaaggagcggaagaagaacatcacgggcaccttgacaaccaaacccaacgacgacgacgaccttgacaaggacgacgacaagttatgcctgcgtggcatctgcctggagttggcatgcaccatggaggtgcaggactgcgggcaccagatgtacgtcgctttcatgctagcgctgtgcttcaacatttccatgcctatcacgatcgctccttcagccatgttgaaaatggctcagccggatggagagctgcttgtttctgttggtgtccctggtaatgctcttgtgctcaagatttcaattcagggtgttgtggctgcctttcatagggaaacacttcaaagcacaagtctgaatgaagagcagatgaagaaggatagcgtcacagacaattgccatcgccaactaaacaagattcttgctgacttggatcaagatcacatcattgtcaggtcgagctgcttggatttagactcttcaggagaatcaagggactatggttttgttcagtttgagatggatgaatctgctcagtcggccattgataaactctatggactggaaaatgcctggaacagtatcaaattcagtaatgtgtatgtgaagaatctgtccgatactgttactgatgatgagttgaaggagatgtttgaaaaatatggaaccataacaataagtttgttgttttttggtgacaaggtcttcaaccttgaggagatcagtgccatgctttttggcaagatgaaggatactgctgaggcataccttggcaagaagatcaatgatgccattgtctttgtccctgcctacttcaataacgcgcagaggcaaacaaccaaggacactgctattacagaggttgatatactcagagatgctgctactataatctgtcatgaccaagagagatgtgatgagattttccaactagccgcttcttttctggggttcaagattaagaatcagagaagtatcttgcacttgcaatgggatcccggtggaattgatgtcatgtatcagcttgagggcaagcctaattttaagaaggggagaatgttagggactgtcggcccaaacagcccatgccagcccaagtag

SEQ ID NO: 37841 - DNA, 381 bp, Zea mays
  Peptide Sequence Number=SeqID_79620
atggatatagaggtggaggaaggaaatgtcgatgttggcaatactgctgaaccatcgtatgaggttgtggctagcagtggttgttcagcacacgtgccaactaatgacactgacgaacataaactggatatagagagcgaggatagtaaggtcctcagtgcatatatacactgtattagggatgaagagcatttacttcatagagaaggtggaaaggtcttcttggagaacacattcatttccagtctgcttaagcgtgatggcgaccctaaggatgatataacaatgtttaggtttaagctatctgtaatattatgggactcgagattaaacacaaagaaaatacatcaaaatcttgaccacaatgtggatgaagattga

SEQ ID NO: 37842 - DNA, 768 bp, Zea mays
  Peptide Sequence Number=SeqID_79621
atggatatagaggtggaggaaggaaatgtcgatgttggcaatactgctgaaccatcgtatgaggttgtggctagcggtggttgttcagcacaattgtcaactaatgacactgatgaacatgaactggatatagagagcgaggatagtaaggtcagtgttggtaatgctgcaaaacaatcacacgatgttgtgggagtaggcattgactgtattttcaatcctattaaagtgtcaactgaagccgatcttggaccacaaccggatgtgatacacctgacatctttggatgttccaaatgaaacaagtcaaataagttttgatgtgaatatggtagagcagaacaaacaagatgctttggacacacttattagaatatcacaacataaaaaaccaaagaaattgaatgtagctcgagttgtctctgaagattataagtgcaccccagaagatgttcagcttattgaatacattaaaacattactggggaaacaagttgtggtgaacatcgacaacgcatggttaaacaaaaatgatatggaatgtctttttcatggtgacattcaattgtctggtgaagtcctcagtgcatatatacactatatgagggatgaagagcatttacttcaaagagaaggtggaaaggtcttcttagagaacatatttatttccagtccacttaagcatgatggcgaccctaaggtgttcattccaatgatgtcggggaccataattaggggtaccctcaagactcctaatctcagctggtaa

SEQ ID NO: 37843 - DNA, 186 bp, Zea mays
  Peptide Sequence Number=SeqID_79622
atgctcagcctcagcccttactttgttgatgagccttacacttcatatgaacccccacctttggtgggctcaagataccttgatcactcgataattgaaagaaaatacgctgaagttgctcagcgctgcccaaagttgttgcgaggatccccttcagcatgggagaggttgcccttgttgctctaa

SEQ ID NO: 37844 - DNA, 186 bp, Zea mays
  Peptide Sequence Number=SeqID_79623
atgctcagcctcagcccttactttgttgatcagccttacacttcatatgaactcccacctttggtgggctcaagataccttgatcactcgataattgaaagaaaatacgctgaagttgctcagcgctgcccaaagttgttgcgaggatccccttcagcatgggagaggttgcccttgttgctctaa

SEQ ID NO: 37845 - DNA, 693 bp, Zea mays
  Peptide Sequence Number=SeqID_79624
atggcagcaacaacagatcggctgcgaccgtgccttgccgcatcgacgggagggaatggggaatctagcgttgcacgcaggggaagcacacgacatgggaaggcagtgggaatttcgggcgtccattctcacatgtggacgaccaacagtacaacgggcgcgcaaaggcctacgctaggaggaggtcgcgcctggagaggggctttcacgtttgggcgactcgacattaggaagaaaggcaactcaacagtaggaagaaaggagaagggagagaactcacatggagcagggcatttaagagagtggtttgaaagagaactagcaagcggttgtcgagctccttacgatgtggctgatctaagcgggactggaggttacagggaggaagatggtgggtgggcttcgtcgggcagtcctaagcgtgggacaagaagcttgggaggtttggctgatgggtcaggcgcgcatgaaatggtcttgcgggtgaatataggcgagggtgttacagatctaaccctcttaataggaatctcgcccccgagattcaagaaggagctagcaagaaaacgagagaagctggaggatgccaaccggacaggtgcaagaggaaagggtatggatagaaaagggaaaactactctaaggccatcgaaaggcaaggggaatactaagacatgcaggataggggcatga

SEQ ID NO: 37846 - DNA, 246 bp, Zea mays
  Peptide Sequence Number=SeqID_79625
atgggagctgggccacgcagtggaggtgtagctggctacacgcgctgggccgagaggaagggctgggtcgcgggcgagatggagatgggccacgagcgcaggccggcgggtggggaggggtcagagaagctggaggatgccaaccggacaggtgcaagaggaaagggtatggatagaaaagggaaaactactctaaggccatcgaaaggcaaggggaatactaagacatgcaggataggggcatga

SEQ ID NO: 37847 - DNA, 723 bp, Zea mays
  Peptide Sequence Number=SeqID_79626
ggatacactggatcagatcgggaccgtaagccagcgatcctacggctacagacgtcgcatggcaaaaaccaatctaggccgtccaagacccatcagacggtccgcacccttcttctctcccacgcgaacagccgagcacccaagaacacgcgcacggcagcgaagcgtcgatgtgctccctccggctaccccacaatcccacatctctgtataaatccgaacgcgacaagtgttacacaacgtgggaggtacgacggacacgatggaggggcactcacctcgtttcacggcgacaacaggtctggccacgacgccttgcggtccacggaggagctgcacgaccaccgagcaattccgagcaccacagcgggtcaatcttcaattaacctcacacacaactccgctaagacgtgggcgcggatggccgagtcagctagggccgagattttcggcacggcaggtaccgccttccgccatgccaaaatcaccggcggatttccagccgagcgcgccgtagaagttgttgaggggaggaaggatagagctgacggagtccgtgcgctaggttgggatgaatccgacctacgggtcccacctggcggccaccacgcggaggctgacggggaagtggtcacgcaagctggcaccagggagcccgcgtccgcgaggaagacggcgatttctgtttcgcccgagcgcgcggatagggatgagttgacctga

SEQ ID NO: 37848 - DNA, 303 bp, Zea mays
  Peptide Sequence Number=SeqID_79627
atggccgagtcagccagggccgagattttcggcacggcaggtaccgccttccgccatgccaaaatcaccggcggatttccagccgagcgcgccgtagaagttgttgaggggaggaaggatagagctgacggagtccgtgcgctaggttgggatgaatccgacctacgggtcccacctggcggccaccacgcggaggctgacggggaagtggtcacgcaagctggcaccagggagcccgcgtccgcgaggaagacggcgatttctgtttcgcccgagcgcgcggatagggatgagttgacctga

SEQ ID NO: 37849 - DNA, 789 bp, Zea mays
  Peptide Sequence Number=SeqID_79628
atgggccggatcgcacgtgggcctctgagctggacgaggccgcactgtgggatgccttcgtcgccgcggctgagcagcggagacttcgagcgaagggtggcgtttctgccttcgctccaacagatagacccggatcatcactggatgcgttttcgttttgagcgagaggatgtcaccattactgccagtcagatccgccagctctttggattccccgagtcgacgactcgtcttcacagcctctgctacgacacttctgaccctcctcgtcgccctcacggcggtgtggctccaggtacagctcacgtcgcgtctctgttccgcccgcccttcacagatgggtcgcgacgttcaccggcagattttactacagcagcaaagtatttatatgagcttatcagacggactcttctgctgaggatgggatacagggaggctaccacacatattcagctttggctccttggtgccctggtctctcactctgagtttgacgttgtggacttcctgatttgtgagatcgaggacaccgttttggatgggattcgtgctcgtcgacagttgccctatgctcactacttgtgccacatctttgcgcagctgattcagcctcctcagtttcagggcacacttgaggcctcacgcctcgtttttggattctaccgtcctgcgcctgagattcctgtgccagcttctgctcctgtttttgactctcaggccgaggatgcagctcttcatcagttcgacactcaggctacaacagttgatgatgatgatgatgattttggg

SEQ ID NO: 37850 - DNA, 1458 bp, Zea mays
  Peptide Sequence Number=SeqID_79629
atgggccggatcgcacgtgggcctctgagctggacgaggccgcactgtgggatgccttcgtcgccgcggctgagcagcggagacttcgagcgaagggtggcgtttctgccttcgctccaacagatagacccggatcatcactggatgcgttttcgttttgagcgagaggatgtcaccattactgccagtcagatccgccagctctttggattccccgagtcgacgactcgtcttcacagcctctgctacgacacttctgaccctcctcgtcgccctcacggcggtgtggctccaggtacagctcacgtcgcgtctctgttccgcccgcccttcacagatgggtcgcgacgttcaccggcagattttactacagcagcaaagtatttatatgagcttatcagacggactcttctgctgaggatgggatacagggaggctaccacacatattcagctttggctccttggtgccctggtctctcactctgagtttgacgttgtggacttcctgatttgtgagatcgaggacaccgttttggatgggattcgtgctcgtcgacagttgccctatgctcactacttgtgccacatctttgcgcagctgattcagcctcctcagtttcagggcacacttgaggcctcacgcctcgtttttggattctaccgtcctgcgcctgagattcctgtgccagcttctgctcctgtttttgactctcaggccgaggatgcagctcttcatcagttcgacactcaggctacaacagttgatgatgatgatgatgattttggggttcctccttcgcctcctatgcctccacgctcacatgatcatgaggctgggagttctagtgctgcccctgctacccctcaggctatggaccctgctcttgcttcgattctccagtctatcactcagcagcaggctcacctggcagccgagcaggcccggttatccgagaggatgctctcgatgtttcagaacatgcaggacaggcaggatgcgcttcagcagcagctacttcaggatcgggctgagagtagggcattcatggctcttatgctacagcagtctggtgtctcagtacctccggttcagtctgctccacctcctccgcttcacgctccagttgtgccatcgattttgtcaggaccccctgttggtacttctccgctccgaccggtcactttggcgttcacctctccggttctcagctctgtctgcccgcagtcgccagtgccaccagcatctgctattaccactactgatgtggcagtatctgtgaccacttctgttccggcagctcctgcagcgcggcctctgtccgagtcagtaccagctccagcttctatcgtagatcctggatccgagactgactctgaccctccgccggcgttcgctctgctgcctcgactgcgaccggatgcgcccccgccgcctcctcctgcttcagatgtttag

SEQ ID NO: 37851 - DNA, 465 bp, Zea mays
  Peptide Sequence Number=SeqID_79630
atgggcaagggcaccaaacgcaagcgcgagccgactcctccgtcggatgagttcggtgactcggagtactcagaggaggagttctcctctgagtccgagggatctccggctcccatccccctgcgagagtcgtctgatgactcagacgactcccaggggcttgcggcggaagtctggacgtacattcgggccgtcgagcgctccgggctcgagggctcggatgagtcggagttctcctcggatgaggaggactcggacggcggcgaggaggaagatgacgacgacgatggcgacgacgacgacggtggcgacggagacggtgatggcggcaacggcggcggaggcagcgggggcaagggcagcaccaggggcggcagcagcacgggcagcaccagaggcggcggcgacaagggcagcaccaagagcggcggcggcaagggcagcggcggcaaggccagtggctaa

SEQ ID NO: 37852 - DNA, 465 bp, Zea mays
  Peptide Sequence Number=SeqID_79631
atgggcaagggcaccaaacgcaagcgcgagccgactcctccgtcggatgagttcggtgactcggagtactcagaggaggagttctcctctgagtccgagggatctccggctcccatccccctgcgagagtcgtctgatgactcagacgactcccaggggcttgcggcggaagtctggacgtacatccgggccgtcgagcgctccgggctcgagggctcggatgagtcggagttctcctcggatgaggaggactcggacggcggcgaggaggaagatgacgacgacgacggcgacgacgacgacggtggcgacggagacggtgatggcggcaacggcggcggaggcagcgggggcaagggcagcaccagaggcggcagcagcacgggcagcatcagaggcggcggcgacaagggcagcaccaagggcggcggcggcaagggcagcggcggcaaggccagtggctaa

SEQ ID NO: 37853 - DNA, 462 bp, Zea mays
  Peptide Sequence Number=SeqID_79632
atggccagagttccctccgtaccctccctcgacccgttcctgggcgagcgcgcgcgccccctggccgcggctccccgtgtccgctgtgccacctcgcccctgcgaccgacgtgcactgccccggcgaatcccctgccgcgcgcgcgccagggcacggtctccatggccggtgagccatcacgcgagcctcggtccaagtcccgttgcattagagaaggaaactgcctagtgggccccactccgaatgcatacccctacgtgattagcttaaagtggctgaaaactgccaatgcgatccatctccaagcttcgagggatcgaagatcaagcgttggcgaccatgtgatcaagctctctgagttctatgaggctgaagatcctgagcatctgtttggtgaaggcaagtgtcctctgacccattatgtcctatctatttataattcactgttccgcactacttaa

SEQ ID NO: 37854 - DNA, 219 bp, Zea mays
  Peptide Sequence Number=SeqID_79633
atggccagagttccctccgtaccctccctcgacccgttcctgggcgagcgcgcgcgccccctggccgcggctccccgtgtccgctgtgccacctcgcctctgcgaccggcgtgcactgcctcggcgtggtccctggccggcgagctcggccgctggcccgctacagccgtccgccaagccgccatacccctacacgattccttttttctgagctgttga

SEQ ID NO: 37855 - DNA, 486 bp, Zea mays
  Peptide Sequence Number=SeqID_79634
atgtgccgcctcagcatttattgtgacctgtccactcagctggcaggcagcgtccaggccatcctgcaggcggcgtgcctgtccaaccatttgccaaacagtacgcccgtgctgcaaggtgcactgtgtccatcatcacttatgagttgccagagaagcttcccctgcacgccaatactacgcagatcgcggatgtcagggtgcaagaagattgctccagcaactccaagtattgcatccattatattcctgggcccacatgtcgaggctcagcaccgttcatacagctgcgcaggcatcccggactccatcgagggcggctccggtggcattgtccgcagcaagggagttgctacgtcaccctccaagctccatggcctcactagaggtcatgaagcagtggcaggacgacgtcgaccgactgctcggcatggcacattctacctcgaccagatcgaggccacggtcttcccggcgccaacatga

SEQ ID NO: 37856 - DNA, 153 bp, Zea mays
  Peptide Sequence Number=SeqID_79635
atgaactcaggaacacgcgaggatttagagtggttcgggtcgccggaggatggcctggacgccgcctgccagctgagtggacaggtcacaataaatgctgaggcggcacatcgcctgtcagggtggacatgcggcgcgtcctctccgcaataa

SEQ ID NO: 37857 - DNA, 294 bp, Zea mays
  Peptide Sequence Number=SeqID_79636
atgatccgtggatgtctgacggaggggaagctggccagggcgatagagttgtatgagatgatgggttcaaaaggatgcccgcctgatgtgcacacatacagtattttgatgcattatgccacggcacaaggccaccatgagattgtctctttgctgcttgaatcccgcgttgagatcaaccttaggaattacaggcggcagactgctttgatgcaagcatgccaatatggccactgggaggttgttcagaaactgatactcttcaatgcaaatattatgttccaagcatactga

SEQ ID NO: 37858 - DNA, 1920 bp, Zea mays
  Peptide Sequence Number=SeqID_79637
atggacgagcccccgtgcccgcccccgcggcccgcgctcaactccgccgccgcgacgtcatggccggagctgctcgcgccgttcgacctctcccgcctccgcgccacgctgtcctcgcacccgctcaccccgcgccgcctggcccgcctcctcgcgctcccgctcgcgccggccacctccctgctcctcctcgactggtacgcgtcgtcccacccggcgctctcgctctcgtccctcccgctccgccccatcctcgcggcagccgaccccgaccgcgcgctcgcgctcctcgactccctgccggcctcccgcctgcccccgctccgcgagtccctcctgctcccgctgctccgctccctgccacccggccgcgcgctccacctgctcgaccagatgccccgccgcttcgccgtctccccctccttccgctcctacaacgtcgtcctctccacgctcgccagggccgactgccacgccgacgccctgctcctgtaccgccggatgctcagggaccgcgtgccgccccaccaccttcaccttcgggcggggtcgccgaggcccgcgatgctcctcgacgagatgttactcatggggtgtgcggcggacgtgaacaccttcaacgacctggtgctcgggctgtgcgggctcgggcgcgtgcgagaggcagccaggctggtggacaggatgatgacgcagggatgcatgccaagtgtggtgacatatgggttcctcctgcaagggctgtgccgaacaaggcaggcggacgaggcgtgcgccatgctcgggaggttgccggaggtgaacgtggtgatgcttaacacggtgatccgtggatgtctgacggaggggaagctggccagggcaacagagttgtatgagatgatgggttcaaaaggatgcccgcctgatgtgcacacatacagtattttgatgcatggcctttgcaagcttgggagatttggttcagcagtgcggatgcttgatgagatggaggagaagggttgtgcaccaaatatcgtgacctactctaccttgctgcattcattttgcaggaatggcatgtgggatgacgcaagagcaatgctggatcagatgttagccaagggctttagtatgaactcccaaggatacaatggtatcatatatgccttatgcaaggatggcaagcttgatcaagcgacaaggcttgtccaagagatgaagagtcaggggtgcaagcctgatatttgcacgtacaatacaatgatttatcatctgtgcaacaatgacctgatggaggaggcagaacatattttcagaaacttaattgaagagggtgttgttgccaatggaataacttataatactctcattcatgcacttctgcgcaacggaaggtggcaggagggcctaaggcttgcaagtgaaatgctacttcatggttgccagctagatgttattagctacaatggcctgattaaagccctctgcaaagaggggaatgttgatcggagtatggcgttgcttgaggaaatggtgacaaagggaattaagccaaataatttctcgtataacatgctgatcaatgaactctgcaaggcgggaaaggtacgtgatgcactggagctctcaaaggagatgctgaatcaaggactgacacctgacattgtgacttacaatacactcataaatgggttatgcaaagtgggatggacacatgctgctttaaatcttttagagaagctacccaacgaaaatgtgcatcctgacattgtgacatacaacattctcattagttggcactgcaaagtcagattgcttgatgatgccgctatgcttctagacaaagcaataagtggaggaatagttcctaatgagcgaacgtggggaatgatggtgcaaaattttgtcagacagacagtcaatctcgagggttactaa

SEQ ID NO: 37859 - DNA, 483 bp, Zea mays
  Peptide Sequence Number=SeqID_79638
atggatagggctcttgagttcagtttagacctcagcctggatagtttcacagacaacagtgtagctgccccgaggagcaataggttgcttcttggaggcatctccatcacatctcataagttaaaagaaaagcttggcacatactggagtacaagaggcagtcgactccatgttgattaccataactcttggactatgacatattttccatggctatttaggtgtcctaacattcctgaggtgaagatcccaaacgacctggctctaaatgttgcacgttccctcagatacgagatcaacatggggtttgctaccttgtgggtgatcggccaagaccaccaactgaagaaatatttgattgtggttgcaggactgtggatcctttctgtccatgggagctgctgcaattttctcaccttgtcttacatagtttttgtggtattgtacacagtgccggtcctgtacgaggtcaccctcagatga

SEQ ID NO: 37860 - DNA, 252 bp, Zea mays
  Peptide Sequence Number=SeqID_79639
atgaagtatcgccttgcaaagtatgtaccagactctcatgctgaaggtttcaaggacggcaagaaagttcaaggattatgtacctttatgagtccttttagcttcaagatcaaactgaatttaagttgccaactctcttttgctgcccaaaacaactcagtattctctctgatcatcaacaccttctctcaggactgtggatcctttctgtccatgggagctgctgcaattttctcaccttgtcttacatag

SEQ ID NO: 37861 - DNA, 429 bp, Zea mays
  Peptide Sequence Number=SeqID_79640
atggcggcgcaaggggcaggaagggcggtttcctcttctctggctaagtctctcgggttgcaaaaacctaagagggaggcaggaagcggagcaaagaaccgtcaccagaccctctcccgggtatataaagaccaaggcgagaccggttcaaacgtttcgcccggaccggacgcgggattcgaaaacgcaaaagcgaaacagccgttccccggacggctcacgcacgcgcaacgaggttcgaaggctggccctccggaagggttcgacagccgcctcagatcgcgtgggccctacacccactactggtcagaggttcgaaggccggcccctcggaagggttccacggccgcctcaggctactcgggctacgcgcccattactgatcaggggttcgaaggctggcccccgaagggttcacagccgccctag

SEQ ID NO: 37862 - DNA, 459 bp, Zea mays
  Peptide Sequence Number=SeqID_79641
atggaaaaaggccatgggtcgcacggcgagatgatggtcacccggtcagccatcatcgagcggaaggggtggcggcgcaaggggcagggagggcggtttcctcttctctggctaagtctctcgggttgcgaaaacctaagagggaggcaggaagcggagcaaagaaccgtcaccagaccctctcccgggtatataaagaccaaggcgagaccggttcaaacgttccgcccggaccggacgcgggattcgaaaacgcaaagcgaaacagccgttccccggaaggctcgcgcacgcgcaacggccgccccgcgaaccactcgccccgtcgcattaactccgcggcgggacaggcggcgcctctggcaggagaagcaggcgacgcttcgccttcgccataataaccgcgccaaaaaagggaccgggaaagggggataccccgaaaaggatccttccccgtga

SEQ ID NO: 37863 - DNA, 195 bp, Zea mays
  Peptide Sequence Number=SeqID_79642
atggcgaagaagaactcgagctgggggctccagagcttttcaacggcaccaagcggcgatgcggatgggattatggcggcggcgcgagttctctgctgtggcgatgcaattgtggacattactccacaactcatcacactcaatcaaagatccaaatcagacaaatatcataagaacaagcattcaagcatataa

SEQ ID NO: 37864 - DNA, 156 bp, Zea mays
  Peptide Sequence Number=SeqID_79643
atggtcaaagtgaggttagctgatggtaagaagaacttggtaagggaagactccatccaaggtgatgtaattgtggacattactccacaactcatcacactcaatcaaagatccaaatcagacaagtatcataagaacaaacattcaagttcatag

SEQ ID NO: 37865 - DNA, 273 bp, Zea mays
  Peptide Sequence Number=SeqID_79644
atggagttgggctggtcgcgcggagggggaaaggatgcaattatggcacatgaaattgaggaattcactctgtattctatgtatacaaatttgagtactacaaatcctacaccccttaaaaataatctcgtcctcgagattagtaagcagaagggttataccgaggtaagaagagagatggtcagagtgaggttagctgatggtaagaagaacttggtaagggaagactccgtccaaggtggtaaatttgaatcatctcgagatctgatttga

SEQ ID NO: 37866 - DNA, 315 bp, Zea mays
  Peptide Sequence Number=SeqID_79645
atggcggacgcggcttccgctgatcaacaccgacgtgaaattggtgacgctccacttgagcaccgcggtgtaacaggtgttacaaatcctaccccccttaaaaataatctcgtcctcgagattagtaagcagaagggttataccgaggtaagaagagagatggtcagagtgaggttagctgatgggaagaagaacttggtaagggaagactccgtccaaggtgatgtaattgtggacattactccacaactcatcgcactcaatcaaagatccaaatcagacaaatatcataagaacaagcattcaagtatataa

SEQ ID NO: 37867 - DNA, 344 bp, Zea mays
  Peptide Sequence Number=SeqID_79646
cactctcctctaaccaggcggccaacccggcggcgccgccccgccaaacgatgacgaagctcaccggcaatgccccaaacccgatctccagtgcccaaaccacaaattgcgactacctacgcgatgcggacaagaaggcgaaacggacaatggataacttactccccgtcacggcaaggtcatggtttgggcggcggcaatggcggatgcggcttccgctgatcaacaccgacgtgaaattggtgaagctccacttgagcaccgcggtgcgccgtgcactccgccgccaaattgatggttcgcgagggcaggaaggtgggatgaggaaaggacggagccggtag

SEQ ID NO: 37868 - DNA, 894 bp, Zea mays
  Peptide Sequence Number=SeqID_79647
atgtccgggggcggaggcggcgcaggcgcgggctcgtcgtccggcggcggcggcggaggtggagggggcggcagggagggcgactgggactgcggcagctgcggcaaccggaactacgccttccgctcgctctgcaaccgttgcaagcagccgcgcctcctcgtcgaccctaacaccccgcgcgactccaagtggctaccccgtgccggggactggatctgcaccgagaagataaagaactgcaaaaagtgtggcctatccaaggaggaagcagcaatgccagcattgcaaatggcagggatggctatgccagcttatgcaacttatatcgcaagactacagagccttgctgcttctgcttctgcatataagatgaactttgggatggctgccaactcacctttgcagcagcaactacttgcaaatgcaaactggtcctatgggatggctggtagatatgggatgcagtcttctggttggccacttggcaacagcagcccaaatcagtttccaggtgttccaaaggattggcgtaatggagactggctctgcagctgtggatttcataattattcatctcgtactcagtgcaaagagtgtggtgcacctataccatcaggcattccctccacaacaatgaaagctacgacatctgatgcctcttccacattaggaactaagcggttagcctcagaggagctggcaaacgactgtgataataaaaggctaaatccaggaaatgacaattatccactttcaacagcaggtgcaaataatttgtttttgggtattgagcaaggagctggaagcagcaatggccaggctgctttttcgaaatttgactatgggagctcaatgtcattaccatctgggcagggaatgtctggtcttatc

SEQ ID NO: 37869 - DNA, 546 bp, Zea mays
  Peptide Sequence Number=SeqID_79648
atgaagttgtggaaggagacttccaggagttccaagactacgacgagttctaggtgtgggttagcggcaacccccagtcggctgcctgtgaaggccgcggttatctacgtttcttttccgcactttgatttattgtcgagaatcttctctttaacattgacaggaaaaggcaaagaaagagaggatgcttcgcatgcgggtagaagggccacttcagggacaactatgcaaatatggccaaacccacaaaggggaggagcaaagacaagtgtcaaaacttgggatgactcttcaagtgaagatgaacctcctaggccacgcagccaccgatcctcatcacgctcatcatggtcatcacacaagtgccttatggcaagagaaaattttgaaacatttgcaaatttcaattatgagctaacaactaaatttgagcaattagaatctaatggtccatcctcagctaccgatgacatccttatgaaaaaaaatgaaaaacttaaggctaagttagctagctctcaacctgggagcgtgaagatgatctga

SEQ ID NO: 37870 - DNA, 861 bp, Zea mays
  Peptide Sequence Number=SeqID_79649
atgaagttgtggaaggagacttccaggagttccaagactacgacgagttctaggtgtgggttagcggcaacccccagtcggctgcctgtgaaggccgcggttatctacgtttcttttccgcactttgatttattgtcgagaatcttctctttaacattgacaggaaaaggcaaagaaagagaggatgcttcgcatgcgggtagaagggccacttcagggacaactatgcaaatatggccaaacccacaaaggggaggagcaaagacaagtgtcaaaacttgggatgactcttcaagtgaagatgaacctcctaggccacacagccaccgatcctcatcacgctcatcatggtcatcacacaagtgccttatggcaagagaaaattttgaaacatttgcaaatttcaattatgagctaacaactaaatttgagcaattagaatctaatggtccatcctcagctaccgatgacatccttatgaaaaaaaatgaaaaacttaaggctaagttagctagctctcaagaagcaattgaaaacttgctagagaaaatggaaattcttagcatacataataatgagctgactactaagctagaaaacattggtagcacctcagaagtatctttagttgaaatatctaaaattattaagaaagatgcttctacttcttgctttgatataattcatgattctaacccttgcaaccaagttcttgttgagaatgttgttatagaaacatgttcgaatgaggttgcaaaggagaatgagcaattaaggcaagaagtggctcgccttggcaaggctttgtatgacaagaaaggcaaagccaaacacaacgtcctcaggataacaccactgtag

SEQ ID NO: 37871 - DNA, 810 bp, Zea mays
  Peptide Sequence Number=SeqID_79650
atggcgaaccgccctcccgcccgccctaccgccaacacgccgcaatcccgcccgacgcatgtcgcacgtccacctagcgtgacccgtggaaccctacagccgcccccgaaccagcccaaagcgagaccggaggggcacgagcgccaccgccttgatcccgcccgctcctccccagatctcctcgccattgtcgccgccatgcccggattcgcgctctattcgcccagatccgaccgcgactttgatttcccaaccgacgcaggagcggtgggtctgaccgaccgtgacccgtcttctcatgggcgcttgctggtgtggtttgctgatcaaaatggggatgtgatgcttctgttgcgccgtgtaagtcaccagatcagacatgtcctcctggcaatttctgaactgttcgtgctcggtccaattcttcgaacagtttccaaatcgacaataggtgtttcagccactggcgatgtctttgttgcctgcaatgagtgtgccttccctatctgtcgcccatgctatgagtatgagcgcgaggggaaccaatgttgcccccagtgcaagactagatacaagagacaaaaatattggtttcctggcaacttctttgagtgggactacaaggacaagcatggtgtcaagggcctgtgcgtcgtgggcgccatcaacaactgtacctcccaactcccccacctatgggagatcttctcccccataatatatgcgtctgagaacatcattgcatcatgccactgggcatacaagggtgttgaggaagactcaaccctagaagatccctatttcttataa

SEQ ID NO: 37872 - DNA, 555 bp, Zea mays
  Peptide Sequence Number=SeqID_79651
tttgctgaggttgtcagccatggaaaactgcttgctgagattgtcaatcatggaaaactggtgtctgatgagatcatcataaatctgctgtcaagacgtctggaagagggagaggaaaagggtgaattggggttcatccttgatggctttcctcgaaccataggacaagcggagatacttgaaggagtcacagacattgatttggtgatcaatctcaaactccgagaagaagctctgcttgcgaaatgccttggcaggaggatgtgcagccagtgtggagggaacttcaatgtggcctccattgatattgagggtgaagatggtgggcctcgaatgtacatgcccccactgttgcctcctccacagtgtgaatcgaagctgattgctagagcagacgatactgaagaagtgactgaaccagtggaggagttctacagagcacgtgggaaactgctggagttcaatctgcctggtgggatacccgaatcatggccgaagttactgcaggccctgaacatagaagaccccgacaataagcgatctgcagcagcatga

SEQ ID NO: 37873 - DNA, 630 bp, Zea mays
  Peptide Sequence Number=SeqID_79652
aagtttctgaccaaacgagaaggcagaaaagaggccccaacagccgcgctcctattcagaaatctatctgaacagtttgctgaggttgtcagccatggaaaactgcttgctgagattgtcaatcatggaaaactggtgtctgatgagatcatcataaatctgctgtcaagacgtctggaagagggagaggaaaagggtgaattggggttcatccttgatggctttcctcgaaccataggacaagcggagatacttgaaggagtcacagacattgatttggtgatcaatctcaaactccgagaagaagctctgcttgcgaaatgccttggcaggaggatgtgcagccagtgtggagggaacttcaatgtggcctccattgatattgagggtgaagatggtgggcctcgaatgtacatgcccccactgttgcctcctccacagtgtgaatcgaagctgattgctagagcagacgatactgaagaagtgactgaaccagtggaggagttctacagagcacgtgggaaactgctggagttcaatctgcctggtgggatacccgaatcatggccgaagttactgcaggccctgaacatagaagaccccgacaataagcgatctgcagcagcatga

SEQ ID NO: 37874 - DNA, 375 bp, Zea mays
  Peptide Sequence Number=SeqID_79653
atggaggacctaggtttagggttaatttttagttgtttactagaaggatttatgggttgcaacacatttgtatgggaaacaatctgtcctggacgaggtttgacctcgtttgacgctaccaagctctgtgtagctttggaggacatagcttgcatgctggagcagggctctctagtgttccaagagtatttggacaaggtcaacaacgataacaaccatattgacgacgactatgtgtcctccgaattgtcctcaccacctcctactaaagcacacctcggtgaagacttggatttcgccgagcacttcaaaaacatgtggggtgttgaatatgactcagatcagatgccatcatttagtggcaatgagctctaa

SEQ ID NO: 37875 - DNA, 381 bp, Zea mays
  Peptide Sequence Number=SeqID_79654
atgtcggtcgctaaagcctttagcgacggcacatgcagcgaccatccttatgggtcgctaaaagtttttagcgaccaaccggaaacaatctgtcctggacgaggtttgacctcgtttgacgctaccaagctctgtgtagctttggaggacatagcttgcatgctggagcagggctctctagtgttccaagagtatttggacaaggtcaacaacgataacaaccatattgacgacgactatgtgtcctccgaattgtcctcaccacctcctactaaagcacacctcggtgaagacttggatttcgccgagcacttcaaaaacatgtggggtgttgaatatgactcagatcagatgccatcatttagtggcaatgagctctaa

SEQ ID NO: 37876 - DNA, 984 bp, Zea mays
  Peptide Sequence Number=SeqID_79655
atgtcacgacaactcgccgaacgacgcaagaaggcggaggaagagtacctatcacacttcacggtggatcgccaccagaagatcatccatcaaggggagatcgatatggaatctcttctacctccgcctcaggctcctattgttacaaagttcacatgtggtgggttttctgtgggcatttgcttcagtcacttggtgttcgacgggcagggtgctgcgcaatttctgaaagcagttggtgagatggctaggggcctccctgagccatcgatcaagccaatctgggctcgtgatgccatccccaacccacctaagccacccctaggcccgccaccgtcattcaccgcattcaacttcgagaaatcagtcgtcgagatcgctctggacagcatcaagcgcgtgaaggatcaagttgcaagcgaaaccaaccagaagtgttccactttcgacgtggtcaccgccatgatcttcaaatgtcgcgccttggcagtcgacttcgcacctgacgctgaggttcgcctgggctttgcagccagcactcgccacctgctgagcaatgtgctgccctccgtcgatggctactacgggaactgtgtgtacccaggtggtctcaccaagaccagccaggaggtgaaggaagcttcactggtggagatcgtgaccgcgatcagggaggccaaggaggctctgtcgtcgaggttcctcgactggttgagcggcggcgccaaggagaaccactacaacgtgtcgctggactacggcaccctcgtcgtgaccgactggagccacgtgggtttcaacgacgttgactacgggttcggtgagccaagctacgtgttcaccctgaacgacgacgtgaacatcgttccctccgttgtgtacctgaagcctcccaagccgaagcagggcatcaggctggtgctgcagtgcgtggaagggcggcactctgccgtgttcagcgaggagctgcagaagcacgcatag

SEQ ID NO: 37877 - DNA, 993 bp, Zea mays
  Peptide Sequence Number=SeqID_79656
atggcgcagagggtcttcttctccatgaagaaccctagaactcgcccccggcgtcgtcgagttgatttggtagtttgcggctcgtctaggaaagtcggagctgctcgttccttgtgtttgagcttggcaacgatgactctagatgtgtctgttacaaagttcacatgtggtgggttttctgtgggcatttgcttcagtcacttggtgttcgacgggcagggtgctgcgcaatttctgaaagcagttggtgagatggctaggggcctccctgagccatcgatcaagccaatctgggctcgtgatgccatccccaacccacctaagccacccctaggcccgccaccgtcattcaccgcattcaacttcgagaaatcagtcgtcgagatcgctctggacagcatcaagcgcgtgaaggatcaagttgcaagcgaaaccaaccagaagtgttccactttcgacgtggtcaccgccatgatcttcaaatgtcgcgccttggcagtcgacttcgcacctgacgctgaggttcgcctgggctttgcagccagcactcgccacctgctgagcaatgtgctgccctccgtcgatggctactacgggaactgtgtgtacccaggtggtctcaccaagaccagccaggaggtgaaggaagcttcactggtggagatcgtgaccgcgatcagggaggccaaggaggctctgtcgtcgaggttcctcgactggttgagcggcggcgccaaggagaaccactacaacgtgtcgctggactacggcaccctcgtcgtgaccgactggagccacgtgggtttcaacgacgttgactacgggttcggtgagccaagctacgtgttcaccctgaacgacgacgtgaacatcgttccctccgttgtgtacctgaagcctcccaagccgaagcagggcatcaggctggtgctgcagtgcgtggaagggcggcactctgccgtgttcagcgaggagctgcagaagcacgcatag

SEQ ID NO: 37878 - DNA, 193 bp, Zea mays
  Peptide Sequence Number=SeqID_79657
atgtcggacgaccttgttgttcctgtccactttgaagttggccaagaactttgctttcgcctcttggatcatccgctccttgtgctcctcgaactggagctgctcgtcagccggcaagcgccaaatactcaagaagaactggcggcggtgctctctggtcaggcgcagacggtccgcggcctggggccggacg

SEQ ID NO: 37879 - DNA, 267 bp, Zea mays
  Peptide Sequence Number=SeqID_79658
atgtcggacgaccttgttgttcctgtccactttgaagttggccaagaactttgctttcacctcctggatcatccgctccttgtgctcctcgaactggagctgctcgtcagccgacaagcgccaaatactcaagaagaactggcggcggtgctctctggtcaggcgcggacggtccgcggcctggggccggacggggcggcggaagatcgccggcggcgcttggatctcgctcctgggaggtaccccgtcggggaggagagatcctag

SEQ ID NO: 37880 - DNA, 366 bp, Zea mays
  Peptide Sequence Number=SeqID_79659
atgaggctcacagatgctggtgatggtcagatgaaaacccttcatctggatgatggtcttcgagtatgtttcaaatggatcactattcgagcgattgcatgcagattaatattactaatatgtgcaagtgatcaatcaatcattcactgctgcagattactattactacaatgcattgtagcatggccacaggttcacccaaatgaaagcctctatgaaaaaaagcctgaagagccaactctcgtcctgacatcattggtgattgagatactacaaccaggagcaaaccccatacttaccaatttgaatatgtcgaaaatgcaccttctcctaagactgggaacagctcagaaggaaaacagatga

SEQ ID NO: 37881 - DNA, 846 bp, Zea mays
  Peptide Sequence Number=SeqID_79660
atgaggctcactgatgctggtgatggtcagatgaaaacccttcatctggatgatggtcttcgagtatgtttcaaatggatcactattcgagcgattgcatggatgctgctggtgaaattgctgctgaattacaagtgcaacattgctcatgctctggaaaagactaagtatccagattcagacatattttggaagaattttgatgagaagtaccatttctcctgtcagttcactactgatataattgctatgaacaatgctgattttatcatcaccagcacataccaagaaattgctggaagcaaaaatattgttggacagtatgagagtcatattgcctttactcccgagttgtcccatgggatcgatgtcttcgatccaaagttcaatatagtctctcctggagctgacatgtccatatactttccacatacgagaaggccaagcgactcacctctccatggttcaatcgaaaatttgatttatgacccggagcaaaacgatgaacacattgggcatctggatgaccggtcaaagcccatcctcttctccatggcaagactcgacagggtgaaggacataacagggctggtcgaagcttttgctaagtgcgctaagctgagggagctggcaaaccttgttgtcgttgccgggtacaatgatgtcaagaagtccaaggacagggaagagatcgcggagatagagaagatgcatgaactcatcaagacccacaaattgttcaggcagttccgctggatctctgcccagacaaacagggcccgtaacggtgagctctatcgctacatcgttgatacccatggtgctttcgtacagatatattcttga

SEQ ID NO: 37882 - DNA, 222 bp, Zea mays
  Peptide Sequence Number=SeqID_79661
atggcggcagccggggtcagtggagcattgtatgccaaggcggtgaggcctggacgcgaactgggaatcgatggggacggttgtcatgtgtggggtcggagtaccctgacatgccgtaccattcaggaaatggttgatggtgtgacttggcctaccaccctgccaccgggttggacggtcgagtgggatgttgctccagcaggagaggagcacgaggagtag

SEQ ID NO: 37883 - DNA, 246 bp, Zea mays
  Peptide Sequence Number=SeqID_79662
atggtgggtacaagtgcggtctgcacggcggcagccggggtcagtggagcattgtatgccaaggcggtgaggcctggacgcggacggggaatcgatggggacggttgtcatgtgtggggtcggagtaccctgacatgccgtaccattcaggaaatggttgatggtgtgacttggcctaccaccctgccaccaggttggacggtcgagtgggatgtggctccggcaggagaggagcacgaggagtag

SEQ ID NO: 37884 - DNA, 282 bp, Zea mays
  Peptide Sequence Number=SeqID_79663
atgcgacctgagactggggtctcccatgctagctatggtgggtacaagtgcggtcactgcacggcggcagccggggtcagtggagcattgtatgccaaggcggtgaggcctggacgcgaacggggaatcgatggggacggttgtcatgtgtggggtcggagtaccctgacatgccgtaccattcaggaaatggttgatggtgtgacttggcctaccaccctgccaccgggttggacggtcgagtgggatgttgctccggcaggagaggagcatgaggagtag

SEQ ID NO: 37885 - DNA, 369 bp, Zea mays
  Peptide Sequence Number=SeqID_79664
atgggagagtacgtgctcatccccgagcaaggatctgtccaagaggaggaccaggagcaggcttcagaggctgctattgaggatctccccgcagccccagcaattgaaggcaagccccgctatggtgggtacaagtgcggtcactgcacggcggcagccggggtcagtggagcattgtatgccaaggcggtgaggcctggacgcgaacggggaatcgatggggacggttgtcatgtgtggggtcggagtaccctgacatgccgtaccattcaggaaatggttgatggtgtgacttggcctaccaccctgccaccgggttggacggtcgagtgggatgttgctccggcaggagaggagcatgaggagtag

SEQ ID NO: 37886 - DNA, 435 bp, Zea mays
  Peptide Sequence Number=SeqID_79665
atggcgggcggaaatacgctcgccggagctaaggaacggtggctggccggtgaggattgtaatcttgccgacggagagtacgtgttcatccccgagcaaggatctgcccaacaggaggaccaggagcaagcttccgaggctgctattgaggatctccccgcagccccagcaattgaaggcaagccccgctatggtgggtacaagtgcggtcactgcacggcggcagccggggtcagtggagcattgtatgccaaggcggtgaggcctggacgcgaacggggaatcgatggggacggttgtcatgtgtggggtcggagtaccctgacatgccgtaccattcaggaaatggttgatggtgtgacttggcctaccaccctgccaccgggttggacggtcgagtgggatgttgctccggcaggagaggagcacgagtag

SEQ ID NO: 37887 - DNA, 693 bp, Zea mays
  Peptide Sequence Number=SeqID_79666
atggcggacgcgaagcagcagcagcagcagccacagcaggcggcagcggcagccaccggcgtgtggaagacggtcaagcccttcgttaacggcggggcctctgggatgctcgcgacctgcgtcatccagcctatcgacatggtcaaggtaccgtaccaccgcaccgctctgtcacccggcttccttcacagtgctcggggcttcgccccttcgtcaaaaaaggtgaggatccaattgggtgagggctccgctggtcaggtcacaaggaacatgcttgcaaatgagggtgtccgttctttctacaagggtttgtctgccggattgctgaggcaagcgacgtacacgactgctcgtcttggatcctttagccatgttaggcctgctgttagtttcctgatgcaatcgttcaatttgattgcaggagccagcgctgtttctggattcttcgcctcagcatgcagtttgccctttgactatgtgaagacacagattcagaagatgcaacctgatgctaatggcaagtacccatacacagggtctttggactgtgctgtgaagaccttcaagagcggtggcccattcaagttctacactggtttcccggtgtactgcgtcaggattgcaccccatgtcatgatgacctggatattcttgaatcagatccagaagtttgagaagaagatcggcatatag

SEQ ID NO: 37888 - DNA, 653 bp, Zea mays
  Peptide Sequence Number=SeqID_79667
gagccagcgctgtttctggattctttgcctcagcatgcagtttgccctttgactatgtgaagacacagattcagaagatgcaacctgatgcgaatggcaagtacccatacacagggtctttggactgtgctgtgaagaccttcaagagcggtggcccattcaagttctacactggtttcccggtgtactgcgtcaggattgcaccccatgtcatgatgacctggatattcttgaatcagatccagaagcgtccacaccaccacacccgccttccctcgccagtcgcacccatcgcctcgcccctcgagatccccgccgccgcgcgccgtaaggacccaaccgcaagcgttgccttgttcgtcgtatttcttatcgaggcaaacagacctggatgttgcggcgctgcgtctcgacctgtgaggctgcgagcgcttgtcgaagtcggggaccatgcagaagcagcggtggtagctcttgacgagggagtcgatggcctcccgcaccagcgttgtgcatccaccgaggggttcttcgtcggcacctcgagccgcaaaggaattccatcagccttgcgggctccattggggagctatcacgacagggcagaggcatcgggggagcgggacacggggcctaggctgcaggcggcgtag

SEQ ID NO: 37889 - DNA, 190 bp, Zea mays
  Peptide Sequence Number=SeqID_79668
atggaggttcaacactccctgtctcgacccctgagcggcaagggtctgtgcgagcacaccggcagccccaggcgcggattccccatcgccgtcgcggcgttcgtgctcgtcctagccctggccacgccctgcctctacgtcgttgtcgtgttatgtcgccttccgtcgcgcctcgccttgctgcgcaacg

SEQ ID NO: 37890 - DNA, 190 bp, Zea mays
  Peptide Sequence Number=SeqID_79669
atggaggttcaacactccctgtctcgacccctgagcggcaagggtctgtgcgagcacaccggcagccccaggcgcgaattacccatcgccgtcgcggcgttcgtgctcgtcctagccctggccacgccctgcctctacgtcgttgtcgtgttatgccgccttccgtcgcgcctcgccttgctgcgcaacg

SEQ ID NO: 37891 - DNA, 207 bp, Zea mays
  Peptide Sequence Number=SeqID_79670
atgcggggtctttctgtaaacgaaaacgaagaagagatcgaagtgactgaagagaaggcaccaccacctttggaatctcaggcagggacttgtctctactttgacatatgcgggcctgagcctgactcacctactaacgaaggcaagcccccggtgataggagttgaatgcttaaacaattcctgcattgacttccttgatctttga

SEQ ID NO: 37892 - DNA, 726 bp, Zea mays
  Peptide Sequence Number=SeqID_79671
atgcggggtctttctgtaaacgaaaacgaagaagagatcgaagtgactgaagagaaggcaccaccacctttggaatctcaggcagggacttgtctctactttgacatatgcgggcctgagcctgactcacctactaacgaagggaagccccgagtctttgatcttgagataccttaccttgactcccttataaccagcatacccttgagagtcttttctttagtcggtttatgtaatcgcttccggatttctatatctccgatgttctgtaatgtctgcaagacgggtgaaacgttcctagaaaggaccagcatatgggttgtggatggcgacagaataaacgaattgagaggttacatccgccgtctgcaggatcagcttgctgatcgagacttagcgcttgactgggcggtacagtctcgttcagtggcttgggctaaggaagctaaggctcgagcccgagtcgaagaacttagctctgccattgacaatctgcaggcgtattgcaataccctacatgaggaagtccatgtactgtattcgcaactacatcccagtgcacctatggatcctgtcgggtcggaagccggaccctcgcacgttgcgggagaagcgcttggtggtgagctagacctttttaagccccctccttctatgaggctgttcgatgaatggtctcccacacccgacgacgaggctgccaggagcaaccaaaagcagaaatag

SEQ ID NO: 37893 - DNA, 429 bp, Zea mays
  Peptide Sequence Number=SeqID_79672
gtttatgtcaaatacagtgctcttttccgcataacaagagaagcatatccatatgaagacactgctcagcttctttccagtgtgatatctcattatggagccagtcgagtaatgtggggaagtgacttcccctatgttgttcctgaatgtggttacaaaggaggaagggaggcgatttctcatgtcgccagcaagataccagtttcccagtcagatttggaatggatcttgggaaaaacattagcgctccaggtaagggaagtcgtgctaatcactagagagctgatggcaaccatgggttttgcatcggaagaagtcatctttagtacccttagattcattgcagattcactcgaaaatcttgggctcgtcctagatctttcggcggttttggcaccccataatcaagtgacatcgactcaaacttaa

SEQ ID NO: 37894 - DNA, 564 bp, Zea mays
  Peptide Sequence Number=SeqID_79673
atgagctttctgaacatctttgaaagcgggaacccttttcataaagagttacagacgacgccagtcaacaagtacaatgggcatcgtatggccgaacagataaagctagcatgccaacggttacggccaagttcggtttatgtcaaatacagtgctcttttccgcataacaagagaagcatatccatatgaagacactgctcagcttctttccagtgtgatatctcattatggagccagtcgagtaatgtggggaagtgacttcccctatgttgttcctgaatgtggttacaaaggaggaagggaggcgatttctcatgtcgccagcaagataccagtttcccagtcagatttggaatggatcttgggaaaaacattagcgctccaggtaagggaagtcgtgctaatcactagagagctgatggcaaccatgggttttgcatcggaagaagtcatctttagtacccttagattcattgcagattcactcgaaaatcttgggctcgtcctagatctttcggcggttttggcaccccataatcaagtgacatcgactcaaacttaa

SEQ ID NO: 37895 - DNA, 936 bp, Zea mays
  Peptide Sequence Number=SeqID_79674
atgaacaaaagaccagcatccaaggtgccattacaaacggaactccggttccgtccccgcgggtcctcgctcccgtcctcgccacgcaagcgaggaagaggacggaatgttgcatccgagctgggcagcaacagtccgcctcccccggcatggctggaggacgcctcctccgcagagctggaggatggtttccaccaccagaagctggaagaggaggtggccagccgacccgtgcgggaggtagagccccggctcgcctcgctctccgccccagcaaggatgatgaacatccttgaagctaagggcgggaccaagatcgcagcccgacttgcttctccccatccaggggctggtggtcaccgtctcgggtgtcccccattcgggggctcggaaggtggaaagacacaatgcataagggaacgcgaagacatggtcgcctttcaagggggccaccctccttttaaaggcgactctccctacttgcgtccccagccgtcgcaggctgagtcttctccaacacgctccaaggtcctccccctatggcgcgggggctgggtcccacgcgtcatgcaaactggcccagggcagaagaagccaaaccgccgcgcgcggtgcatgcaaccgcccagcggttacaagcattcctccactttcgcccagaccagcgggggaagcaagcgacgcttcgccttcgtcataatgaccgcgtcaaaaaaggctggcccctcggaggggttcaacagccgcctaagagcgcttgggttccacgcccactactggtcagaggttcgaaggccggcccctcggaagggttcaacggccgcctcaggccactcgggctccgcgcccactactgatcagggcgggaacgatcttgtaacggaatcccatcagagggaggcatcgagccctcggaccccgtcgaaaggggactag

SEQ ID NO: 37896 - DNA, 863 bp, Zea mays
  Peptide Sequence Number=SeqID_79675
atgaacaaaagaccagcatccaaggtgccattacaaacggaactccggttccgtccccgcgggtcctcgctcccgtcctcgccacgcaagcgaggaagaggacggaatgttgcatccgagctgggcagcaacagtccgcctcccccggcatggctggaggacgcctcctccgcagagctggaggatggtttccaccaccagaagctggaagaggaggtggccagccgacccgtgcgggaggtagagccccggctcgcctcgctctccgccccagcaaggatgatgaacatccttgaagctaagggcgggaccaagatcgcagcccgacttgcttctccccatccaggggctggtggtcaccgtctcgggtgtcccccattcgggggctcggaaggtggaaagacacaatgcataagggaacgcgaagacatggtcgcctttcaagggggccaccctccttttaaaggcgactctccctacttgcgtccccagccgtcgcaggctgagtcttctccaacacgctccaaggtcctccccctatggcgcgggggctgggtcccacgcgtcatgcaaactggcccagggcagaagaagccaaaccgccgcgcgcggtgcatgcaaccgcccagcggttacaagcattcctccactttcgcccagaccagcgggggaagcaagcgacgcttcgccttcgtcataatgaccgcgtcaaaaaaggctggcccctcggaggggttcaacagccgcctaagagcgcttgggttccacgcccactactggtcagaggttcgaaggccggcccctcggaagggttcaacggccgcctcaggccactcgggctccgcgcccactactgatcaggg

SEQ ID NO: 37897 - DNA, 159 bp, Zea mays
  Peptide Sequence Number=SeqID_79676
atgtcgcgcgcgttcgacgactactatatcaaggattgtagcgtcatctcggcgccggagaacttctaccggcaggtgtggcacatgctctccaatgatgagaccatgcaaatggtgacatatattgaagtctgcatgatactgatagttgcaatgtag

SEQ ID NO: 37898 - DNA, 966 bp, Zea mays
  Peptide Sequence Number=SeqID_79677
atggcattcggcgaaccacaacagcagaatcttatcttggcattgataaaaaccaagtatttgcgtgattgcgtccagcgtatagaatacctcctgtccagagagcatcttggacgtcttcgccaagaattggatggcaaaacaacagtaggctttgcatttggtttctctatatttgagtgtgcagacttggcagatgaaagaaagccgtggacgggtaacggtgacgaaggaactgaaggctgggggggggcatacgatcatggtgtcctgtgtcatcttcagcgatggcaaaaagattgcaatgatagaagagaggaccgaggcaaagcagcattgtgcacgcataccctccagcagcagcagcaggcagcacaggcgcaggtggtcattcacttgcgcgcccttttgcgaccagcactcgagcctttccatgaccacagagaaccaaccagttgggtggatcatccgtctgtcaccttgaacttgaagcgactacaggaggctgcggaagctggttctggttggaatggatggatgcattggctccagcagagactgaacactgatagtaactggagatcgtggcagtacagttcctttgttgcctttgaccgtctcacagttgccacaacaaacaccacagatactgctgctctctccaaactgagcacggtgatagcgggtaggagactgtggactggagtagcagtagaatacaatatctgccgtctgatcaactccgtggctgtcaatcaggaaatgtatgaactcgtcagtaatcctgttgatttatcctcagaagccggtggtttaccacgtttgaagcaggtgcctgcacatgtaactacaagcagaccgttgtttcactactacattgcaactatcagtatcatgcagacttcgatatatgtcatgatttgcatggtctcattattggagagcacgtgccacacctgccggtag

SEQ ID NO: 37899 - DNA, 144 bp, Zea mays
  Peptide Sequence Number=SeqID_79678
atgtcgcgcgcgttcgacgactactatatcaaggattgtggcgtcatctcggcgccgaatgtgtggcacgtgctctccaatgatgagaccatgcaaatcatgacatatatcgaagtctgcatgatactgatggttgcaatgtag

SEQ ID NO: 37900 - DNA, 144 bp, Zea mays
  Peptide Sequence Number=SeqID_79679
atgtcgcgcgcgttcgacgactactatatcaaggattgtggcgtcatctcggcgccggaggtgtggcacgtgctctccaatgatgagaccatgcaaatcatgacatatatcgaagtctgcatgatactgatggttacaatgtag

SEQ ID NO: 37901 - DNA, 144 bp, Zea mays
  Peptide Sequence Number=SeqID_79680
atgtcgcgcatgttcgacggctactatatcaaggattgtggcgtcatctcggcgccagaggtgtggcacgtgctctccaatgatgagaccatgcaaatcatgatatatatcgaagtctgcatgatactgatggttgcaatatag

SEQ ID NO: 37902 - DNA, 144 bp, Zea mays
  Peptide Sequence Number=SeqID_79681
atgtcgcgcgtgttcgacggctactatatcaaggattgtggcgtcatctcggcgccggaggtgtggtacgtgctctccaatgatgagactatgcaaatcataatatatatcgaagtctgcatgatactgatggttgcaatgtaa

SEQ ID NO: 37903 - DNA, 144 bp, Zea mays
  Peptide Sequence Number=SeqID_79682
atgtcgcacgcgttcaacgactactatatcaaggattatggcgtcatctcggcgccggaggtgtggcacgtgctcttcaatgatgagaccatgcaaatcatgacatatatcgaagtctgcatgatactgatggttgcaatgtag

SEQ ID NO: 37904 - DNA, 144 bp, Zea mays
  Peptide Sequence Number=SeqID_79683
atgtcgcgcgcgttcgacgactactatatcaaggattgtggcgttatctcggcgccggaggtgtggcacgtgctctccaatgatgaaaccatgcaaatcataacatatatcgaagtctgcatgatactgatgattgcaatgtag

SEQ ID NO: 37905 - DNA, 144 bp, Zea mays
  Peptide Sequence Number=SeqID_79684
atgtcgcgcgtgttcgacgaccagtatatcaaggattgtggcgtcatctcggcgccggagttgtggcacgtgctctccaatgatgagatcatgcaaatcatgacatatatcgaagtctgcatgatactgatggttgcaatgtag

SEQ ID NO: 37906 - DNA, 144 bp, Zea mays
  Peptide Sequence Number=SeqID_79685
atgtcgcgcgcgttcgacgactactatatcaaggattgttgcgtcatctcggcgtcggaggtgtggcatgtgctctccaatgatgagaccatacaaatcatgacatatatcgaagtctgcatgatactgatggttgcaatgtag

SEQ ID NO: 37907 - DNA, 144 bp, Zea mays
  Peptide Sequence Number=SeqID_79686
atgtcgcgcgcgttcgacgactactatatcaaggattgtggcgtcatctcggcgccggaggtgtggcacgtgctctccaatgatgagaccatgcaaatcatgacatatatcgaaatctgcatgattctgatggttgcaatgtag

SEQ ID NO: 37908 - DNA, 210 bp, Zea mays
  Peptide Sequence Number=SeqID_79687
atggccacctaccccggcggtaaaaccggcccgtggcggcggagctcgccggacccgcccaggcgcacctccctggtgcacaatttccccgactacgcaggccaacacaatgaagagaagaatgcgaacacgggcatgggtaactcacctcgactggggctgcgtagtaaccgggcgacgttgggagcggatttggccgcagcagtgtga

SEQ ID NO: 37909 - DNA, 276 bp, Zea mays
  Peptide Sequence Number=SeqID_79688
atggccacctaccccggcggtaaaaccggcccgtggcggcggagctcgccggacccgcccaggcgcacctccctggtgcacaatttccccgactacgcaggccaacacaatgaagagaagaatgcgaacacgggcatgggtaactcacctcgactggggctgcgtagtaaccgggcgacgttgggagcggatttggccgcagcagttccgcacacggggcgaatcgacgaccagccgagggtgcccgagttgcggcgctctcacaccaagcgttag

SEQ ID NO: 37910 - DNA, 615 bp, Zea mays
  Peptide Sequence Number=SeqID_79689
atggagacaccatgttcggcgccctccgagggcaacatggcgctttccccccttcctccttgcggaaaggcgacgaaggggcgcgcattcaaatacaaggatcgcctggcgcattatcctgacacgcgtgcctcagtcggcaaggtcgaacctcaggcgcaacaggaagctccgcctcgcctgaccttgggcctcggcctcaggaggaagtctccgccttgcccgaccccatggctcggcccccgcctcggcctcggaaggtggtctccgcctcgcccgaccccagggctcggccttaacctcgacctcaggaggaagtctccgcctcgcccgaccccagggctcggccccgcttcggcctcggaaggtggtctccgcctcgcccgaccccagggctcggcctcaacctcgacctcggaaggtggtctccgcctcgctcgaccccagggcccggcctcaacctcgacctcgggaggaatcgcgtcctcgcccgaccccggcctctgcctcaggaggagtctccgcctcgctcgaccttgggctcggaccgaccacgccgcaggggggctcaaacgctcctccgacggccacgacaccgcgtacacagggctctag

SEQ ID NO: 37911 - DNA, 603 bp, Zea mays
  Peptide Sequence Number=SeqID_79690
atgttcggcgccctccgagggcaacatggcgctttccccccttcctccttgcggaaaggcgacgaaggggcgcgcattcaatacaaggatcgcctggcgcattatcctgacacgcgtgcctcagtcggcaaggtcgaacctcaggcgcaacaggaagctccgcctcgcctgaccttgggcctcggcctcaggaggaagtctccgccttgcccgaccccatggctcggcccccgcctcggcctcggaaggtggtctccgcctcgcccgaccccagggctcggccttaacctcgacctcaggaggaagtctccgcctcgcccgaccccagggctcggccccgcttcggcctcggaaggtggtctccgcctcgcccgaccccagggctcggcctcaacctcgacctcggaaggtggtctccgcctcgctcgaccccagggcccggcctcaacctcgacctcgggaggaatcgcgtcctcgcccgaccccggcctctgcctcaggaggagtctccgcctcgctcgaccttgggctcggaccgaccacgccgcaggggggctcaaacgctcctccgacggccacgacaccgcgtacacagggctctag

SEQ ID NO: 37912 - DNA, 672 bp, Zea mays
  Peptide Sequence Number=SeqID_79691
atggctcccttcgcgctcggatctcaggtggtcgccgtagcctcggtgtctgtcggcttgaactcttccgtcaggggtgtcgcactcaaggaatgtgaacaccctcttgcggcacgacagagaaagtttgttagagtgcaacttctaagatcaggatggtgtattaggaaaatcccaggcagggatgcatgccaaatcacggtgctgcatcatgaggacaatggaatgaatatagagatggcaaagctagctttttccaagggcatctggagttacatatgtaaaatgagcaatgctctacgtcggtatcctcagcatggcagtccatcagtgtcaattctgaccatgcagaaacttatgaagaaggatctgacaaatctaagcctctttgcatgtcagtttcccaaggatttggagactgccgacgcaagcctttctgcttctcagaacactgcagcatcggtcgttccttccacaccgacttccaggacttcaccatgcaagcttgcggggaggaagtctcgccaaatgatcgcgagcgggattctgctggttggaagcatcgtttgtctatctcgaggccgatccaacctcggggcgcagctcgcgatggccttcttcctgaaaaaggccttcaagcaagagaggcaatcaggctcctcatcgacatga

SEQ ID NO: 37913 - DNA, 672 bp, Zea mays
  Peptide Sequence Number=SeqID_79692
atggctcccttcgcgctcggatctcaggtggtcgccgtagcctcggtgtctgtcggcttgaactcttccgtcaagggtgtcgcactcaaggaatgtgaacaccctcttgcggcacgacagagaaagtttgttagagtgcaacttctaagatcaggatggtgtattaggaaaatcccaggcagggatgcatgccaaatcacggtgctgcatcatgaggacaatggaatgaatatagagatggcaaagctagctttttccaagggcatctggagttacatatgtaaaatgagcaatgctctacgtcggtatcctcagcatggcagtccatcagtgtcaattctgaccatgcagaaacttatgaagaaggatctgacaaatctaagcctctttgcatgtcagtttcccaaggatttggagactgccgacgcaagcctttctgcttctcagaacactgcagcatcggtcgttccttccacaccgacttccaggacttcaccatgcaagcttgcggggaggaagtctcgccaaatgatcgcgagcgggattctgctggttggaagcatcgtttgtctatctcgaggccgatccaacctcggggcgcagctcgcgatggccttcttcctgaaaaaggccttcaagcaagagaggcaatcaggctcctcatcgacatga

SEQ ID NO: 37914 - DNA, 279 bp, Zea mays
  Peptide Sequence Number=SeqID_79693
atgcaggaatcccttgcaggaccgccatcgcagcaaaaatcctcccgagggcctccctacactgaccactcccctactgcccttgcccctttcggagcagaggagggcttaccagcacagggcatcgacgagatcgtatggagacggcgcgacgccttcgccacacgacgcgagttccaccaggtctgcaccgaagaccagccgacacgcccgccccggccgaacacggatcgctcccacccgaagatcggcactcagggacccaagcacatgcgctag

SEQ ID NO: 37915 - DNA, 1392 bp, Zea mays
  Peptide Sequence Number=SeqID_79694
atggccgtccgattcaaattgagcggtcagattttccctttagcgaaaggcacatgcgtcggcccccagaacactctctctcccgttgaaccaccggtgctggccaagacccgaccgagagcagaggagggcttaccagcacagggcatcgacgagatcgtatggagacggcgcgacgccttcgccacacgacgcgagttccaccaggaagggcgcacgacacggcacatatacccgacggtggagtccgatcccgagagcccggctgaggattccctggtctggcggcggccggtccggagatcaggtggcaatgagattgatggttctggttatgactatggtgctggtaagtggtattctttccgtttggaaaggatggctcgtcttagacacactgcacgaaagtccatcatccccttcttaccctcccgccttgctgaacgtccgcttcgccatcccgtggccggacagtccagtcacttggagaggctgcaccaccgcctgcatgaggagcaggagcgtcaaagacaggagcagctgggttcttctttctcgctccaccaggagatagagtccgtgaggagctgctcccctgtgcttcctctggaggcgccccctgcaccaccactgggcgccccaacctctggagtagctgctggaggagacccagacgacggaggtggcgacgacagctcgagccacgacaccgacttttctgcggaccaggagccggaaggatgggttgctcgacccatcactcgcgacgctgctcgcgggtgtcacttccacgatgcgctcgacaccctgctacgtcgggcacttaaccggcgtacttggtccatcgagtatcgctgtgtggtctaccagcatagtcgcggggtctacccggaccgctgggaggcgacctgcttggtgcgccgtccgaagaacagtctccagggtgcagaggcctgctcagagcactattctatctctgagcgggactcagctgaggcggccatgcaagatgctgcacggcgtgcgctttcgcactactgctcggttctcggtgaggtagctgacggtctcaacctgaagtattacccctgccgtccatctggcagcacaggaggcgtgattgtctcacctattggtgaggacaatcctaggttgagcagcaaagtcaacctagccgccgtgctaaacacggagctggaccatgcactagacgagctgagtagggctcgtgctgagattgccctgctgtgggctgagcgcgcggagcgtcgtcacctggatgatggttcccccgctcccgtcgggactcagcacccgtaccgctcacctcggcgtggacgccagtcttatggcaatcccgactgcaagaccaagataaatctagaaccatag

SEQ ID NO: 37916 - DNA, 198 bp, Zea mays
  Peptide Sequence Number=SeqID_79695
atggcaccagctcctcgcatcgcatctcccctgctaggcctcctcgtcccgttgaggtctggccagccagacaggcaattgaaaaagagaattgatcttttttataggcgaagtgttgaagatggctttggtgacggaaatgtcttgttagcatcaagtaagtggcgacatcacaacccctacaagcttgtgccttaa

SEQ ID NO: 37917 - DNA, 165 bp, Zea mays
  Peptide Sequence Number=SeqID_79696
atgggccaagtcatttatattggggctaacgacaaagacaggcaattgaaaatgagaattgatcttttttatgggcgaagtgttgaagatggctttggtgaaggaaatgtcttgttagcatcaagtaagtggcgacatcacaacccctacaagcttgtgccttaa

SEQ ID NO: 37918 - DNA, 336 bp, Zea mays
  Peptide Sequence Number=SeqID_79697
atgcagatgataaatatatgtagggaagcctcatatataccttccaagtccgggtgcaagaaccacctgctgggttgctcggtggtgcagttggcggcgtggaggacaactacctgggaaaaagatacagatatcgattttgctcaagatgcaattgatgaatataagctgtttggtagtctagattatatagatgtagattataatttacttattgtaattatcacttgtcttgcagacaggcaattgaaaatgagaattgatcttttttatgggcgaagtgttgaagatggctttggtgaaggaaatgtcttgttacttgttagcatcaagtaa

SEQ ID NO: 37919 - DNA, 483 bp, Zea mays
  Peptide Sequence Number=SeqID_79698
atgcccgacgccccgactgcctcgacccgcctacgcccaggaagacccgacgccgccaggcgaccctggccacccgcaccctgccccggcgagccgacgctagcccgcgccaagaacgccgccatcgcctcccgcgccgaaaacttcaaaatggtcatcaaagctgatggagatgatctggttcctgaatatttagtcaaatggcaaggacttccttatgcagaatctacctgggaaaaagatacatatatcgattttgctcaagatgcaattgatgaatataagctgtttggtagtctagactatatagatgtagattataatttacttattgtaattatcgcttgtcttgcagacaggcaattgaaaatgagaattgatcttttttatgggcgaagtgttgaagatggctttggtgaagaaaatgtcttgttagcatcaagtaagtggcgacatcacaacccctacaagcttgtgccttaa

SEQ ID NO: 37920 - DNA, 1035 bp, Zea mays
  Peptide Sequence Number=SeqID_79699
ggaacactcaactcacaggataagtttatggatagtgagaattctgacggcgacgacgatgatgaccttgaactctcagatgatgaagatgattttgttgagaatcggaggcaacctaaacgacttaagattgtagcaactaaaacttccaagggaggacagttgcccatgccagttcaaccaaaacgaggggtgtctcacagtgatgaagaatatttttcaggaaaagactcagatgttcccagcgattcggatttcaaacacataccgaaaaaacctgacaggttgcatcagaaacctgtgggccgcagtgatgttgccccaatcagttctcataatgagcttagaacttctggaaggaggaggacggtgaaaaagatctcatatgctgaaagcgaagaaagtgatgatagtgaggagaagtcaaataagcgacaaaagctcatcaaggaggaaccggaagaggaggatggagaaacaattgaaaaagttctgtggcatcaacccaagggtgtagcagaagaggcaataaggaatcaccggtcagctcaacctactgttgccagcctaacatcggactttgaccaacaatgggatgaattagagttctatataaaatggaaaggccagtcttacctgcattgtcaatggaagatactatcagagctccaaagtgttagtggattcaagaaggttgaggttgaacggatatttgctgatagggtcagcaaagctgatggagatgatctggttcccgaatatttagtaaaatggcaaggacttccttatgcagaatctacctgggaaaaagatacagatattgattttgctcaagatgcgattgatgaatataaggctcgtgaagctgcctcagctatacttgggaaaacagtagatttccaacgaaagaaaagcaaagctagtttgaggaggcttgatggtcagccagaatggctaaaagctggcaagcttcgtgattatcagctggaaggactaaactttctcgtcaatgggtacgtggagaaacgatactaa

SEQ ID NO: 37921 - DNA, 405 bp, Zea mays
  Peptide Sequence Number=SeqID_79700
atgctccccgcacgcaacaaggccctgattcgcaatgaggagggtgattcgaatacgatggagctactcaccgcagctggagggcaatggagggagctggccacggagaagaggggacccgcggcggcgcttgagctacggcgagcgattccgacgtcgccggcccccaatcgcacccggaaaggtcacggaagggatgagcagggcgcaacaacgcggtataaatcacccgaggcaatacgtggattacagcagtcattgcgcgacggactcggcctccctcgcgcgaagaccgtgaatcccagtagaaatcgcgtggagtttgttttggtcgcccgcgaggaagacggacctggtagatgggccccaccggcagtggcacaaaagggaaacgcgcagaggtga

SEQ ID NO: 37922 - DNA, 1437 bp, Zea mays
  Peptide Sequence Number=SeqID_79701
atgggccgttggattagaatcccacggatcagatcagacctacctgagattgaatcggggcgaggcgagaaccgcacgatccatgatctacggcaacgatcgaatcccaccgaatcgctggttgatccacactcgatcccagatgtcctacgaacacacccggtcacccacgggctgcccggcggcgacgtacgcgggaggcggatgcggcagcgagttgatcccgagcggatcgtggcggcgcaacggcggtataaatcacccgaggcaatacgtggattacggcagtcgttgcgcgacggactcggcctccctcgcgcgaagaccgtgaatcccagtagaaatcgcgtggagtttgttttggtcgcccgcgaggaagacggacctagtagatgggccccaccggcagcgtttagtgaagcggagctgatggctcgtcttagacacactgcacgtaagtcggtgattcctttcctgccgtctcgacttgcggagcgtcctctgcaccgcaccgtgtccggtcagtcgagtcacctggagaggctgcaccaccgcctgcgtgaggagcaggaacgccggcgccagcacggagagcagcagggctcttcctcctcaccccagcaggaggtggagaccgtgaggccccgttcctctgttgcccagctggaggcgccccttgtaccaccgcgggacgccccggctgttggaggagctactggaggagaccccgacgacgacgactcagaccacagcacggagtcttctgagccgcaggaggcggaaggatgggtcgcccgacccatcacccgtgacgccgctcgcggttgtcacttccacgacgcactcgacaccttgctgcgccaggctttcgaccggcacacctggtcgatcgagtatcgttgtgtagtctaccagcacagtcgcgggaggtacccggaccgctgggaggctacctgcctagttcgccgtccggaggatgacctccggggtgcggaggccgtttcggagcactattccatctccgagagggacactgcggaggcggctatgcaggatgcagcacgacgtgcactctcccagtactgttctctgttcggtggcgtggccgatggtcttaaccttcggtactacccccgccgccctactggcagcacagagagtgtggttgtctcacctgttggtgaggctaaccctaggttgagcagcacagtcaacctagtcgcagtgcttaacactgagctggatcactctctggacgagctaagcagggctcgaacggagattgcggagttgcgtgctgagttggcagagcgccatcaccaggagggtggttctcccgctcctgttgggactcagcacccataccgctcgccgccacgtggtcaccacacttatggttcccctgtctgtaagaccaggatagatctggatccttag

SEQ ID NO: 37923 - DNA, 387 bp, Zea mays
  Peptide Sequence Number=SeqID_79702
atggcctcgccgggggccatgaagcagtggtgtgacgacgtcgaccgtctgctcggcatggcgcattctagctcgaccagatctaggccatggtcatcccagcgccagcgcgaggcaacagcgtctgtgcgctcaccctcgatgaggggtgcacaaaccgacgacctatgggcagagctcaaccgcaagcgtgcaggagatgacgctccagtctctctggagaggcctgatgacttgcgggcagaactcaaccgtaggcgtgcgggcgaggatgcacgcgtctctctggagagggcgcgtgagcgccgacagaacgtcgagggtcgcaacctcgactacgacttcgctgtggttgcaccgcagaccccaatgcgcgcccggatctag

SEQ ID NO: 37924 - DNA, 930 bp, Zea mays
  Peptide Sequence Number=SeqID_79703
gtagggggcttaggctttaggtttttgcttgttctcctgctcgacgccatggttcacatcgttgagcaccatgatttcttgcccgaggatttcatggtggaggaggcggcagcctctcccacaccgcttgccaccaacctccctgcacctggtgcagctactgctgtgcactccgcacagcagcacactcctgcgcaaacgtccagggcgtctagggtagtgcctggggcgctgtctgcggccagagagttgctgcgccaccctcctagctccatggcctcactgggggccatgaagcagtggcgcgatgatgtcgactgtctgctcggcatggcacactctggctcaaccaagcctaggcctcggtcgtcccggcgtcaacatgaggcgtcggcgtctgtgcgctcgccctcgggagggccgcaccgactgaggacctgcgggcggagctcaaccgccggcggggcgcgtgagcgccgacagaacgtcgagggttgcaacctcgactacgacttcgctgcggttgcaccacagactccaacggcgaacttcgccagtgcttaccagcagcatggcgtggaggcccacctccacgcagtgaggcaggagctcggggaaactctccgggcgtttatctcccgcttcactaaggacggcaaaaagaagaagaaaaagaaccacgtccacgagaagccatcgtcttccgctctggtcatcgcagccgcgactggggctggaacaagcgcaacaagcgcccacagccacagagggacctccagagatggctccccaccttgtcgccgccctggcaaggaaagggtcgatagcggcgaagtggccgcgggagaacgggaccttgggtatcagtcacccgagggggtcctgaaggatgtcttcaccggaggctctgactccggtgacgacagctag

SEQ ID NO: 37925 - DNA, 276 bp, Zea mays
  Peptide Sequence Number=SeqID_79704
acgaaaagtctcggctgtgagaaccaagggcagtccgacgcgagaagaaagaaggagcgaacactcaccagggacacatacccgcggtcgggacgcatcaagggctgggagagggcgccggcgtccggcttccccaacgtgccggctacccacctgtggaggtcgtcgacgggaaggcgatccgaggacatccacaaaccctccaagtcggcccccggcatcatctcccaaagcggcagccgccgctccgtcaagggaagcaccctccggcaatga

SEQ ID NO: 37926 - DNA, 213 bp, Zea mays
  Peptide Sequence Number=SeqID_79705
atggagtttgctcagtctggcggccgacggctctgcgcgatggcggctgggaactggcgtctgaggagcgcgatggatgagccggctggcattaatcctaaataccaaaaggtccttcttaggcactacactttccaaactaacatctacatcctcgtgtggtgccaaaatcatatctccatcctcgtgtggtgccaaaatcaattcctctga

SEQ ID NO: 37927 - DNA, 1352 bp, Zea mays
  Peptide Sequence Number=SeqID_79706
cgcggcaccggcacctgccaccagcggccatggatctgctcccgccgccgacggacgcgccggatgccggcggccccagcgccggcgggtcaggccgggggctgcgccgcgggatcgggttccggtcgctgaagctggtcagcgttgccatggacgagaccctgcccgtcgaccccgtcggcgccacctacggccgcctcgccaacggcctcacctactacgtccgctcaaacccaaagccacgcatgcgcgccgcgctctcgcttgccgtcaaggtcgggtcagtactgctactctcgccgcgcctgttgtttttgccgccgctgtttatcccccttcgcgcgtttgctgacttccatgtcgtgctcatcgctcggttcgctcttaggtcggtggtagaggaggaggacgagcgcggtgtggcgcacatcgttgagcacctcgccttcagcgccaccgcgcgatataccaaccacgacatcgtcaagttcctcgagagcataggggccgagttcggtgcctgccagaacgcgctcacctcatcggatgagactatttacgagctgctcgtacccgtcgacaagccaggcctgctctcccaggctatatctgtcctcgcagagttcagctcagaggttagggtgtcagcagaggatctggagaaagagaggggtgctgtgctggaggagtacaggggtggacgcaatgcagcaggccggatgcaggactcccactgggcactgttgtttgatggttctaagggcagctatggcgccaatgtctatgaacattatatgacgtctgtggcattcagtattaccacagaatgccatgttcagtattgccgcgccattgctctagtccgggatctggagcaaatgagcaatggcgctgccgggttggcgtcgcgcctgtacgtggagggaagagggaagagggaggagggaggaggggggctgaccggcggcgtacctggagggcggccaacggcgtctggcggccgacgacgtctgctcagtctgggcgcgatttcgtctggcgcgatggagtttgctcagtctggcggccgacggctttgcgcgatggcggctgggaactggcgtctgaggagcgcgatggataagcaggctggtcctgcagtccagtccggtccaatccccacaggcttgctctattctgctcacctgaagcctgacggcaccatgcagcatgtgctctgctctttgccgctgccgctgaaggtgctgctgctactctctactgccgctgccactgaaggtctgctggctccagtagaggcgcaaggaggacctactccatccgcgcaagggttgatggggccgcgagcgtag

SEQ ID NO: 37928 - DNA, 715 bp, Zea mays
  Peptide Sequence Number=SeqID_79707
atggggggtatccgccgcctttccgcctcctcgttggaggaacgcaactccatgggagttggtacctctcagccatcgttcggcttcaaggattttcatcacgcagcctggccataccccgccaccggcggtcacccaagatggccaagatggaagacgaggcgagtcggggggccgcctccgcgtgggtcggctgcccctttcttccccctgcgcctgggggtgaagggcgtccttgagccccacggagacttcctccagccatgccaggatatgcagggcgctaggggccctgggtccccatctccctgcctgaatggctgcctgtttgattatctgaaccgctttaccaagcatgagttgccccgcgtcaaggtgacgggtgaggccgggggtagcgatatcagtatgaacagaggcggagttggctcgagaatgggaacctggggtaaccggttgagccgcctgctcgggccggattcccggaggagcccctggaccgcgacgccgcccgaggctgggtcgggctttgctgaagacgtcgtcgatgccgagggtgctacggctcccttcggcgcgaagacccgagcctgcaggatccgatcatcttgtagcgtgtgcttcctacggccgccgaggccagaagaaaacaccctcgctgcacttgcgaagctgcgccttttttcctcctgtttcgagcatctggacttcgccg

SEQ ID NO: 37929 - DNA, 840 bp, Zea mays
  Peptide Sequence Number=SeqID_79708
atggggggtatccgccgcctttccgcctcctcgttggaggaacgcaactccatgggagctggtacctctcagccatcgttcggcttcaaggattttcatcacgcagcctggccataccccgccaccggcggccaagatggaagaggaggcgagtcggggggccgcctccgcgtgggtcggctgcccctttcttccccctgcgcccggggcgggggggagcccttctgccgtgacacctcccccaaggctgctgcttacgctgcttcgctgtctgggcaggggagcactaggtctcgcctgtttgattatctgaaccgctttaccaagcatgagttgccccgtgtcaaggtgacgggtgaggccgggggtagcgatatcagtatgaacagaggcggagttggctcgagaatgggaacctggggtaaccggttgagccgcctgctcgggccggattcccggaggagcccctggaccgcggcgccgcccgaggctgggtcgggctttgctgaagacgtcgtcgatgccgagggtgctacagctcccttcggcgtgaagacccgagcctgcaggatccgatcatcttgtagcgtgtgcttcctgcggccgccgaggccagaagaaaacaccctcgctgcacttgcgaagctgcgccttttttcctcctgtttcgagcatctggacttcgtcggtaacagggatgtttgtgtgagcaagagctgcttttcgcggaagggacgagtgaggtatccgtatcccagaggcgtgggaatccctcggctcggtcggccttgccgcttacgcgtactttcacccgtccatgaggccctgtccccgacttag

SEQ ID NO: 37930 - DNA, 576 bp, Zea mays
  Peptide Sequence Number=SeqID_79709
atgccgcgaactcaaagcaccacttccccgccccaatccctcgcccaaagaccaccggcggcgatccccgccgcggagctccgccacctccccgcagacagccccctcctggccccctctagccaaatcaagcctacccctaggatcgcccagcccctgcccgtgctaagccacctccccgtaagccaagaaccgggccaccggcgggcgaatcgccgtcgagcccaccggcggccgggttttctcccccgcggacggtcggttcgcccgcgtcgtcgacccgcggcaccatttccccctctgctctcgctgacatgtgggccccgcggtgacgccgtcgcttccgcgcactcgcgccgtctccccgcccgtggaccgcagctgggccacaagcgcgcccgcgcgcgctcgcgtccggcggaagagggatccgatcctccggaacttatagctccggaagaagggcaagaacctgacccctccgagataaacctcttgtgccaggaaaacttcgacgaaggcaagtccatccttcccttgatgcataaattacctattctttctaccactgcctag

SEQ ID NO: 37931 - DNA, 237 bp, Zea mays
  Peptide Sequence Number=SeqID_79710
atgccgcgaactcaaagcaccacttccccgccccaatccctcgcccaaagaccaccggcgacgatccccgccgcggagctccgccacctccctgcagacagccccctcccggcccctctagccaaatcaagcctacccctaggatcgccagcccctgcccgtgctaagccacctccccccggaagagggatccgatcctccggaacttatagctccggaagaagggcaagaacctga

SEQ ID NO: 37932 - DNA, 672 bp, Zea mays
  Peptide Sequence Number=SeqID_79711
atggctcacctaattgctcggtctacgtgcggcttcgggcgaccaaagtccagcgacgatgatcttgctattctagtgagacagggcttcgattcttgcttggagaagcttcacggctcttcggggaagctgtccaaatgctcggttgaggctgagggtctctggaaaaggctggccacggtggctggcgctcgggtggctcgggcgggcggcgcagaactcgtcgaagctaagggtggtgtctggccagtgagggaccgagaggtcaaagctcaagcccgtgcggaggagcttagcacggccgttgataacatgcagatgccatctcaaactcatgcacatgacaacgcgggaacatcccgtggtcaagatgatacccccaatccaccgctggttccacccacgctggccgaggctatcaccgccttggtcaccgctaccgctgacaacacccgcttcttcgtgaaacggcgggacaacaacttcagcagcaaggtggaagagcttatccgcaaggaccccacgaaacttcgtatttggatttctcggaaactcgtcccccactattcgtcaaagctgaagatcccctcgaagctgacgaatggatttgggtcattgagcagaagtttggactccaccgagacccagaagcccttgtttgtggctcagtag

SEQ ID NO: 37933 - DNA, 651 bp, Zea mays
  Peptide Sequence Number=SeqID_79712
gccggtccacgtgcgcaggtgggtgagctcgtcggcggcgagggcttcggcctatccagggcgggcttcgattcttgcttggagaagcttcacggctcttcggggaagctgtccaaatgctcggttgaggctgagggtctctggaaaaggctggccacggtggctggcgctcgggtggctcgggcgggcggcgcagaactcgtcgaagctaagggtggtgtctggccagtgagggaccgagaggtcaaagctcaagcccgtgcggaggagcttagcacggccgttgataacatgcagatgccatctcaaactcatgcacatgacaacgcgggaacatcccgtggtcaagatgatacccccaatccaccgctggttccacccacgctggccgaggctatcaccgccttggtcaccgctaccgctgacaacacccgcttcttcgtgaaacggcgggacaacaacttcagcagcaaggtggaagagcttatccgcaaggaccccacgaaacttcgtatttggatttctcggaaactcgtcccccactattcgtcaaagctgaagatcccctcgaagctgacgaatggatttgggtcattgagcagaagtttggactccaccgagacccagaagcccttgtttgtggctcagtag

SEQ ID NO: 37934 - DNA, 1179 bp, Zea mays
  Peptide Sequence Number=SeqID_79713
atggacggcggcggcgcgaaggcgaagaaggcggctgctgggcggaagctgggcggcggcgggccgaagaagaagccggtgtcgcggtccgtcaaggccgggctccagttccccgtgggccgcatcggacggtacctgaagaaagggcggtacgcgcagcgcgtgggcacgggcgctcccgtgttcctggccgccgtcctcgagtacctcgccgccgaggtcctggagctggcgggcaacgcggcgcgcgacaacaagaagacccgcatcatcccgcgccacctcctcctcgccatccgcaacgacgaggagcttggcaagctgctgggcggggtcaccatcgcgcacggcggtgtgttgcccaacatcaaccccgtcctcctccccaagaaggccgccgagagggccgagaaggccgctgccgctggccccaatggcggccacggcagccgccgcagcgccttctcgctgcttcctccgtcgttgtcgtcgccgccgcttacaattaccaccctcggccgcttggcgccagagccgccgccgcagcgcaaaccgagggccaaaccggtcccgtcgtcggcgtcgttactggcgctgatctcccctcgtcctccttccgcgcggaaacttgcgcggatcgcgttcgccgccggtccatggctaagtgacagaactggcccggcggcagtgacaccggcgcccttgtccgtcgtgctggttcctccggtccccgaccatcgcgttggcatcttcgcagatttgcgtatcgagttgttcgtcttcggttccaagatcaagtgcatccaagcagactccatagccaacaaggcaattggaaggatgcaagatatttcggacaagatattttccgtagcgagggaaacaatccgtcctggacgtgggttgacctcatttgatgctaccaaacttcgtgtagctttggaggagatagcttgcatgctggagcaagactctctggtgttgcaagagcatttggacatcatgaacaacgtaaacatcccggttgacagcagctatgaaccttctaccttgtcgtctccacccccatctgacgacgaccttactccacactgggactttgcggagcatttccaaaacttctggggtgttgaatatgactccgatcagatgccttcgtttagtgaaaatgatgtttaa

SEQ ID NO: 37935 - DNA, 594 bp, Zea mays
  Peptide Sequence Number=SeqID_79714
atgtggctgtttggttcagcttctggtcggcttctggccgccagaagcagaagctgctaccaaacgcgcagattttgggccggcttctgcgcgacgcgcttcgtgacaccggcgcccttgtccgtcgtgctggttcctccggtccccgaccatcgcgttggcatcttcgcagatttgcgtatcgagttgttcgtcttcggttccaagatcaagtgcatccaagcagactccatagccaacaaggcaattggaaggatgcaagagatttcggacaagatattttccgtagcgagggaaacaatccgtcctggacgtgggttgacctcatttgatgctaccaaacttcgtgtagctttggaggagatagcttgcatgctggagcaagactctctggtgttgcaagagcatttggacatcgtgaacaacgtaaacatcccggttgacagcagctatgaaccttctaccttgtcgtctccacccccatctgatgacgaccttactccacactgggactttgcggagcatttccaaaacttctggggtgttgaatatgactccgatcacatgccttcgtttagtgacaatgatgtttaa

SEQ ID NO: 37936 - DNA, 363 bp, Zea mays
  Peptide Sequence Number=SeqID_79715
atggttgcaggaaccagcaatgttgtgtccctcaagctgatgggtggtgcccttattgggagatgctatgaatcgtgtgcggcagcagttgactccacggacccgccagctgagaagcatgagtaccaggctgaggtcaacaggctcatggatttgatcgtacatagcttgtatagtaacaaggaagttttccttcgagaactggtcagatgtgtggtaacgggttctgttgcattgctcggtttatggaagaacatgaaaatatgttggggacaattaggtaatgcattgcagcatgattgtaaaacaattaaaatgatttacacaaaaattgcacttgaggccttgctattctctgcctaa

SEQ ID NO: 37937 - DNA, 996 bp, Zea mays
  Peptide Sequence Number=SeqID_79716
atgggtgcgaaggctgctgcttctagcgcgggcaagcaaccctcgggcgggcccgtgaaggggcaaaggctacattcgccggcgcatactgacgaggcggcggcgcgtgttgccgacttcgacacggatatctgtgtggcagattatcttgttgggtcggatgtggggcaactagctgttgtcccgactccggtggcggccacttcgccaacggcggcggttggggcgaagggtgccccgcgggacccgtggtccaccttctgcgtgagcggcgagatttcgtcggtcgccgccgctaaagatgtggcgggctccgtgttccagcaactgaggcaagcgtcgcagcagctgaagcatgcgaccgacttcgccgaccatgttgtgtcgggtgctctgactgcggagtttgctgccgaagtcgagcgtctccgggcgcagcatgcggatgctgttcgggagaagtcggctgcggaaagcaaaagtcgcaggctgacggagaggttggccgctatggaggtcgagaagggggatctccggcgccagctggtggaggagaggagggaagcgaacaaggccattgctgatgcacaggctgcgcaagccgaggccaaacttgcgcgggcgaagggtagtctcgcccgccaacgcgccgaggagctggaggcgaggctcaacatcctacgcaaccacgtggacaaagccaaggcctcgacgcgcgcggaggtcgagcggacgcatgcgcagttcgtggacgcgtaccgggagctgggtgcgcggaccgccgccttcgaagcgcccggccaagaggtgggcctccgcttcttggagtggttacaggaggagctgggggtgctcccgacaatcgtgatgggcctcatgtcctttgcctccatcgtcacctgcgagggggccgtgaatgctttgtcccgcgaggggtgcgggcatttcgaggtcttcgaccaatcggacgaaaacttcaaacgcgaaatcttctag

SEQ ID NO: 37938 - DNA, 279 bp, Zea mays
  Peptide Sequence Number=SeqID_79717
atggcgaaggcgcggcgcgacaatcctaggaggcggaggcacgacaatcctgaagttcgcggacgagcggagttacgggaggctgctcatctcaaggctgtgctgggaaagatgcagttccagcttgacccatttgctgcgatccatcagcacctgctagcaacacagccacctgcagctgcaaagggcgatgccgtgaaggaggggaaggactccaagaacaagaaaaggaggaggaagaagggtgcatcatcgagctctcaagcaatggatatttga

SEQ ID NO: 37939 - DNA, 333 bp, Zea mays
  Peptide Sequence Number=SeqID_79718
atggcgaaaaatacacggagtcggtgtcagaagaaactgaaagcatacgacctctcagcactgtccgagtccctcctagaaccaggtgcaccaaagcagaaacctgaagcaaagctgaactgcaagttacgggaggctgctcatctcaaggctgtgctggtaaagatgcagttccagcttgacccatttgctgcgatccatcagcacctgctagcaacgcagccacctgcagctgcaaagggcgatgccgtgaagcaggggaaggactccaagaacaagaaaaggaggaggaagaagggtgcatcatcgagctctcaagcaatggatatatga

SEQ ID NO: 37940 - DNA, 1401 bp, Zea mays
  Peptide Sequence Number=SeqID_79719
atgggggaaggcctgcggagcaacagaagactgacgagcggctcgccgccgcccgctctgactacgacgacaacgacccccacttttgcccagaccaacgggcggaaggggcgggcagtcatgcaggcggcatgcaaccgcgccaggtggacgcgcttctccgactcccaacgcgccggcatggaggcccaggcccacgcgtcacgcaaccggcgtgccagatgctgcatgcaagcaactgcaccgccacttgcgccaccaccgcgcctcttcggttgcggaaccaataccgcgactcgaggcggcccagcgcacgacccagcaacgccagcctggcgcgacggtcaatacgaccgaaaggcgcccgtgatccgttcctccaacggctcgcgcacgcgcaacggccgccctgccaacaactcaccccgtcgcattaactccgcggcgggacaggcgacgcttctggcaggagaagcgggcgacgcttcgccttcgccgctggccctccgaggggttcaacagtcgcctcagatcgcgtgggccctacacccactactggtcaaaggttcgaaggccggccccccgaagggctccacggccgcctcaagctactcgggctccgcgcccattactgatcagggggctcggactcgggctcagccccagaagacgacgaactccgcttcgcccgaccccagggctcggactccgccctggcctctaccgaacgacctccgcctcgcccgacccaggagctcgggctcggcctcggccatggaagacagactcgacctcggcttcggaggagcctccacgtcgcccgacctaggacacaggcccgccacgtcaacaggaagcgccatcatcaccctaccccgagccgacccgggccgcagagaacaagaccgctcccttacggaagcagggggacgtcagcaaggactcaaccgctccgacagctgtccctccgccaggctccgttgctcctccgacagccacgacatcacaccagcagggtgccaagatctctccggctgccacattggcatggccttcttggagaaggttggccgcgcggggacgaggacgggacaggcgctctcttggggccgctcgcttccctcacccgcgtggacgcttgtaaccccctactgcaagcgcacccgacctgggcgcgggacgaacacgaaggccgcgggatttccacctctctcacgcccgtctccggccgcctcgcttccccccttcgcgctcgcccacgcgctcgacccatctgggctggggcacgcggcacactcactcgtcggcttagggaccccccggtctcgagacgccgacaccttggaaaagtgtataccggccgtgactgtgaaaaaagatgctgtggactgtgagctgtga

SEQ ID NO: 37941 - DNA, 1401 bp, Zea mays
  Peptide Sequence Number=SeqID_79720
atgggggaaggcctgcggagcaacagaagactgacgagcggctcgccgccgcccgctctgactacgacgacaacgacccccacttttgcccagaccaacgggcggaaggggcgggcagtcatgcaggcggcatgcaaccgcgccaggtggacgcgcttctccgactcccaacgcgccggcatggaggcccaggcccacgcgtcacgcaaccggcgtgccagatgctgcatgcaagcaactgcaccgccacttgcgccaccaccgcgcctcttcggttgcggaaccaataccgcgactcgaggcggcccagcgcacgacccagcaacgccagcctggcgcgacggtcaatacgaccgaaaggcgcccgtgatccgttcctccaacggctcgcgcacgcgcaacggccgccctgccaacaactcaccccgtcgcattaactccgcggcgggacaggcgacgcttctggcaggagaagcgggcgacgcttcgccttcgccgctggccctccgaggggttcaacagtcgcctcagatcgcgtgggccctacacccactactggtcaaaggttcgaaggccggccccccgaagggctccacggccgcctcaagctactcgggctccgcgcccattactgatcagggggctcggactcgggctcagccccagaagacgacgaactccgcttcgcccgaccccagggctcggactccgccctggcctctaccgaacgacctccgcctcgcccgacccaggagctcgggctcggcctcggccatggaagacagactcgacctcggcttcggaggagcctccacgtcgcccgacctaggacacaggcccgccacgtcaacaggaagcgccatcatcaccctaccccgagccgactcgggccgcagagaacaagaccgctcccttacggaagcagggggacgtcagcaaggactcaaccgctccgacagctgtccctccgccaggctccgttgctcctccgacagccacgacatcacaccagcagggtgccaagatctctccggctgccacattggcatggccttcttggagaaggttggccgcgcggggacgaggacgggacaggcgctctcttggggccgctcgcttccctcacccgcgtggacgcttgtaaccccctactgcaagcgcacccgacctgggcgcgggacgaacacgaaggccgcgggatttccacctctctcacgcccgtctccggccgcctcgcttccccccttcgcgctcgcccacgcgctcgacccatctgggctggggcacgcggcacactcactcgtcggcttagggaccccccggtctcgagacgccgacaccttggaaaagtgtataccggccgtgactgtgaaaaaagatgctgtggactgtgagctgtga

SEQ ID NO: 37942 - DNA, 222 bp, Zea mays
  Peptide Sequence Number=SeqID_79721
atggagacggctgccgcgaccgcgaggcccggcgcagcgaggaagcggcggtggaaccaatcgcagccttgccaaggggagggtccgagcgatctcaagttcgctagacttcgcttcgacggcgacggcggcgccaagggcgcgtgggaacacctcgacctcgtcctctccctccagagcaaggagctgtcgctcgaaaggatgatagaagcaaagcactga

SEQ ID NO: 37943 - DNA, 3312 bp, Zea mays
  Peptide Sequence Number=SeqID_79722
atggagacggctgccgcgaccgcgaggcccggcgcagcgaggaagcggcggtggaaccaatcgcagccttgccaaggggagggtccgagcgatctcaagttcgctagacttcgcttcgacggcgacggcggcgccaagggcgcgtgggaacacctcgacctcgtcctctccctccagagcaaggagctgtcgctcgaaagaaagattgagctagcggtcgaatttctaaccacactgccaaataactcaagctgcagcattcagctattgcggctggtgtcatttattggaaactggttgcagtctatcttaaattttcctgagaatagtaaaaagattctacatatttttgatccagcattggatagtagatgctgggcaattttgagagtgtgtgttgaaaagaaaccatccatttcaatatctctgaacttacttaaatcccttagtcgagttgcaagtcatggtttgggcagagttgatagcaacacatcatgtcctgacaatgaatctattgagctctttgaacaagtgtttgactgcatgtcattgcttttctcttccaatacaagagctttcttcaacgctggtgtggatttatgggcctcttgtgccattgaggttgtcaatcttgctcagaaggtgtcagctaaaaaggacaatttttgccctgttcttcagaagcttgcaaattgcctcctcgggcaattcgcatgcttcctgagattttatgcaaatccgaagaatattttccatgcttttgttgataaggttcttgggccattgttggaattgttagttttacttaattcacaagcacattccagtgaacacaagcagacaggaacaatgttgaaaattgttgaagatgttttttcaaatggactgtttcatccccaacatcttagtggatatttcggtctcaggagtttgaataaatcttctgctgctaaggatatcaaaggaagctaccatagacatctatttcagcgattcaaaggaataaaaacagaaaacaaggctgtattgctggctgggtttggctacttgtttcaattgtttgttaggagggctagaaatcaaagaacaactgtagcaccaagtagaacgactttgggtacgctgcacaaaagcaatgatggttctgaagaaccacaacatagggaatcactttttgaagtgtttattatgttcatggaacccatcgtattagagtgtaaatcgtattcccaaaaggacttctctaagttaggggtgacaaggctagtagaggtccattgcatgctgaaatccattaatgtgatgctgataacccttattgaagagaagatctatgttcctacagaggacacattggaaggatctcacttcaattttttgcaagatatttactctgtcttgatcttaatatctgaaaagatgtacaaattctggatgtctgctgtgcatctagaagatgtaaacattaagaagatagtacctttaatgtttgcagagattatttctgcagttggcaattttctagaaatcgagtacaaagttctaggagacgaccttgtgaaattgtggttaatgatttttgctttgtctgctattaatacatcttccaaggacatcgaaccctgttttctgcttgcttcaaagatttcaagcctctcagcccaagtgatttgcacattcagtgaacttcgtcaggtttcccgctcaattttcagtctgtgtgatgctgtgagggcattcagagttgagggccctgatggagtacatggctcattttctgtggcctctttatcgtcccaggagtgtttgggatcattgacaacactgttgagttccgaaacattgatgggtgctattcgcacttcaattaagtcgatgcctcaaggccagtctagccgatgtatagaggagcttacatcggatctcacagaaacattgaattggatggcagattgcagttttgaagatgatgtaagcaaactcagagagccatccattgccaggaagtctattttttgtcagaaagccgaacttcttggcagacacttatctgaagtatatgctagcattcttgattcaataactgtcactgtttcaaatagtacactggtaggaaaatctgttgaaagaagcttgtatcagcaatctattggcctcatgcctccagatgtagccatagatgcaacaaagttagtggggaatccattcattgtatgttcaggaaaggaatggaccaatccgacgaatattcttgggaagggttattttgcattgatcgatgaaaattcaaactcccttttggatgttattgagagtttatcagagtctctctcaacaaactgtgcttcttttgctccacttgtttacatcttccatgtcatggttctgcagagactcaatgaccttaacaggcagattaaggcatttcaatttttgcttgaagatgatgcttggcaaatagataataaggatataggaaacactcgactgttaaaggaatcttgcagtctggaggctgctaaattgatgagttttgtgatgaattatgtgaagctattatcttcaggagaaactggtccttttgggtcttatgatgttagtagttcctgggatttgagtctatgttccttagatgaaggctcttttcctatagccacgtggcagcttctgtgtgaaaacattgacgtttggagctctcatgtttctaagaaggatttaaagaactttttctctaatttgataaggttttcttttactcaaaagagatcttccctggacaaggagaataatggcactcaatcttcgggcagagaaatgactttgcatagtgtctctattggagtcctttgtgatacaattatttatgaaaaaaaggtaattttgaagaatctggcatcaagtttttgtcatgctttgaagaaatcgttttcttttgttaccaactctgatggagataatgtctttttggacacttcacctgatttgatggagacaataagtaacctggaaaatgagaagttgattggtacaggttctggtgctacgcatgcgcactgcttagacaaacactggatctgtgaggatttccttaatttttttagtgctgttcctggatttcatgcaaattccaaggcattcatacggcttataaactatattctccatcttgaaaggcaagtagaaaaaatgttcacaaatacataccggttccatgctgaggtgtccattaagcgtcgccttagcgagcgcgctcacagggcaaggtgtctagctcgccttgcgctgtggagtaaggcgtccgccacggcgtaa

SEQ ID NO: 37944 - DNA, 405 bp, Zea mays
  Peptide Sequence Number=SeqID_79723
atggccaccgccgccgccgctccagcatctgtggcgccgtctcttgcacccaaggccaacgacagcaggaaggcagtggtgcccgtggacgcgtcggagctggagaagcacgtgctggcggtggacgacaaatccgtggaccgtgccgcgatcgccaggatcctgcgcggctctaggtacagggtgaccgccgtggagtcggcgacgcgcgcgctggagttgctcgcgatgggcctactccccgacgtcagcatgatcatcaccgactactggatgcctaggatgaccgggtacgagctgctcaagcgcgttaaggagtcggcggcgctcaggggcatctacgtcgtcatcatgtcgtctaagaccatcgtgatttatacattttcaaacaaaattttacgatag

SEQ ID NO: 37945 - DNA, 228 bp, Zea mays
  Peptide Sequence Number=SeqID_79724
atggagtcggcgacgcacgcgctggagttgctcgcgatgggcctgctccccgacgtcagcatgatcatcaccgactactggatgcctaggatgaccgggtacgagctgctcaagcgcggcaaggagtcggcggcgctcaggggcatctacatcgtcatcatgtcgtctatgaccatctcgttaatcgccgccaatatcacagatacgaacatggacgagcggctgtaa

SEQ ID NO: 37946 - DNA, 417 bp, Zea mays
  Peptide Sequence Number=SeqID_79725
atgagggtggcatgggacgcccttagccaagtaattagggaagtcttgtgttgggtgctggtttgggtcattggggacggaggcatctgctatggctcctatattctcgctcagggatttaggtacgggagtcatcccatggcttttcctgagggcggagggtataggtttggatacgtcagatggtctctatacagtggtcatttccaacatccgcatagtgaggatcctggggaaatgccacgtagtgataccctgccagaccacctaagaagggatcaatggggagtagcgctcctcgggcagaaagggaataacgactcatgggtaaagtgtgcaacctctgtaaagtgttatgaaactgatatatcagttgtgctcacggttaagagcggccttgggatcctctttgattag

SEQ ID NO: 37947 - DNA, 279 bp, Zea mays
  Peptide Sequence Number=SeqID_79726
atggcttttcctgagggcggagggtataggtttggatacgtcagatggtctctatacagtggtcatttccaacatccgcatagtgaggatcctggggaaatgccacgtagtgataccctgccagaccacctaagaagggatcaatggggagtagcgctcctcgggcagaaagggaataacgactcatgggtaaagtgtgcaacctctgtaaagtgttatgaaactgatatatcagttgtgctcacggttaagagcggccttgggatcctctttgattag

SEQ ID NO: 37948 - DNA, 333 bp, Zea mays
  Peptide Sequence Number=SeqID_79727
atggagttgcgcagcaaaaggaagaggcaacgtgccaagcgccggaggggagttgtggagcaggcgcttcttctgcaccctcctacggactctttctcgaatgaagaccatgatgccccattggtaatgcatgatgaagctggaggtgatgaatcatctcaaccggtggtaccagtggaacctacttgcgttctggatttctctaatggtatgggcgtatggcccaagaggaagtggcactccgacgagctctgtacgtcatggtggttggcaccagaccaaaggttcttggcgctgaggttgtggagggagtggcgcgttgcttcgacatag

SEQ ID NO: 37949 - DNA, 2535 bp, Zea mays
  Peptide Sequence Number=SeqID_79728
atggccgcccttccgtctcccgcccttccatcttccgcccctgtcccttcccctcccggcgccaacctctccaccagcctcacgccggcatccaccccggacccggcggccaccccgtcgtcttccaccccactggtgtcgggacccaacgctccttgccacccaacttcccatgcggccaagatattcatccaccgcagccccctgccggtcttcaatctgaagccggcgaccacctccgcccaccacgttccagcgccaggatcctccacccaccacgttccggcttcccagactggacgctcaaaatcccagagatggaccgacgccagtgattactcgttatcctctggcggctctagtctggtaccagattcctacaaagcggctgtgctgtcctgctctaagagcacacttccccgttctacgtcggacgcacggccgccaatcgacggtacgacggcggtctgtagacgcgcagaggtgtcgtgccagaagcctgttgtgaagcttgactctgctgcgggcgggtggcagttggtaaagagtaggagagcgcgacgttctgagcaggtttctcgtcgtaggtccctagtggatctccgaggacgatgctttaactgtttgtccttctcccaccatgcttcttcttgctggcggcctactcgctgcttcaggtgcttcaagttcggccaccgcgcagctctgtgctcggttcagactgtagctgtgaagaaggcggcagggcagcagcgagaccaacaagggttgcgtgttccggtgtggcagcggctgtccggaatggatggacctggccatcaggatctccagcgaaaaggatcggtgtggaggcggatcaccccgtcacagtcggcagcagggactgagagttccacacagccggccctgatggctgcctctagtggtgcaactgccccggcgttgcgcagcatgaggaagaggcgacgtgctaagcgccggaggggagttgtggagcaggcgcttcttccgctacctcctccttcggatcatgatgccccgttggtaatgcaggaggaagctggaagtgatgaatcttctgtggagcctacttgcgttctggaactctctattggaatggcccaagaggaagtggcactccgacgagctctgtacgtcatggtggttggcaccagaccaaaggttcttggcgctgaggttgtggaggaagtggcacgttgtttcggcatagatgctgattctttggcaattcatcaagccatgcccgaggactttctgctattcctccctaacgaagacaccgccacaagggttttcaatgaaggcaaagttttcagagggcctcgtttcaacttgcaattcaagcggtggtcgcggtttacgcatgcaacggcgggggctctcccatttctggtcgacgtgcagatttgggggatcccggctcatgcctgggcaagatcaacggcggagcacctcctgcatgattcttgtttggtttcagatatccatcctgccacagccttgaagtcagacctctcctccttcaagctgagggcttggtgttttgacccaaaaaaactccaccgaaacatgaagctctacatcgctgagcctgggatggtgacaagtgagaagcggtgcttgtcatacaatattagtatggcggcctttccggttgatgcttcgtcgggggctgaggactctcctccccccccaccggctgatggcacgcatccagatggagacaatgaacgccatcgaccggattccccgtctcgacatcctcgtaaaggcgctggtcagcgacgatcaattcatcttcgtctgggtcctcagcagactgagggatgtggatggggcgctgcgacgcttacaaacgcagatccattcatgacaggtgcttcgggatgtgatgggcttgaattgtaccctgagactgggccgctggacctggcagttcatgcttcacccctgcatgacaacttgagtgcggggctgtttgagctgaatgggccaggatcgccccagtctagacttgtatcggtttctggggacattactggaggtgacatgttgaagaagatgcacagtcaagttgacatcgttgctgtttttgctgatggattaagtgggcagcatagtaatggttttgatgggctcgagatgcgctctggtactgggccgctggacctggctattcacgttccacccctgcacaatgccatgtgtgcggggttgctggagctgagtggagcaggttcgccccaggctagactggtttgggggactgtggacactactggaacagcatcgccccaaattcacaatgggtcgctggagctggcccagttctgcccacctttaattcctttaccccaaactgatcgtcctctaaaagtctattacagaaagaaaaaaaggaaacagacaaaggctcatggaggagtctcaggagtctgcaactgggcacaatattcatacaaaatctctacagaaaaatcaggatcagtgtggaggaactggggatacatctga

SEQ ID NO: 37950 - DNA, 845 bp, Zea mays
  Peptide Sequence Number=SeqID_79729
gcctcggcggccgcaggaaacacacgctacaagacaatccaatcctgcaggctcgaatcttgacggctggagggagcagcagcacccttggcatcgacgacaccttcggccagggccaacctagcctcggacggcgacgcggtccgaggatctccactctggaggacgacgtcatcaccacgcccgggccatcgccgctagggtcttctccgggaatccggcccgagcaggcggctcggccggtcaccccggggcctcggccagttaccttccaaggacgtcaatccggcccgagcaggcggctcggccggtcaccccggggcctcggccagctgccctccaaggacgtcagcccgacccgaggcctcggctggacaattccggcgtcggtcccactaacggacgacccggccaggctccggccaaccaggtttccttttcgagccaactctgcctctgtccatgttgacgccgctacccctggcctcagctcatcgaagagtgaccgaggggttcctttaactaagttagagaagcctcggacaacaaggccgaccgagccgaggaactcctacgcatccgggatacggatacctcactcgtcacctgtacacggggcgactcacgcttggtacgaacaaccccactcgacaggggagaggcctgcggagcaacagaagatcgacgaacggcttgtcgtcgcccgccctagtcgcggcgacgacgacgactactgtccccgggggccgaacagcagcagcgatgacctcagggcggatgctgctgcccaggaggccctcgcccgtgcccaaactcgagaggcaaggacgggcagaaggctgtag

SEQ ID NO: 37951 - DNA, 1011 bp, Zea mays
  Peptide Sequence Number=SeqID_79730
atggacgggaaacacacgctacaagacaatccaatcctgcaggctcgaatcttgacggctggagggagcagcagcacccttggcatcgacgacaccttcggccagggccaacctagcctcggacggcgacgcggtccgaggatctccactctggaggacgacgtcatcaccacgcccgggccatcgccgctagggtcttctccgggaatccggcccgagcaggcggctcggccggtcaccccggggcctcggccagttaccttccaaggacgtcaatccggcccgagcaggcggctcggccggtcaccccggggcctcggccagctgccctccaaggacgtcagcccgacccgaggcctcggctggacaattccggcgtcggtcccactaacggacgacccggccaggctccggccaaccaggtttccttttcgagccaactctgcctctgtccatgttgacgccgctacccctggcctcagctcatcgaagagtgaccgaggggttcctttaactaagttagagaagcctcggacaacaaggccgaccgagccgaggaactcctacgcatccgggatacggatacctcactcgtcacctgtacacggggcgactcacgcttggtacgaacaaccccactcgacaggggagaggcctgcggagcaacagaagatcgacgaacggcttgtcgtcgcccgccctagtcgcggcgacgacgacgactactgtcccgggggccgaacagcagcagcgatgacctcagggcggatgctgctgccaggaggccctcgcccgtgcccaaactcgagaggcaaggacgggcagaaggctgtagagttggaggtcggtccgcgggtggcgccggcaaactcgtcggcggcggaacctcttccagctgccatggcaggaggcggcaccgggagcggctccgaagccgctcgacccagcgagccgggcacggtgcagctgtcagcgccacagacgactcccgcccttccccccgatcactaa

SEQ ID NO: 37952 - DNA, 645 bp, Zea mays
  Peptide Sequence Number=SeqID_79731
ccgttctccactggatcaatggtccggatcgatcacgtgaagaggtacgcctactgcctaatcgtggccgttggtcaaaatccaagggtccgaagacccatcccctacccaccgccgagccatggcggcgcgctcagaacgcacggcggcgcactcgccgtgacgacgtctcgcaccacggcacggggcggcgcggacgctgggaggagacccggtgaggagttcccgcggccacagaagctaatcctggtcgcgatgcttcggagatctttctcccgattcagcggcgcaaccagcgcacggatcggagaggccggtgatgacgcgtgggccccggccatcagcggtcgggtgatggtgggcgcgccaggtccaccggacagcgacgaggaggccaggaaggtgggatgcaacagaccgcgtgtgggggggtcggccactggttctgtggccccaccggtcggtgtatggggtgagagggcagcacgtgggctgagggagcatggtgaagtgggcctgctagagggattcggcccaggcgcagggcatagtggtcaccccgagttaagtaagcgtgagcatgttgcacctgggcatagtggtcaccccgagttaagtaagcgggagcatgttgcaccggtttaa

SEQ ID NO: 37953 - DNA, 356 bp, Zea mays
  Peptide Sequence Number=SeqID_79732
atggcgggttggttatgggattttgcgggggctcctttgcataaaatcccagccgaagggccgttctccactggatcaatggtccggatcgatcacgtgaagaggtacgcctactgcctaatcgtggccgttggtcaaaatccaagggtccgaagacccatcccctacccaccgccgagccatggcggcgcgctcagaacgcacggcggcgcactcgccgtgacgacgtctcgcaccacggcacggggcggcgcggacgctgggaggagacccggtgaggagttcccgcggccacagaagctaatcctggtcgcgatgcttcggagatctttctcccgattcagcggcgcaaccag

SEQ ID NO: 37954 - DNA, 675 bp, Zea mays
  Peptide Sequence Number=SeqID_79733
atgggtcgagaggaggaggttgaggatggatgctcgcaacgccactgcgccaaccctgtgaaatccgcaaagcccgcccctgcgccaatggaagatcatatcgctaacgacactgtgctgaagctgtcaattttgggttgtatttgctctagggtttccctcagtagtttgttgtttcggctagcgaggggtgtggaagaaggaagggataaggacaccgtcgggggttcgctgcaacgcatcgacgacttccacagcttctcaggccaaggctacaaggttttgatggaaccggtcgtattgaaccgtgaaagagccgcaacggaccaaagaaaacggatgcctatgttgttcgacaactaccgtgatgaagatttttatgggctaccgcagaaatacagtattgtcgctcgggtagaagttaaattctcgattgaaccacgttttcgtgacagacaacatttcgttttatctgacatcaatagtgcctctaatcttcggatcataccgcaatacacttcaatctgttccatcacaacacccatcattttggaccaattcaaaaagctttggtggcgcggaacaaccgtcagtttgctgttacatttcttgaagaacaaaggcgtagatagattctacaaattcgcaaagagcaataattgggactatgtttag

SEQ ID NO: 37955 - DNA, 831 bp, Zea mays
  Peptide Sequence Number=SeqID_79734
atgtgttacatttatgttaaaggctacaaggttttgatggaaccggtcgtattgaactgtgaaagagccgcaacggaccaaagaaaacggatgcctgtgttgttcgacgactaccgtgatgaagatttttatgggctaccgcggaaatacagtattgtcgctcgggtagaagttaaattcccgattgaaccacgttttcgtgacagacaacatttcgttttatctgacatcaatggagccaagatcgaggccataacatatatgtatgagacagtcaaacatttcgacaattttctccatgaaaagcatgtttacaagatgcataatgtaaagttcagtcttcatccgggtgaatttaattttcgtcatctaaatggtcccatggaattgtgtcttgaccaacaaactatcgtggagccatacactgttccaattcaaatggcgccattcccaaaacaaataatcttgaaccttgctgatattgccgagttgccaaacaggactttagtcgacataatggctattgtagtccacttggatacaattcatcgcacaatgtggggccctttcagaaagattgttataatggatgctaggggatatttacatatcattaaagcttggggtgacctactaaacaaaaatgcactccgctgggcgttggctaaggaggattatggcataataattgggactatgtttagagggttcagaagacaagagtgcctcgaatcttcggatcataccgcaatacacttcaattcgttccatcacaacacccatcattttggaccaattcaaaaagctttggtggcccggaacaaccgttag

SEQ ID NO: 37956 - DNA, 315 bp, Zea mays
  Peptide Sequence Number=SeqID_79735
atggcccgacaacccaacagtggtggcggcccacgaacaaagacacacaatctaacattatccaccatccaaagaagtccatgtccagaggagccggcgagaggtcttggagatcatagtgacagaaagaatgcaaaactgcagacgcagacaagggggaaggaggggagcagggatgacaagctcatcttgtgccttgtagatgagcagggggcagggacgaccttcaaggatgagctgcacgccggcgctggtggacggtggagagccctggaggctggagcagccgccgccggaagaggacagaaagtttag

SEQ ID NO: 37957 - DNA, 1029 bp, Zea mays
  Peptide Sequence Number=SeqID_79736
atgcaaaactgcagactgcagacaagggggaaggaggggagcagggatgacgagctcatcttgtgccttgtagatgagcagggggcagggacgaccttcaaggatgagctgcacgccggcgctggtagacggtggagagccctggaggctggagcagccgccgccggcagaggacagaaagtacaggagaggggcgcaggcacaggggaggctttagggctatgtcttggtccatggtcagagcatggagagaggactggtggattttatgcttgtaaccgctatgagtcagcaaggcaagaaggagtgtatgatgaatctgaaaggagaagagaaatggcaaagaactcgcttgagagatatacacattattatgaacgatgggcagccaatcagtcgtcgaggcaaaaggcactgggggaccttcaaagcctacagaacgacaagcttgaaaggttaagtgacatacaaagtcaacctgagtcacagctgaagttcattatagaggcatggttacagattgtcgaatgcagaagggtattgaagtggacttatgcctatggattttacctgccagagcatgagcatgccaaaagacagttctttgaatatctgcaaggtgaggcagaatcaggattggagcggctacatcaatgtgcagagaaagaacttcaaatataccttgatgcagaatctccctcgaaagacttcaatgatttccgtacaaagttggctggattaactagtgtgactcgcaattattttgaaaacctcgtccgggctctggaaactggattaaatgatgtaggtccttccactagccatggtacatgcagcaaaagcgcaacttcgaagagcctcggtggtaaaagtaagagtggcaagaaccgagcatcaagcaccagttccaagtcgggtggctcaagccgaggtgtggatgatagtaacatatggacgtgcgatcagtgcacatatgcaaaccccaaatctgccagagcctgccaggcttgtgatcaccagcatcgatag

SEQ ID NO: 37958 - DNA, 487 bp, Zea mays
  Peptide Sequence Number=SeqID_79737
gctggcccctcggaagggttcgacagccgcctcaggccactcgggcttcgcgcccactactgatcaggggttcgaaggttggccccccgaaggtttcgacagccgcctcagaacacgcagagcgagggatgactctgggtacgtccgatacatgaccgagctcgggctacgctcccgaggtaccctaggacatttccgagaccatcaggagcgattctataacggaatcccatcagagggaggcatcgagccctcagaccctatcaaacgggaccgggtccggcaaatcacctgcaggtcaaagctccgcccactcaagggacacgatctcgcctcgcccgagcccagcctcgggcaagaacagcagacccaggaaaacagtgtcgcctgcactgctccgactgctgtgccacccgccagggtgaggctgacagcagccaagtccagcctcgggcaccataggaagctccgcctcgcccgaccctag

SEQ ID NO: 37959 - DNA, 1338 bp, Zea mays
  Peptide Sequence Number=SeqID_79738
atgcaggcggcatgcaaccgcaccacgaggatgcaccccttcgactttgacgcgtcctgcatggagtcccaggcccacacgtcatgcgggcggaagcagcagtcaaatcgtctgcaggctcacgtcccctcctggggcagcaggggagccctctcccacggcgtgaagacgacgcgcccgtgttccgttcctcgaacggctcgcgcaacagctgccccgcgaaccactcgtcccgtcgcattaactccgtggcagggcaggcgacacctttggcaggcgaagcgggcgacgcttcacctccgccataatgaccgcatcaaaaaagggaccgggaaaggggatattccaaaagggatccttctccacgaaggaagcgggccccgagcccttctactgatcagaggttcgaaggctggcccctcggaagggttcgacagccgcctcagagcactcgggctccgcgcccactactggtcagaggttcgaaggctggcccctcggaagggtttgacagccgccttaggccactcgggctccgtgcccactactgatcaggggttcgaaggctggccccccgaagggttcgacagccgcctcagaacacgtagagcgagggatgactctaggtacgtcctctacatggccgaggctcgggctatgctctcgagaaaggcgacgaaggggcgtatgataaaagccgagtcagtccttgaccgtcctctcgctctgtgcaaaggctcgggggctgctctcgcaaacccggctccggccaaaccgttgacagcgtcaacataccagcccgagaactcggaacctaaccatgcacccgggtcaaagctccgcccactcaagggacatgatctcgcctcgcccgagcccagcctcaggcaagaacagccgacccaggaaaacagtgtcgcctgccctgctccgactgctgtgccacccgccagggtgaggctgacagcagccaagtccagcctcaggcgccataggaagctccgcctcgcccgaccccagggctcggactcaacctcgaccctggaagacggtctccgccttgcccgaccccagggctcggactcaacctcaacccccggaagacggtctccgcctcacccgaccctagggcttggactcaacctcgacctcggaagacggtctccgcctcgcccgaccccagggctcggactcagcctcgacctcggaagacggtctctgcctcacccgaccctagggctcggactcagcctcgacctcggaggagtcaccgcctcacccgaccttgggctcggatcgaccatcttacaaggggatacatcattaccctacccctag

SEQ ID NO: 37960 - DNA, 282 bp, Zea mays
  Peptide Sequence Number=SeqID_79739
atggctgcatttagcgtagcagaacaatatacattacaaagcagtcgaggcctctatgttgtttgtgcgattagggccaccaccagtgttgtagctggtcctatagcgttgggggccttcggcttccgaagggatcttcgaacaagagcccacggtatgaagaagcacggaaacaatacgaaggatggagcagagccgaagctgtgcgcaagggagcttcggcatgatggcagaaaagaggaaaccgacttaaagaggaaaagactatctagactcagatag

SEQ ID NO: 37961 - DNA, 420 bp, Zea mays
  Peptide Sequence Number=SeqID_79740
atggatggaggaaaagaggacgacgtggacaccgtgaacgcgcgtctttcctaccgcgattgtaatatagaaatgctcatagatatgctcacaggtggttacgatctcgcgtggaagatggatttgcctgggcggtcccacacatcagagtctaagtgggatgcggaggagaggctagcgtgtggtgttgaacaggggccagatcgtgggtcccgctcagcagtgagccatccacgacgcgggatcaacaagccaaggggcgactgcaggtaccttcgaacaagagcccacggtatgaagaagcacggaaacaatacgaaggatggaacagagccgaagctgtgcgcaagggagcttcggcatgatggcagaaaagaggaaaccgacttaaagagaaaaagactatctagacccagatag

SEQ ID NO: 37962 - DNA, 429 bp, Zea mays
  Peptide Sequence Number=SeqID_79741
atgacaaattataaatgtaccttcggctcgaaggaaagtaagggtacaagcgtgatgcagaagcgaatgccaagtcagcgtgaacagtacgggaatactgttcacctatttataggcacgggtcgcagcccatgcaaaattacatccaagccctttgcctttgacaataactctatagtaatctatctgggtctagatagtcttttcctctttaagtcggtttcctcttttctgccatcatgtcgaagctcccttgcgcacagcttcggctctgctccatccttcgtattgtttctgtgcttcttcataccgtgggctcttgttcgaagatctctgtccacacattatactccagaggcattgttaaatcatgtttttgaggaccttcggaagtcgaaggcccccaacagtagcccctcgcaatattaa

SEQ ID NO: 37963 - DNA, 1122 bp, Zea mays
  Peptide Sequence Number=SeqID_79742
atgacaaattataaatgtaccttcggctcgaaggaaagtaggggtacaagcgggacgcgaaaatccctgtccacacattatactctagaggcattgttaaatcatgtttttgaggaccttcggaagccgaaggcccccaacatcgtcgtagcaagtaaaagcaaagaggaccacctgactgacctcgcagagacattcgctaatatgtgcgacgcaagattacggctcaacccagagaagtgtgtcttcaagatgacttcccacggatcctcggaggacggaaatgcactatcccacactgacgggcttgcacgagagggctttccccgcattttgtgggaggtacttcagggggccggatacacgacaccccctcagtacgtgatgcagcaattcgagaagcaccgggtgccccgctgtagggtgaggatgaccttcgagcctcatcccctgcagccaggctggcgctcattggactccgagtcttttggataccgagctgaggacacgatcgaggtgatcgctctgcacgggttgaccactttctgcggattccatcctttggagctggctacccaccccattggcttgttccccgcagaaagggaggacgacccaatgtggaaggatcgggtggagcatgccaaggatatctgggccatctacccaggacagactgcgcacttgaccgtacggtgcatgaatgctctgtaccgtctgcaagtgatgcgcggtgaggcgacgtcccatctgatggcactattggaggcaacaaagattactttggacaacagggaggagctcgtggttgatttgtccactgaaatggtggaaaaggacttgcaggtggagcaactatccactgatatccaagagttggaggaattggtgggcaccagggagaacaccatcgaagttcttgaggatcagctcattaacactcagcaacagcttgttgaggctaatgagcacttggatatgcatcatcaggagatccaggacatggaggccaatgaggacgtcgacatcgagggaggagaggagcctgcctctagtgtggacactgctggctcagggagaccaccttcccccgagtcgagtgttgcctcgttcgctcactaa

SEQ ID NO: 37964 - DNA, 432 bp, Zea mays
  Peptide Sequence Number=SeqID_79743
atggagctacgtcaccgaaacagaacatgggcagaaaatggtcagcgtattaatgagttggcagccgatgtcagccgcctgcaggacgagcttgctgaacgggatttgggggtcgattgggccatcaactcacgttcggttgcttgggaccgagaagccaaatctcgtgctcgtgtggtagagcatagtgcggcccttgacaacatgcaggtgtactgcaatactttacatgaggatgttcatgtacagtattcacgactgcacccagacgtacctgccgaccctgttggaatgggtgccagaccctcaggaacagcaggtgaagcatttggtggggaattggaccttttcaagccccctccttctatgaacctggttgacgaacggtcccctacaacagacagtgaagcaaccaaagatgataaatactag

SEQ ID NO: 37965 - DNA, 432 bp, Zea mays
  Peptide Sequence Number=SeqID_79744
atggagctacgtcaccgaaacagaacatgggcagaaaatggtcagcgtattaatgagttggcagccgatgtcagccgcctgcaggacgagcttgctgaacgggatttgggggtcgattgggccatcaactcacgttcggttgcttgggaccgagaagccaaatctcgtgctcgtgtggtagagcatagtgcggcccttgacaacatgcaggtgtactgcaatactttacatgaggatgttcatgtacagtattcacgactgcacccagacgtacctgccgaccctgttggaatgggagccagaccctcaggaacagcaggtgaagcatttggtggggaattggaccttttcaagccccctccttctatgaacctggttgacgaacggtcccctacaacagacagtgaagcaaccaaagatgataaatactag

SEQ ID NO: 37966 - DNA, 144 bp, Zea mays
  Peptide Sequence Number=SeqID_79745
atggcgcgcggtggtgatgagaatgttggttttggcattgactctgatgatggtaagtggtattctttccgtttggaaaggattttgggccttacagaaattccgggcactgttgtgatcgtgcttaccgggtcgtggttataa

SEQ ID NO: 37967 - DNA, 968 bp, Zea mays
  Peptide Sequence Number=SeqID_79746
ataacagtcagttggtggagtccgaaggagttgcaggtggtgatgagaatgttggttttggcattgactctgatgatggtaagtggtattctttccgtttggaaaggatggctcgtcttagacacactgcacggaagtcagtcattcctttcttgccttctcgtctcgcggagcgcccgcttcgtcgtctagtgaccggtcaatccagccacttggagaggctgcaccactgcctgcatgaggagcaggagcgtcgacgacaggagcaggagcagcagggctcttctttctcgctccagcaggaggaactggaaggatgggttgctcgacccatcactcgcgacgctgctcgcgggtgtcacttccacgacgcgctcgacaccctgctacgtcgggcacttgactggcgtacttggtccattgagtatcactgtgtggtcttccagcacagtcgtggggtttacccggaccgctgggaggcgacctgcttggtgcgccggccgaagaacagtctctggggtgcggagatctgctcagagcactattccatctctgagcgggactcagctgaggcagccatgcaagatgccgcacggcgtgcgctttcgcactactgctcagtgctcggcggggtagccgatggtctcaacctgaagtattacccccaccatccatctagcagcacaggaggcgtgattgtctcacctgttggcgaggacaatcctaggttgagcagcacagtcaacctagccaccgtgctaaacacggagctggaccatgcggtagacgagctaagtagggctcgtgctgagatcgcccagctgcgggctgagcgcgcggagcgtcgtcacctggatgatggctctcccgctcccgccgggactcagcacccgtaccgctcacctcggcatcgacaccagtcctatggcaacctcgactgcaggaccaagataaatttagaaccatag

SEQ ID NO: 37968 - DNA, 273 bp, Zea mays
  Peptide Sequence Number=SeqID_79747
atggtttggcgggaacgtgtgctcccatgcttggtgtccgccgtgaccgtggtcaagcacgtcctggtccgggctagttacattggagcttgttctatgattgcctcagagaacgaagaagagagtgaagtgactgaagagaagacaccaccaccacctttggaatctcgagcaaggacttggctctacttcaacatctgcaagtccgaacctgactcacctactaacgaaggcaagccccggtgcatgcaacccctttccttgggtttttaa

SEQ ID NO: 37969 - DNA, 273 bp, Zea mays
  Peptide Sequence Number=SeqID_79748
atggtttggcgggaacgtgtgctcccatgcttggtgtccgccgtgaccgtggtcaagcacgtcctggtccgggctagttacattggagcttgttctatgattgcctcagagaacgaagaagagagtgaagtgactgaagagaagacaccaccaccacctttggaatctcgggcaaggacttggctctacttcaacatctgcaagtccgaacctgactcacctactaacgaaggcaagccccggtgcatgcaacccctttccttgggtttttaa

SEQ ID NO: 37970 - DNA, 108 bp, Zea mays
  Peptide Sequence Number=SeqID_79749
atggccaacctggtggtggggaatttctcgccgtcgcgcagcgacgccatgaatccgctgtgcgccgtggccaagcttcatccgtacctcaatgccggtactaaataa

SEQ ID NO: 37971 - DNA, 141 bp, Zea mays
  Peptide Sequence Number=SeqID_79750
atggccaacctggtggcggggaatttctcgccgtcgcgcagcgacgccatgaatccgtcgtgcgccgtggccaagcttcatccgtacctcaatgccgatctaatccaacggctgagacttaaagataccccttcgcgatga

SEQ ID NO: 37972 - DNA, 567 bp, Zea mays
  Peptide Sequence Number=SeqID_79751
atgtcgggctgggacgagggcgccgtgttctacagcgaccaggcgcagttcccccgcggcggccccggcggcgacccagccgccgacctcacccgccactccgcccttcgcaagttcaaggagttcctccgcggtttcaccggccccaccggcgacttcccttaccgcgagagcctagtacacaaccgcgaccatgtcaccgtcgccactgaggacctcgacgccttcgatgccgagctctctgacaagatccgcaagtcgcctgccgattatcttcctttgttcgagacggctgcgtccgaggttctcgcaagcctccgttcgaaagtcgccggcgagaccggggagatggaggagccagtcccaggagatgtccagatctttctctcctccaaggagaactgcctgtccatgagatctgtcggggaaatggaattcaaagaatttgcacagaggccagatgcatatgccaagctctgctcaatgattggtccttcaatttatggtcattctgatgtcaagaaagctattgcatgcttgttatttggggggtctaagaaggtttag

SEQ ID NO: 37973 - DNA, 1404 bp, Zea mays
  Peptide Sequence Number=SeqID_79752
atgtcgggctgggacgagggcgccgtgttctacagcgaccaggcgcagttcccccgcggcggccccggcggcgacccagccgccgacctcacccgccactccgcccttcgcaagttcaaggagttcctccgcggtttcaccggccccaccggcgacttcccttaccgcgagagcctagtacacaaccgcgaccatgtcaccgtcgccactgaggacctcgacgccttcgatgccgagctctctgacaagatccgcaagtcgcctgccgattatcttcctttgttcgagacggctgcgtccgaggttctcgcaagcctccgttcgaaagtcgccggcgagaccggggagatggaggagccagtcccaggagatgtccagatctttctctcctccaaggagaactgcctgtccatgagatctgtcggggcggattacatgtcgaagctggttaagattgcgggaatcacaattgctgcatcgagagtaaaagccaaagccactcatgtaactcttatatgcaagaattgccggagtgtgaggacagtgccttgcaggccaggcctcggcggggctatcgttccacgttcgtgtgaccatgttcctcagcctggagaagagccatgccccctggatccttggattgctgtcccggataagagcaagtatgtggatctccagaccctcaaattgcaagaaaatcctgaggatgttccaacaggtgagcttccaaggaatatgctgctttctgtagatagacacctagttcagactatcgttccagggaccagattaactgtcgttggcatctacagcgtgtaccaagcttccacaacccagaagggtgcagttggtgttaaacagccttacattagagttgtgggtttggagcaatctcgagacaataactcaaacggtccctcaaattttactctcgatgaggaaatggaattcaaagaatttgcacagaggccagatgcatatgccaagctctgctcaatgattggtccttcaatttatggtcattctgatgtcaagaaagctattgcatgcttgttatttggggggtctaagaagttcctcaaatttgtagagaagactgcccctattgcagtctatacatctggcaaaggttcatctgcagctggtcttacagcatctgtaactcgggatagtagctcgcgcgagttttatttggaaggaggagccatggttttggctgatggtggagtagtttgtatcgatgaatttgacaagatgcgacctgaagacagagtggcgattcatgaggccatggagcagcagacaatatctattgccaaagctggcattacaacagtactcaattcaaggacttcagttcttgcagctgccaatccaattgcaggacgctatgatgatcttaag

SEQ ID NO: 37974 - DNA, 258 bp, Zea mays
  Peptide Sequence Number=SeqID_79753
atggttaaaaattttggcagcagaacagtgcaaatagcaatgaatgttgtgagcggaccagcaagcgaaccaaagggtccagaatctcaccagggatcatgccgaggagaccttcaaccatggtgcagcggctcggtgatgagcactggattgaaggaattccgcagaggccctgcccatcagcgcaccatggtgaaccgtctgaacaccgacgggatcaagcgctgcgaccatgtgtccctcgcggcttcactctga

SEQ ID NO: 37975 - DNA, 447 bp, Zea mays
  Peptide Sequence Number=SeqID_79754
atggaggaattccccgcgggaatcggggatcgggtccccattgccatctctagcagcgaggaagccctggattgggcgctcaaggttcccgtgcttcctggtggtcaacggagggcgaagtctgacacttatgtaggcctcccagcggagagcccgactgtccgagtatggcgcgatagcacagcgagagaatcagcaaggttgtttgccgagcagtggaagggagatctccatgcaatattggcgtggccagatccaaatttccacggactactccgtcttctgcgcgcgcgtcaggtaggaggagcacctgtgaagctaggcagtgggtcccgccaacggctagccccatccgcgctacgaataggtgccgcgctgcgcgcggaattctgttacagtgcctatgatcctggagaaaagatagggaggtggagaagatggacctga

SEQ ID NO: 37976 - DNA, 633 bp, Zea mays
  Peptide Sequence Number=SeqID_79755
atgggttgtcttccaccatcgatagctgagcgcagcagatcccgcaccagtggcggctgcccccaacggtggagaccatcaccggtgcctccatccaatcgagcaccagaactccactttcccctatggtttgtgctacgcagagcggaccagcaagcgaaccaaagggtccagaatctcaccagggatcatgccgaggagaccttcaaccatggtgcagcggctcgcgaggaagccctggattgggcgctcaaggttcccgtgcttcctggtagtcaacggagggcgaagtctgacacttatgtaggcctcccagcggagagcccgactgtccgagtatggcgcgatagcgcggcgagagaatcagcaaggttgtttgccgagcagtggaagggagatctccatgcaatattggcgtggccagatccaaatttccacggactactccgtcttctgcgcgcgcgtcagtgcctacgatcctggagaaaagatagggaggtggagaagatggacctgaccggtgggtcccgccctgaagcagcagtgcgcgctcggccatgtggctgtgaggatgactgccacggcccacccgtcattgggagagagcatgaggcacatggtgggctggtttga

SEQ ID NO: 37977 - DNA, 444 bp, Zea mays
  Peptide Sequence Number=SeqID_79756
atgcttcactctgacgacgacggcacgctcgctagcagcgaggaagccctggattgggcgctcaaggttcccgtgcttcctggtagtcaacggagggcgaagtctgacacttatgtaggcctcccagcggagagcccgactgtccgagtatggcgcgatagcgcggcgagagaatcagcaaggttgtttgccgagcagtggaagggagatctccatgcaatattggcgtggccagatccaaatttccacggactactccgtcttctgcgcgcgcgtcagtgcctacgatcctggagaaaagatagggaggtggagaagatggacctgaccggtgggtcccgccctgaagcagcagtgcgcgctcggccatgtggctgtgaggatgactgccacggcccacccgtcattgggagagagcatgaggcacatggtgggctggtttga

SEQ ID NO: 37978 - DNA, 501 bp, Zea mays
  Peptide Sequence Number=SeqID_79757
atgtgcaaaaaggccaggccgaaggggtaccgggtaactagagccgtccagattagatctagcggcgaagattggatctggcgtgttatgtactgcgaggaagccctggattgggcgctcaaggttcccgtgcttcctggtagtcaacggagggcgaagtctgacacttatgtaggcctcccagcggagagcccgactgtccgagtatggcgcgatagcgcggcgagagaatcagcaaggttgtttgccgagcagtggaagggagatctccatgcaatattggcgtggccagatccaaatttccacggactactccgtcttctgcgcgcgcgtcagtgcctacgatcctggagaaaagatagggaggtggagaagatggacctgaccggtgggtcccgccctgaagcagcagtgcgcgctcggccatgtggctgtgaggatgactgccacggcccacccgtcattgggagagagcatgaggcacatggtgggctggtttga

SEQ ID NO: 37979 - DNA, 723 bp, Zea mays
  Peptide Sequence Number=SeqID_79758
atgtcgctccgccggtggaagcccttcttccctgcgttcgcggccatcgacaccgccatagagaccgccaccggggcccgctcccgggacaagttccggcaactgaggagcgagctggtggagatgctctgcgatgccgcggacgacgacgccgatcgagtcaaggggctgtgccggctgctcgacgcggccatggccgaggcgctttcgacgctgcatgtggtcccggtgacgacgaccatgctgaccaccaccggcgtggacaaggccgtcgaaggcctgctgagccacgaggccgggaaggtgcgcgccctcgcgcacggcatcttgatccagtgggcggaaggcggcgtgttggacaccacggtgttggccgctccatccactcaccgaatgcatccgcaggcgcagaggcctgagacagccgttctactagcttatacccccaagatctcggacgagaagatgcctcctgtcgtttccaatgccggcggcgatcgcgtcaggagcgggcagacaggagatgcaaagcgcaagcacccaggctactaccgagaagctgatgctgatgacgagaagcggcagcgcaacgtccctgagaaggtcgaggacaggccaaggaaaatggagccggacatcaagagtaggagcagctggagatccagggacacgaagagcaggagccgagcgagcagctggagatacagggacgagaggcgctaa

SEQ ID NO: 37980 - DNA, 723 bp, Zea mays
  Peptide Sequence Number=SeqID_79759
atgtcgctccgccggtggaagcccttcttccctgcgttcgcggccatcgacaccgccatagagaccgccaccggggcccgctcccgggacaagttccggcaactgaggagcgagctggtggagatgctctgcgatgccgcggacgacgacgccgatcgagtcaaggggctgtgccggctgctcgacgcggccatggccgaggcgctttcgacgctgcatgtggtcccggtgacgacgaccatgctgaccaccaccggcgtggacaaggccgtcgaaggcctgctgagccacgaggccgggaaggtgcgcgccctcgcgcacggcatcttgatccagtgggcggaaggcggcgtgttggacaccacggtgttggccgctccatccactcaccgaatgcatccgcaggcgcagaggcctgagacagccgttctactagcttatacccccaagatctcggacgagaagatgcctcctgtcgtttccaatgccggcggcgatcgcgtcaggagcgggcagacaggagatgcaaagcgcaagcacccaggctactaccgagaagctaatgctgatgacgagaagcggcagcgcaacgtccctgagaaggtcgaggagaggccaaggaaaatggagccggacatcaagagtaggagcagctggagatccagggacacgaagagcaggagccgagcgagcagctggagatacagggacgagaggcgctaa

SEQ ID NO: 37981 - DNA, 294 bp, Zea mays
  Peptide Sequence Number=SeqID_79760
atgtgcagccgcccccccccacttctcttcccccttggccgccgcccccctgcccatctcctcctctctcaattcttgcatccaccaaaccctagccgccccccctctcaatcccctcctcccaaggtgccaatccttgccgctcggatcatcgttgtcgtggtgcgagtcttcaatcgttttggtggagggaagaagggaggaaggaaagggggagaatccaaggtggtggacttccagatcgtacttagggatttgcccgaacttccggtacttgatacatgttgggaatga

SEQ ID NO: 37982 - DNA, 243 bp, Zea mays
  Peptide Sequence Number=SeqID_79761
atggtgcatcctccccgcttggtaccccgtcgtgtgggtgcgagtcttccattggagtttggagggaggaagaaggaagaatggaaggaggaaaggaggaacccaagatttttcaggtgggtaaaaacaagactattagcagtttccctgattttcgtgggtggtaatttaccggtggtggacttccggatcgtacttagggatttgcccgaacttccggtacttgatacatgttgggaatga

SEQ ID NO: 37983 - DNA, 873 bp, Zea mays
  Peptide Sequence Number=SeqID_79762
atgccccaaaacccaatcagagagatgctacatgatgtggagggaagggaagacgtaatgggggcgacgatacctgtgattaagccacgacgatccccatccacgatgcacagtggcccggcggcggaatacccagacaccatgcggcggaggaccacacccgggcccccgcagcgccaatccggccacagcgtcgaagcccgaccatgccccaacctgcgaagacacggcgaggatcgctacccccgctgtgcctgctctcctgcggctcggctcaagttcaacggtggtggagacatgagctccgcggtggcacccttctcgcaccctatctctttctcatgttggcttcgaaggtctacggatggcaaagtggtcatgggacatgggtttatactcaccacgaaaggaggggggtccgccacgcccaaggtagccgagatccacgccggaaatgactctgcgcaagcttcggtgggttgttacagactcaatgatcgacggaggaaagggatgattgaagctgtgcacaggggcccacctagcggtgacatgctgagagaggaagcgcgccaagcgactgaccagagggccccacatgtcggcactactgcgaacgcgggcgtgcaacgggttaatgggccgagcgggagagttgttcttcgggtgggccggagtcaagtagggagcaggcccgacaagcttgtgacgcttgccgtgcgcgcacacaagactagcagagacgcaaacacagtgacttgccagtttgccacttcattccgggtacccgcccgtattgtacccgtttcgtacgcggaattttcggatacttatcggttattggtgattccgtatcctaccgatatccggtga

SEQ ID NO: 37984 - DNA, 789 bp, Zea mays
  Peptide Sequence Number=SeqID_79763
atgcacagtggcccggcggcggaatacccagacaccatgcggcggaggaccacacccgggcccccgcagcgccaatccggccacggcgtcgaagcccgaccatgccccaacctgcgaagacacggcgaggatcgctacccccgctgtgcctgctctcctgcggctcggctcaagttcaacggtggtggagacatgagctccgcggtggcacccttctcgcaccctatctctttctcatgttggcttcgaaggtctacggatggcaaagtggtcatgggacatgggtttatactcaccacgaaaggaggggggtccgccacgcccaaggtagccgagatccacgccggaaatgactctgcgcaagcttcggtgggttgttacagactcaatgatcgacggaggaaagggatgattgaagctgtgcacaggggcccacctggcggtgacatgctgagagaggaagcgcgccaagcgactaaccagagggccccacatgtcggcactactgcgaacgcgggcgtgcaacggtttaatgggccgagcgggagagttgttcttcgggtgggccggagtcaagaggtggtaccctttacccacaagtcatgttacccatctgccaagggatcgcgacttcccatacacctctaccgaggaggcgaggcagggaccgccatcgcagcaaaatcctcccgagggcctccctacactgaccactcccctactgcccttgcccctttcggcaggggcccaggcgcaaaagatcctaagactcagaatactatgcagtag

SEQ ID NO: 37985 - DNA, 480 bp, Zea mays
  Peptide Sequence Number=SeqID_79764
atggccacgatcctatgtaatggaacggtatccctcgattgcccatggccgtcactcagcagatcaacggttcatggcctgctcccttatttcgaccacaagggcggcggcgctctagtgccgcacggcggagggcccgccggcgatagccgtgccggtgcgcagatgccccaatccccgctcctaagggtgctacgtgaagcgcagaacatagggaatagggaggggtggttctcaccgacaacagaggtccggtcgatgctgtccacggaggatggcggcaacacgacggggatggttctccggcgagcgattcactggactctgaaggccaccgcggctaagcacatgcccgatcaccatccacgtgcaccggcgattctcccagaccccaccatggacaccgaatggaggcagagatgccggaccatggtggtggcattatctcgctccccccggtggcggtgggcgagtccatag

SEQ ID NO: 37986 - DNA, 516 bp, Zea mays
  Peptide Sequence Number=SeqID_79765
atggccacgatcctatgtaatggaacggtatccctcgattgcccatggccgtcactcagcagatcaacggttcatggcctgctcccttatttcgaccacaagggcggcggcgctctagtgccgcacggcggagggcccgccggcgatagccgtgccggtgcgcagatgccccaatccccgctcctaagggtgctacgtgaagcgcagaacatagggaatagggaggggtggttctcaccgacaacagaggtccggtcgatgctgtccacggaggatggcggcaacacgacggggatggttctccggcgagcgattcactggactctgaaggccaccgcggctaagcacatgcccgatcaccatccacgtgcaccggcgattctcccagaccccaccatggacaccgaatggaggcagagatgccggaccatggtggtggcattatctcgctcccccggtggcggtggcgagtccatagatacagagcacttggaggactggctcaaaggagggtag

SEQ ID NO: 37987 - DNA, 279 bp, Zea mays
  Peptide Sequence Number=SeqID_79766
atggcaatgggtcgggttcggatcgggtatgataaatacccgcccgcgacaatacccgcgggtattactcatacccgcccacgtctatacccgcgggcagccggcagggaccagggtcgctcactcgctcctcggattggagggacgctgacgcaggattcttggagaccggcagacgacagggagccagggacgctgacgcaggagcaggattggagcctcgcaggtatgtccttcatgaccttcgtctgccttcgtctgaggatcattgtgtcctaa

SEQ ID NO: 37988 - DNA, 564 bp, Zea mays
  Peptide Sequence Number=SeqID_79767
caccggacagtgtccggtgtcacaccggactgtccggtgtgccagcggagcaacagctacttcgcgccaacagtcgactgcaaacgcattcaatgcgctacagtgcgcgccagagtcagagcagcggcagacggcgcaccggacagtctacaggacttgtccggtgcaccaccggacagcccagaggccccaccagtagggatggcaatgggtcgggttcggatcgggtatggtaaatatccgcccgcgacaatacccgcgggtattactcatacccgcccgcgactatacccgcgggtaggattttgtacccgtgcccgtacccatcgggtatcgggcgggtatcggatatccgcgggtataattacactgcacgggaagccagggacgccggacgcagggcccgcgtctactgtgctgggcggtctgggcactgccgcactcgcctggtcgcttgatctcgctcctcggctcctcgctggcagattgcggtggcggtccggtgcctggggcagggaccgcgtcaggagtaggaccgccaagcggactgccgaattttgcgag

SEQ ID NO: 37989 - DNA, 477 bp, Zea mays
  Peptide Sequence Number=SeqID_79768
atgacgggaaaacagcgacgcccgccccgctccgactgccatgccaaccacccaggcgaagctgacaacaagtcacaatcaaccaccgagttcgatctcgggcgcgacaggaagctccgcctcgctcgacctcaagctccggcctcgggaggaggtctccgcctcgcccgaccccctgactcggcatcgacctcggcctcgggaggaatcgcgtcctcgcccgatcccggccttggcttcaagagaagtctccacctcgcccgaccttgggctcggaccaactggggatacatcattaccctatccctagccagctcaggctacaaggaacaagaccggcgtcccatctggcttaccccggcgacgggtaatgatggtgccccgcgtgcaaccatgacgccggtggctctcagccccttacggcagcaaggagacgtcagcaggatccctgccgcactaccagctgtgctcctatag

SEQ ID NO: 37990 - DNA, 477 bp, Zea mays
  Peptide Sequence Number=SeqID_79769
atgacgggaaaacagcgacgcccgccccgctccgactgccatgccaaccacccaggcgaagctgacaacaagtcacaatcaaccaccgagttcgatctcgggcgcgacaggaagctccgcctcgctcgacctcaagctccggcctcgggaggaggtctccgcctcgcccgaccccctgactcggcttcgacctcggcctcgggaggaatcgcgtcctcgcccgatcccggccttggcttcaagagaagtctccacctcgcccgaccttgggctcggaccaactggggatacatcattaccctatccctagccagctcaggctacaaggaacaagaccggcgtcccatctggcttaccccggcgacgggtaatgatggtgccccgcgtgcaaccatgacgccggtggctctcagccccttacggcagcaaggagacgtcagcaggatccctgccgcactaccagctgtgctcctatag

SEQ ID NO: 37991 - DNA, 1014 bp, Zea mays
  Peptide Sequence Number=SeqID_79770
atggacgagtctggtatgaaaaaggagatcaggctgcttcagccccactctgatgatatgtcccgagttgtggaccaactcttaaagttgttcgccacctttgtaggtggtggggtgcaccggcatcgccttgctcttgctgtcgttgaaggagcgcggcctcgtggagatcggcgcccttcacccatcgctcggcttcaaggattttcgtcgtgcagcccggctgcattccctcaccaatggtcagtttggtggggagaagcaagccgggctgcggcctccgccccgccctcagcttcaaggatcttcgtcatccttgctgaggcggagggcaagctaagctggggttctacctcccgcatgggccggcaggccgtcttctccttcagcattcaggggagagggcgctcaccagccttgcggagggggcgaacttcgacaacgcgggaccggttggctgcaagcgtcgtcagctccagcgtgcctggctcgttggctcagctggctgtgccgcaagcctccgacgctgcctcctgccgcttgatccgggcgcggccgtccgtccatcgcgcgggcgacttgttgcgccgtgcgcaccgggggatcgtccaagacgccgtacgccgcatgggcggcgttcgtgttcttggattgtcttgtcctcactccagcacgacgcctccgcgcggaggtcggggcccgcccgtccgcgaggacttgagtggggatctgccggtgcaggctggggcgtccgccattcgtctgtgtggcgctggcgcgcaggtggccactgtcgtcggtgctgaggtggtggcagccagagaaggtttctccgccgacgagactatcggcgccatctgcggccggacccccggctctttggctttgatggcttgtcctcgcccctcgagtggagacgtgggcgagggcctcatcacagcagcatctgctctgaggtcatcgctgctgctatttagccgctcgaagcgggggtcgtcgtcgctgctggtgtag

SEQ ID NO: 37992 - DNA, 978 bp, Zea mays
  Peptide Sequence Number=SeqID_79771
atggacgagtctggtatgaaaaaggagatcaggctgcttcagccccactctgatgatatgtcccgagttgtggaccaactcttaaagttgttcgccacctttgtaggtggtggggtgcaccggcatcgccttgctcttgctgtcgttgaaggagcgcggcctcgtggagatcggcgcccttcacccatcgctcggcttcaaggattttcgtcgtgcagcccggctgcattccctcaccaatggtcagtttggtggggagaagcaagccgggctgcggcctccgccccgccctcagcttcaaggatcttcgtcatccttgctgaggcggagggcaagctaagctggggttctacctcccgcatgggccggcaggccgtcttctccttcagcattcaggggagagggcgctcaccagccttgcggagggggcgaacttcgacaacgcgggaccggttggctgcaagcgtcgtcagctccagcgtgcctggctcgttggctcagctggctgtgccgcaagcctccgacgctgcctcctgccgcttgatccgggcgcggccgtccgtccatcgcgcgggcgacttgttgcgccgtgcgcaccgggggatcgtccaagacgccgtacgccgcatgggcggcgttcgtgttcttggattgtcttgtcctcactccagcacgacgcctccgcgcggaggtcggggcccgcccgtccgcgaggacttgagtggggatctgccggtgcaggctggggcgtccgccattcgtctgtgtggcgctggcgcgcaggtggccactgtcgtcggtgctgaggtggtggcagccagagaaggtttctccgccgacgagactatcggcgccatctgcggccggacccccggctctttggctttgatggcttgtcctcgcccctcgagtggagacgtgggcgagggcctcatcacagcagcatctgctctgaaggtcatcgctgctgctatttag

SEQ ID NO: 37993 - DNA, 258 bp, Zea mays
  Peptide Sequence Number=SeqID_79772
atgctgtcggtgccgttcatcatgctgttcatgatccagtcgctgcttgccttgacccggctacgggcggactcgtccagctcgacccgggcctcaccagcgccggtggccacggcggccacctgcgcgatgctgaggctgggcgccctcgatcttcaccaagggacggtgtcgacgactgtagcaaaatggttcgtgccaattgcacgagggacaatggacaaggtttacaggttcgggccgcttagagatgcgtaa

SEQ ID NO: 37994 - DNA, 648 bp, Zea mays
  Peptide Sequence Number=SeqID_79773
atgagctctgatgtcaatggagaatttgtcatggataccaaatctgtcctgccagtaatgccagtgtttgatttctggatccaagttgttgaagtcccaaatgtctcttgggaggatattggtgggctggagaatgtcaagagagagctccaggaggggacggcgccgggcgccggtggcaggccgggctcgcgggcgcacggggcgccgctgggtggcctggtgctagtctccaaggatccggacaacatccccgagatcgctgcaatttacatggccgagtaccgccaacccttggtgaagatcgagggcgccagcctcagcatcgcgcaggtggccgccgtggccaccggcgctggtgaggcccgggtcgagctggacgagtccgcccgtagccgggtcaaggcaagcagcgactgggtcatgaacaacatgatgaacgacaccgacagcatgatgcggggcggggccgcgggcgggatccgcgtccgcttgcttcggctcctccgttcccaaacctcctcaaccagcatctctagggttttcgcagctgccgcccatggctgccactccggaccgcgtcaatgccgaccttcgtcgtcgcctcgccgtcgacaccccatcgccgccccaggtagccaaaggtaa

SEQ ID NO: 37995 - DNA, 288 bp, Zea mays
  Peptide Sequence Number=SeqID_79774
atggcgtgggcaggtgcgaagcacagtcgaagaggaggttgtttcagtcgctggttgcagctgaggcaactatgtagaagcaccgtgaggtccgcgccggagatggagagcttggccaccgacgacgtggtggcgttgtcgccgagggccatcggatttgaggagatggtggactcatctgctgtcggagatgtaggcgaagagctatggttcgatgaagagggcgatgcggcgttgagggcgacgacagatgagtgcgaggcccaccacggctgtgacccccgatga

SEQ ID NO: 37996 - DNA, 1209 bp, Zea mays
  Peptide Sequence Number=SeqID_79775
atgacgaggagaacccaacgccgcgcgctgattggttcatacggcctcgcctcggattgcccccatcagcgccaccagattgaacctgaccgtaaggagggcgtccgccctgacgcggctccgccctccaccaccccgccaatctcgcgggcgagccacgcccgctccatcccagcaacgtcaccagcgtggtccaagcccggagatctgcactccctcgtgcccccgcctgccaccaccgcccggtcccgtgccctccctctcacacaatcgagacgaacgccatctccgtcgcccatcttccaacctcctccccacgccgccatttgtgcctccttcatcgctaaggtcagtgtcgccctagaagatgggtccacgcctaaaccgctcgcccccgtcgtgcccccgctccccccacatgattctcgatcctggcccacgaccgagatcgccgccgagaaccccctgacgagaccgtttgcagccgtcctctccaagacgagatcgccgtcgagccccctcccctcgagccccgtaccccgcccaagattccagatctacgcccgatgtgggcgtgtggttgcgtcgagcgcgtggccgcgagcctcttcgtcgtcccccacgccgttggaacaccgctgtcatcatcgggggtcacagtcgtggtgggcctcgcactcatctgtcgtcgccctcaacgccgcatcgccctcttcatcgaaccatagctcttcgcctacatctccggcagcagatgagtccaccatctcctcaaatctgatggccctcggcgacagcgccaccacgtcgtcggtggccaagctctccatctccggcgcggacctcacggtgcttctacatagttgcctcagctgcaaccagcgactgaaacaacctcctcttcgaccatgcttcgcacctgcccacgccatcggtcgctctctcggactacaccgacaccgatgccacgacgacccctcctgccctcgtgctctcctcgtcgtcctcttcccgaccctccttacctgtgatgcccattttactggtttgcctacaatgagctctgatgtcaatggagaatttgtcatggataccaaatctgtcctgtcagtaatgccagtgtttgatttctggatccaagttgttgaagtcccaaatgtctcttgggaggatattggtgggctggagaatgtcaagagagagctctag

SEQ ID NO: 37997 - DNA, 402 bp, Zea mays
  Peptide Sequence Number=SeqID_79776
atggcgccttcacgtggaggccggtgccccactcgcccgggaggacttgagtggggatctgccggagggctggtgggccctgccgtcggcgccgaggcagaggcggctcgagaagtccccattgccgatgggatcaccgccaccattcgcgcttcgggcctccgagcgggtggcggcgagccgctcgtcagtcttctgttgctccgtaggcctacccccatggagtggggttgttcgtacctgcggaggagggaaccagagttccgttttgtaatggcacttcgaatgccagagttcctcggctcgatcggccttgctgtccgaggctcctctagctcagttaaagggacccctcggccgctcttcgatgagccgaggccaggggtagcgatatcagtatga

SEQ ID NO: 37998 - DNA, 843 bp, Zea mays
  Peptide Sequence Number=SeqID_79777
atgtcttcttcctccctcatgcgccgcatctttccaccttccaagcccccggatgggggatgcctgccgtctttttgcctcatcattggtggaacgcaactccgtgggagttggtacctttcagccatcgttcagcttcaaggattttcatcagccagcccggctgcacccccccgccggcggtcacccgagatggtgaccaccagttcctgggtggggaggagcaagccgggctgcgatcttggtcccaccctcagcttcaaggatgtttatcatcctcgctggggtgggggccgggctgagccggcgctctgcctcccgcgcgggtccgtgggccatcctctcccgcggcattcgagggagagggcgctcactggccctgcgggcggcccgaactccgacaacgcggggctggtcgacggcaggcgtcgtcacctccagcgtgtcgggttcgttggcttggctcccggcggccccttctgtcggagggcggctgccgcgccgtgccggtgcctcactcgcccgggaggacttgagtggggatctgccagagggctggtgggccctgccgttggcgccgaggcagaggcggctcgagaagtccccgtcgccgatgggatcaccgccaccatccgcgcttcgggcctccggcctacccccatggagtggggttgttcgtacctgcggaggagggagctggagttccgttttgtaatggcacttcgaatgccagagttcctcggctcggtcggccttgctgtccgaggctcctctagctcagttaaagggacccctcgaccgctcttcgatgagccgaggccaggggtagcgatatcagtatga

SEQ ID NO: 37999 - DNA, 1011 bp, Zea mays
  Peptide Sequence Number=SeqID_79778
atgtcgtcgtcttcgtcatcatcgtcgtcatcgtcgtcgtcaggcgtctccggcgacggctccctcgggagcccgtccctctcttgcctccaacgacgcctctccaaggcgtcccgagcccgcatctgctcgcgagccccaagcctttttcgcgtccttcttctccttcttctctgcagcgaccctccacacggctcggtccaccgcgtcctccgggaccggtggcagggaaggcttgtgacaccccaactcctggagacggacggaaatcccgactgtgagaaccaagggcaatctgacacaagaaagaaggagcggacactcactagggacatacacccacgctcgggacacataaagggctgggtaagggcgccggcgtccagcctccctaccgtgcccgctactcgcgtgcggaggtcatcggcggagagggggaccgaggacatctgcgaaccctccaagtcgacccccggcatcatctccgaaagcggtaaccaccgctctatcaagggaagcaccctccggcgatggatggcggcaaccatcctcgcggcggagacgaaactcagcacaccccggcggcggggtcgggccggccccgctcggagggaccatccactccggctgtgggtcaccagagaggggacggagcaagccatcggtgacaagggcctccagatcgtcccccatgacggtggagaaaggtcacgggtcgcgcggcggaacgacggttacccggtcggccatcgccaagcgaagggggtggcggcggagcagacaagggaccaggaaaggggatactccgaaagggatccttctccacgaaggaagcgggccccgagccctcctactgatcaggggttcgaaggctggcccctcggaagggttcgacagccgccccagagcactcaggcttcaggctcaatactgatcagaggttcgaaggctggcccctcggaagggttcgacagctgcctcagaccactccggctccgcgcccactactga

SEQ ID NO: 38000 - DNA, 378 bp, Zea mays
  Peptide Sequence Number=SeqID_79779
atggcgcccgaggctggacttagctgctgtcagcctcactctgtcgagtggcacagcagtcggagcagggcaggcggcgctgttgtcctatcaggtcggtcagtggagcggcgaagtgactgcggtcacttcggctctgtcgacttgaagagcgtgcgtcaggataaggtgttagtcgatccttgcattaaatgctcctgcgatacggtcggttggcgtggcgatctggccaaggttgcttctccgcgaagcctgcccgagctgggcctcgggcgagtcgaagggcgagagactccaagttgtggagattcctcgcaaacgggaaatagtgaaaggaagaaacaccgtggtattcaagtggatctttggatcacttga

SEQ ID NO: 38001 - DNA, 480 bp, Zea mays
  Peptide Sequence Number=SeqID_79780
atgacgcgtggccgggccaatggtctgaaggggcaccggactgtccggtgtgcaccggacagtgtccggtgcgccaacggctccaaatcgccaacggtcggctgcgccaaaacaggaaagaaatctgcaccggactgtccggtgcgccagtcgacagaaggcaagaattgccttcctggaatgctctcaacggctcctagctgccttggggctataaaagggacccctaggcgcatggaggaagataccaagcacactttgagcattcttgatcattcacacttcgttcttgcgcactcgttcgacattcttagtgatttgagctccgttctagacgagagactccaagttgtggagattcctcgcaaacgggatatagtgaaaggaaaagaaataccgtggtattcaagtggatctttggatcacttgagaggggttgattgcaaccctcgtccattgggacgccacaacgtggagtag

SEQ ID NO: 38002 - DNA, 1080 bp, Zea mays
  Peptide Sequence Number=SeqID_79781
atgaatgctgtggtaacttcacacatactcgtctgtttatatagtgctgcagtggaccgcaaagatcaaacagtaactctgcaaggtgggaccgacacgagctcgggaattgaatcgtttctcggcaacgagctcagggaaggcgcggttcaagccaaggcttcgtctacccaagggacgcgacctcgcccaagcccagcctcgggctggagcagtagtcccagacgagttcacgcctcgcccgagggcctcctcaggcagcgggcaccccctcggctctcccgaagcccggctcgggcaagcttcgtcgtgaagcaaccttggccagaccgcctcaccaaccgaccacttcgcaggcgcattcaatgcaggggacgcctgacaccgtatcctgacacacgcgcctcagtcggccaggccgaagtgaagactgacaacaagtcacgatcaaccactgagttcggccttgggcgcaacaggaagctccacctcgcccgacctcaggctccggcctcgggaggaggtctccgcctcgcccgacccccgaactcggtctcgaccttggtctcgggaggaatcgcgtcctcgctcgaccctggcctcagccttaagagaagtctccgcctcgcccgaccttgggctcggaccgaccgcgccaacaggggatacatcattaccctatccctagccagctcaggctacaaggaacaagaccgacgtcccatctggcttaccgcggcgacgggtaatgatggtgccccgcgtgcaaccatgacgccggtggctctcagccccttacggcagcaaggagacgtcagcaggatccttgccgcactgccagctgtgctcctacagggctcaggcgcttctccgacggccacgctatcacgtgtacagggctcaagctctccctcaacagcaacgttgccatccgagcaccccacggcagcgcgcgcggaacgcggcggcgccattgccgtgaacatcgaccctgccttcgactaccccgctgcaaacgcgacttcattagaattaaaggtgaggaaaaggcgaacacgacggaggattccttaccagtag

SEQ ID NO: 38003 - DNA, 447 bp, Zea mays
  Peptide Sequence Number=SeqID_79782
atgcctaagccctgtgtacatggcaacgttgctgttgagggagagcttgagccctgtacacgtgatagcgtggccgtcggagaagcgcctgagccctgtaggagcacagctggcagtgcggcaaggatcctgctgacgtctccttgctgccgtaaggggctgagagccaccggcgtcatggttgcacgcggggcaccatcattacccgtcgccgcgggtaatgatgtatcccctgttggcgcggtcggtccgagcccaaggtcgggcgaggcggagacttctcttaaggctgaggccagggtcgagcgaggacgcgattcctcccgagaccaaggtcgagaccgagttcgggggtcgggcgaggcggagacctcctcccgaggccggagcctgaggtcgggcgaggtggagcttcctgttgcgcccaaggccgaactcagtggttga

SEQ ID NO: 38004 - DNA, 951 bp, Zea mays
  Peptide Sequence Number=SeqID_79783
atgtcgcgtcttctcgattgcggaaccagtaccgcgactcgaggcagccctacgcatgacccaacagtgccaattgagtgcaatgatcacgggctggcccctcggaagggttcgacagccgccctagagcactcgggctccaagcccattactgatcaggggttcgaaggctggcccctcggaagggttcgacagccgccccagagcactcgggctccgcgcccactactgatcaggggttcgaaggctggcccctcggaagggttcgacagccgccccagagcacgcagagtgagggatgactctaggtacgtctattacatggccgaggctcgggctacgctcccgagtcacttcgccctttcactgaccgacctgacaggaaaacaacgttgctcgccccgctccgactgtcgtgccacccactacggtgagactgacaacagccgagttcagcctcgggtgcaacaggaagctccgcctcgccctaccttaggcctcggcctcggggaggaggtctccgcctcgcccgaccctagggctcggcctcagcctcagcctcaagaggaatcgcgtcctcgcctgaccccggcctcggcctcaggagaagtctccgcctcgcccgaccttgggctcggaccgaccgcgccacaggggatacatcattaccctaccctagctagcttaggatacgagggaacaagaccggcgtcccatctggctcgccccgataacaggcacttctccgacggccacgttatcgcgtacacagggctcaagcacttatccgatagccacgttggcatgtacacagggctcaggcactcctctgccagacacccgaacgttggcttcaatccaggcaagaattttacttgctcctcgggtaggttgaaacccactcgtgtttcttttagcgaaaacagtgggggaaaatcctatcgagtatga

SEQ ID NO: 38005 - DNA, 264 bp, Zea mays
  Peptide Sequence Number=SeqID_79784
atggtgaatcataactcttaccatgaagatccatattctaaagagtttggcattaatatcaccttttatattttacttatgatgaagctcaagtataataaaactggcagagagaatgactgcttgcctagagttgggcattggaatatgatggacaagggaccgacgaggagggacgcggcagcgctggacccagagctgctgcagctggtggagcttgccccgggcgcgctttgtgagaactccatcgctgatgtgttgtaa

SEQ ID NO: 38006 - DNA, 462 bp, Zea mays
  Peptide Sequence Number=SeqID_79785
atgggggaagggtggctctcccttttaaagtggcttcctcctcccaagttaagcgagccgaacgttggcttcaatccaggcaagaattttacttgctcctcggtcttttatattttacttatgatgaagctcaagtataataaaactggcagagagaatgactgcttgcctagagttggacattggaatatgatggacaagggaccgacgaggagggacgcggcagcgctggacccggagctgctgcagctggtggagcttgccccgggcgtgcttcgtgagaactccatcgctgatgtgttgtattcgcagtggctcgtgctacccgagacgaccaagctgttgggatccactgcaattgggttgaagacgaaggatggtgttgttctcgccattgagaaacgtgtgacatcaccactgctggtactgagtcacttcttatctggtcatagtgttaaatga

SEQ ID NO: 38007 - DNA, 603 bp, Zea mays
  Peptide Sequence Number=SeqID_79786
atgggggaagggtggctctcccttttaaagtggcttcctcctcccaagttaagcgagccgaacgttggcttcaatccaggcaagaattttacttgctcctcggtcttttatattttacttatgatgaagctcaagtataataaaactggcagagagaatgactgcttgcctagagttggacattggaatatgatggacaagggaccgacgaggagggacgcggcagcgctggacccggagctgctgcagctggtggagcttgccccgggcgtgcttcgtgagaactccatcgctgatgtgttgtattcgcagtggctcgtgctacccgagacgaccaagctgttgggatccactgcaattgggttgaagacgaaggatggtgttgttctcgccattgagaaacgtgtgacatcaccactgctggaaatgtgtggttttgatgaagaagcgaagtcatataaggatcctagcgcgatagaattggttcttatgccatggagatactctacaggctatgtacttttcgtattaatcatgcaaacaaatttgtgtctgtgtttaatttcacacctactccagaatggtgcaaagatataccactaa

SEQ ID NO: 38008 - DNA, 234 bp, Zea mays
  Peptide Sequence Number=SeqID_79787
atgtcgactggcagttcttatgccatggagacactctacaggctatgtacttttcgtattaatcatgcaaacaaatttgtgtctgtgtttaatttcacacctactctagaatggtgcaaagatataccactaaaaagtcttaatactggtcattttgctctgcacattatggagtggtgggacagtggtttaagagcgcaacttagtatggtgagaataatagcatatatgtaa

SEQ ID NO: 38009 - DNA, 220 bp, Zea mays
  Peptide Sequence Number=SeqID_79788
atggcggggatcgccgcctgtgggctctgggtgagggactgggactgggaagtggtgcttcgggttcgtggtttcgtgagggagctgctcgactcacttgatttcttgctggaccaatggagagggagagagaggaggggggactcaccggagagggggacgatgacggtgcttcgcgatttgcacacgggtgaggggaggaggggagtggccgaggccg

SEQ ID NO: 38010 - DNA, 348 bp, Zea mays
  Peptide Sequence Number=SeqID_79789
atggcgcgggcgaaccggccgagcgggcggagaaagccggccgccgagggggtcgggagggggctgcccgtggggaggtggcggagctccgcggcggggatcgccgccggtgggctctgggtgagggactgggactgggaagtggtgcttcgggtttgtggtttcgtgagggagctcctcgactcacttgatttcttgctggaccaacggagagggagagagaggaggggggactcaccggagagggggacgatgacggtgcttcgcgatttgcgcacgggtgaggggaggaggggagtggtcgaggccggtgcggggaagaaggtgcctgggcgaccctttttatag

SEQ ID NO: 38011 - DNA, 570 bp, Zea mays
  Peptide Sequence Number=SeqID_79790
atgtcgccggcgcgcgcctccttgagtgcgtcctggaaccaccgcctcgtgcagtccgacaccacctccgcgagcggaaccctctcgtccgcctctagcccgcacgccgccgccaaatcccgcacctcggcccgcccggagctggccgcggcagcggcggcagcggatttcctgggcgtatccagcggggcagacggcgtcttatctgccctcccggcggatgcggcggtatcggatgggacgcgaaggctgcgggcgtacgagcgaaccgcggcggcggcggcggcggtggcggcggcagggatcggtccattcgagggactcgatcacgcctcgcccgagcctagcctcggacaagggcagccgaccccggaggatctccgcctcgcccgaggcccccctccagcggctaacagccgaagtgaccgccatcacttcgtcgctccactgaccggcctgacagaaagacagcgctgcctgcgccgctccgactgcgggctcggactcgggctaagtcccggaagacggcgaactccgctccgcccgacccagggctcggactcgggctaa

SEQ ID NO: 38012 - DNA, 724 bp, Zea mays
  Peptide Sequence Number=SeqID_79791
atggcggcggccccgtccccctccgtccccgcctgcagcgacctcttggctgccgtatctgcattcgtcgacgcgttcgtggactttgccgtgtccgacatcttcttcccgaccttcccgtcctcctccttgctccctcctcgcccgaagactccgaccaccttcctcccttccccatcctggctcgtcgccatcggagacctccacggggacctgcccaagtccctctccgcgctccgactcgccggcctcacacacggaggcgcgttcctccccatcctcggcaaccacgaggtcatgaacatctccggcgacttccgcttcgtcatgctgcagggtttccacgacagggcggacggagtgatatggatcgacgaagcgaacagcttccaggaacgccgcatgcatggccccggggctggccgctgctttggcaatggcgactgtccgatcttgcgcgcattgtttgtttcagcaacgcccatgtctgatgcagcggaggaggttgaggagatgctgtccggcgacatccccccgagccagaccatctacctcaacaacctcaacgagaaggtcaagaaagaagagttgaagagatcactttatgccttgtgttcacagtatggaaggatactggatgtggtggccctgaaaacacaaaaactgagagggcaagcatgggtggcgtttagcgaaattacagctgctaccaatgctttccgtg

SEQ ID NO: 38013 - DNA, 729 bp, Zea mays
  Peptide Sequence Number=SeqID_79792
atggcgacgagccaggatggggaagggaggaaggtggtcggagtcttcgggcgaggagggagcaaggaggaggacgggaaggtcgggaagaagatgtcggacacggcaaagtccacgaacgcgtcgacgaatgcagatacggcagccaagaggtcgctgcaggcggggacggagggggacggggccgccgccatctttctctatttgtgctccggcagggattccccctcgcgcgacatggtggatgcacgggccagtatcggtgccgaggatcccacgaccgtggacgtagtcgtgacgcaactgatgccggaggaggcgctccagctctgcaccggctgcgtccacctctacactttcttgcatcgcctatcgctctgcaggaagcttttaagcggaacggtgttcttgtacaagcaatatccgttgagtatggctcgcaggggctttgtgttgatctcaaagattgtaaaaacagtgaacatcatcgatgccaaaatcagagatcggatgttaaggagagccggggcggcggggattgcggcctcggcgcagggagaggagagccggggtggggagattgctgcgatgtcgggcggaggcgtgatcctcgtgctccccgcagggcgcttcatgggtccgcagggctcatgggccaatctcattcgaggtgcttctctatctttaggagttgtccagcagaaaagtactgccatggctgcaatgtga

SEQ ID NO: 38014 - DNA, 408 bp, Zea mays
  Peptide Sequence Number=SeqID_79793
atggcgctgtcagctgccgcgtgtctggctccccggcctgggttgatctggtgccgcctccggcgttgccacccaccgctggggcggagcgttgctgcccgtccaccgcacgggcgatggtcgcgtcgtgcgtgggtcggccacatccacggcttctcccgcgccaccggccacaccgggaggtcgtacaagacgtcgtacgccgtgggggcggcggtggcgttcttggatggtcttgtcctcactcccgcagtgaggacgggagcgaggacctcttcgtgggtgctagggcaaccactgcccattggagcagaggtggtcgctgccactgacggggctgtcgtggtcgcctccgctggtgaggctgcccgctacagaggtggttgcctccgctggcaagaccgttag

SEQ ID NO: 38015 - DNA, 408 bp, Zea mays
  Peptide Sequence Number=SeqID_79794
atggcgctgtcagctgccgcgtgtctggctccccggcctgggtggatctggtgccgcctccggcgttgccacccaccgctggggcggagcgttgctgcccgtccaccgcacgggcgatggtcgcgtcgtgcgtgggtcggccacatccacggcttctcccgcgccaccggccacaccgggaggtcgtacaagacgtcgtacgccgtgggggcggcggtggcgttcttggatggtcttgtcctcactcccgcagtgaggacgggagcgaggacctcttcgtgggtgctagggcaaccactgcccattggagcagaggtggtcgctgccactgacggggctgtcgtggtcgcctccgctggtgaggctgcccgctacagaggtggttgcctccgctggcaagaccgttag

SEQ ID NO: 38016 - DNA, 819 bp, Zea mays
  Peptide Sequence Number=SeqID_79795
actgttacaggaggcttcggctttgggatgaaggttctctttctagtgaaaatggtccgtaccattcaaaccactcgaatgaacaccaactacatccctccaccacggaaagttcctgtctacccagtggtagtcgaggaaattcctgtggatctctctcacatttgggtggagaacggagttattctggaggacatctcggaggagtttctgcctacacccaccccgttggcagaatcactagccttcacagctggatcgtcagcttcagcaccgctagcaccagcagtccaagcccctgctcccggaggcgacgacccagacgactctagtgacgatgataagacaacaaggaagaagaagaagatgaggaaaacctcaatgaggaagccaacgaagaacagcaggaccactacgtgggattatggcctatcactgaacattacacctcaatgtgatagagggttcaggactctgtcaacacatgagtctctgacgccgctatccacctacgctgcttcgttcagcgatgctgctaggcgaactttgtggtctctcagccacacctaccggcagcagctgcacaatacgaagtataggcatcttcctctacgtcttaactccaatctggatagtgctaccctagacctctctagggtacacttggatctagaggatgcacatgcaaggatcgcaaccctagaagctcagcttgatggaaggaatcccctggaagttcaagtccccgctatggcgttatcccctccccgcaagaggatccgctatggagagccaggatccatcaccaggctgctttag

SEQ ID NO: 38017 - DNA, 774 bp, Zea mays
  Peptide Sequence Number=SeqID_79796
atgaagatggtccgtaccattcaaaccactcgaatgaacaccaactacatccctccaccacggaaagttcctgtctacccagtggtagtcgaggaaattcctgtggatctctctcacatttgggtggagaacggagttattctggaggacatctcggaggagtttctgcctacacccaccccgttggcagaatcactagccttcacagctggatcgtcagcttcagcaccgctagcaccagcagtccaagcccctgctcccggaggcgacgacccagacgactctagtgacgatgataagacaacaaggaagaagaagaagatgaggaaaacctcaatgaggaagccaacgaagaacagcaggaccactacgtgggattatggcctatcactgaacattacacctcaatgtgatagagggttcaggactctgtcaacacatgagtctctgacgccgctatccacctacgctgcttcgttcagcgatgctgctaggcgaactttgtggtctctcagccacacctaccggcagcagctgcacaatacgaagtataggcatcttcctctacgtcttaactccaatctggatagtgctaccctagacctctctagggtacacttggatctagaggatgcacatgcaaggatcgcaaccctagaagctcagcttgatggaaggaatcccctggaagttcaagtccccgctatggcgttatcccctccccgcaagaggatccgctatggagagccaggatccatcaccaggctgctttag

SEQ ID NO: 38018 - DNA, 335 bp, Zea mays
  Peptide Sequence Number=SeqID_79797
gcctcgtctgtctagctgatgtgatgaacatgcatcaaccttgctttctacagtatctcctcctcatcctcgtgcctctgctgctgtccgcctcttcttatgatagatcaggtgagttcaccttcgatggtttctctggcaacgatctaataaccatggatgttgcagcttctgtcaccaatggcctcttgagcctcactagtgggcagaaggaattgagaggtcacctggcggagagggaggttggctgtgtctccctggccgactgcggtgcagaagccagaggcgcgagggcggcgagcggggaggcgcactgtaacacccctggtgttact

SEQ ID NO: 38019 - DNA, 798 bp, Zea mays
  Peptide Sequence Number=SeqID_79798
atgaagttctggattgggctctcggcgacagttaaatggaccggcctccctcccgcccacccgggactcgtcctggtggagcccaaggcgcgcgtcctggtggccggcggcggcatcggcggtctggccttcgcgctcgccgccaggcggaaggggttcgaggtgctggtgctggagcgggatttgagcaccgtccgcggggaagggaggtaccgcagcccgatccagctgcagagcaacgcgctcgccgcgcttgaggctcgggtgcgcctccccgctcgctgccctcgtgcctctggcttctgcaccgccgtcggccagggagacacaaccgacctccctctccgccaggtggcctacgacgcccatgcgtccctggggaacccgtggccactccaggccgaccacgcgcggatgtcaggcttctggttgatctcgaaaagaatatcattgcaggaggtgccatctgattctcaaactgcttttgagtttgtttttattgatggtgcaaaacgccttgagggaaagaggcctgatatatttgtagtcaactattttggttctggcttccagacattttcagctactgtatctgctcttggcatctacaacaaagatgggatagtagtttatgatggaaaggggctgtttagtgctgctcgtgtttggtgggttaagaacgtgggtacccacgttcttaatgttaagaatgtgggtaccgtcgaagttattgtgcagtcctcacagacccacgcaggacacataagttcgacggccacgtggccccatcgaacttaa

SEQ ID NO: 38020 - DNA, 2202 bp, Zea mays
  Peptide Sequence Number=SeqID_79799
atgaatggcggaagcaagaggagaggagtgaacagtgaagaagcgaagccgagcgggtggaccgccgcagccccgcagcagcagcaccagcagcggcacggccccgaggtcgggtcgtctccccacacccgaaatcccctcgcgcaccacacaaaatcctccagccacctccccaccccaccgccggcgctctgctcgccggaccttcgcacgcggccggagacacagaaagaaagagagatccgggccccgccggctccgatatccgcccctcccctgcccgccgccgctggattccgcgccctcctcctcgatcctaccgcagggccctcactctgctctgtcccttttcgagtagtaggtatcatggtcatgaagatggagcacgaggacaatggtgccatcggaggaactgatggcacgtggacagaggacgaccgagctctcggcgctgctgtgcttggagcagatgcctttgcatatctaacaaaaggaggtggtgccatatccgagggccttgttgccacatctttgccgggtgacttgcagaacaaactccaggagcttgttgaatccgagagccccggtaccagttggaactatgctatcttctggcagctctcacgcacaaagtctggtgatctcgtccttggatggggggatggctgctgccgtgaaccccgcgatggagagctgggagctgctgcttctgcaggcagcgaagatagcaagcagaggatgcgcaaacgtgcgctgcagcggttgcacatcgcattcggagttgctgacgaggaggattattcccctggtattgatcaggtcacagatactgagatgttcttcctggcatctatgtactttgcgtttccccgtcacgctggtggccctggccaagcatttgcagcaggcatccccatctgggttcccaatagtgagcgcaaggttgtaccagccaactactgttaccgtgggttccttgcaaatgcggcaggatttaggactattgttttggtgccatttgagagtggcgtccttgaactgggctcaacgcagcacatagctgagagttctggtactgtccagacagtaaggtctgtatttgcaggaacaagtggtaataagtctgcagtgcagagacacgaggctgaaaggtcacccggtttggcgaagatctttgggaaggatttgaaccttggccggccttcagtcgggctggcggtcggtgtatctaattctaaggtggatgagaggacatgggagcagaggagtgctgttggtgggacctcattgctaccgagtgtccagaaaggtttgcagaatttcagttggagtcaggctcgtgggctgaattcccatcagcagaagtttggcaacggtgtgttgattgtgagcaataatgagggtgcacaccgcaacaacggagcagtggacagccctagcgcagcgcagtttcagcttcaaaaggcgcctcagcttcagaaactgtcggttgttcagaaaacgcctcagctagtgaaccagcagccaatgcaggcacaggtacctaggcaaattgacttcagcgccgggagcagttccaagcctggtgtgttggttacaagggcaggtgtcctggatggtgagagtgcagaggtggatggcttgtgcaaagaggaagggccaccacctgttatggaggaccgacggccaaggaagaggggaagaaaaccagcaaatgggagggaagaaccacttaaccacgtcgaggcggagcgccagaggagggagaagctcaaccagcggttctatgcgcttagagctgttgtgccaaacatatcgaaaatggacaaggcgtccctgctgggcgatgcgataacgtacatcactgacctccagaagaagctcaaagagatggagacggagagggaaaggctgttggagtcgggtatggtggacccaagggagcgggcgcctaggccagaggtggacatccaggtggtgcaggacgaggttcttgttcgtgtgatgtctccaatggagaaccatccagtcaagaaggtcttccaagcgttcgaagaggcagaggtccgtgtaggcgagtcaaaggtgacgagcaataacaacgggacggcggtgcattctttcatcatcaagtgtcctggcactgagcagcaaacgagggagaaggtgatagcggcaatgtctcgcgcgatgagcagttga

SEQ ID NO: 38021 - DNA, 732 bp, Zea mays
  Peptide Sequence Number=SeqID_79800
gcaattgtcgagggcttggggaatatcgcgctgctagcttcgtcttcacctgattcttgggattacttgacgacgcacggaacggcgacgagattgtgtctggagcgagctggcgaagtggagatcgagctagggatgacggggaagaacgacgagctggaaaagctgcacgcgatctcggcgcgcaggtacgagctcggcgaggaagtagagcgtgcacaagggagcaggccggacgcggcagtaggcgcggctatggcagcaaggcgagatcacccgggcgagaactggagcagaggcgcgcgtgggagcaacctcgactgggcgccatgggcgagcagcggagatccgaccggcgccaccataggagcagggacaggggcgcggctggagcttggagacggactggggcagggagaggcgaccagcgcgcaagggagctcgaggaaaatccacggcgcgtgcgcagggacaagcaggagatcgacggtgttggggtttgggaaggtcgagcagagagagaggaagttgtcggcctgccgcgagggagcagagagcagggaagtccggcgcggtggaggagagaggagcgctacactgggagcaggagcctcggcgagcagggagaagaaggctgggcgagctgcagataggagcggccatggcaggaagggggaagagcgcgcgcgcacggagctaagctcgacaggacgcggctgggaaggggaatag

SEQ ID NO: 38022 - DNA, 531 bp, Zea mays
  Peptide Sequence Number=SeqID_79801
atgagccgagcaaggagcgctcgtgaactttatggcggggtcggcagcagccgatgccagagcgcacggcgagacccgggcgagaactggagcagaggcgcgcgtgggagcaacctcgactgggcgccatgggcgagcagcggagatccgaccggcgccaccataagagcagggacaggggcgcggctggagcttggagacggactggggcagggagaggcgaccagcgcgcaagggagctcaaggaaaatccgcggcgcgtgcgcagggacaagcaggagatcgacggtgttggggtttgggaaggtcgagcagagagagaggaagttgccggcctgccgcgagggagcagagagcagggaagtccggcgcggtggaggagagaggagcgctacactgggagcaggagcctcggcgagcagggagaagaaggctggtcgagctgcagataggagcggccatggcaggaagggggaagagcgcgcgcgcacggagctaagctcgacaggacgcggctgggaaggggaatag

SEQ ID NO: 38023 - DNA, 300 bp, Zea mays
  Peptide Sequence Number=SeqID_79802
atggagagctcgccggtgctcgccgtctcccccatccccctccctcccccgagcgcctataaaaggacccgctcgagccccgtcttcgccacacaactccagccatccccacttccctcctccccgagccattcaagcaagcgccgccgtgctccctgccttgctccgctatggccaaagctccgccacacgctcacgatcacagggcaccactttgccttccccatcgtggccggaaaccccaccggcggcttcgccgctgcgggcacccgccactgcgccgtggaccggccgccatag

SEQ ID NO: 38024 - DNA, 300 bp, Zea mays
  Peptide Sequence Number=SeqID_79803
atggcgagctcgccggtgctcgccgtctcccccatccccctccctcccccgagcgcctataaaaggacccgctcgagccccgtcttcgccacacaactccagccatccccacttccctcctccccgagccgttcaagcaagcgccgccgtgctccctgccttgctccgctatggccaaagctccgccacacgctcacgatcacagggcaccactttgccttccccatcgtggccggaaaccccaccggcggcttcgccgctgcgggcacccgccactgcgccgtggactggccgccatag

SEQ ID NO: 38025 - DNA, 432 bp, Zea mays
  Peptide Sequence Number=SeqID_79804
atgggtaagcctgtcccatcactcctcatgctcctcctcagccgaggcggggtcccactcgacagtccaacccggtggcaagatggatggccaagtcactccagcaaccatgtcctccaaggaacctgtaaaatttatgccacaagcaaggctgagtatactaatactcagctagacttacccggttacaatggatcaagcagtctcattagctgcgagaagcagacgattcgaatcgagtttttatccttgcaagtgaccgcacttgtacccaccataaccggaatgggagaccacgtctcaggtcgtgtgaggagggcaatctgcgggcagtacgttcaaacgcttgacacaggtatccgcacgttaatccttattccattttcccatctcgtagacaaccaatccccatggattgttgtctaccactag

SEQ ID NO: 38026 - DNA, 390 bp, Zea mays
  Peptide Sequence Number=SeqID_79805
atggccactgacaggatcaagtaccacaatctcactcgatgtttttgcaaaagtaaccatcattgttcgaagtgcagcggaaataaactaatggggcactccgtccccacacacatcaaccgtccccatcgattccctggcaacagaaaggggctcaccgccttggcgtacaatgcctcactgaccccgactggccgtcgtgcagtgaccgcacttgtacccaccataaccggaatgggagacctcgtctcaggtcgcgtgaggagggcaatctgcgggcagtacgttcaaacgcttgacacaggtatccgcacgttaatccttattccattttttccatctcgtagacaaccaatccccatggattgttgtccacaactagaatcatga

SEQ ID NO: 38027 - DNA, 3522 bp, Zea mays
  Peptide Sequence Number=SeqID_79806
atgaatttattctgtgggcacccttatttcctggaatgtttcatcttgaagctgtcttttgttgagcagataaggctccacataattgcgatgcatgaattatgtgaatacaacaaaggagaaggtttttccgagggttttgatgcacacctcaacattgagcagatgaataaaacatcagttgagctatttcaaatgtatgatgaccataggagagaaggtgttctcttctcaacagaaaaggagtttcggggttattatgcactgctcaagttagacaaacatcctggttacaaggttgaacctgctgagttatctctggatcttgctaagatgtctcgtgaaattagaggcagtccagagatcttgtttgcaagagaagttgcaagagcatgcagaatggggaactttatttccttcttccgtcttgcaaggaaagctacatatttgcaggcctgtttgatgcatgctcattttgcaaaggctgctgttcaatttcaagtgcacctttttttttgtaaattaacaagcgaagtctcttcccagctaaggaggcaagcactcgcttccttgcacagtggtcttcagaatggccaaggcatccctatttcgcaggttgtggtgtggcttgctatggaggacgaggatgttgaaaatctattagaataccatggttttgggttgaggcagtatgaagaactgtacttagtcaaagaaggaccttttcttaacagtgaaagtgatttcccatctggctgttcacagcttgtgcattctaaaaaatcgcagagggtcgttgatgatgtttcttctgggccagattgtgctccaactagcaaagaaaagactgtctttccatatactggtcaaccagttgctggcaaaagagatctatttctaccacagaatgctcctgcgattcctcctgatggcagaatggatttggatccatcatttcctgggcctatttcaatcactcctgacagacagattagcccattgttttcagatcctttctctccaagagctgccagcaaactattcagttcaacacatccaaagcctctctccccaactgatggtagaaaagacaggttttcatctgtccttactgctgtttctccacgtactggcaagagggacatactgtcaaaaacaccaaaagtagcttcaccaaaagctgaaggcaagaccaaattggttaatggccttatagctgaagaccaggatagtggtgttgctgagatccctcagaaggtagagatgcaaacagacatactgtggtcacaagctaacacgcaaaacgccaatgctctggcagaaccaattatttcacatcctcttgcagatagcatgtctttaaattactccagtatgtatggagcggaagatgacttcagggcacatgtttctggcatcggtgcagatatggatgagggaactccaccagatcatgaatgtctggttattggagctggattgcctattagctcccctttgtcctatcatgaggaatatgaggatcatagtattagtaacggcacaaatgatgattggttaccaattgttatgcccgcaaagaaactaatttctgatgaaaacctgaaagcaatactgaggaaatggaggcagcatgctgctgacaagcgattacttagggagcagaagaatgctcttgctgttgcagcattgtgttctctatcacttggcccaccagttcataaaagtacaacggtgtctaagctagcagtcgaagaactagatattggccacgcctttaaagaaagacaagcaagaaagcaaaggtcctggtcacggctaaatgtttcggagttgtctggtcccattctaaatgaaaataaccctgatgctagatgcctctgctggaagttgcttgtacttgttccaccgggtatggaatcccagaccaacagttttgtctcaaaatggttacttagaaagctcatgggttatggaatcggagatattggattggttgtttcttcagcaggcctatcaatttggacagagtggatcagttttccaaatgcatgttgtttgtctgttgttagggccagcgatcagcaagttattgataatgatattgctaacagtacaagttgtatagtatttgtagtgtctgaaagcatttcatgggaaatgcagaaggaacggtttaacagtcttttagcctacataccagatgaatccaatcttccccttctgattttcagtggcgatacatataacgaaggatatgagtatgcgtcaaagtacatcatcaacatgcttggcctcaatggtcttaacagaggaaagatcggtttgtctttggttatttttcttgttgaaaactacacagaagaccatgccaatggtttctttgatgatgacaaactgcgtgagggcctgaagtggctggtaagtagtttgccagtgcagcctgatgtcactcttgtgaagacccatgaattgcttctggaatacttgaatccacaacttgagctgcttaacacccatgttgcacctggagctggtcctggcgattgcatttcagtattcaacaatgctgtcaatcaacttgcagaagagattttggctgcagcaaacgcaaaccgtagccaatggccagctcccgagattgatcttctggagagaacaagcaatgagaggatatatgcagaaatgttcttgcctagcattggatggtcttcgccatcaaggatccagccactgcttgcagccattaatagctgcaagattccagagttcagttacgatctatcttggctaaaccatggttctcacatgggcaagcagatccaggatcagaagaagttacttgaggagtgcttggcgagatacttgaccgaatcagcccggctgttagatgaaagccaggtggtcaccgaagtgaatgttatggtgcagaattgtgttggccttgaactccgggattcgtcttactatctcgctcccagatgggtggcgatcttccgtcgtatttacaactggaggctagcaaagctctctaccggaaagttctccgaagcttatgttctgactcagcacctgtatcaggctcctgcagcagctggctcaaatggtaccacacaagggcttactgctaacaccgccagcagcgatgctgtggatcacatcatgatgcctgctgtttcaaccggcatcacactagacgaaatcattgagatcagttgtgacctcgatgctgttgatgcgcagcccgtaactctggcaccacgactgcctgtgcatgttcatgaagaacctcaggcacttgctgacaacaacggcgtgcatggagttgatgaaatgtacataccaagaagagtagagttgggagaggtgatgcccatcgagacagacgacaagctttcccagctaagagtagagttgggcgaggtgatgcccatcgagacggacgacaagctttcccggctactggagcagtgcaccaagctgcaggacaggatcgatgagacactttccatatacttttga

SEQ ID NO: 38028 - DNA, 1218 bp, Zea mays
  Peptide Sequence Number=SeqID_79807
atgatgaaaatgttgaagcctcaaaaaggatgcgatcacctgcatcagagtttcacacgcatggtcaagtcaccaccatcagataccagaggcaatatcaggtcatcatctgtagattttggcagcaacaactcagtccagaatcttcatgcatatgctgatgtccagaagtctgatgcatccttttccaagttcagaaatcaaatacaatcacgcattggtggtgcatgttcaccatcacaacagatgtctcatctttcagactccaatgaactaaacacgttagctatttctccaccaaagccttctacccttagcgctaccagaagaacagggatctcttctttggatgctactgctgatgatcatttgaccccttcaactgaacttgagagggaggaacaagcaaaagccaagcgtctggctcgtttccatgttgaattaagcaggccagtagaaaatactaatgattttgtgaaaacagttaaaagctctgcagataagtccaaacaagccacatcagtgggaagaactcctttgagaacaaatgatgacaccgatgacaatactttggttgacatggattccacagctttggctgcaattgttgggctttgccatgatatgtgcccagaacctgagagggcagagcgtgagagaaaaggagatcttgataggtatgaaagattggacggagacagaaacctaactactgagcttctcgctgttaaaaagtataataggactgctgagagagatgcagacttgataaggcctctgccaattttacagaagacaatggagtatcttcttagtttgctggatcacacatatgatgacagtttcttgggcttatacaacttcttgtgggataggatgcgagcaataagaatggatcttagaatgcaacatttcttcaatcaagaggctatttctatgcttgagcaaatgataaggctccacataattgcgatgcatgaattatgtgaatacaacaaaggagaaggtttttccgagggttttgatgcacacctcaacattgagcagatgaataaaacatcagttgagctatttcaaatgtatgatgaccataggagagaaggtgttctcttctcaacagaaaaggagtttcggggttattatgcactgctcaagttagacaaacatcctggttacaaggtgaggcaacttgagcagatctggtcttttgcgttctga

SEQ ID NO: 38029 - DNA, 384 bp, Zea mays
  Peptide Sequence Number=SeqID_79808
atggggcgctggctgggagagggcggaggtgggcgagctgctgctggtggccatggagcaaggagaacagcgagctcggcccggcagcaagaggagagagctcgcagggaggggctagagcttggacgtcgaccatggaagttgcaggggggcgcctgctgcaggggaacagcacgagagaaaagaagctcgtccatggctgctggccgagcagaactccgaccaaggggacagcaggagggtgccgcgccatggctgctgcgctgtggaggccgtcggccatgggaggcagagagcacgcagggaggtggagctgagctccctgctgcacgctatgtggaagaagacagggagaaaaagaagaaggtggcggctagggggtag

SEQ ID NO: 38030 - DNA, 249 bp, Zea mays
  Peptide Sequence Number=SeqID_79809
atggggcgctggctgggagagggcggaggggaacagcaggggagaaaagaagctcgtccatggctgttggccgagcagaactccgaccaaggggacagtaggagggtgccgcgccatggctgctgcgctgtggaggtcgtcggccatgggaggcagagagcacacagggaggtggagctgagctccctgctgcacgccgtgtggaagaagacagggagaaaaagaagaaggtggcggctaggggggtag

SEQ ID NO: 38031 - DNA, 408 bp, Zea mays
  Peptide Sequence Number=SeqID_79810
atggaggagcctctgcgcatgcataggaaaatagaggggaggagagggacgagctggataagcagcccatgggggagaagggcgcagggaggtaagctcggccatgggaatggctgcttgctgccgtgctgcgggaggaagaagcagggggcgccatggagaagtttctgcgcatcctgcagcaaggacgccattggagaaggggacgctggccttggtgctccctgcacgcaggggaacagcaggggagaaaagaagctcgtccatggctgctgcgctgtggaggccgtcggccatgggaggcagagagcacgcagggaggtggagctgagctccctgctgcacgccgtgtggaagaagacagggaaaaaaaagaagaaggtggcggctaggggggtaggtgaataa

SEQ ID NO: 38032 - DNA, 450 bp, Zea mays
  Peptide Sequence Number=SeqID_79811
atggaggagcctctgcgcatgcataggaaaatagaggggaggagagggacgagctggataagcagcccatgggggagaagggcgcagggaggtaagctcggccatgggaatggctgcttgctgccgtgctgcgagaggaagaagcagggggcgccatggagaagtttctgcgcatcctgcagcaaggacgccattggagaagggggcgctggccttggtgctccctgcacgcaggggaacagcaggggagaaaagaagctcgtccatggctgctgcgctgtggaggccgtcggccatgggaggcagagagcacgcagggaggtggagctgagctccctgctgcacgccgtgtggaagaagacagggaaaaaaaagaagaaggtggcggctagggggtcggagaaggcgaatcgtggtattttaaaaattgctgtcgatacggggttttga

SEQ ID NO: 38033 - DNA, 495 bp, Zea mays
  Peptide Sequence Number=SeqID_79812
atggaggagcctctgcgcatgcataggaaaatagaggggaggagagggacgagctggataagcagcccatgggggagaagggcgcagggaggtaagctcggccatgggaatggctgcttgctgccgtgctgcgagaggaagaagcagggggcgccatggagaagtttctgcgcatcctgcagcaaggacgccattggagaagggggcgctggccttggtgctccctgcacgcaggggaacagcaggggagaaaagaagctcgtccatggctgctgcgctgtggaggccgtcggccatgggaggcagagagcacgcagggaggtggagctgagctccctgctgcacgccgtgtggaagaagacagggaaaaaaaagaagaaggtggcggctagggggtcggagaaggcgaatcgtggtattttaaaattgctgtcgatacggggttttgaattcggctcggacatgagatatttggctgagtcgaataagaattaa

SEQ ID NO: 38034 - DNA, 813 bp, Zea mays
  Peptide Sequence Number=SeqID_79813
atgtaccgagaggcgttgtggcagaagagaggtcgtcctcgggagttatatccggacgtatctagtaaggatgctcctgttcctcctgaactccccgtgcctaactgtgactgtggcagactggcttgggtacatcaatcacaacatccagacacggctgctcgctgctactacctttgtggcactttggacggacatcagaggtgtttctttttccagtggatcgatggtcctgataaatttgaccctcgatatcttcttttcgttaattggttgagtggaaagaccaatcatgagcgttttaagcgttgggtacctcctcccccgaatcctccaccaatgacggatgcggagaaggaggtagcaacagaaagacggatggactcaccgcctcgatgcgattgtggagaccgtgctgtcatcgacgaagactatgacaagcagttctgttgtccgaacattgattatccatacgggtggcgtaagtgtcgtttcagagagtggttgtatggtcctttgtcccattggccagagccagaggtaaaggaaaagatatacatggggtgggcggcagaagaggtcaaatttgatccagtactctgcaaatgtggtattgaagctaagtatggattagttccttcggagcttggtgttggatatttttgtggacatatggtcgattacgatgagcttggtgttggatatttttgtggacatatggtcgattacgatggattagttccttcggagcttgttctccctctccaccaaagcaaatgccaaaggaaccaatgcgttgtctgcgtcgcatga

SEQ ID NO: 38035 - DNA, 1419 bp, Zea mays
  Peptide Sequence Number=SeqID_79814
atgtaccgagaggcgttgtggcagaagagaggtcgtcctcgggagttatatccggacgtatctagtaaggatgctcctgttcctcctgaactccccgtgcctaactgtgactgtggcagactggcttgggtacatcaatcacaacatccagacacggctgctcgctgctactacctttgtggcactttggacggacatcagaggtgtttctttttccagtggatcgatggtcctgataaatttgaccctcgatatcttcttttcgttaattggttgagtggaaagaccagtcatgagcgttttaagcgttgggtacctcctcccccgaatcctccaccaatgacggatgcggagaaggaggtagcaacagaaagacggatggactcaccgcctcgatgcgattgtggagaccgtgctgtcatcgacgaagactatgacaagcagttctgttgtccgaacattgattatccatacgggcggcgtaagtgtcgtttcagagagtggttgtatggtcctttgtcccattggccagagccagaggtaaaggaaaagagatacatggggtgggcggtagaagaggtcaaatttgatccagtactctgcaaatgtggtattgaagctaagtatggattagttccttcggagcttggtgttggatatttttgtggacatatggtcgattacgatgaggagacgaggaaatgcagttgggagagttacgacgacaaaggagaggtgatgcgcacaatagagtccaagagaataatgggacagaagatgcgttgtggatctcggctcgtcgattcgtacattaacgatcgcatacgcgacatgcgtagggaagcaaaatctgccttttatgatagcccgaagcgtgcagagtataggaggttgaaggcggcagatgagaagagagcacaggatgcaagggaatgggaagcgactcaagccgagaaacagatgttggataatcttgctgatcgcctcaagggaaagattggaagcggcgtaaactatttggccgatgaggcgcatgcgagatatgttcaggataaaatggcaacgatggaggaggaggacgacgacacatctagattgagtgagcttatcgccctcgcagaggcaggattacatgaagaagaggaggacgacacgtcaaggttgaaggaagaggatgagtttatgtcacaggccgccgcagaggtagaggcagcttattacaagaagaagtctgatgaggctgaggctgaggatgagctattctcccaagctgcagatgaagcagaagccaattattacaaaagaactggtgacaagtgtgatgcaggacaatgcaacaagtggaatgaggttgttgttgaggattgcgcgacggatgactccgaagatgagttactcatagattgtgattcagactga

SEQ ID NO: 38036 - DNA, 672 bp, Zea mays
  Peptide Sequence Number=SeqID_79815
atgaacggtgaggtaatgaatgttgttctattcatgatgagacaactcaatgatttgaagatggacaagaaccaaaatttagcatatgctccttatattatggctctcatcaaagccaagacaagatttgaggggccctgcgagattgttcacacaccgttcagaccctttaagaatgagatagggtttctcaccaggccactcactcccttcccagatgatgaggaagaccctggctataatgcaggagcagctcctgatgttgaggccgagcagatgcctcctcctccacctcctcctcagcctcagcagtattggcagcctggtctaggctactttgatccctattttcacaatatacagcaggggcttgagacccatattgatactcgctttgagggcatgatgacacatgtggatcaccacctagatgacatgcagtctcgctttgacaatcctacacctgcacaggtcggagttcaccgccgccgtggtttctcgtcgtccgaccaaccagagtccctcgcgccgtgccaagctgcccctagcgtcgtctctggcgaccttgacttcgccatagtgctcgccgagtcctccccaacctctctgactacccagaccaccccagcgcccctagaaaccccggtctgcctcatctcctcctgctgctaa

SEQ ID NO: 38037 - DNA, 672 bp, Zea mays
  Peptide Sequence Number=SeqID_79816
atgaacggtgaggtaatgaatgttgttctattcatgatgagacaactcaatgatttgaagatggacaagaaccaaaatttagcatatgctccttatattatggctctcatcaaagccaagacaagatttgaggggtcctgcgagattgttcacacaccgttcagaccctttaagaatgagatagggtttctcaccaggccactcactcccttcccagatgatgaggaagaccctggctataatgcaggagcagctcctgatgttgaggccgagcagatgcctcctcctccacctcctcctcagcctcagcagtattggcagcctggtctaggctactttgatccctattttcacaatatacagcaggggcttgagacccatattgatactcgctttgagggcatgatgacacatgtggatcaccacctagatgacatgcagtctcgctttgacaatcctacacctgcacaggtcggagttcaccgccgccgtggtttctcgtcgtccgaccaaccagagtccctcgcgccgtgccaagctgcccctagcgtcgtctctggcgaccttgacttcgccatagtgctcgccgagtcctccccaacctctctgactacccagaccaccccagcgcccctagaaaccccggtctgcctcatctcctcctgctgctaa

SEQ ID NO: 38038 - DNA, 658 bp, Zea mays
  Peptide Sequence Number=SeqID_79817
gaaccggcgcccaaaggaggatgactcgtgggcccagggcccttgtgccagggactgggctgttggttttggcggaggcaaagaggcgcacaaccataggcggaggcgcgctcttcacgcattggttcgccttctccgcacacagaaaccggcacgcctggtgtatgacatgtgggcctgggcccccatgccagaggttggaccgctggttgcagcgaagacaaggcgagttggtgctgccggtcttgtctttcctctgctggaggtgtgcggccttgtgggagcggcgctcttccaccggtgcttggcttcaaggatgttcatcaacctcgcggtggtggagagcgagctgagccgcggcttcgcctcccacatgggttggtggcccgcctcttcctccagcattcggaggaaaagaatgatcaccagccttgtgaaggaggcgaacttcggctacgcggtcccggccagaccgcaagcactgccttccgccgagggcgggggcgagggcctcttcgccatggcgcgcacactgaggtggtcaccaccgctggggaggctgcccggtgcagaggtggtcgccgccactgaggtggtcgcctccgctggcgagccgcccagagctagcttccaacgcgaccctgctggtgcagagtag

SEQ ID NO: 38039 - DNA, 792 bp, Zea mays
  Peptide Sequence Number=SeqID_79818
atggcccaagggcacatttccctttcactaactgatggtatcctggagtataccaccttttctggtcacgtggcggccccggagctgcccatgcggaaagtaaggggtacccctgattcagggtacgacagtggcccccgagcccgcctcaggggagggtacgagcctgcaggcccttgtgccagggactgggctgttggttttggcggaggcaaagaggcgcacaaccataggcggaggcgcgctcttcacgcattggttcgccttctccgcacacagaaaccggcacgcctggtgtatgacatgtgggcctgggcccccatgccagaggttggaccgctggttgcagcgaagacaaggcgagttggtgctgccggtcttgtctttcctctgctggaggtgtgcggccttgtgggagcggcgctcttccaccggtgcttggcttcaaggatgttcatcaacctcgcggtggtggagagcgagctgagccgcggcttcgcctcccacatgggttggtggcccgcctcttcctccagcattcggaggaaaagaatgatcaccagccttgtgaaggaggcgaacttcggctacgcggtcccggccagaccgcaagcactgccttccgccgagggcgggggcgagggcctcttcgccatggcgcgcacactgaggtggtcaccaccgctggggaggctgcccggtgcagaggtggtcgccgccactgaggtggtcgcctccgctggcgagccgcccagagctagcttccaacgcgaccctgctggtgcagagtag

SEQ ID NO: 38040 - DNA, 144 bp, Zea mays
  Peptide Sequence Number=SeqID_79819
atggcggattgggagtgtcttccccgccacgggatgtacctgccccatcatgtgcacgggagaccgttcatctgcaagattcatggaaggaggggctccaaaaaggttttcgagggacgcactaagttctgctactcgagctag

SEQ ID NO: 38041 - DNA, 576 bp, Zea mays
  Peptide Sequence Number=SeqID_79820
atggcacgcactaaaactacccagcacaaatcaactggacctcatggtgtgcctcgacatgagctggcctctaggcatgaaggaagcagcagtggaagcaacgaccccatcggggatttggaggccagagtggatcgactcagatctgaactacgccatgggtgtagggagcgtgcgcgcgacagtcgccgcattgctgaactatcagccgaagttaatcgcctacagtataaaattacgaaatgcaatacgaccattgactgggccataaactcgcgctcttttgcttgggattgtgtagccaatgctctagctcgagtagcagaacttagcgcatccctcgaaaacctggaagcgtactgcaacaccttgcttgaagaggtgcacgtattgtatgatcggttgcacccgaatgtgccacccgaagtggcagcaatgggagctagaccatctggaacagcaaatggaagatctgatgggggaattgacctttttggagcccctccttccatgaatcttgcagatgaacggtctcctgaagcaggcagcggaacaactaaggacgaagaggattag

SEQ ID NO: 38042 - DNA, 246 bp, Zea mays
  Peptide Sequence Number=SeqID_79821
atggcaggtgccctctggggcctgaaattctttggctgcgggcagctgctggccgagggcaatgtaaccacggtttttgtcgcagagtcgttttggtgcttgctggtgtgcgtgccggacatcaccgtggccggcggcgacgggcatgtcgtggcttgccagcggggaggaactgcgcgctctggctgtagtttggcaaggggaggaggacgcacggtcgctgttgaaaacccgatgaacggctag

SEQ ID NO: 38043 - DNA, 1020 bp, Zea mays
  Peptide Sequence Number=SeqID_79822
atgtggggccgcacctatgcgcgccaaaagcgagaggccgcagggggcgctggcagcagcgcgcgcaaggaaggcatggcaaaggaaagcctaaccaagcctatggcaaaggggtataacctcgccggagaagacaactatccccatggaccgacacctggtatcagctccaggttatcctcaccaccaccacccgcccatccctcaccaccaccagccgccgcgccatcagccaccgcaacgtcctcccacccgctctctccaactccagatgcattcactcggctcgaagagagttttggccgtttcgtagagcagtgggatcagttcgttgtgatgttccaccgctacaaggagaagacagagaaggaactccaagcagcggtgcggcttcagacggtagcgcgagggttcctggcacgccgccaggtacagtcccttcgtggggagaagcaccttgttgtggcctccagggccaccccatggccgtcatcacatgagcaggccgtgaaaccaagagagattggatcaacgtcgtcgctgccgtcgaacgacgctcaagatgacgtccccgtcctcggtgacaggtgccatggagagctgatggcgtgcagaggaccatccgagcactcaaagcttcggggcggccgagaatcttcgtcaacattctgtgccagtgtggttccgtaccacatgagattcacggattgtcggagtgggattgtcgccatggcaggtgccctctggggcctgaaattctttggctgcgggcagctgctggccgagggcaatgtaaccacggtttttgtcgcaggtgagtgtctcttcctctgctctcgtttgttctgggtgggtctagagtcgttttggtgcttgctggtgtgcgtgccggacatcaccgtggccggcggcgacgggcatgtcgtggcttgccagcggggaggaactgcgcgctctggctgtagtttggcaaggggaggaggacgcacggtcgctgttgaaaacccgatgaacggctag

SEQ ID NO: 38044 - DNA, 303 bp, Zea mays
  Peptide Sequence Number=SeqID_79823
atggcgggcggaaattcgctcgccggagctaaggaacggtggctggccgatgagggtgagtgcggggcgaagagaggaagtaatggctcttggtgtggctttttaagagaaaccctaggtgacactggggtgtcacagccttccccccttaaaggaatctcgtcccgagattcaggccagagtcctcccggggtgaagcgaagggtgagactgataggaaaaagggtgatgattgttaatattagggcaaaactgctcttcgaatgtcattctctttgcaacttcagaaggaagtccttttaa

SEQ ID NO: 38045 - DNA, 303 bp, Zea mays
  Peptide Sequence Number=SeqID_79824
atggcgggcggaaatacgctcgccggagctaaggaacggtggctggccgatgagggtgagtgcggggcgaagagaggaagtaatggctcttggtgtggctttttaaaagaaaccctaggtgacactggggtgtcacagccttccccccttaagggaatctcgtcccgagattcaggccagagtcctcccggggtgaagcgaagggtgagactgataggaaaaagggtgatgattgctattattagggcaaaactgctcttcgaatgtcattctctttgcaacttcagaaggaagtccttttaa

SEQ ID NO: 38046 - DNA, 303 bp, Zea mays
  Peptide Sequence Number=SeqID_79825
atggcgagcggaaatacgctcgctggagctaaggaacggtggctagccgatgagggtgagtgcggggcgaagagaggaagtaatggctcttggtgtggctttttaagagaaaccctaggtgacactggggtgtcacagccttccccccttaaaggaatctcgtcccgagattcaggccagagtcctcccggggtgaagcgaagggtgagactgataggaaaaagggtgatgattgttattattagggcaaaactgctcttcgaatgtcattctctttgcaacttcagaaggaagtccttttaa

SEQ ID NO: 38047 - DNA, 303 bp, Zea mays
  Peptide Sequence Number=SeqID_79826
atggcgggcggaaatacgctcgccggagctaaggaacggtggctggccgatgagggtgagtgcggggcgaagagaggaagtaatggctcttggtgtggctttttaagagaaaccctaggtgacactggggtgtcacagccttccccccttaaaggaatctcatcccgagattcaggccagagtcctcccggggtgaagcgaagggtgagactgataggaaaaagggtgatgattgttattattagggcaaaactgctcttcgaatgtcattctctttgcaacttcagaaggaagtccttttaa

SEQ ID NO: 38048 - DNA, 303 bp, Zea mays
  Peptide Sequence Number=SeqID_79827
atggcgggcggaaatacgctcgccggagctaaggaacggtggctggccgatgagggtgagtgcggggcgaagagaggaagtaatggctcttggtgtggctttttaagagaaaccctaggtgacactagggtgtcacagccttccccccttaaaggaatctcgtcccgagattcgggccagagtcctcccggggtgaagcgaagggtgagactgataggaaaaagggtgatgattgttattattagggcaaaactgctcttcgaatgtcattctctttgcaacttcagaaggaagtccttttaa

SEQ ID NO: 38049 - DNA, 303 bp, Zea mays
  Peptide Sequence Number=SeqID_79828
atggcgggcgaaaacacgctcgccggagctaaggaacggtggctggccgatgagggtgagtgcggggcgaagagaggaagtaatggctcttggtgtggctttttaagagaaaccctaggtgacactggggtgtcacagccttccccccttaaaggaatctcgtcccgagattcaggccagagtcctcccggggtgaagcgaagggtgagactgataggaaaaagggtgatgattgttattattagggcaaaactgctcttcgaatgtcattctctttgcaacttcagaaggaagtccttttaa

SEQ ID NO: 38050 - DNA, 303 bp, Zea mays
  Peptide Sequence Number=SeqID_79829
atggcgggcggaaatacgctcgccggagctaaggaacggtggctggccgatgagggtgagtgcggggcgaagagaggaagtaatggctcttggtgtggctttttaagagaaaccctaggtgacactggggtgtcacagccttccccccttaaaggaatctcgtcccgagattcaggccagagtcttcccggggtgaagcgaagggtgagactgataggaaaaagggtgatgattgttattattagggcaaaactgctcttcgaatgtcattctctttgcaacttcagaaggaagtccttttaa

SEQ ID NO: 38051 - DNA, 303 bp, Zea mays
  Peptide Sequence Number=SeqID_79830
atggcgggcggaaatacgctcgccggagctaaggaacggtggctggccgatgagggtgagtgcggggcgaagagaggaagtaatggctcttggtgtggctttttaagagaaaccctaggtgacactggggtgtcacagccttccccccttaaaggaatctcgtcccgagattcaggccagagtcctcccggggtgaagcgaagggtgagactgataggaaaaagggtgatgattgttattattagggcaaaactgctcttcgaatgtcattctctttgcaacttcagaaggaagtccttttaa

SEQ ID NO: 38052 - DNA, 294 bp, Zea mays
  Peptide Sequence Number=SeqID_79831
atggcgggcggaaatacgctcgccggagctaaggaacggtggctggccgatgagggtgagtgcggggcgaagagaggaagtaatggctcttggtgtggctttttaagagaaaccctaggtgacactggggtgtcacagccttccccccttaaaggaatctcgtcccgagattcaggccagagtcctcccggggtgaagcgaagggtgagactgataggaaaaagggtgatgattgttattattagggcaaaactgctcttcgaatgtcattctctttgcaacttcagaaggtag

SEQ ID NO: 38053 - DNA, 168 bp, Zea mays
  Peptide Sequence Number=SeqID_79832
atggcgggcggaaatacgctcgccggagctaaggaacggtggctggccgatgagggtgagtgcggggcgaagagaggaagtaatggctcttggtgtggctttttaagagaaaccctaggtgacactggggtgtcacaattggttcttgtacctgaagttgtactttag

SEQ ID NO: 38054 - DNA, 462 bp, Zea mays
  Peptide Sequence Number=SeqID_79833
atggcgaagctaaccaaagcactgacgcgacttgggggtgactggagtgggctggccatggtggccgaggctctggcggcaatggcgggcggaaaggagctcgccggagctaaggaggggcgtctggccggcgatggatttgagttagggatcaaggtgaacacgctttatctttggctcaagggctcaattagggtttttattggggttgcaacattttgcccttttgaaaacccatttgttttgaacatgatacttttaagtataagcttagtggatcctttactctttagtcaatttgatgctcatgctcaatttggttcacataaaatgatggttcttgggttagcacttgagagaaaccctggggtgtcacaattgttaatcatcaacataaaagtacgcaaagttcttctaatcaaagaggatcccaaggctgctcttaaccgtgagctcggctga

SEQ ID NO: 38055 - DNA, 273 bp, Zea mays
  Peptide Sequence Number=SeqID_79834
atgggcctcggacgagccgaagggcatggtgtcggctacgtcaaaagcaacctagcctgcatgaaacttttaagattaggccaaacttttcattgttcaagaaaggaaaaggggaacaacatgtgtggttactatgtttatcgattgattcacacattcgtagaatgggaatcacgtgtcgtgggtaaaatgtgcaacctctgtagagtgttagaaattggtatatcagccgagttcacggttaagagcaatcttgggatcctctttgattag

SEQ ID NO: 38056 - DNA, 171 bp, Zea mays
  Peptide Sequence Number=SeqID_79835
atggccgtcaatgggggccagggcgtagtcctcactctgccaaggtggggtgcagaggctggaaagggatcacgatttgtgggtaaagtgtacaacctctgtagagtgttagaaactggtatatcagtcgagctcatggttaagagcagccttgggatcctctttgattag

SEQ ID NO: 38057 - DNA, 300 bp, Zea mays
  Peptide Sequence Number=SeqID_79836
atggcccagatcacgggataccacttcacgcacgcgcgccctgcgtccagacgcacctgtcggtcgcatgtgcccctggaaccgggcccgaccgacaacaagcagtctgtggttcctgagtgtgttgctgaagatcttcctgagcaacaaccaggggactcaggccattttcctgagtacctctccgctggaaagggatcgcggctcgtgggtaaagtgtgcaacctctgcagagtgttagaaattggtatatcagccgagctcatggttaagagcagccttgggatcctctttgattag

SEQ ID NO: 38058 - DNA, 471 bp, Zea mays
  Peptide Sequence Number=SeqID_79837
atgcctcgctggagttcctccggtccgcccaagaccttctccctaccgttctcccctctctgccctcagattcgtggcctcttttccgccattgagttcgctgtggcgttctctccctctctgcccaatctcggcaacctcggaacccccctagcacacgtctgcctcaactctagcgacctcaccaccgtggaaaggagcagcgccgcccgcagccgttcgtccctccctgatctgatctcccccgtccgatctggatcccacagcctagatcgcggataccgcttcgcgcacgcgcgccctgcgcccctggcccgcctgtcagcgcccgtgttccttggcgctgggcccgctcggttgggaaagggatcacgactcgtgggtaaagtgtgcaacctctgtagagtgttagaaactggtatatcagccgagctcatggttaagagcagccttgggatcctctttgattag

SEQ ID NO: 38059 - DNA, 381 bp, Zea mays
  Peptide Sequence Number=SeqID_79838
atgaagcacaaaaaccgcagctctcaaactcactcaaagatttctctccaaagatttgaaatgggagaggcaagaggtgtgtgtgagagagtgggaggtgtttctcaggtgcccacaaaagcaggtggccgttggggaaagttggccaaaaaccggttgaaccggtttgtaaaccggttgaaccggtttccaccaggaagaactcggttcactgacctactcagccggagagttgaccggacccaaaaccggttgagccgggctcaaatccggttgaaccggttttcccaaaatctgcacacgactttttctgacaggactgactggcagactggcagtgacagagcggaacagtgcagaaaccggttgaaccggttttag

SEQ ID NO: 38060 - DNA, 381 bp, Zea mays
  Peptide Sequence Number=SeqID_79839
atgaagcacaaaaaccgcagctctcaaactcactcaaagatttctctccaaagatttgaaatgggagaggcaagaggtgtgtgtgagagagtgggaggtgtttctcaggtgcccacaaaagcaggtggccgttggggaaagttggccaaaaaccggttgaaccggtttgtaaaccggttgaaccggtttccaccaggaagaactcggttcactgacctactcagccggagagttgaccggacccaaaaccggttgagccgggctcaaatccggttgaaccggttttcccaaaatctgcacactactttttctgacaggactgactggcagactggcagtgacagagcggaacagtgcagaaaccggttgaaccggttttag

SEQ ID NO: 38061 - DNA, 342 bp, Zea mays
  Peptide Sequence Number=SeqID_79840
atgcccgcggacccgattgatggtgcacagcggagaatcgcccacgacaaccacggcggagctccaactttcaccctactaaacacaaatccgacggcgatagctggttttgggggtccaaggggtagatcagggggaacgacaagggcgactgtggaaatcgggtggcaggcgagcttgcgtaacagccagcggcattctgttgcgcccgcgcgcgagttccacggagaagacccgtcagcgagggggcccacacgacagcgtaccacggcgattgcgggcgcggagtatagtgctggtgtgcaggggctggcaaattgggcccacttggccgagacctga

SEQ ID NO: 38062 - DNA, 621 bp, Zea mays
  Peptide Sequence Number=SeqID_79841
atggggggcgcggagcccggttccttcgcggagaaggatccctctcgggcaactggcgtgccagttgctcgacgcgtgggcctgggccccaggctggcgtgtcagaagttggagaagcgcgtccatctggcgcggttgcatgccgcctgcatggctgctcgccccttctgcccgttggtctgggcggaaatggggggtcgcctcgccgggtcttcccgtcttccaagcccccggatgggggatatccgccgcatttccgcctcctcgttggaggaacgcaactccatgggagttggtacctctcagccatcgttcggcttcaaggattttcatcagccggcctggccataccccgccaccggcggtcacccaagatggccaagatggaagatgaggcgagtcggggagccgcctccgcgtgggtcggctgcccctttcttccccctgcgcccgggggtgaagggcgtccttgagccccacggagacttcctccagccatgccaggatatgcggggcgctaggggccctgggcccccgtttccttgcctgaatggctggttctcgtcctcagtggggggggagccctttcgccgtgacacctcccctaaagctgctgcctaa

SEQ ID NO: 38063 - DNA, 621 bp, Zea mays
  Peptide Sequence Number=SeqID_79842
atggggggcgcggagcccggttccttcgcggagaaggatccctctcgggcaactggcgtgccagttgctcgacgcgtgggcctgggccccaggctggcgtgtcagaagttggagaagcgcgtccatctggcgcggttgcatgccgcctgcatggctgctcgccccttctgcccgttggtctgggcggaaatggggggtcgcctcgccgggtcttcccgtcttccaagcccccggatgggggatatccgccgcctttccgcctcctcgttggaggaacgcaactccatgggagttggtacctctcagccatcgttcggcttcaaggattttcatcatccagcctggccataccccgccaccggcggtcacccaagatggccaagatggaagatgaggcgagtcggggagccgcctccgcgtgggtcggctgcccctttcttccccctgcgcccgggggtgaagggcgtccttgagccccacggagacttcctccagccatgccaggatatgcggggcgctaggggccctgggcccccgtttccttgcctgaatggctggttctcgtcctcagtggggggggagcccttccgccgtgacacctcccctaaagctgctgcctaa

SEQ ID NO: 38064 - DNA, 921 bp, Zea mays
  Peptide Sequence Number=SeqID_79843
atggtggcatcatttctctcatgtgatatcttgaggcccccgcaatccgtcgcctttccatccgcgaccgcaatcatttccgtccgccggagatcagccgcgacagacaacgtctcccacgcgataccatgccccgctcccgcctcagcacaccccctcgccctcgcccccgtcttcgaagaggtcgtgaccctgcctccatcctcaacgccgccagctcgccctcatcctcctaatccttggtcgctgctagattcgtcagactaccgaggcgctgctcataggatctacggggcggcgtcggtgctcatcggaatccggagaggtggcagttgtttgccagggatcggcgtcgcatgtctcagatctgagatggacaggatccgggatggcaggaggggcagggtgtcggccggaggcgttccgcggcctctgaggagacgccttaggagcaacggcggaggggggcccagggactcgcctcgctccgagcgccgacggggcgagcgcctcatgctcttcggcgggggtggctgcgccagtcgggaccacggcgatgacatctccgacgagagcctcggcggcgacgacgccgacgccgagcaggagctcgcgtcgcggtaccaccagcagcggcggtcaccgagcatggcaccacctccgccgtcgccaccacttctacaccatgcctccgccccccgcctccgtaatgttcatcccgttggcgtcaacaggatcgtctcggtgggcgtccctcgcgtgctgccggatgagcggatccactggttcgtcagcacggacaaggttgtgttcctggctcatgaagcgctcgacatcttcaagcgtcgcgggtgctgtcgatcgatcgaccatcaacccatgctctgcatggcgctcttccgctcagggtcaggatcttag

SEQ ID NO: 38065 - DNA, 907 bp, Zea mays
  Peptide Sequence Number=SeqID_79844
atggtggcatcatttctctcatgtgatatcttgaggcccccgcaatccgtcgcctttccatccgcgaccgcaatcatttccgtccgccggagatcagccgcgacagacaacgtctcccacgcgataccatgccccgctcccgcctcagcacaccccctcgccctcgcccccgtcttcgaagaggtcgtgaccctgcctccatcctcaacgccgccagctcgccctcatcctcctaatccttggtcgctgctagattcgtcagactaccgaggcgctgctcataggatctacggggcggcgtcggtgctcatcggaatccggagaggtggcagttgtttgccagggatcggcgtcgcatgtctcagatctgagatggacaggatccgggatggcaggaggggcagggtgtcggccggaggcgttccgcggcctctgaggagacgccttaggagcaacggcggaggggggcccagggactcgcctcgctccgagcgccgacggggcgagcgcctcatgctcttcggcgggggtggctgcgccagtcgggaccacggcgatgacatctccgacgagagcctcggcggcgacgacgccgacgccgagcaggagctcgcgtcgcggtaccaccagcagcggcggtcaccgagcatggcaccacctccgccgtcgccaccacttctacaccatgcctccgccccccgcctccgtaatgttcatcccgttggcgtcaacaggatcgtctcggtgggcgtccctcgcgtgctgccggatgagcggatccactggttcgtcagcacggacaaggttgtgttcctggctcatgaagcgctcgacatcttcaagcgtcgcgggtgctgtcgatcgatcgaccatcaacccatgctctgcatggcgctcttccgctcag

SEQ ID NO: 38066 - DNA, 786 bp, Zea mays
  Peptide Sequence Number=SeqID_79845
gaatccataacagatgattctgaccacaatgtttgtttatcaaggccagagctatactactatgaagaacctaagggggcggatgcgcttgcagtagggggttacaagcgttcgcgagggagagagagagagagcctgtgcgtcagcccgtcctcccgcgcggccaccttctcgtacgagggccctggaccttccttttatagatgtaaggagagggtccaggtgtacaacagggagcgtagtaatgtgctaacgtgtctagcagggaggagccagagtcctatgtacatgccgacgtggctgttggagaggtgttgctgccctgttcatgtgatgtcgtggccgtcggaggagcgcttgagccttgtggaagcacagctgtcgggcgctgtcggatccttgctgacgtctccttgcttccgtaaggggttgagaactgccatcgtcatggaccacagaccgtcttccgaggtcgaggtggagtctgagccctggggtcgggcgaggcggagaccgtcttccggtgtcgagagcttcctatggcgccttaggctggacttggctactgtcagtctcaccctggcgggtggcacagtagtcggagcagggcaggcgacgctgttttcctgtcaggcgatccttgcattgaatgctcctgcgatccggtcagctggcgaggcgatctggccaaggttgcttctctgggaagcctgcccgagctgggcctcgagcgagtcgaagctttgtgctgatgggggttaccagctgagattaggagtcttgggg

SEQ ID NO: 38067 - DNA, 225 bp, Zea mays
  Peptide Sequence Number=SeqID_79846
atggggagggctatcaataagactgtcatggttgtggaattgatcaaggaagatcctaccaattctgacagtgatgctaagaactcaggaaggaccgagtttccagcagatgaagatgctcatagtgttggtgactgtgtaaaggaatccataacagatgattctgaccacaatgtttgtttgtcaaggccagagctatactactatgaagaacctaaggggtag

SEQ ID NO: 38068 - DNA, 343 bp, Zea mays
  Peptide Sequence Number=SeqID_79847
catcggcctctcgccatggatggagctcggatgggggaggaagaagctggctggagatgcggtgcaggtactggcggccatgggagaaactcgagctcgctgccatgggggaagcttcagcgcgttgaggaagaaggagcagggggcgccatggctggccgaggggaggagctcgccatttggagcagtggcagggggcgcctgtgactgccttgctgtggaggccgtcagccatggaaggcagagagcagagggcatgcacgccaaggaggaagagggctggcgtggggagaagaagacagggaggctatggcggctgggaagaagtgaggggtgggagtga

SEQ ID NO: 38069 - DNA, 522 bp, Zea mays
  Peptide Sequence Number=SeqID_79848
atgggagcggctgccgctgctttgtgtagtagctcgaccagggacagagaggggcgagctgcagaggggcatccatgggaaggagtcctctgctgggcgtgcagtccagagggaaaaagaaaaaaaacgccatggggaactagcagcaaggggcgtccatggagaaagagctgctgcagcatcggcctctcgccatggatggagctcggatgggggaggaagaagctggctggagatgcggtgcaggtactggcggccatgggagaaactcgagctcgctgccatgggggaagcttcagcgcgttgaggaagaaggagcagggggcgccatggctggccgaggggaggagctcgccatttggagcagtggcagggggcgcctgtgactgccttgctgtggaggccgtcagccatggaaggcagagagcagagggcatgcacgccaaggaggaagagggctggcgtggggagaagaagacagggaggctatggcggctgggaagaagtgaggggtgggagtga

SEQ ID NO: 38070 - DNA, 525 bp, Zea mays
  Peptide Sequence Number=SeqID_79849
atggcactcggcaaagaaggaaacctgggaaccggtaaagacatctttgccgagtgccattgccaaggcactcggcaaagggactggcaaaggggcccactggagggttctttgccgagtacctgtccaacagacactcggcaaagaagcctcctttgccgagtgcctactagagctctcggcacagggactggtagtggggcccactggatgcaacaaatactagggggtgtgcaagaggattatagaaggctagcacgtgcgttcgataaatttgtcattactaattttccatcgcacgattttgaaactaaagaaaacccacaatatccatcggctgcaaatgggcatatgtccgatcccagctactttatgggatgtcgattaactcttacaccggacagctacatcctccaccacctctatgggaaacagcctgtgcccatgcgcacgggcggacggtccggtctagcggcagttggctctatcccctgcaatgagccatcgaagcccacaccaggataa

SEQ ID NO: 38071 - DNA, 228 bp, Zea mays
  Peptide Sequence Number=SeqID_79850
atggcactcggcaaagaaggaaacctgggaaccggcaaagacatctttgccgagtgctattgccaaggcactcggcaaagggactggcaaaggggcccactggagggttctttgccgagtacctgtccaacagacactcggcaaagagtcctcctttgccgagtgcctactagagctctcggcacagggactggcagtggggcccactggcaaaaagtcttcaaatag

SEQ ID NO: 38072 - DNA, 522 bp, Zea mays
  Peptide Sequence Number=SeqID_79851
atggccccaaattacccagacaaaggatcagagaagagtcgaggcttcgggttcgtgcaatttgcaactgttcaagatgttgatcgagctattcaacaaaagaatggatctcctgtttctgtgcaagtgaaggactctgatgcaaaggatgaagcagacgaaatttctcctgctgaaaagcataaggggaaatctcataaagcagatccagtatttttcaatactgatgcaatatgttatgtggaactagagcaactgcatttgttgtcaaatgatgctaaggtggttgaggttaatgttaaggtggaaagtgcaggcacatgtaatgtgcacaataatgatttctatgctaaagagaagttgctcaaatcaatgcgtgattgtgatccttcgtctgtgcgccactggattgacagaaatgagaagctattttacaagctcctgattgacaatgtcgaagagctgcttcctataatgtatacaccaacagcggggggaagccttttgtttccagccctttaa

SEQ ID NO: 38073 - DNA, 1041 bp, Zea mays
  Peptide Sequence Number=SeqID_79852
atgaagtccgttgtcgtagcgtcctcggatccacgtccaccgcgtcgcagaccaaggccgaccgggccaagctcgacgtacgagtgcatcctctgcgcctgctgctccacctcctgcccgtcctactggtggaacccggaggagtacctcggcctggccgcgctgctccacgccaacagttatactccaactcatgatttattctgtgatgtactggcgtgggaaacgaaaccattaattcttgagcgcccagttctaggcatgagaggacctacgggaggctacccaggaaaggaaaagattagaatcgcaaggccagattctcagggtggttgtttagatctactagagcttaatttagtcagactagagacagttcgccatatgttgatgatcaccgtgacactgtcgaagaagcctctggatacatcatctccaggctttcctgcttatccctactactctataagcacgctgactggaaatctcagcttaggggccctgatgctcggggaatcaaggaaatatggcacaactattgtccctggtctgtatgcaccagttcatctacatttctttgttgctcgtatggacatggctgttgattgcaaattgaatgaggtggttgaggttaatgttaaggtggaaagtgcaggcacacataacatgcacaataatgatttctatgctaaagagaagttgctcaaatcaatgcgtgattgtgatccttcgtctttgcgccattggattttgtggcaacggaagttccaggccccattgcagcactacactgcgctaatggaccttcaggactattctgagaatggaactgtaaccgtggtatatcgagtgatacttaaaggaactgatggagaggcatatagagatgccacgggcacaacacagttccatgaggggcgcagggaagatgctgttgcagccgcagaggaagctgcattcagcaaagcttgcgcatggttcggttttggcctgtatctgtaccaccaggatgaatctcattacgacgaccacttccattga

SEQ ID NO: 38074 - DNA, 2271 bp, Zea mays
  Peptide Sequence Number=SeqID_79853
atgtcgctcgatttcaagctcatccttgacgagctcaaccggcgattcgacgagctggaggttcgctgggaccggcgcttctcgccatctgtgtacctcgaccttccacccacactgctcagcgtccaccaatcctccgacgcatccgccagcgcgccgcccaccccgactgcggccgttggggccgtcgtcatcgccgacaactggggcgggtgcttcgatgacggcaagcagtactacgtagcgccatctgtcgtcgccgacaactggggcggactcttcgagggttgtgatgctggcggcgatatctcttcgaacctgctcgactccgaccccgacgaggcgttcgtcacctcccactcggacaaggcgctgctcgacaaccaccacgccggtgagctcatcgccaccggcatcgaatatggctcatacagctccgtccatggtagcggcggcgctgcgctgtctcacctcgcgcacagcaacaccaacttcgccatgcccaccacctgttcgacttgggggctcaccgagcatgctatggccaaggccgtgcaccgtcgcgcgctatggatgctccgacgcgagccacttccgcgcctacttcgtgcgttcctaacgctcgagcggctcaacctctccgcctacgcctcgctcgacgacgcctccctcgctgcgtccgtcgccgatggaccagcagccgcgacaacctggtggtgcacgctcaaggggattcgcggcagcgacacgccgttcgtgatggacctagacgacgcagccaccgtggcgggcggcgtcgaggacacttacggcgaggaccgcgccaccgaggagcagctcgccacgcccttggacacgctcatgtgcgcccgcctcgaccctgtcaagtcgcacatcgggtgcctgctgctgcagcacctcaagctttcgcctaccttgattggtgccaaggtggtattcgaggaaatgcagcaaagcaccatcctcagggacgcgcacaccactatctgcaccacgcccgacccggcactcgacgcccacttcgccaacaagtggcggatgcgctgctcccacaacagcaccagtacggcggaagcggcattggagttcgatcccgacaactgcaccacctgcaacaccagttactaccaccacgtcgcacagccacgcggactgctgcgttccgacgcatcgctcctggaccaccgcttcactagggtctacgtgatgcaagttgccttcggcaggttcgacggacacttcttccacgacttcaccatcatcaagtcaaagacagacaacagcagcagctcgcccctcgagtgttcgaccaaatgtctcagcctcgatattggactattctctgaagctcgtgctgtgttaaatgcagcaagaccgcaagcaatgaagattgcaccaaacatgccacaacaccagacctgcattgctgtgatggaagaaggcatattatgtggaggccaacctggtgttttgaaggaagccattgtttgctcgattcctagtgtcatggtgtttacttggactgttaagaatttttctggagttactggtttatacagtcagcatgacagaggtacggtgtggttaatcgttgctcctgattgctacttcattcaacacaatgagagggtgcacatgatattctgtggctttgatctactgagtttgcaacacttacagggacatttcactgaggctgatatgtttgctccttgggatggtcaggaattaacccagtttcagttttctgaactatcaatatattggcagcagtcacatggcctgaacagcctattctttttcagaaagctcaagtattcatcatcagttgaggaattttgtggtgcacagttttcatttcctaatattctattgcccaagtcttggtcacaggagttagccaccaacatagaaaggcatttactaccagaaatgatagaagtggccaatggctatatttttcatgagcttcatctaatgcttgcttctattggagtgacacgtatgatcggttgtggtaaatatttgatatggatcattggattgctaactccatgggatccgggcagagtggtcttcgacctcaagttcatgatgctttggcttgagggcaagccaaatcttaagaaagggggaatgtcatacatccagtggtgggaacaggctacatatgaggacatgaagacaattgggccgaggcggagtgagcaagcctgggcggcatttgtgaagctgagcggcccagagtga

SEQ ID NO: 38075 - DNA, 2271 bp, Zea mays
  Peptide Sequence Number=SeqID_79854
atgtcgctcgatttcaagctcatccttgacgagctcaaccggcgattcgacgagctggaggttcgctgggaccggcgcttctcgccatctgtgtacctcgaccttccacccacactgctcagcgtccaccaatcctccgacgcatccgccagcgcgccgcccaccccgactgcggccgttggggccgtcgtcatcgccgacaactggggcgggtgcttcgatgacggcaagcagtactacgtagcgccatctgtcgtcgccgacaactggggcggactcttcgagggttgtgatgctggcggcgatatctcttcgaacctgctcgactccgaccccgacgaggcgttcgtcacctcccactcggacaaggcgctgctcgacaaccaccacgccggtgagctcatcgccaccggcatcgaatatggctcatacagctccgtccatggtagcggcggcgctgcgctgtctcacctcgcgcacagcaacaccaacttcgccatgcccaccacctgttcgacttgggggctcaccgagcatgctatggccaaggccgtgcaccgtcgcgcgctatggatgctccgacgcgagccacttccgcgcctacttcgtgcgttcctaacgctcgagcggctcaacctctccgcctacgcctcgctcgacgacgcctccctcgctgcgtccgtcgccgatggaccagcagccgcgacaacctggtggtgcacgctcaaggggattcgcggcagcgacacgccgttcgtgatggacctagacgacgcagccaccgtggcgggcggcgtcgaggacacttacggcgaggaccgcgccaccgaggagcagctcgccacgcccttggacacgctcatgtgcgcccgcctcgaccctgtcaagtcgcacatcgggtgcctgctgctgcagcacctcaagctttcgcctaccttgattggtgccaaggtggtattcgaggaaatgcagcaaagcaccatcctcagggacgcgcacaccactatctgcaccacgcccgacccggcactcgacgcccacttcgccaacaagtggcggatgcgctgctcccacaacagcaccagtacggcggaagcggcattggagttcgatcccgacaactgcaccacctgcaacaccagttactaccaccacgtcgcacagccacgcggactgctgcgttccgacgcatcgctcctggaccaccgcttcactagggtctacgtgatgcaagttgccttcggcaggttcgacggacacttcttccacgacttcaccatcatcaagtcaaagacagacaacagcagcagctcgcccctcgagtgttcgaccaaatgtctcagcctcgatattggactattctctgaagctcgtgctgtgttaaatgcagcaagaccgcaagcaatgaagattgcaccaaacatgccacaacaccagacctgcattgctgtgatggaagaaggcatattatgtggaggccaacctggtgttttgaaggaagccattgtttgctcgattcctagtgtcatggtgtttacttggactgttaagaatttttctggagttactggtttatacagtcagcatgacagaggtacggtgtggttaatcgttgctcctgattgctacttcattcaacacaatgagagggtgcacatgatattctgtggctttgatctactgagtttgcaacacttacagggacatttcactgaggctgatatgtttgctccttgggatggtcaggaattaacccagtttcagttttctgaactatcaatatattggcagcagtcacatggcctgaacagcctattctttttcagaaagctcaagtattcatcatcagttgaggaattttgtggtgcacagttttcatttcctaatattctattgcccaagtcttggtcacaggagttagccaccaacatagaaaggcatttactaccagaaatgatagaagtggccaatggctatatttttcatgagcttcatctaatgcttgcttctattggagtgacacgtatgatcggttgtggtaaatatttgatatggatcattggattgctaactccatgggatccgggcagagtggtcttcgacctcaagttcatgatgctttggcttgagggcaagccaaatcttaagaaagggggaatgtcatacatccagtggtgggaacaggctacatatgaggacatgaagacaattgggccgaggcggagtgagcaagcctgggcggcaattgtgaagctgagcggcccagagtga

SEQ ID NO: 38076 - DNA, 264 bp, Zea mays
  Peptide Sequence Number=SeqID_79855
atggggaagcctgtcccatcactcctcatgctcatcctcagccgagggcaaatacaacttgatgaagtccatgatcttgttggtctccagatcgatcttgatggtgtcgttggccttgatgagagggtcggggtagcggatggtgcggtcgtcgtaggtgttcagaagccaaaaccaaatggtccaaatgctgatagacttattgtggctgctctagcagccaatagattaaacggcagagcaggttcagtcccaaacttctag

SEQ ID NO: 38077 - DNA, 1095 bp, Zea mays
  Peptide Sequence Number=SeqID_79856
atggatgaagaaatggatgaagatgtcatagtcaaggttgtggactgctcgaaccaatcagagttcaagctctgcaaggtgaggtctgtacagtttggccagaaaggcatcccctacctgaacacctacgacggtcgcaccatccgctaccccgaccctctcatcaaggccaacgacaccatcaagattgatctggagaccaacaagatcatggacttcatcaagttcgacgaagcaggcctccaacagtttcaaattcaaataaattcaaacatgtgcaacacttcaaagaatagttctaaagataaatcaggtgatgggctgagattggaagatcttagtgatgagaaagttgattttgatcccaatgaagatgacctgttgagttctcaagagttagaagaatttgcaaaagatatggaggaaatgcaaactgacttccaagctaaagtgggcgaggtgctttcgattccctcgactaaagatgaaaagcaggatccggtgggtaaaaagtcaagcgagatccagatgtctaccactgaaagcataagaaaaagctcaagattggagaagaatgaagatattaaggtggcagataaggctatttctagagctgaagctaaagacaccttcctcaacaaaggtatgaacaacaattccttctctttacttaatgctagtaatgaggatttgtgtgatatttctaataaactaggagtttgtttgggttcttctgaatccactgttatggctaatcttgacttgataagagatttagaaatgtccagaaaaattctggctattcaatcatgtggaattaaaaaaactgaggagcccattgttgatgattttaatgaagtggatagtagtgtccatgctgattctgagaaagagattgattatgatcttttggatgttatggtcctgagaaaagggagaaaaattaaacatcgaaagaatcagcaaaaaaaagcttcccctaaatttaggtgtacacctaataaaaagagggaagcagagaaattttatcttccccagaccccttctgatgataggcctcatttggaattgtcagggtttagggattggttctaa

SEQ ID NO: 38078 - DNA, 243 bp, Zea mays
  Peptide Sequence Number=SeqID_79857
atggcttttcatagtgctcaattggatctatcccctgagcataggagaaaattcaagctctgcaaggtgaggtctgttcagtttggccagaaagtcatcccctacctgaacacctacgacgaccgcaccatccgctaccccgaccctctcatcaaggccaacgacaccatcaagatcgatctggagaccaacaagatcatggacttcatcaagttgacttcatcaagttatatacttagttag

SEQ ID NO: 38079 - DNA, 643 bp, Zea mays
  Peptide Sequence Number=SeqID_79858
atggatgaagaaatggatgaagatgtcatagtcaaggttgtggactgctcgaaccaatcagagttcaagctctgcaaggtgaggtctgtacagtttggccagaaaggcatcccctacctgaacacctacgacggtcgcaccatccgctaccccgaccctctcatcaaggccaacgacaccatcaagattgatctggagaccaacaagatcatggacttcatcaagttcgacgaagcaggcctccaacagtttcaaattcaaataaattcaaacatgtgcaacacttcaaagaatagttctaaagataaatcaggtgatgggctgagattggaagatcttagtgatgagaaagttgattttgatcccaatgaagatgacctgttgagttctcaagagttagaagaatttgcaaaagatatggaggaaatgcaaactgacttccaagctaaagtgggcgaggtgctttcgattccctcgactaaagatgaaaagcaggatccggtgggtaaaaagtcaagcgagatccagatgtctaccactgaaagcataagaaaaagctcaagattggagaagaatgaagatattaaggtggcagataaggctatttctagagctgaagctaaagacaccttcctcaacaaag

SEQ ID NO: 38080 - DNA, 987 bp, Zea mays
  Peptide Sequence Number=SeqID_79859
atggctaaccatcagttggtctcctaccacgagctcgctcgtgctaccgaaaacttcagtgatgctaacttgttggggtctggaagctttgggaaggtttttaagggccagctgagcaatggcctggtggttgccgtaaaggtcatacgcatgcatatggagcaagctgctgcaaggtttgacgcagagtgttgtgtgcttcgaatggctcggcatcgcaacctgataaggatactgaacacctgttccaacttggacttcagagcgctggtgctccagtacatgcccaacgggagcttagaggagctcttgcgctccgtcaatagaggaatgcgactagggttcgttgagaggttggacatcgtgctagatgtgtccatggcaatggagtatctgcaccacgagcattgcgaggtggtcctacactgcgacttgaagcctagcaaactaaggcatgagacattgaagcagcagctgtgccgaaagctaataaatggtgtatcagtgcataagcatgttcctgggcagagttctgttatacctccagagacaaattccatctccatgcaggacttaaaggcaccaaatgaaagcctgtatgagcagaagcccgaagaaacaactcctgtcctgccatcatcggtgattgcaagtactgcagctaggagcaaaccccatacttcccgatttgaatatgtagaaaatgcagctgctcctaagactgggagcagctcagaaggcaatctcatgagtggacatgttgcacccccaaagtcatcgaacttctttgttgaatttgggatggacagtggatatcacaaaaaatatacatccagttcatccaaagtgcagttcaagctctgcaaggtgaggtctgttcagtttggccagaaaggcatcccctacctgaacacctacgacgaccgcaccatccgctaccccgaccctctcatcaaggccaacgacaccatcaagatcgatctgtag

SEQ ID NO: 38081 - DNA, 483 bp, Zea mays
  Peptide Sequence Number=SeqID_79860
atggagatcgactacagccactgggtggacgagcagaaaaggcacatggcagagctgacgtcgacgctccaggggcagcagacgtcggagctggagctccgcctgctggtggagacgtggctcagcaactacgagcgcctgtttaggatcaaggcgacggcggccaacgcggacgtgttctacgtcatgtcgggcttgtggaagacccccgccaagaggttcttcctctggatcggtgggttccggccgtcggatgtcctcaaggatgatttggttcagcttctcactttgtttttaatgagaagaagcagacaacaaattatagtgaaagctcctctcgtcccccgttgcttgggtggatcacccccacggaaccagcctagccaaagacagggtgactattcttacctgaatagagtatttcgtgatctctttatccaggaagataccagttcaactatgtgtttgactggaccattctga

SEQ ID NO: 38082 - DNA, 741 bp, Zea mays
  Peptide Sequence Number=SeqID_79861
atggcgctcttagttgttagatcccataaagggaaagtgatgggatacacttctccatttttccttttggcttttactacccagttccaactaacaaggaaaatcgagggtcaactgatctttatattatcaggtggatgcaatcaaaaccaagatgcaagtgcatgcgtcactgggttcgagatcgactacagccactgggtggacgagcagaaaaggcacatggcagagctgacgtcgacgctccaggggcagcagacgtcggagctggagctccgcctgctggtggagacgtggctcagcaactacgagcgcctgtttaggatcaaggcgacggcggccaacgcggacgtgttctacgtcatgtcgggcttgtggaagacccccgccaagaggttcttcctctggatcggtgggttccggccgtcggatgtcctcaaggatgttgctttgagccgtggtggatctcccggtgtgatgacatggggctgggtctgggagctcttctcaaatctgggggttctcggatttggttcagcttctcactttgtttttaatgagaagaagcagacaacaaattatagtgaaggctcctctcgtcccccgttgcttggtggatcacccccacggaaccagcctagccaaagacagggtgactattcttacctgaatagagtatttcgtgatctctttatccaggaagataccagttcaactatgtgtttgactggaccattctga

SEQ ID NO: 38083 - DNA, 582 bp, Zea mays
  Peptide Sequence Number=SeqID_79862
atgcctacgtccgtgaggaaccagctgcagcggccggccgagtgcccgccagcgccgcggaagccggtgtgggcgcctccgctgccgtcgacgcccgccaacaagcgcagcaggccgtctccgccctcctccgcggcgccggctcgccgggccttcttccccgtcgcgcgacctcaccaccgtgttccgcgccctgccgcccaagaagcggatccgcgtggtgtgaccctggcgcgcaggacgggacggcgtggatctggcgagtcagtaagcaccgacgatctgccccccgcgctctcaacaacccccgcccccatcgctctcctccgaggtggttgtttcttcgcccagtacccagttcgtccgcctccttctcttcgagtttgggtgcccatggccatggagaccagcagtgcgcccgccgccgccaccgaggccggctggtacgtgcttggaccgaaccaggagggcgtcggaccctacgtgattgctgagattcgaggtggctgtttccttcactctcctagcaattcaacgcgtttcaaggctgctaggtcaggtcaccatcgattcaaccagtaa

SEQ ID NO: 38084 - DNA, 675 bp, Zea mays
  Peptide Sequence Number=SeqID_79863
atgcctacgtccgtgaggaaccagctgcagcggccggccgagtgcccgccagcgccgcggaagccggtgtgggcgcctccgctgccgtcgacgcccgccaacaagcgcagcaggccgtctccgccctcctccgcggcgccggctcgccgggacttcttccccgtcgcgcgacctcaccaccgtgttccgcgccctgccgcccaagaagcggatccgcgtggtgtgaccctggcgcgcaggacgggacggcgtggatctggcgagtcagtaagcaccgacgatctgctccccgcgctctcaacaacccccgcccccatcgctctcctccgagtttgggtgcccatggccatggagaccagcagtgcgcccgccgccgccaccgaggccggctggttggtgttatcattggaaaagccggggaaactattagcatacaaggagaagggcaaggtccccgacaggttcaggaagctgcagcacgcgcaccatggcagagccgagttcaccggctgcgcgtcgcccaccggattgctggattccagggacccctacgatctccaacaacctcagatcggtgtgtcgcggaccataattaggggtaccctcaagtctcctaattctcagctggtaacccccatcagcacaaagctgcaaaggcctgatgggtgcgactaa

SEQ ID NO: 38085 - DNA, 387 bp, Zea mays
  Peptide Sequence Number=SeqID_79864
atgggcacgagcccccggcagcggcagccagaacgtcgccgccttgacgaccagcacatcgttcttcattaccaagacttgttacgctgtgtgatcaaagccccatccacgccatttgatgtggttagaaatgttgtggagaaacagttggggaagaacttcgatgacatgtttgaattcgtcgatgtcgagcctgttgggtctgcttctattgcacagaagcatgacctcaactttgatctattctctgccaccaaagagatggaaaaacagttttgcagatttttttatttcatatctgatcgggagagcgtgaagctcctgcttcttgagaacaggcaagtacttggatttttgaaagaacggcatgatgtagaccaactgtga

SEQ ID NO: 38086 - DNA, 916 bp, Zea mays
  Peptide Sequence Number=SeqID_79865
atgccgctggcgctcgcgcaactgcaggacttgcgggaccgcatctccgaccgcctccgcccatggagccgctccgcgcagttctgggtccgcgccgcggacatctacaccagctacaaggtgtgccagctgcgcgcggggttcgtgaaggacgaggacgagctagagaccatgtgggagcggcagcacgagctcggcgcggagaagatgtactccctctgctccgagctcggcggtctcttcctcaaggctgctcaaattctgggaaaacctgacctggcaccgatggcttgggtgaagagacttgttacgctgtgtgatcaagccccatccacgccatttgatgtggttagagatgttgtggagaaacagttggggaagaacttcgatgacatgtttgaattcttcgatgtcgagcctgttgggtctgcttctattgcacagaagcatgacctcaactttgatctattctctgccaccaaagagatggaaaaacaggtggctttacttgattatggacaagtgaaagaaatgccagaagatttacggctggcttatgcaaatcttgtagttgcaatggccgatgatgatttctcgagggctgaggaaagtttcagggagctgggtatccgaacatgggccataactgataacaaactagaagaattgtttcagttatccctgcgaatgttcgatacaagattaccaccaggtgtaactgttatgtcaccttttgccgatgattcttcgcttaacaaaattggagtggagagcttcccggaggagctattttcagtgcttcgaacaatccagcttttgcgagggttgactgtgggcatgggccttacattctcgtgcgcccagcattggagaccgatagctgaggaggcgttgttaaaagctggaagacaaagcg

SEQ ID NO: 38087 - DNA, 501 bp, Zea mays
  Peptide Sequence Number=SeqID_79866
atgccgacggtaaacaccaacaagtttattgagttctatgatgtaagagcagcagaggctgctcttcggtcactgaataaaagtgagatagctggaaaacgaatcaagttggaaccaagtcgtcctggtggaacacgcagaaacttgatgcagcagcttggtcacgatttggaccaagaagagccaagaacctacatacattctcatgttggctcacctattgctaactctcctccaggggcatgggctcaatacagtagtccaacagatagcaatatgctgcaagctttcaccagatctccaactggaaatggaatgagtcctatcagaattccttccctgatttcaaatgctccaaagattgctcctattggcaaggatagcaaccggtctaagtatgatcaagtgttttcaaatggtaaccagtccctgggagctgcatttcagcactcccactcataccaagatcacaacagtaaccaggaatcgggggaggtctaa

SEQ ID NO: 38088 - DNA, 354 bp, Zea mays
  Peptide Sequence Number=SeqID_79867
atgcagcagcttggtcacgatttggaccaagaagagccaagaacctacagacattctcatgttggctcacctattgctaactctcctcaaggggcatgggctcaatacagtagtccaacagatagcaatatgctgcaagctttcaccagatctccaactggaaatggaatgagtcctatcagaattccttcccggatttcaaatgctccaaagattgctcctattggcaaggatagcaaccggtctaagtatgatcaagtgttttcaaatggtaaccaatccctgggagctgcatttcagcactcccactcataccaagatcacaacagtaaccaggaatcgggggaggtctaa

SEQ ID NO: 38089 - DNA, 504 bp, Zea mays
  Peptide Sequence Number=SeqID_79868
atgtccggtgcaccaggggactccaacttcgaactgctcggcttcgggattttccagagaccactccactataattcaccggactgtccggtgtgcaccggacatgtccggtgctccaaggaagggcggcctcaggaactcgccagcctcgggttttcacttcagccgctccgctataattcaccggactgtccggtgtacaccggactatccggtgcatctgcggagcaacggctacttcaggcgccaacggctacctgcagcgcatttattgcgcgccagcgcgcgcagaggtcagacacgcccatgctggcgcaccggacaccctacagtgcatgtccggtggacgatgagttggatggtcgtgatgacaccgtcgtcggatgcgatgcccagaacaacccaggagtcgccgatgttggcaacgaccatgaggtcccttgcttgacgatggacagcacggtgcagccgctctgcaccgcgtccaagcgacggctgcgctag

SEQ ID NO: 38090 - DNA, 414 bp, Zea mays
  Peptide Sequence Number=SeqID_79869
atgtccggtgcaccaggggactccaacttcgaactgctcggcttcgggattttccagagaccactccgctataattcaccggactgtccggtgtgcaccggacatgtccggtgctccaaggaagggcggcctcaggaactcgccagcctcgggttttcacttcagccgctccgctataattcaccggactgtccggtgtacaccggactgtccggtgcatctgcggagcaacggctacttcaggcgccaacggctacctgcagcgcatttattgcgcgccagcgcgcgcagaggtcagacacgcccatgctggcgcaccggacaccctacagtgcatatccggtgcgccaccggacatcaaggcgggcccagaagtcagaagcttcaacggtcggaatccaacggaactggtga

SEQ ID NO: 38091 - DNA, 531 bp, Zea mays
  Peptide Sequence Number=SeqID_79870
atggcaacggccgcgccgacgtccatcaaggggttcaactgcacctccaactgcacttactcgtgccaggcgtacgcgctctaccacgccggcttcgtgggcgtgccgctcgatctcgcggccatcggtgacctcttcgccgtcagccgctttatggtcgtgcacgccaacaacctctccaccacggccgcgccggccaactggcagcctctgctcatgtcgctccagtgcggctgccccttacggtcccccagctcgtacgcgccgatgcagtaccagatcggcccgagggacacctactggatcgtctccaccaccaagttgcacaacctcacgcaataccagatcgtggagcgcatgaaccccatgctggtgcccaccgacctcgacgtcggcaccatggtcacgttccccgccttctgccaatgcccggtcaccgccaacaacgccacggcgctcatcacctacgtcatgcagcccggggacacatacgcgtccgttgccgccgccttctccgtcgcctatccatag

SEQ ID NO: 38092 - DNA, 591 bp, Zea mays
  Peptide Sequence Number=SeqID_79871
atggcaacggccgcgccgacgtccatcaaggggttcaactgcacctccaactgcacttactcgtgccaggcgtacgcgctctaccacgccggcttcgtgggcgtgccgctcgatctcgcggccatcggtgacctcttcgccgtcagccgctttatggtcgtgcacgccaacaacctctccaccacggccgcgccggccaactggcagcctctgctcatgtcgctccagtgcggctgccccttacggtcccccagctcgtacgcgccgatgcagtaccagatcggcccgagggacacctactggatcgtctccaccaccaagttgcacaacctcacgcaataccagatcgtggagcgcatgaaccccatgctggtgcccaccgacctcgacgtcggcaccatggtcacgttccccgccttctgccaatgcccggtcaccgccaacaacgccacggcgctcatcacctacgtcatgcagcccggggacacatacgcgtccgttgccgccgccttctccgtcgcctatccatacttgtgcaacataagacaggttataaatttaactatctgcacgcggttattaatgtcttag

SEQ ID NO: 38093 - DNA, 765 bp, Zea mays
  Peptide Sequence Number=SeqID_79872
atgacttcccacggatcctcagacgacgggaatgcattgtcccacactaacgggcttgcacgagagggctttccccgcattttgtgggaggctggcgttcgctggactatgagtcctttggacaccgggctgaggatacaatcgaggcgattgctctgcacgggccagacggctcacttgacagtgcggtgcatgaatgccctgtaccgtctgcaagtgatgcgtggtgaggcaatgtcccatctgatggcattgttggaggcaacaaagatcaccctggataacagagaggagcttgtggttgacttgtccacggagatggtggaaaagtacttacaggtggagcagctatccaacgagatccaagagcttgaggaactggtggggaccagggagaacaccatcgaggttctcgaggaccagcttattaacacccagcagcagcttgccgaggctaatgagcacctggatatgcatcaccaggagatccaggatatggaggccaacgcggacgtcgacattgagggaggagaggagcctgcctccagcttggacactactggctcagggagaccaccttcccccgagtcgagtcactacaggaaacgcctaaattttcgtgggccaaaaacccacgaaaataagcctaaaccgacgaaaatagccgccgaaaataagttcgacgaaaataggctcctctcctccctcaatgtcgacgtccgcgttggcctccatatccaggatctcctggtgatgcatatccag

SEQ ID NO: 38094 - DNA, 711 bp, Zea mays
  Peptide Sequence Number=SeqID_79873
atgacttcccacggatcctcagacgacgggaatgcattgtcccacactaacgggcttgcacgagagggctttccccgcattttgtgggaggctggcgttcgctggactatgagtcctttggacaccgggctgaggatacaatcgaggcgattgctctgcacgggccagacggctcacttgacagtgcggtgcatgaatgccctgtaccgtctgcaagtgatgcgtggtgaggcaatgtcccatctgatggcattgttggaggcaacaaagatcaccctggataacagagaggagcttgtggttgacttgtccacggagatggtggaaaagtacttacaggtggagcagctatccaacgagatccaagagcttgaggaactggtggggaccagggagaacaccatcgaggttctcgaggaccagcttattaacacccagcagcagcttgccgaggctaatgagcacctggatatgcatcaccaggagatccaggatatggaggccaacgcggacgtcgacattgagggaggagaggagcctgcctccagcttggacactactggctcagggagaccaccttcccccgagtcgagtcactacaggaaacgcctaaattttcgtgggccaaaaacccacgaaaataagcctaaaccgacgaaaatagccgccgaaaataagttcgacgaaaatagactattttcgtcggcctag

SEQ ID NO: 38095 - DNA, 366 bp, Zea mays
  Peptide Sequence Number=SeqID_79874
atggcctcagctaatgttagaggtactgggggtggcttcactgtcggtcgtacgagaccattcatcaaccagtttcaaagagggaggggcctgaaaaggtccaattcaccaccaaatgcttctcctgctactccagaaggcccggctcccattccgacaggatccgcagagatgggctttgcttcgataccagctgtgacggaacctcccaagtcattaggcccacctacagttgtccttgtcctatggacctcagacaaccctgcaggtgcccctgatcacttgacaagttcggtatctatattccttacctttcccaagagcgtttcacccatcacgcagacattacaatacatcggaggttaa

SEQ ID NO: 38096 - DNA, 330 bp, Zea mays
  Peptide Sequence Number=SeqID_79875
atgggctttgctccgataccagctgtgacagaacctcccaagtcattaggcccacctacagttgtccttctccaatggacctcagacaaccctgcaggtgcccctgatcacttgacaagttcggtatctatattctttacctttcccaagagcgtttcacccgtcacgcagacattacaatacatcggagagcaccttgaagaagaacttggaattgaagtggagggggagcctgttcctccatctaaaccttctccaactgaggttgtcactgaaggtcctccagaaggtgcccctttggatttgttgctaactgcaatatccttgtag

SEQ ID NO: 38097 - DNA, 744 bp, Zea mays
  Peptide Sequence Number=SeqID_79876
atgtcggcgctacagaaagttgtagcagcggtagtccacgatgtcaacgctgagggctgggatcgaggattggagggcttgagaaggccgaggtccaaatggagctccaccagttccactgagattctgggcgcctccacggcgccgctttttagttcctccagggataacggtggtccagcatttgaaactgattttgcagaccaattgaaaaacttcagtaagatgggtcatggtgttagcagtgggggtgttttgcttaagtcttctggatggcacactcctgtcgtaccacaaatcagaaccaatgcgtcaataggcaccgtagttgataataatatctgccacccaacagaatttgatttcttcctgtgcatccatgctggggccaaggataggcttcaagagaggctaagaaagtctaagtgtttaggacttgaagaggctgcaaagaacaaaggttttgaccttggtaacgtcgatgccatgcagacggacatggaggttgtgttcgaggtgctgaagagcctagaggacgttgaggagctggaccccgagtggctgcatgatcctcacaagctgcacacgtgcgtggagaaggacacctccttgtcggactcgtgcggcgtcgacccattcgggctggtggtgatggcgcccgaaggcatgcagagcaggagcagatcaccgtattcttcagggagtgaccaggatctcagcttctcgatctatgcttctttgtga

SEQ ID NO: 38098 - DNA, 357 bp, Zea mays
  Peptide Sequence Number=SeqID_79877
atgaaggataggcttcaagagaggctaagaaaatctaagtgtttaggacttgaagaggctgcaaagaacaaaggttttgaccttggtaacgtcgatgccatgcagacggacatggaggttgtgttcgaggtgctgaagagcctagaggacgttgaggagctggaccccgagtggctgcatgatcctcacaagctgcacacgtgcgtggagaaggacacctccttgtcggactcgtgcggcgtcgacccattcgggctggtggtgatggcgcccgaaggcatgcagagcaggagcagatcaccgtattcttcagggagtgaccaggatctcagcttctcgatctatgcttctttgtga

SEQ ID NO: 38099 - DNA, 438 bp, Zea mays
  Peptide Sequence Number=SeqID_79878
atgaggggaaaaaggatactgccagtattttcttggaagaacaaaatggttggacttgcatcttgtggagaaatgctatggcagctctctgtagcagcatgtggtcttcaacagagagagaaaatcaccatgtggtcttcagcagagagagaaaatctggtgctgcacttcagcaggccatgcatttctcctacaaagtgtgaccttatcaatatctttagccaatacggtcatgtcaatgaagtgaagccagatgttgcaaacagtgccagctctgcccaggtgatcttcaagaggcgcatggatgctgaggcagcgtttgcaggtgctgggaagatcaatgcccttggacctgcccttgtgagctttcgtctcactgacttcccagctagtgcttcaggaaataaagcttcccatgttggatcaaagagtgaatag

SEQ ID NO: 38100 - DNA, 423 bp, Zea mays
  Peptide Sequence Number=SeqID_79879
atgtggtcttcagcagagagagaacatctggtgctgcacttcagcaggccatgcatttctcctacaaagtgtgaccttatcaatatctttagccaatacggtcatgtcaatgaagtgaagccagatgttgcaaacagtgccagctctgcccaggtgatcttcaagaggcgcatggatgctgaggcagcgtttgcaggtgctaggaagatcaatgcccttggacctgcccttgtgagctttcgtctcactgacttcccagctagtgcttcaggaaataaagcttcccatgttggatcaaagaaatacggtgatctgttcctgctctgcatgccttcgggcgccatcaccaccagcccgaatgggccgacgccgcacgagtccgacaaggaggtgtccttctccacgcacgcgtgcagcttgtga

SEQ ID NO: 38101 - DNA, 495 bp, Zea mays
  Peptide Sequence Number=SeqID_79880
atgcgcagtgcggcgacggtgacgccggccgtggccacaacgagcctagcgttgtctctgcacctgccggagctgccgtcgcaggtgaaggacaagatcctgagcctggagctgatgggcgtggactatgggcgcgcgctggagcagagcccggcgctccgcgacgcggcgccggagtccatccacgcggtggtgtcgttcctccagtcccgcgggctccagttcaaggacctgggccgcgtcttcggcatgtgcacgtccgtgctgaccgccaacgtccgcgccgacctctgccccgtgttcgccttcctctccgcggacctgggcgtgccggagtcggcgcactggcgcgtggtgatcaagtgcccgcgcgtgctggcctgcagcgtccgcgaccagctccgccccgcgctcatctacctccgccgcctgggcttccgggttgggcggagactcgggtggacggcggtaggtgatgtgccgcatcagcattaa

SEQ ID NO: 38102 - DNA, 1080 bp, Zea mays
  Peptide Sequence Number=SeqID_79881
atggcggctacgacggcagaagagcgcggagaactcgtgggtgaaaaggcgctgcgagtgatgagaatggctatcgcactcgggggaatcccctttttaaagaaagagaagtcgaaccgccgctcacgccagtactgcgccccctcaggaccgccgcaaaggataaaaaaggtgaactttcaaaaccaatgcagtggtatcgagacaccccgcgcgtggcccagcaaaaacatcaagtgcggagaccacgagtcagtcagccgcgggacaggcgtgacagttggcgtgaccgaaggcggactggcagtagttgtgtcagtaagcgcacagaagcagcgtgccaatcgccaatctagctttggccccacctgcaggctcgtttcctcccctgaagcgggcccgggggccactgtcggtaccctgaatcagtggtaccccttactacagtgtgaaggcgtggagtccatgcggctacctctagccacgtggcaaacagcgcctgaccccaccacgacctccgcgagtacagaccggggccccgagacgggtcctagacctccctgtgtggggtccagctcaggtggagacccgatgctgccacgtggccagctgcccgtgactgcggcgacggtgacgccggccgtggccacaacgagcctagcgttgtctctgcacctgccggagctgccgtcgcaggtgaaggacaagatcctgagcctggagctgatgggcgtggactatgggcgcgcgctggagcagagcccggcgctccgcgacgcggcgccggagtccatccacgcggtggtgtcgttcctccagtcccgcgggctccagttcaaggacctgggccgcgtcttcggcatgtgcacgtccgtgctgaccgccaacgtccgcgccgacctctgccccgtgttcgccttcctctccgcggacctgggcgtgccggagtcggcgcactggcgcgtggtgatcaagtgcccgcgcgtgctggcctgcagcgtccgcgaccagctccgccccgcgctcatctacctccgccgcctgggcttccgggttgggcggagactcgggtggacggcg

SEQ ID NO: 38103 - DNA, 339 bp, Zea mays
  Peptide Sequence Number=SeqID_79882
atgtgcttttgctatcgggaactggggcatcgttcgtttgagtgctctcagcataaaaggtcggtgtggcatatgatttcttctgggaaggtggcagcgagcagtgcagatgcttctcgacctgagactgagatctcggtctggaggaggatcaaccttccggagccaagtgcagtcagtggtgatgatccgagggagtcacatcgaccttttgctgaagcaaactggaggaggctcacttcatcttcagtgctcaaggcgaagaaactggatggatctgatcctaaccctcaggttattgaagtggacggtgatgatatagggcgtgtgcagcagtga

SEQ ID NO: 38104 - DNA, 1753 bp, Zea mays
  Peptide Sequence Number=SeqID_79883
gaaggtgacgacacctgctcctattgcgcggcctgtctgcagccaggagggatgcagttccagcgtccagaagaggagcgtgtatggtctgtcgtcgacgacatcgggcatggctcagattgctcggagcgcagagaagctagtcggtgggtggcagctggtggaatccaaaaagtcaaaacggcaccgattgaagctggagcgacaacgtcagcggcggcccgtcccagaagacctggctggcagatgctttaactgcctctctcaggatcactttgtcttccagtgtacgcagaagacgagtctgcttaaaagaccggtgtggcagaggattaagtctgggaaggtggcggtgaacaacattgttgcttctcgacctgagactaagatctcggtctggaggaggatcaaccttccggagccaatgctcaaggcgaagaagctgcagatgaccagagcagaggatgatcttcagaaggcagtggtgattacttttatcagcgatcgtgagagagtcccagttgaagagattgctgagttaattgctcctaggctggagttggaagagagggcggccacattcactatcacctgcaggaaatggtcccgttttctgaactctaggggtgctgtgttacctaccttgttggacatagagcttcaggacaccttggagctaaaggatgtggctgtttaccgttgttctgcttggtgtttggacacgtccttggtgactgcttcaagagagctttggattgtcgagcctccctttgccgttgatggggtgtcctctggcaggagaacgttgatggatccaatccacatcacattctcgtctgccccgaggcaggatggatccgatcctaaccttcgggctattacttcgggcgatgatgttcatgagcgtttgggtccaagagatgagaacatgcagcagcggaacattagctcggagatggcagtatcagatctaatgagaacattggaatccgatggggggaccttgtctcctaggctgatagagaagactgatgacaaggtccttacttcacctgtgaaggcgaagcaactgaaagtttactctcgtcaaaggctcaagaacgtcctgactttggaaggggttggagctcccaatcctgtcactggcttcctccctccccctcagacgtggcagctgctgacacggttccgtctaaggatcctctcagatgttgatgctgtgttggcaattccgtctggaacgctaccttcctccctatcagatgtggcagcaacacacgcggctccgtcggaggctattgccttagacgttgatgctgagttggttggtccatctgaggatgaccttccagcaacacaagattctgtggagattagtgctcaagagcaattcatcagcagactgtcaaaccagatcacacgcgtcttaccagtcccaaaatctgtcagacgtcagtcctctacccccctggcggttccaaggcgcagccgacgtgtggcgggggttggggttgaatttaaaattcaggattggggaaaaaggtctaagaaacaagctatggtggctcttaatattattaaagacaatgaagaattcagccgtcaagctttagacgactacgccaagctcttcaagcatactctgtctcgtagtcatgtgcaggctcttgctgctctttttgggtggtctatcccaattaatttggaatatgataatgggactggggatattaccgcagcaagcatattttag

SEQ ID NO: 38105 - DNA, 687 bp, Zea mays
  Peptide Sequence Number=SeqID_79884
atgcggcgctggtgggccgctctaaagaatataatagaatttttcatctccattcggattcgtctagaagattatttaatacttctcttctttacacatagactcgaagaaagtacagcagataaagattctttattggctacagaaagacatgaaaacagtgaaaccaagaaggaattagctggttctcagaaaaagattgcggaattgctaactgaagtgcaagataccggtgcatatattgcagaacttgagggctcggaacagaatgcttccaccttaaaattacttacagaagcacaattgagaatcgaagaattaataaaaaagcttgaaggttcaaatagaaaatctgatagtcttctggatacaataacaagaattttccactttgttcatgcatcagtaagctcacagaattgtaaatcttcaaatgatggttatggagtgttatgcccagtatttgagcactacatggtggacttagccgactatgatacttggcttgctgatgaggctcagacgactcagattcttcttggcagtatgaaggtggaatttgccatagatctctttgctctgccctccactcaggagatgtgggagcgggcacaagctctctaccagccgagcagcaccactctctacatctccaccctggagctcgctagctctcttcatcagtag

SEQ ID NO: 38106 - DNA, 900 bp, Zea mays
  Peptide Sequence Number=SeqID_79885
atgctcgcacttggagatagcggcccagtgccgctgctgatggccggccaacagggcgaggtcgcacccccgtgtgccgaggtcaaccgtcaccaaggctgcctcgagcatctgtcagtgcatctctcgcactctccgtcgtgcaaggaagccacgagcagcagcctgtatgcccacagctgccgacgtctggagccgtgcggacaacgccagctgctgctcatgttgcactgctgccttgatttgcagcagccctgctcaaccatccggagcgaggcttgcatctttgcgagatcagcccttatgttggtccacaagtcccccatcgatggagctgatgggcacgctgacgtccaggatgtggtgacaaaattggcaggtgatgctgcccatgtagatggggacgccggttgccaggacggcgtgacgaaggtgacatgcagcgcagtccatggagatggggacgccgattgccaggacgatgacatgaaattggcagcagaagccatgggatcggatcgaaacccaagctctctgataccagatgttatggtcgctagatcggtgagggattggagagggggatgggagaggagaacgagtgaggagctaagcctaaagctgctcgaattccaaacgaagacgccggaggaactagtggaggcgaagaacactgaaggcatcgacgaaaaagtcctactgatgaagagagctagcgagctccagggtggagatgtagagagtggtgctgctcggctggtagagagcttgtgcccgctcccacatctcctgagtggagggcagagcaaagagatctatggcaaattccaccttcatactgccaagaagaatctgagtcgtctgagcctcatcagcaagccaagtatcatagtcggctaa

SEQ ID NO: 38107 - DNA, 402 bp, Zea mays
  Peptide Sequence Number=SeqID_79886
atgcaggcgcacaaaagagttgttgataaaccaattactgaagtcagagaagcgggaatatgcatgcgtgaaaattctttctatgtagacacagtgcgtagctttcgtgatagaagatatgaatacaaaggtcttaacaaaacatggaaaggaaaactcgcagaagcgaaagccagtggaaattctatgaaaattcaggaagcgcaggatatggttgttctatatgattctttgcaacttgctcacaagtgcatattgaattctttttatggatatgttatgcgcaagtatgtgaaatttaaagataacatggttttcatttgtattcatccgttagtattcgtggatgcttcaatcctggggtttcagctttcagatgtgccttccctgtggattggttaa

SEQ ID NO: 38108 - DNA, 1449 bp, Zea mays
  Peptide Sequence Number=SeqID_79887
atggattatcaaattccaagccaaatctctactattctatatgagtctaacgagggcgtccaccatgcccccgccccgactgtcgagtcctgcaatttcagccgtgtaggtcctgccgcgtctcgcgatcccagctaccccaccaagcctgtcctgggtttctgccgccggctgccatcacgcgatggatcccctctccctcctgcagctccctcgtgcctcgcgcccaccgctgcccctggccgcggccgccgcgccattggtctccgcgaggctaagcataagcggcggggtgcgccccgttcggaggtggcggcggcgctacgccgctcggctgtcggtgtcctccgtggcgaccgagacgccgaggagcagcagtcgtcgccgtccggggaggagcggttcgactggctggacaagtggtacccgctggcgcccgtgtgcgacctcgacccgcacgtgccgcacggcaagacggtgctggggctcagcatcgtggactggtatgatattttggttgagaatctcatggaccctgctcatgccccgtatgcacacaaggggatcatgcggggcatccgcaagaaggaagatcctggaagattctcatggaccctgctcatgtcccccttacatggatgttcgtacgccacaatgcaggcgcacaaaagagttgtcgataaaccaattactgaagtcagagaagcggaaatatgcatgagtgaaaattctttctatgtagacacagtgcgtagatttcgtgatagaagatatgaatacaaaggtcttaacgaaacatggaaaggaaaactcgcagaagcgaaagccagtggaaattctatgaaaattcagaaagcgcaggggagcaagatggtactctatggaaatggctggtgttgtaacatatactggtgcaaagattatccaaaatgcccgattacttgtagaaaaattggaaggccactggaactggatacagatggcatttgtgagcgttccattgagtttgaggttgatggaccttacaaggccatgatcttgcatgcctctaaagaggaagggattctgataaagaagaggtatgctgtcttcaatgaagatggcactttggcagaacttaaaggttttgaaatcaagcgtagaggtttcacctttaatcccagagcagtagctttcaagatccaaaagcggatgacggtggtgctagcagccggtggcggcatcggtaacatcctcgctaccagcgatagggacttttcgtgcagtccctcggcggcaccatcgtgcccgatagcatcagttcggacgaggattcatggaagagtttgtgagtgtccaattgcgatttgtgaagtctgctatatgctggatgatggttgcaaatacctagatggattcaagggtggcagtaggcacaaatgtgaaggtacactatcagcttattattga

SEQ ID NO: 38109 - DNA, 180 bp, Zea mays
  Peptide Sequence Number=SeqID_79888
atgtggctgaaggagcttcggcttagcacattaacgatggtgaaaggagaaaccgacttaagggggaaaagactgcttagtcctcgacagtttgccttatggtcaacagtgaatgtcaaggacatgaatggtatagcatccgagaacaaggaccaacactccacatttacacccacctaa

SEQ ID NO: 38110 - DNA, 213 bp, Zea mays
  Peptide Sequence Number=SeqID_79889
atgtggctgaaggagcttcggcttagcacattaacgatggtgaaaggagaaaccgacttaagggggaaaagactgcctagtcctcgacagtttgccttatggataatagtgaatgtcaaggacatgaatctatgtccttcatggccttcgtctgaagattattatattctaaggggaataatgcttcaaaggatgaatgtcattaatcgttaa

SEQ ID NO: 38111 - DNA, 240 bp, Zea mays
  Peptide Sequence Number=SeqID_79890
atgacgctcgacggtgttggaactaacagttcgaccaaatctaaagggatcacgtccgttgagtcaaccatcgagaccaaggccactgcgtaccatcctagagagctgcacatcattaaattaagaggagaaaagtccagaaaaggaccaaagtacaagccgaaaacaaaaggaaaagaaaaagaggaagaaacctgccctgcaacagagctaaatcatgcaggcctcaaaacaaaatga

SEQ ID NO: 38112 - DNA, 384 bp, Zea mays
  Peptide Sequence Number=SeqID_79891
atgacgctcggcgatgttgggactgacagttcgatcaaatctaaagggatcacgtccgttgagtcaaccatcgagaccaaggccattgcgtaccatcctacaacgcctcgcctgctcctgtcgttcacggacacggccgcccctgcccttgacgagctgtacaggaggagcggcgaccagccggagaccgagcagcaggccgacgaggaagacgaagaggtcgaggtcgtggagaacgcgacgggtatggctgccgcgcgaagtcttggtcggaggcagcggcgcccggctgccgcgcgaaggagaacgcgacggagatggagaacacgacggggatggaggagaactgacggcgacggcgctggagacggaacccgattttaa

SEQ ID NO: 38113 - DNA, 222 bp, Zea mays
  Peptide Sequence Number=SeqID_79892
atgacgctcggcgatgttgggactgacagttcgatcaaatctaaagggatcacgtccgttgagtcaaccatcgagaccaaggccactgcgtaccatcctagaaacggagctgcgaagatgaggcgggtgcggtgccgcagtgctaagctgacactgctgcatcgggacaaaagttggagtgctcatgataatgaagcaatgcgagatggatcggagtcctaa

SEQ ID NO: 38114 - DNA, 552 bp, Zea mays
  Peptide Sequence Number=SeqID_79893
atggaggaagacgactgcaaggagagacctggtcgactacggagctacgccagaacacttagagaattaggaaggcaaggtgacgaattggtcaggaccagtatgacgctcggcgatgttgggactgacagttcgatcaaatctaaagggatcacgtccgttgagtcaatcatcgagaccaaggccactgcgtaccatcctactccaccaaaaggcaggggggcatataaaaagtatgttgacgccttttcggagcgccaaacactcaacaagaactgtggcggtgccctctgcacaggggcggacggtccgcgcgcaggggccggacggtccgcggcctggtgcgaggcgcggtggtgctctctgcgcaagggcggactgtccgcggcctggggccggacggtccgcggcctggtgcgcggttgggacttctgcctgacggccggacggtccgcgccctggggccggacggtccgcacgtacgcagggacggcggaagatcgccgacggcgcctggatctcgctcccgggagagaccccgtcggggagtag

SEQ ID NO: 38115 - DNA, 1218 bp, Zea mays
  Peptide Sequence Number=SeqID_79894
atgacgctcggcgatgttgggactgacagttcgatcaaatctaaagggatcacgtccgttgagtcaatcatcgagaccaaggccactgcgtaccatcctactccaccaaaaggcaggggggcatatgttgagcaccaaattgagcgcggacggtccggccctgaggccggacggtccgcggtccggacggtcggcctgcccgagcctagacaccacctaggatctctactccccgacggggtctctcccgggagcgagatccaggcgccgtcggcgatcttccgccgtccctgcgtacgtgcggaccgtccggccccagggcgcggaccgtccggccgtcaggcagaagtcccaaccgcgcaccaggccgtggaccgtccggccccaggccgcggacagtccgcccttgcgcagagagcaccaccgcgcctcgcaccaggccgcggaccgtccggcccctgcgcgcggaccgtccgcccctgtgcagagggcaccgccacggttcttgttgagtgtttggcgctccaaaaaggcgtcaacatactttttggtgttgagcaccaaattgagcgcggacggtccggccctgaggcccggacggtcggcctgcccgagcctagacaccacctaggatctctactccccgacggggtctctcccgggagcgagatccaggcgccgtcggcgatcttccgccgtccctgcgtacgtgcggaccgtccggccccagggcgcggaccgtccggccgtcaggcagaagtcccaaccgcgcaccaggccgcggacagtccgcccttgcgcagagagcaccaccgcgcctcgcaccaggccgcggaccgtccggcccctgcgcgcggaccgtccgcccctgtgcagagggcaccgccacggttcttgttgagtgtttggcgctccgaaaaggcgtcaacatactttttggcgactccgctggggacaacacatatagacctatcaaatcggccctcaatggccggttcaaaagatagctctgaggttttcaccagcaatatcatcacaccgacatgggaagccttgccggctgaagaacagctcctgttcgaggagcgccaggagcagctgatccaagaagcaaaggcgaagttcctggctgacttcaaagtggacaggaacaacaaagtcgttcggcaacgggcgacagatctggcttcgctccgacctactacaattaccccaaat

SEQ ID NO: 38116 - DNA, 306 bp, Zea mays
  Peptide Sequence Number=SeqID_79895
atggcgacttcgggggattcgagcgtcgctgtggcgcttgaggcgcaggcgcagaccatggccgcccaagctcggctgctgaagcagatctgtgaccgcctcgacgcgcaagaccgccattgggagacgcttgagaagacagtggcgggtaacatcgcttctatcggtaccttagcgaccaagctgcaagaggtggaggttcctgctgctgttcgagcggacatggctcggtcgttgtcgcatcaggtggagactcaggtgggggaattccaatctctgacatgggagcgcattgatgccgtctga

SEQ ID NO: 38117 - DNA, 657 bp, Zea mays
  Peptide Sequence Number=SeqID_79896
atggcgagttcaggggattcgagcatcgctgtggcgcttgaggcgcaggcgcagaccatggccgcccaagctcggctgctgaagcagatctgtgaccgcctcgacgcgcaagaccgccattgggagacgcttgagaagacagtggcgggtaacatcgcttctatcggcaccttggcgaccaagctgcaagaggtggaggttcctgctgctgttcgagcggacatggctcggtcgttgtcgcatcaggtggagactcaggtgggggaattccaatctctgacatgggagcgcattgatgccgtcgacgaggccttatctgggcgtgtggccaaccttgaatcggctacggcggttctggagtcttggaggccatacgtcgagcgctctgtgggcgtcgcccaagccagcgtggagtctcttcgtgcggaggtcgcgcgtatgtccgaaccctgggggcggccgcaccacgcatctcctccacgtcggccggatgcgtcgatgccatacataccgccggtggcgcgtccgtctgctcctcggatgaacgtcgacgcaccacgcggacatcatgatgcttaccaccaccgggaggaaggccctgggtatccctatactcacggcttactcccgcacaatggtatgaatgctgggccctag

SEQ ID NO: 38118 - DNA, 258 bp, Zea mays
  Peptide Sequence Number=SeqID_79897
atgaccgaggaccctttaactggtcacatgcctcgtcatgggatccactttagtaagcatttctgcaaaacagagtctttgattattgagaagccttaccttgactcccttaacctgcatacccttgagagtcttttctttagtcgggtgaggaagcgacaaatttttgttgcttctgctctatggtggtgccaaaagaagaacacaaggaatgaagtgcgggaggaaaggatcctccatatagaactttttgtttaa

SEQ ID NO: 38119 - DNA, 258 bp, Zea mays
  Peptide Sequence Number=SeqID_79898
atgaccgaggaccctttaactggtcacatgcctcgtcatgggatccactttagtaagcatttctgcaaaacagagtctttgattattgagaagccttaccttgactcccttaaccagcatacccttgatagtcttttctttagtcgggtgaggaagcgacaaatttttgttgcttctgctctatggtggtgccaaaagaagaacacaaggaatgaagtgcgggaggaaaggatcctccatatagaactttttgtttaa

SEQ ID NO: 38120 - DNA, 1650 bp, Zea mays
  Peptide Sequence Number=SeqID_79899
atgagcgagagggaccttgaacggcaaggccgaccgagccgagggactcctacgcctccaggatacggatacctcactcatcaccttccacgaaaagcctcagcagccatagagaacaaacacacatacttagggaatgaactacctccagaccagaagagctgcgagacaacgaactccaagcggctcacgggcgaccactgcaccaacagcgacaacgacttccgcctcaggcggctagacagcagcaacgattgcctcagggcaaacgctactgtgaaaagtccctcgcccctgtcccccgcacgggggcgagaacaatccattaaagccaaagagctggaggtccggccgcaggtggcactgacggtctcgtcggcggaggcaaccccctttgcagtgggaggcctcacctgtggcggccaccacctcagcaccgacgacagcggccacctgcgcaccaacgctgcaccggcgaatggcggccgccccagcgcgcacaaggaggtcctcactcctatcctcgccacaggagcgaggacaagactatccaagaacacggaggccaccgctgtggcgtacgacgtgttgtgcgaccccccggtgcggccagcggcgcgggaagggccgtggacgtggccgaccagcgtacggcgcgaccgtcgcccgtgcggtggacggacagccacacctcgaccaggcagcaggtggcagttcgcctcctccgtaaggctggtggacgcccttctcccccgaatgctagaggaagaagcgggtcaccagcccatgcggaaggcaggacaccaactcgacttgccctcctccccagcacggatgatgaacatccttgaagctgagggcaagggagaggccatggcccggctcgctcttccccaccacaaggctggcggccatcattctggatctcctcactcgcaccccaagcgtcatgggcaaagtctctgccgacgtgctccagggttcccaccctacgacacgggggctaggtcccacatgacatacgagctgacccgaaatgcgaagagggcaaaccaccgcacacgaagcatggatcgggaaaggggatatttcgaaagggtccttcacagcgaaggaaacgggcctcgagccctcctactgatcaggggtttgaaggttgcgccctgcggggttcggcaaccgccccagagcactcgggctccgagccctttactgatcaggggatcgaaagctggcccctcggatgggttcgatagccgcccccgagcatgcagagtgagggatgaccctgggtacgtacgttacatggccaaggctcaggctacgctttcgaggtaccctaagacatttctgagaccagcgggaacgatttgtaatggaatcccaccggagggaggcaccgagccctcggaccctatcaaatgggtccgggtccagcgaatcactcgcagcctcgggcgcaacagggagctccgcctcgcccgacctcaggcctcgacctcagcctcggcctcgggagaagcctcggcctcgggaggagtcacaacctcgcccgacctcagcctcggcctcgggagaaatctccgcctcgcccgacctcggcctcggaccgactacgccataggggatacatcattaccctacacctag

SEQ ID NO: 38121 - DNA, 888 bp, Zea mays
  Peptide Sequence Number=SeqID_79900
atgctacttagacttagacatcggcagcgccctcggctctcaggcaaataccattacattcccttacaaacgggaccccagctccattcccgcaggaatgaactacctccagaccagaagagctgcgagacaacgaactccaagcggctcacgggcgaccactgcaccaacagcgacaacgacttccgcctcaggcggctagacagcagcaacgattgcctcagggcaaacgctactgtgaaaagtccctcgcccctgtcccccgcacgggggcgagaacaatccattaaagccaaagagctggaggtccggccgcaggtggcactgacggtctcgtcggcggaggcaaccccctttgcagtgggaggcctcacctgtggcggccaccacctcagcaccgacgacagcggccacctgcgcaccaacgctgcaccggcgaatggcggccgccccagcgcgcacaaggaggtcctcactcctatcctcgccacaggagcgaggacaagactatccaagaacacggaggccaccgctgtggcgtacgacgtgttgtgcgaccccccggtgcggccagcggcgcgggaagggccgtggacgtggccgaccagcgtacggcgcgaccgtcgcccgtgcggtggacggacagccacacctcgaccaggcagcaggtggcagttcgcctcctccgtaaggctggtggacgcccttctcccccgaatgctagaggaagaagcgggtcaccagcccatgcggaaggcaggacaccaactcgacttgccctcctccccagcacggatgatgaacatccttgaagctgagggcaagggagaggccatggcccggctcgctcttccccaccacaaggctggcggccatcattctgggtga

SEQ ID NO: 38122 - DNA, 423 bp, Zea mays
  Peptide Sequence Number=SeqID_79901
atggggaagcctgtcccatcactccttatgttcctcctcagtcgaggaggggtcccactcgacagtccaacccagtggcaagatggacgaccaagtcactccagcaaccatgtcctccaaagaacctgtaaaaattgtgccacaagcaaggatgagtatactaatactcagctagacttacccggggcactccgtccccacacacatcaaccgtccccatcgattccccgtcagcagatcagggctcaccgccttggcgtacaatgcctcactgaccccgactaccgtcgtgcagtgaccgcacttgtacccaccataaccggaatgggagaccacgtctcaggtcgcgtgaggggtaaagtctactgccaggttcaatcaggatttagcaacattatgctaaaggaagaaaagctaagttag

SEQ ID NO: 38123 - DNA, 312 bp, Zea mays
  Peptide Sequence Number=SeqID_79902
atggggaagcctgtcccatcactcctcatgttcctcctcagcagaggcggggtcccgctcgacagtccaacccggtggcaagatggacggccaagtcactccagcaaccatgtcctccaaagaacctgtaaaaattgtgccacaagcaaggctgagtatactaatactcagctagacttacccgtgaccgcacttgtacccaccataaccggaatgggagaccacgtctcaggtcgcgtgaggggtaaagtctactgccaggttcaatcaggatttagcaacattatgctaaaggaagaaaagctaagttag

SEQ ID NO: 38124 - DNA, 207 bp, Zea mays
  Peptide Sequence Number=SeqID_79903
atggagaacgcagaagtgcacattttgcacttgcacacggcgttcaggaatcgcgtgcaccggtggaagcgctgcggcttgcccaacggtgaacgcttccaacatcgcatcatcaacaatgtgaagaacttcgcgcatacggcgtatgcgcatggaaacgtgctcagtggcaaaatggagaggacagagacaaatgacaggggttga

SEQ ID NO: 38125 - DNA, 276 bp, Zea mays
  Peptide Sequence Number=SeqID_79904
atggagaacgcagaagtgcacattttgcacttgcacacggcgttcagggatcgcgtgcaccggtggaagcgctgcggcttgcccaacggtgaacgcttccaacatcgcatcatcaacaatgtgaagaacttcgcgcatacggcgtatgcgcatggaaacgtgctcagtggcaaaatggagaagacagagacaaatgacagggatgtctgtttattgaagagatctccctatatatatacatgtgcacaaagggcacttaacccttggatcaaataa

SEQ ID NO: 38126 - DNA, 240 bp, Zea mays
  Peptide Sequence Number=SeqID_79905
atggagaacgcagaagtgcacattttgcacttgcacacggcgttcagggatcgcgtgcaccggtggaagcgctgcggcttgcccaacggtgaacgcttccaacatcgcatcatcaacaatatgaagaacttcgcgcatacggcgtatgcgcatggaaacgccgcaaagccaaagcgggaggcggcgtgggcgccgggtggtgctgcgcggcgcgggcagcggccactcaaacccgtgtga

SEQ ID NO: 38127 - DNA, 723 bp, Zea mays
  Peptide Sequence Number=SeqID_79906
atggccggtgaagatgatgcggcctctcggggcatcaacagcgcgagcaggctgcccacgacgggcagcgatggtcccgacgaccacgggcgccggtggagatggcgaacgacgagcaactgccgctgcagtgggcggaggcggcggtggtgcctccaaatcgacgtccataggagcggatgcagacgatcccacgtcaaccaccggcaccggtggcgacggggatgcagtggggagtccacactccaccaccggcagcggaaccaccgctatccatccatggataacgcagaagtgcacattttgcacttgcacacggcgttcagggatcgcgtgcaccggtggaagcgctgcggcttgcccaacggtgaacgcttccaacatcgcatcatcaacaatatgaagaacttcgcgcatacggcgtatgcgcatggaaacgttcgccttatttggtttgaagtggaccgagtgaggccggcgtcatgccgcctttcatctgtgtctatgcacccacctacccgatcggtctctgcttcctcccgccgccggcagatggacacggcagcccgcaccgcaggcggccgcgctgacggcttgggccagcggacggcggggggatgcagtcatgcagatgcgcgcaaggtgcacggggtacggtcggtcgacggcgcatggctagtacaggaacagtgtggaaatggcaaggggaggaagatactgtag

SEQ ID NO: 38128 - DNA, 765 bp, Zea mays
  Peptide Sequence Number=SeqID_79907
atggatgtcgatttggaggcaccaccaccgcctccgcccactgcagcggcagttgctcgtcgttcgccatctccaccggcgcccgtggtcgtcgggaccatcgttgcccgtcgtgggcagcctgctcgcgctgttgatgccccgagaggccgcatcatcttcaccggccatcacccaagggggtggcctcatcttcctcctccaatcggagggcctaatggccctcgacccggccgccacgtcggccgtttggggggaggggggtggggaacagcgcggcgaacccggcgcgagcgcgctctgcggagcgcagccggtcctgccctggcgcgagagaagcccaggcgggcgcgcgcggctccagagcacgggcgcgaaaggcccccggcgagcaggcgggcccaccgaccccggcgcggctccgagtggatcgtgtggcccccgtggcggcgctcggcgaggctgccaaaccgggccaccagcggcggcactcggcgcggcccgccaaggcgagctcggcgcggcctcctgcggctccagatcttgggcgcgcacggcacccggccggccaggcgaaccggcgagctccaggcgctcggcctggcttccaccgagcacaggcgcggcgcagagaccggcgcgggagggcccgcaggccctttttccccttggcgcgacagctccctcctggagcctggtggcggctgggagcatcctgctccctggcggcggctggcaatagcccctgtgggcgacggcggctga

SEQ ID NO: 38129 - DNA, 186 bp, Zea mays
  Peptide Sequence Number=SeqID_79908
atggagtctattaatacttatcatggcgttaaaagattgaaacatacccttgagagtcttttccttagtcgggtgaggaagcgacaaacttttgttgcttctgctccaaggtggtaccaaatgaggaaaaagaagactgaagtgcgggaggactcggtcctccacttaggatcttttgtttattaa

SEQ ID NO: 38130 - DNA, 186 bp, Zea mays
  Peptide Sequence Number=SeqID_79909
atggagtctattaatacttatcatggcattaaaagattgaaacatacccttgagagtcttttccttagtcgggtgaggaagcgacaaacttttgttgcttctgctccaaggtggtaccaaatgaggaaaaagaagactgaagtgcgggaggactcggtcctccacttaggatcttttgtttattaa

SEQ ID NO: 38131 - DNA, 729 bp, Zea mays
  Peptide Sequence Number=SeqID_79910
atggattcgtgtccacagaccatcattattctgttatcaaagtggatacaaccaattcctgacctcgcgcgagtgctagaaaaatcactcgacttctatgtggcggaactgcccgaattattccaacttaagtgtccaagtcccgccttagaggctagaccacacttaaatgggaataaaccgtcaatccctcggatctggtccgacacggccactgacaggatcaagtaccacaatctcactcgaagatcagggctcaccgccttggcgtacaatgccccactgaccccgactggccgtcgtgcagtggccgcacttgtacccaccataaccggaatgggagacctcgtctcaggtcgcgtgaggggcaaagtctgcgggcaggttcactcaggtactaggcttaccgatttaccatatttttcggttatgcataaaaccggggcttgccttccaaagcagtggcaggcaggtcctctggtgcaggctcgggtgctggatctggggctacctcctgagcagctccttgctccggcacgaggatgtactctccgtcagcaagattacagtctagcgaatgcaatgaacattgggttgtcactggctattttagcttgttttaagaatttgaggcttaaggaaactaaggggtggttatttagttatgcttttcttaagtttcatgtcaaaaaggctctttctactacatcactatttgaaaaatgttaa

SEQ ID NO: 38132 - DNA, 354 bp, Zea mays
  Peptide Sequence Number=SeqID_79911
atgaaggccaagtcacaccatcaacaaataatcctaaggagtacctgcaaaaattatgccacaagcaaggctgagtatactaatactcagctagacttacccggttacaatggatcaagcagtctcattagctgcgagaagcagacgattcgaatcgagtttttatccttgcaagtgaccgcacttgtacccaccataaccggaatgggagaccacgtctcaggtcgcgtgaggggcaaagtctactgccaggttcaatcagaccacgcgtccccatggacccgtgtccacagaccatcaccattctgttatcaaagtggatacaaccaattcctgacctcgcgcgagtgctag

SEQ ID NO: 38133 - DNA, 553 bp, Zea mays
  Peptide Sequence Number=SeqID_79912
atggccaatagacctctggtcacctccaacgccgaccggcacattgacgtgaccgccaaagcctccccgacctcatatgacccttcgccaaagctctactgccaccgatccatggggatgcgctatctacgagacaaaattggaataaggattaaacgtgcggatacctgtgtcaagcgtttgaaagtactaagcactaccgagaaatatgatggagtctcccattccaaatatggtgggtacaagtgcggtcactgcacagtggcggtcggtgcccgtggtggaggaaagggcggaggggcttaccggtggcgagatagctccggcaagatggtcgaggatgtaggggcggtcgagacggtcacgtcgatgtacgggttgtcgtcgaggatggccggagtcggctggtccacgagcgccggtggggagctcgtcggcggcgagggctccggcttaactagggcgctctacggggctctggggaagctaaccgaggcacgagatcgagcggagatcggctggagtggcctggccacggcgaccgagtgctcgg

SEQ ID NO: 38134 - DNA, 411 bp, Zea mays
  Peptide Sequence Number=SeqID_79913
atgaccactctcagcgctgcctcctgctcgacgtcgtgcccaggcggcaaagcgtgcactggcgttctcccactcatgcccgagcgcgtgtcagagcagcccgcagccgagcttgcccgcgcccttaaaaaccaccctcggacgcgccacacttcactccacgcttgcccccgctatctcgaccccatccttagctccagcgagctctacaccgcccaccaaggcacccgagcactcggccgccgtggccaggccactccagcccatctccgctcgatctcgtgcctcgacaagcttccccagagccccgtagagctccctgaagcaagaaaccggacgctacatcgccggagaagcagttccaccatcgctggagttgtcttccccgtcggcgcgcgtggccacgactaa

SEQ ID NO: 38135 - DNA, 375 bp, Zea mays
  Peptide Sequence Number=SeqID_79914
atgccaaagttgtaccagagcaacagtagtcattggtatagatgtgctaactccacttcaattggccttattagttactatcggagggagatgcttcttgtagaagggataacacagtgcgctgcttggcacgggcgcactgtttgccagcagacccagcaggcgcgcaacctgctggatgaccttgacgccgcctgccagcggatgggacgggacgcattaaatgctgagagggcacgtcgcctgtcagcgctgtggcaggtggcgcgtcctttcctcaataaatgcaggggctgcacggctttacgtcaggcttggcccgatggcttatgtcatgggccacaagcagtgcgtctccgcctgagcgggaagtga

SEQ ID NO: 38136 - DNA, 471 bp, Zea mays
  Peptide Sequence Number=SeqID_79915
atggctagttccaaagattccactaaagtttccctaagcaacatcatgaagctgactctagagaagcgcaaggagacaaaagaaaaatatctagcacatttgaaggtggaccggtatcagaggatcatccaacaaggagagttcgagatggcatctcttctacctgcgacacatgcccccaatgagatgcttcttgtagaagggataacacagtgcgctgcttggcacgggcgcactgtttgccagcagacccagcaggcgcgcaacctgctggatgaccttgacgccgcctgccagcggatgggacgggacgcattaaatgctgagagggcacgtcgcctgtcagcgctgtggcaggtggcgcgtcctttcctcaataaatgcaggggctgcacggctttacgtcaggcttggcccgatggcttatgtcatgggccacaagcagtgcgtctccgcctgagcgggaagtga

SEQ ID NO: 38137 - DNA, 672 bp, Zea mays
  Peptide Sequence Number=SeqID_79916
atgggaaaggacataaagacattccctcttcctcatatcatcaacgcgtatgacgatgctattggaagaaccacccattcacgcttcaagatacctctcactattaacgatggcgttgtatgtagcttcacgaagcagagtggaaccgtagagttgctacggaaagcatctctcattatctgggacaaggcttctatgactaagagacaagtcgtggaggcactggacaatagcatgcgcgatataatgggtcaacccagactgccattaggtggtaaaaccattgtcctcggtggggatttcagacaggtcttgcatgttgttcgtaaagggtcaagggctcaagtggtcgcttcttcgctacggatgtcttacctatgggagtccatgtcccacttaaagcttgttaacaatatgagggcaaaaaatgacccttggtttctgaagtatttgctacgcgtaggcggtggaactgaggacacaaatagtgacgatgacatccgtcttcctgacgaggtatgtgtgccttatagtgggagtgatagcgatcttgacaacctaatagacttcgttttcccaaatctcaacaaaaatatgtctgatttgacctacatcacttcaagggcgatactatcaacgctgaacgactgggttgatatgataaatgtttag

SEQ ID NO: 38138 - DNA, 420 bp, Zea mays
  Peptide Sequence Number=SeqID_79917
atggcgttactgccattaggtggtaaaaccattgtcctcggtggggatttcagacaggtcttgcatgttgttcgtaaagggtcaagggctcaagtggtcgcttcttcgctacggatgtcttacctatgggagtccatgtcccacttaaagcttgttaacaatatgagggcaaaaaatgacccttggtttctgaagtatttgctacgcgtaggcggtggaactgaggacacaaatagtgacgatgacatccgtcttcctgacgaggtatgtgtgccttatagtgggagtgatagcgatcttgacaacctaatagacttcgttttcccaaatctcaacaaaaatatgtctgatttgacctacatcacttcaagggcgatactatcaacgctgaacgactgggttgatatgataaatgtttag

SEQ ID NO: 38139 - DNA, 405 bp, Zea mays
  Peptide Sequence Number=SeqID_79918
atggctgggcatctttctgatgttgattgtgtccagtggcacgtaaactgtaactacattgctaccggctctagcgacaaaactgtaagactatgggatgttcagacgggtgaatgtatacggatgtttattggtcataggagtatggttttgtcactggcaatgtcacctgatggacgatacatggcctctggagatgaagatggaacaatcatgatatgggatctctcgactggccgttgtgtttcaccactgctaggacacagctcttgtgtgcggacacttgctttcagttcaccccaagtttctttttatctgaacgcctcttgcatgagcctgcccaaagagcaagtgttcattgtagttaaaggaaaacctggcttgataagctggtttgcaatctaa

SEQ ID NO: 38140 - DNA, 336 bp, Zea mays
  Peptide Sequence Number=SeqID_79919
atgtcacctgatggacgatacatggcctctggagatgaagatggaacgatcatgatatgggatctctcgactggccgttgtgtttcaccactgctaggacacagctcttgtgtgtggacacttgctttcagttcaccccaagtttctttttatctgaacgcctcttgcatgagcctgcccaaagagcaagtgttcattgcagttaaaggaaaacctggcttgataagctgcaaaggcagctcatcagctaaccgactgagactgcttaaatccctgcctacaaaatcagctcatgtctatagcctgcggtccatcaggaaatgtttgagcgggtga

SEQ ID NO: 38141 - DNA, 993 bp, Zea mays
  Peptide Sequence Number=SeqID_79920
atgtaccgagaggcgttgtggcagaagagaggtcgtcctcgggagttatatccggacgtatctagtaaggatgctcctgttcctcctgaactccccatgcctaactgtgactgtggcagactggcttgggtacatcaatcacaacatccagacatggctgctcgctgctactacctttgtggcactttggacggacatcagaggtgtttctttttccagtggatcgatggtcctgataaatttgactctcgatatcttcttttcgttaattggttgagtggaaagaccagtcatgagcgttttaagcgttgggtacctcctcccccgaatcctccaccaatgacggatgcggagaaggaggtagcaacagaaagacggatggactcaccgcctcgatgcgattgtggagaccgtgctgtcatcgacgaagactatgacaagcagttctgttgtccgaacattgattatccatacgggtggtgtaagtgtcgtttcagagagtggttgtatggtcctttgtcccattggctagagccagaggtaaaggaaaagagatacatggggtgggcgacagaagatgtcaaatttgatccagtactctgcaaatgtggagacgaggaaatgcagttgagagagttacgacgacaaaggagagagattggaagcggcgtaaactatttggccgatgaggcgcatgcgagatatgttcaggataaaatggcaacggttgagctgatggaggaggaggacgacgacacatctagattgagtgagcttatcgccctcgcagaggcaggattacatgaagaagaggaggacgacacgtcaaggttgagtgagctcatcgcactaactgaggcaggattacgtgctcaagaggaagaggatgagtttatgtctcaggccgccgcagaggtagaggcagcttcttacaagaagaagtctgatgaggctgaggctgaggatgagctattctcccaagctgcagattaa

SEQ ID NO: 38142 - DNA, 564 bp, Zea mays
  Peptide Sequence Number=SeqID_79921
atgaggcagggggtgatccaagatctggactacgccttgaggacaaagaagggaggtttgacccccgaggaggagaagacgctcctggcttacaatttacttcctggtgtttacttcatcgtgggttcaatactgggcactttcgcggggttgttgggtacccacaaaggatggggattggggaggacaatatctctagataaagttcaaagaaccgtgggtcatctggcaagcaacattattccattcttatggctgtattttgagagctccttccctaaatgttacaccatggaagttgttgttatgctgctatcaagtgggcacaccagaggcaaacgaattatattctgcttttgttattgctcctacttttcaaggatatttgtatgcttacccttcgccgtcgctgcgctcctgctcctcgccttctgcaacagcaccagggagagggctatactaatgatgcagacagcagcgggctgtaggaaggttcctccggagttgcccgagccggcattcgacatcaactttgcgtgtgatggcatacaacaccgcggctag

SEQ ID NO: 38143 - DNA, 780 bp, Zea mays
  Peptide Sequence Number=SeqID_79922
atgccgcgcaaaagccccggcattccgtcgcggtggccgtgcgtgcccccgctggccgcggctcgctccgcgtctcccgcgcagggcgcactcccacgacgctgcgtttcccttcgctttcgcgtcgtcccgctccgtctgcccctcactcgcccggcaagtcccgatcccgaggacttgtcagtgaagctgtcgtcgccccggaacggacagtggactgtggcaccttttcatttgtcctgtgggatggaagtacttgaagtggactccttcgtctttctccttttccagaacgaacagtggactgttgcaccttttcgtttgtcctgtgggatggaagtacttgaagtgtgcaagttgtgcatgtatacattggactccactgtactggaaaacgatcaacagtccacaggacaaagaaaggcccacacaggacactcctccttcgtctttctccttcctcgcagctctctgctgcattcgcgaacagccatcgaccctacgactacgagtagcgagagaggattgatggcggcgcagctgcggtacatgataagccattatttcggtaccccacctgcacctggcaagggggtgatccaagatctggactacgccttgaggacaaagaagggaggtttgacccccgaggaggagaagacgctcctggcttacaatttacttcctggtgtttacttcatcgtgggttcagtactgggcactttcgcggggttgttgggtacccacaaaggttgctcactccctcagctctcgatttaa

SEQ ID NO: 38144 - DNA, 741 bp, Zea mays
  Peptide Sequence Number=SeqID_79923
atgggcctctgctatggcaagtcggcggcggtccaggagccggcggtagcggaggagaacaacaaagccgatggcgcggcggcgggccgaggcgatggcccaccagcgtcgccggcgaaggtgtctcggacgcccaagcagctcaagttgtccttctacttgccgagcccgctcccgccctccagctacaagggctcgccggcaaactccagcgtcgcgtccacgccggcgcgcgatgggttcaagcgcccgttcctgtcgccgtcgcctgccaagcacattcgtgcgctgctggcgcggcgccacggctcggtcaagtccatctccgagggcggcgaaccagaccttgggctggacaagagcttcggctactccaggcactttgcggccaagtacgaccttggtcgagaggtggggcgcggccactttggcttcacctgtgctgccaagtgcaagaagggcgagctcaagggcgaggacgtcgccgtcaaggtcattcccaaggccaaggccgcacttgaagaaatcttatatcagtttgaggaaaaactccaagctgaaagaaaggaagctgctaggaagcaggaagagttgcaagcacaactacaagctcaacatgtcgcacttgaagaaaaccaaagtttgctgtgccagaccccagaggaagtgaaggggatgcataccaagtttgaagagaccaatgcactgctacgagctgtcctgaaacttcagaaagattga

SEQ ID NO: 38145 - DNA, 675 bp, Zea mays
  Peptide Sequence Number=SeqID_79924
atggcgcggcggcgggcccgaggcgatgggcccaccagcgtcgccggcgaaggtgtctcggacgcccaagcagctcaagttgtccttctacttgccgagccccgctcccgccctccagctacaagggctcgccggcaaaactccagcgtcgcgtccacgccggcgcgcgatgggttcaagcgcccgttcctgtcgccgtcgcctgccaagcacattcgtgcgctgctggcgcggcgccacggctcggtcaagtccatctccgagggcggcgaaccagaccttgggctggacaagagcttcggctactccaggcactttgcggccaagtacgaccttggtcgagaggtggggcgcggccactttggcttcacctgtgctgccaagtgcaagaagggcgagctcaagggcgaggacgtcgccgtcaaggtcattcccaaggccaaggccgcacttgaagaaatcttatatcagtttgaggaaaaactccaagctgaaagaaaggaagctgctaggaagcaggaagagttgcaagcacaactacaagctcaacatgtcgcacttgaagaaaaccaaagtttgctgtgccagaccccagaggaagtgaaggggatgcataccaagtttgaagagaccaatgcactgctacgagctgtcctgaaacttcagaaagattga

SEQ ID NO: 38146 - DNA, 327 bp, Zea mays
  Peptide Sequence Number=SeqID_79925
atggtgagagaacgaagaacacaaacaaacacaatgagcaagaacacaagagacacaagatttatcccgaggttcggtcacaccaccaaggtgccctacttcctcgttgaggcgcccacaaagagccgggtctctttcaaccctaatcctccctttgccgaccacaaagctcagctgcagctgaagaagctcaactcagctgaagtcaagttcagctggaaagctcagctgcagctgaagaagctcaactcagctgaagtcaagttcagctggaaagctcagctgcagttgaagaagttcagctgcttttcaacaagaacactctag

SEQ ID NO: 38147 - DNA, 243 bp, Zea mays
  Peptide Sequence Number=SeqID_79926
atgagcaagaacacaagagacacaagatttatcccgaggttcggtcacaccaccaaggtgccctacttcctcgttgaggcgcccacaaagagccggctgaagaagctcaactcagctgaagtcaagttcagctggaaagctcagctgcagctgaagaagctcaactcagctgaagtcaagttcagctggaaagctcagctgcagttgaagaagttcagctgcttttcaacaagaacactctag

SEQ ID NO: 38148 - DNA, 348 bp, Zea mays
  Peptide Sequence Number=SeqID_79927
atgagcaagaacacaagagacacaagatttatcccgaggttcggtcacaccaccaaggtgccctacttcctcgttgaggcgcccacaaagagccgggtctctttcaaccctaatcctccctttgccgaccacaaagctcagctgcagctgaagaagctcaactcagctgaagtcaagttcagctggaaagctcagctgcagctgaagaagctcaactcagctgaagtcaagttcagctggaaagctcagctgcagctgaagaagctcaactcagctgaagtcaagttcagctggaaagctcagctgcagttgaagaagttcagctgcttttcaacaagaacactctag

SEQ ID NO: 38149 - DNA, 186 bp, Zea mays
  Peptide Sequence Number=SeqID_79928
atgagcaagaacacaagagacacaagatttatcccgaggttcggtcacaccaccaaggtgtcctacttcctcgttgaggcgcccacaaagagccgggtctctttcaaccctaatcctccctttggcgaccacaaagctcagcagcagctgaagaagctcaactcagctgaagttcagctcagctga

SEQ ID NO: 38150 - DNA, 294 bp, Zea mays
  Peptide Sequence Number=SeqID_79929
atgagcaagaacacaagagacacaagatttatcccgaggttcggtcacaccaccaaggtgccctacttcctcgttgaggcgcccacaaagagccgggtctctttcaaccctaatcctccctttgccgaccacaaagctcagctgcagctgaagaagctcaactcagctgaagtcaagttcagctggaaagctcagctgcagctgaagaagctcaactcagctgaagtcaagttcagctggaaagctcagctgcagttgaagaagttcagctgcttttcaacaagaacactctag

SEQ ID NO: 38151 - DNA, 1374 bp, Zea mays
  Peptide Sequence Number=SeqID_79930
atgtcttcgcgctcccttatgcatcgcgtctttccaccttccgagcccccagatggggaacacccgcaatccttccgccttgtcattggaggaatgcaacttcgtggaagttggtacctttcagccatcgttcggcttcaaggattttcatcaggcagcccggccgcatcccctcgccggcggtcacccaagacggtgaccaccagctcctgggtggggagaagcaagccgggctgcgatcttggtcccgccctcagcttcaaggatcttcaacatccttgctggggcggaggccgggctgagccggagctctacctcccgcgtgggttcgtgggtcagcctctccctcagcattcaagggagagggcgctcaccggcctagcgggagggtcggactccgataacgcggggccgatcggcggcgggcatcgtcagcttcagcgcgttgggctcgctggctcagctgactcggctcccggtgccccctctcgccgcgagggcggttgtcgcgccgcgcgcaccggaggaccgcccaagacgtcgcgtgccgctagggcggcgttcgtgttctggggctgtcctgcctttgccccggtacggcgcctctgcgcggaggtcagtgctccgctcgtccgggaggatctgagtggggatctgccggtgggcagatggctcctgtcgttggtgctgaggtggcggcggctggagaagtcctcgtcgccgacgggatcaccgccaccatccgcgctccgggcctctggctctttgtacttgtcctcgcccctcgagcgtagacgtgggcgagggcattgttgcagcggcgcccgccccgaggccattgctgctgcaattcgaccacccggagcgggggtcgttgtcgctgctgctggagcgggcgacggtgggcgacctggagctttgtcgcctcgcggccccccccaatgtggggggttgaacccttgcccgctcttcgatgagccgaagccggaggtagcggcgtcagcacggacagaggcagagttggctcgaaaagaagatttggtcggccagagcctggccgggtcgtccactggcgggaccgacgccggagttgagttgccgaagctacgagccgggctgatgtccttgggggatggctggctgaggcttcaaggtggccggccgagccgtttgctcgagccggattcctggagaagaccctggcggcgatggcccgggcatggtgctgatgtcgtccttcggagtggagatcctccgaccgcgtcgccgtccgaggctaggccggacctcgccgaaggtgtagatgacgccgagggtgctgctgctcccttcaactgtcaagatccgagcctgcaggatcgggttatcttgtag

SEQ ID NO: 38152 - DNA, 1374 bp, Zea mays
  Peptide Sequence Number=SeqID_79931
atgtcttcgcgctcccttatgcatcgcgtctttccaccttccgagcccccagatggggaacacccgcaatccttccgccttgtcattggaggaatgcaacttcgtggaagttggtacctttcagccatcgttcggcttcaaggattttcatcaggcagcccggccgcatcccctcgccggcggtcacccaagacggtgaccaccagctcctgggtggggagaagcaagccgggctgcgatcttggtcccgccctcagcttcaaggatcttcaacatccttgctggggcggaggccgggctgagccggagctctacctcccgcgtgggttcgtgggtcagcctctccctcagcattcaagggagagggcgctcaccggcctagcgggagggtcggactccgataacgcggggccgatcggcggcgggcatcgtcagcttcagcgcgttgggctcgctggctcagctgactcggctcccggtgccccctctcgccgcgagggcggttgtcgcgccgcgcgcaccggaggaccgcccaagacgtcgcgtgccgctagggcggcgttcgtgttctggggctgtcctgcctttgccccggtacggcgcctctgcgcggaggtcagtgctccgctcgtccgggaggatctgagtggggatctgccggtgggcagatggctcctgtcgttggtgctgaggtggcggcggctggagaagtcctcgtcgccgacgggatcaccgccaccatccgcgctccgggcctctggctctttgtacttgtcctcgcccctcgagcgtagacgtgggcgagggcattgttgcagcggcgcccgccccgaggccattgctgctgcattcgaccacccggagcggggggtcgttgtcgctgctgctggagcgggcgacggtgggcgacctggagctttgtcgcctcgcggccccccccaatgtggggggttgaacccttgcccgctcttcgatgagccgaagccggaggtagcggcgtcagcacggacagaggcagagttggctcgaaaagaagatttggtcggccagagcctggccgggtcgtccactggcgggaccgacgccggagttgagttgccgaagctacgagccgggctgatgtccttgggggatggctggctgaggcttcaaggtggccggccgagccgtttgctcgagccggattcctggagaagaccctggcggcgatggcccgggcatggtgctgatgtcgtccttcggagtggagatcctccgaccgcgtcgccgtccgaggctaggccggacctcgccgaaggtgtagatgacgccgagggtgctgctgctcccttcaactgtcaagatccgagcctgcaggatcgggttatcttgtag

SEQ ID NO: 38153 - DNA, 426 bp, Zea mays
  Peptide Sequence Number=SeqID_79932
atggctgttgctgccgcagcccctccgtgggcctccttaggccctgacactacacccctactggacaagcaactcgccctcgagctgccgcataacggtggcgtcgcccatggggacggagacgttgtcaacgaagatgatgtgatgaaatttggcgttgtccctggggatgggcacgccgacgtccaggatgtggtgacaaaattgacaggcgatgttgcccatggagacagggacgccggttgccaggatggcgtgacgaaggtggcatgcggcgcaacccatggagatggggacgtcggttgccaggacggcgtgacgaaggtgacatgcggcgctgtccatggagatggggacgccggttgccatgatgacgccgcgaaattggcagcagaagccatgggatcaggtcgaaacccaagatag

SEQ ID NO: 38154 - DNA, 219 bp, Zea mays
  Peptide Sequence Number=SeqID_79933
atgactaaccgaataatcgcgattcgtttccgagcttcgaggaatcgacggtcaagctttggcaaccaagagatcaaactcttcgagttctacgaggatgaagaccctgagcatctgtttggtggtgacaaggatgatgtttatgactatggtaatggtaaagaaggcgtcgaggtggatctccaggagttccaggacgtcgacgagttcgaggattag

SEQ ID NO: 38155 - DNA, 300 bp, Zea mays
  Peptide Sequence Number=SeqID_79934
atgactaaccgaataatcgcgattcgtttccaagcttcgaggaatcgacggtcaagctttggcgaccaagagatcaaactcttccagttctacgaggatgaagaccctgagcatatgtttggtgaaggcaagaactggggtgtagttcgcttcgccgtcgtgctgttaatggggctcggtgtatgcggctcgctctgccaagatggtgacaaggatgatgtttatgactatattaatggtaaagaaggcatcgaggtggatctccaggagttccaggacgtcgatgagttcgaggattag

SEQ ID NO: 38156 - DNA, 402 bp, Zea mays
  Peptide Sequence Number=SeqID_79935
atggaatctgccgctgagctatgtgcccagaacttctccgcggcggttgatgcagcccgtgacacattgagtgcttctgctgccacctgtgtggttgctggtgatctctgcgccacagcatcattaggtaaccatgtggtttctacgcttgatgttcttgaatccgctgtggaggcagaaaaagtgctatgtgttcttatcaacaagcgagtgcaacagtcgtttgtgcttaggagacattggccaaatactatgaggcatcaggctgagggcatctggctgacggcatcaggctgtttgctgctgtgctgttctgttcatatcctctcagttcatttggcagatggtttgtttgtctttccagtgcagcagaaggtttcctcatatgcctgtccatggtaa

SEQ ID NO: 38157 - DNA, 300 bp, Zea mays
  Peptide Sequence Number=SeqID_79936
atggaatctgccgctgagctatgtgcccagaacttctccgcggcggttgatgcagcccgtgacacattgagtgcttctgctgccacctgtgtggttgctggtgatctctgcgccacagcatcattaggtaaccatgtggtttctacgcttgatgttcttgaatccgctgtggaggcagaaaaagtgctatgtgttcttatcaacaagcgagtgcaacagtcgtttgtgcttaggagacattggccaaatactatgagaaacctgagtgctgttttcaggcttgtgatacatgtgaggtga

SEQ ID NO: 38158 - DNA, 177 bp, Zea mays
  Peptide Sequence Number=SeqID_79937
atggcccgcctgtcagcgcacgcgccctcggctgcagatctaatctcagctgttggttttagatctcacgacaacgagcagtccgaggttcctgagtgtgttgttggagacctccctgagcaaccacctggtgaaggcaaatgtcctctgacccattatgtcctacatactttatga

SEQ ID NO: 38159 - DNA, 231 bp, Zea mays
  Peptide Sequence Number=SeqID_79938
atggagaccgcgccaagtcaccccgagctccgccccgaggttagacacctgtacccgtgcccaattttcccaattgcgctctgtggtcggccaatttcggcttcgccggagttcggccacggagacaacgagcagtccaaggttcctgagtgtgttgttggagacctccctgagcaacaacctggtgaaggcaagtgtcctctgacctattatgtcctacatactttatga

SEQ ID NO: 38160 - DNA, 243 bp, Zea mays
  Peptide Sequence Number=SeqID_79939
atgggcttcactccaataccagctgtcacggaaccttccaagatattaggcccacctacagatgtcattgttctaaggacctcagacagtcatgcaagtgcgctcaagggctcggcagaggaatctccacaactgggagtctctcgcccttacaataagaatcaaagtgaaagcactagagtaagggagggaagcaccacacacaaatccacagcaatacgcacacacacagccaagacttga

SEQ ID NO: 38161 - DNA, 369 bp, Zea mays
  Peptide Sequence Number=SeqID_79940
atggacgagagttgcactcaactcctctcaagtgatccaatgatcaacttgaataccacggtgttcttctttctttactctttaccatttccgaggaatctccacaacttggagtctctcgcccttacaataagaatcaaagtgaaagcactagactatggtgggtacaagtgcggtcactacacggcgatagctgaggtcagtggagcattgtatgtcaaggcgtgcttttggcaaaccaaacccctcagccaaacaccaggtacgcttcaggacatggttgatggtgtgacttggcctgccaccctgccaccgggttggatggtcgagtgggatgctgctccagcaggagaggagcaggaggagtag

SEQ ID NO: 38162 - DNA, 504 bp, Zea mays
  Peptide Sequence Number=SeqID_79941
atggatgttactattagggaagaggtgtttagcaggcatgttaatttcaggtttaaactcctcccgctgctcgccgatttaaagagcttatttcaaccatttaactatgtgtccaaccattttgggctggtcattgctgatcatttgtctactgaggaagttgaggatataaaggatatgtttaagactatggatactgacaatgatggaattatccaggagtgcaggaggagctctagtgctctaccaaacacgacccgcgctgcccacccgcgcgacccgccgcacgcagcaactgcgcccgccgcgcgcggcacccacgccgcccaccgtgccccttaccgtgccgccgccggcccgcccaccatgcccgccaccagctcgcccaccgcaccgccgccagccagcccatcgcgctacagacgcgctaccggtaccctctccctctccgcccggaagttcttgggtaaccatcgcactactgataaccatctccctctctga

SEQ ID NO: 38163 - DNA, 3555 bp, Zea mays
  Peptide Sequence Number=SeqID_79942
atgggcaactgctgccgctcgccagccgccgtcgtgcgggaggacgaggcgtgcgaagacgagggcgtcgtccacctcgtcatggagctctacgagggtggcaagctctttgaccgcatcgtcgcgcgggggcactacaccgagcgcgccgccgccaatgtcacccgcaccatcgtcgaggtcgtccagctctgccagcggcacggtgtcatccaccgcgacctcaagccggagaacttcctcttcgccaataaggataactcgccgctcaaggccatcacttcggtctctccatcttcttcaagcctgagcttatttcaaccaattaactatgtgtccaaccattttgggctggtcattgctgatcatttgtctgctgaggaagttgaggatataaaggatatgttcaagactatggatactgccaatgatggaattgacaagtcttctacctccaacctaaagattgaagcacttgtattaacaaggcttgttatggtttcacattcgccatctgtgtttcatccatacatcaagacactttctgcacctatattgtctgctatcagagatagatattataaagtcactgttgaggctttgcggacaaccgcagttgattttaagccatacattggtccaatctataatgcgatattgggacgtttggccaatcaagatcaggatcaggaggtaaaagaatgcgccatatcttgcatgagtttggtggtctctacttttggtgatggtcttgaaagagaattaccagcatgccttcccatactcgttgacaggatgggtaatgaaattacaagacttacagttgtcaaggatactgctgaggcgtaccttggcaagaagatcaacgatgctgtcgtcactgtccctgcatacttcaatgatgcgcagaggcaggcaaccaaggatgctggtgtcattgccggcctcaatgttgctaggatcatcaatgagccaactgctgctgctattgcctatggtttggacaagaagggtggcgagaagaacatccttgtctttgaccttggtggtggtacttttgatgtcagtatcttgaccattgataacggtgtgtttgaggtgctggccaccaatggtgacacccatcttggaggtgaggattttgaccagaggatcatggaatacttcatcaagttgatcaagaagaagtacaacaaggacatcaacaaggacaaccgtgctcttgggaagctgaggagggaagctgagcgtgccaagagagccctgagcaaccagcaccaggtccgagttgagatcgagtccctctttgacgggaccgatttctcggagccgctgacccatgccaggtttgaggagctgaacaacgatctgttccgcaagactatgggccctgccaagaaggccatggaggacgctggccttgagaagagccagatccacgagatcgtcctggttggtggaagcaccaggattcccaaggtccagcagctcctgaaggactactttaatggcaaggagcccaacaagggtgtgaaccatgatgaggttgttgcctttggtgccgcggtgcagggaagcatcttgagcggcgagggtggtgacgagacaaaagatatcctcctccttgatgtggctcctctcaccctgggtattgagaccgttggtggagtcatgaccaagttgatcccgaggaacactgtcatcccgaccaagaagtcgcaggtgttcaccacctaccaggaccagcagaccatttgtctccatccagttattgcgaattcacctctacgtattgatctctcgtgtgtcctggatcatgttgtttctgagctcacagctttccttcgtaagtccgagtgccgtacgatatgcagcacatccagtgaaagtccacttggcaaattgtctgcagcaatgtttctgggagctctgttcgccgcggtgaccacgtcggcaccagcagcacgcagcctgctggtgtacggtgtccctggcctcgtcctgctttggcagggcgggcggctgctgagcaggctatggcgggagcctcggcggctggagcgggctctgcgcgcgcagggtctccgcggcacctcgtaccgcttcctgacgggcgatctgagggagttcggccgcctcaacaaggaggcttgggccaggccgccgctgcccctggggtgccacgacatcgtgccccgcgtcacgccgttcctctgcggcaacgtccgggagcacggcaagacgtgcttctcttggttcgggccgatccccaacgtgaccatcaccgacccggcgctggtcagggacgtgctctccaacaagttcggccacttcgggaagccccagttcccggccctgacgaagctgctctccgacgggctcaccagccacgagggcgagaaatgggttaggcacaggaggatcctcaaccctgcgttccatctcgagaagctcaggctcatgctgcctacgttctctgcatgctgcgaagagcttgtcggcagatgggcggcgcggtgcctgggtcccgacggcggctcgtgcgagctggacgtctggccggagctccaggccctcacgggggatgtcatctcccgcaccgcgttcggcagcagctacctcgaaggaagaaggatcttcgagctccagtccgagcaagccgagcgcttcgtgggtgccattcagaagatcgtgatcccaggctacatgtacttgccgacaaaaaacaacagaaggatgcggcagatcaacaaggaggtgaactcgattctgcgaggggtggtcgggaagaggatgcgggctatggctatgagagaaggcggcgaaagcaccaccggcgccgacgatctcctgggcctgctgctggagtccaacaacacgaggcacgaaggcgagaccggccacggccagcagtccgcccttgggatgacgatcgaagatgtcatcgaggagtgcaagctgttctacttcgcagggatggagacaacgtcggtgctgctgacatgggccatggtcctgctgagcatgcaccgcgagtggcaggaccgtgcgagggaggaagtgactggcctgttcgggagagacgacaacaagccagagtacgagggactgagccgcctcaaaacagtgaatatgatcctctacgagactctccggctatacccgccggccgtggtgttcagccggaaggcctacaaggagatgaaggtcggaggcgtgacgttgccggccggcgcgatcattgagatccccgtcctgttcatccaccacgaccccgacacctggggagacgacgcgcacgagttcaagccggagaggttcgccgagggggtctccagggcgtgcaacggcgcctcgggcgcgttcatcccgttcggctggggccctcgcacgtgcatcggccagagcttcgcgcttctcgaggccaagatggcgctgtgcgtcatccttcagcggtttgagatggagctcgcgccgtcgtatacccacgcgccgcataccgtcatgacgctgcatccgatgcacggtgcgcagatcaagctcacggcgatctga

SEQ ID NO: 38164 - DNA, 279 bp, Zea mays
  Peptide Sequence Number=SeqID_79943
atgtcgccgataggaaagaaatattggaccggccatgttacatcaaaaaaagatcaggaacagtactggatacaaaatgaaaaaccatatcactatgtatcagtacctgaatttgttgcaaagttcaagaaatttcatatggggaagagcctcaagaaacaactttcggtgcctttccataagaggaaaatacacaaatatgctttggtcttctctaagaagtctgtctctactttggagcttctcaaggtctatggtccaaagaatgacttctcatga

SEQ ID NO: 38165 - DNA, 4617 bp, Zea mays
  Peptide Sequence Number=SeqID_79944
atggagacgctgagccgaggcctgcacggcatgtcgagccccgacgccaccccctacttctcgggcgcgtcgtcgcggcgccgcagcggcgccgacgaggtggacgacgaggaggcgctgcagtgggccgcgatggagcggctgccgtccttcgagcgcctgcgcacgggcctcgtgcggccggcggacgcttccgacggcggcagcgacagcggccgccgcggccggaggcgccggcacgcgcatgaggaggtggacgtgcgcgcgatggggctcgcgcagcgccaggccttcgtggagcgcgtgttccgggtcgccgatgaggacaacgagcgcttcctcaggaagctccgcgcgcgcatcgaccgcgccggtatccagatccccacggtggaggtgaggttccggggcgtcaacgtgcaggcggagtgccacgtcggcacccgcgcgctgcccacgctggcgaacgtctcgctggacgtggccgactcgctgctgggacgcgtcggggtcaagctcggcaagaggaagacgctccacatcctcaaggacgtctccggcgtcgtgcgcccgtccaggatgacgctgctgctcggcccaccgtcgtccggcaagacgacgctgctgctggcgctggccggcaagctggaccccactcttgaggtcagcggggaggtcacctacaacggctacgggctggacgagttcgtgccgcagaagacggcggcgtacatcagccagaacgacatccacgacggcgagatgaccgtcaaggaggtcctcgacttctccgcgaggtgccagggtgtgggccagagatacgagctgctcaaggagctggcgaagaaggagaggcagcagggcatatatcccgacccggaagtcgacctgttcatgaaggcaacttcagttcatggagccactctgcagacggactacattctcaggattctcgggctggacatgtgcgcggatatcatcgtcggcaacgagctaatgcgcggcatctccggcggccagaagaagcgcctcacaacaggggagatgctggtcggcccgaccaaggtgctattcatggacgagatctccacgggcctcgacagctccaccaccttccagattgtcaagtgcatccagcagatcgtccacctgggcgaggccaccgtcctggcctcgctgctccagcctgcgccggaggtcttcgagctcttcgacgatgtcatgctgctgtccgaggggcagattgtctaccagggcccccgggagtacgtgcttgagttcttcgaggtgtgtggcttccggtgcccgcagaggaaaggtgtccctgatttccttcaggagatggaccaccatgtcgccgataggaaagaaatattggaccggccacatgagattgcgccattaggtttatcaggaaaatttaatgatttttttcattctgccatctggcactgtggcacatccaagtacagaacacaaagttgcatgttggggagcttgcattgtctaaaatggcccaaagttacatcaaaaaaagatcaggaacagtactggatacaaaatgaaaaaccatatcactatgtatcagtacctgaatttgttgcaaagttcaagaaatttcatatggggaagagcctcaagaaacaactttcggtgcctttccacaagaggaaaatacacaaatctgctttggtcttctctgagaagtctgtctctactttggagcttctcaaggtctcatggtccaaggaatggcttctcatgaagaggaattcatttgtgtacatcttcaaaatagttcagggaattctggttgcgctagtagcgtcaacggtgttcttgcgtacacaaatgcatacaagaaatgaggaagatgggcaaatctatataggagcacttctttatgtcatgatagttaacatgttcaatggttttgccgagtcatctattcttttggcaagactccctgtactgtacaaacatagggattttttgttctatagaccatggactattgtacttccgaatgttctaatgagagttcctgcctccatattcgagtcaataatttgggtagcagtgacttactacagcattggctttgcccctgaagctagcaggttctttaaacatttagttgccgtcttctttatccagcagatggctgcgggtctcttcagacttgtcactggcttatgcagaacagttatcataactaacacggcaggatcacttgcagtccttttcatgtttacgctaggaggattcatcctaccaaaggatgcaatttcaaaatggttgatatgggcctattattgttcacctcttacttatgcatacattgctcttgcctttaatgaaatgcactctccaaggtggatggaccaatttgcacctgatggtaggagattgggagttgcaattttagaaaactcaagtatcttcaccggcaaggaatggtactggattgctactggtgcacttttaggtttcactgttctgttcaatgtgttattcacactgtcacttatgtacctgaatcctgttggaaaaccacaggcaattctgcctgaagaaactgatacaagtctagaggacagtgaggaaggaaagaagatgacagatataacacagagaacgaaaatcccgacaccagaacctttatcctcaaattctatgatcaccttggataaggtacttgaacagttacgtggccagtccccgaatacttctgatagatcacacatgaatgcttctgtcagaattactccaggaagagggatgattcttccattcgaacccctctccatgtccttcaacgagataaattactatgttgacatgcctgcagagatgaagagtcaaggagtaaccgcggataagcttcagctgctgtcagggatatctggggcttttcgacctggtgttctcactgctcttatgggtgtgagtgggtctggaaagactactctcatggacgttttatctggaaggaagactggaggatatattgaaggagaaatttatatatctggttaccctaagaaccaagaaacatttgccagaatatcaggttactgtgaacaaaatgacatccactctccacagatcactataagggagtccctactcttttctgctttcatgcgccttcctaaggaggtcactgaccaagaaaagaagatattcgtggatgaagttatggaactggttgagcttaacggtcttaaggatgctattgtgggtctccctggtgtgaacgggctctcaacagagcaaagaaagcgattaacagtcgctgtagagcttgtggcaaacccctcgatcatctttatggatgaaccaacttcaggtcttgatgcaagggctgctgcagttgttatgagaactgttcggaacaccgtcaatactggacgaactgttgtctgcactatccatcaaccaagtattgacatttttgaagcttttgatgagctgcttttaatgaaaagaggaggccagatcatatactctgggccactgggtaggaactcacataaagttgttgaatactttgaggcagttcctggaatcccaaagatcaaagaggggtgcaaccctgctacatggatgttggatgtaacctcagcttctacagaggttcagttgaatattgattttgcagagcattacaagtcatcaactatgcatcagcggaacaaagcattagttaaagagctgagtaagccgcctcctggttccagtgacctctacttccccactcaatactcgcagagtacctttgatcagttcagattctgcctctggaagcaatggttgacttactggagaagccctgactacaaccttgtcagaatgttctttgcattgtttactgccttgctgctggggattatattttggagggttggcagtaagatgaagagttcatcagaccttttgatcatcgtcggatcaatgtattttgctgtcgcatttattggctttgaaaactgtataactgctcaacctgttattgccgtggaaaggacggtcttttacagagagcgtgcagctggaatgtactcggctataccctatgctttctcgcaggttgttgctgagataccatatgtgttcgtcgagagtgtcatatacactgttatcgtgtacccgatgatgtctttccagtggaccctagcgaaattcttctggttcttctacatttcgttcctctcgttcctctacttcacttactatggtatgatgggtgtcgccataacgccgaaccctcaggtggcttccatatttgccgcttccttctacactctctttaatctcttctcggggttcattgttccaagatcgagaatcccggtgtggtggatctggtactactggatctgtccagtggcatggacagtctatgggctgattgtgtcgcagtatggcgatgtggaggatttgatcaaggtgcctgggaaacccgatcagcaggtcaaagctttcatcaaggactactttggctacgatccggacttcatgggcgtagtggcagcggtgttggctggctttactgccctctttgcttttatatatgtttactgcataaagagatttaatttccaacagagatga

SEQ ID NO: 38166 - DNA, 414 bp, Zea mays
  Peptide Sequence Number=SeqID_79945
atgggccacgacgtttacctcacgccatatggcgtgcagccgctcgaggttctgcacgaagatccgctccggacctccgcccctaccgaccaagttgtgttcctctccattgggcgtagcggtacaaacgcgttcaacaatgaactcacctacggcatggtgccacagtctgtgaaccgcgcggtgctggaggcctctcactggtgggatgcaagtgctgggagggaggacgtggagacgctggtgcaatgccagcggatgattgcgtgtggggagtggccgccgctggtcgtggcctataaccacgtggaagggttcaccatggaggccggtgggatgcaagtgcttgttgatcaggttggttctacaattctatttatcaaatctatggttttgcaattctattatttatga

SEQ ID NO: 38167 - DNA, 624 bp, Zea mays
  Peptide Sequence Number=SeqID_79946
atgggcttcttccgccggatcgccggcttcctaggcatctcgcgggacgacgccgaccacccggactccccgacctccgtcggcggcgccgcggcggcggcggaactccctcatgacagggcggcggcgcacggggtgaggcaggggttcagcgtcaaggttcctgtccatgtcgagcggcaggtgcccgtgcccgtgctggtgccctgcccgcagggggacggcggcgtgcagggttttaggtggtacacaaggaggcttaggatcgatgaagacggcgacgtggctgacgagttcttggatgaaattatcccggaaggctcaatcagcaacgacaaaagcgcaaggttccaagtgaaatataacaataaacctgctgctgtagcgctgaggaagcaggtcatcgctgtcgacggtgacatccgccatagcttggaacaccaggggcaactgcggtggtgtgttggtatgcttgatctcatggcgattgagacgccttgtaccactagcagttgtacattattgaaacagctcccgctgtacatgttgaatgtgcttgcttggcaatggatctgccagactggtgaaaaattggaatgtgacacttcagccttcagcctttaa

SEQ ID NO: 38168 - DNA, 420 bp, Zea mays
  Peptide Sequence Number=SeqID_79947
atgatctggttcctgtgtttatccaaccagggttttaggtggtacacaaggaggcttaggatcgatgaagacggcgacgtggctgacgagttcttggatgaaattatcccggaaggctcaatcagcaacgacaaaagcgcaaggttccaagtgaaatataacaataaacctgctgctgtagcgctgaggaagcaggtcatcgctgtcgacggtgacatccgccatagcttggaacaccaggggcaactgcggtggtgtgttggtatgcttgatctcatggcgattgagacgccttgtaccactagcagttgtacattattgaaacagctcccgctgtacatgttgaatgtgcttgcttggcaatggatctgccagactggtgaaaaattggaatgtgacacttcagccttcagcctttaa

SEQ ID NO: 38169 - DNA, 1473 bp, Zea mays
  Peptide Sequence Number=SeqID_79948
atggtggcaaaattattagaatgttggcctgacatggagtacgatgtttcagattgcaaacaaattctattgcccttttctttcatgggtcacttcaccttatatgtacttaacatggacactagaagcatctatataatggactccatgcctataccatcatggtttaagggtgatcatcctagcatgcattatatccataatatacattatattgccaataatatgaatgctgccatggaattggccaatcctacatggaaagacgatatttatatgtggcgtcgtatagtaccaacatgggttccaagaacattaaactgggatttatctggctttcttgttatcaactttatgcacgattggaatggtataaggttaccctgcatttgcactcactgtaatctgtcaccactgccagtatatgagcctgcatttgattgggagaatgagaggtctttgatatttggccaaagggtgccagaaagtataccagcaataagcaacagtggcttgaagataactgtcaagattgggtacaccatagtcgccatgatcgcgaggggtctgatgcttggaccagaccagccggtggttctctacatgctggacctccctaagtcggcggacgccctgagcggcgtcaggatggagctgatcgatgccgcgttgcctcttctcagaggtgtcgtggcaacgagcgacgagcccgaagcgttccgaggcgtcagcttcgccgtcctgatcggcggatggccgaggaaagagggggtgcagaggaaagacctcatcgccaagaacgtccccatataccagtcccaggcttctgcgctgcagcagcacgctgccctaaactgcaagggttttaggtggtacacaaggaggcttaggatcgatgaagacggcggcgtggctgacgagttcttggatgaaattctcacggaaggctcaatcagcaacgacaaagcgcaaggtataatactagcatgtgctaatggacttgactgtgctataaagagaggaaggcgagtcgcactagacttggtaatactcgagcatcactgcatcagagaacataaagcttgttccttttttggcatcatttaccagtcaagtcaaatattcacaggtacaaacgcgttcaacaacgaactcacctacggcatggtgccacagtctgtgaaccgcgcggtgctggaggcctctcaccggtgggatgcaagtgctgggagggaggacgtggagacgctggtgcaatgccagcggatgattgcgtgcggggagtggccgccgctggtcgtggcctatgaccacgtggaagggttcaccatggaggccggtgggatgcaggtgcttgttgatcaggatatggagaaagaaatcaggaaacaagtagatgacgccattgctaaagcaaagttagatgaggcgtccagggctctcctgatgaaggtactagaagatgccacctag

SEQ ID NO: 38170 - DNA, 1209 bp, Zea mays
  Peptide Sequence Number=SeqID_79949
atgaatcagcttgattcgtttgtctctgaagattataagtgcactccagaagatgttcagcttattgaatacattaaaacattaccggggaaacaagttgtggtggacatcgacagcgcatggttaaatagaaatgatatggaatgtctttttcatggtgacatccaattgtctggcgaagccctcagtgcatatatacactgtattagggatgaagagcatttacttcatagagaaggtggaaaggtcttcttggagaacacattcatttccagtctgcttaagcgtgatggcgaccctaaggtgttcattccaatgaatatagaaaattttcactggtacctggcagttctgaatgcaaaaaaaagtgagttaaaaggtctagaaagacagattaaacttgcagcagaacataaagagctttaccaaggcaagtggtcgaagcttgatgttgcatcatggccagttatagagaagatcacaacacaaatgcaaaccgatggggtatcttgcgggctatggatgataaactatatggaatactggacaggatcctccctatctgataacgtaactcaggatgatataacaatgtttaggtttaagctacctgcaatattatgggactcgagattaaacacaaagaaaggacatcaaaatcttgaccacaatgtggatgaagatggagagagttcaagtgatgttcaaataatcgatactccattaacatcaacaaacacgcaagaactgatgtttgtattatgcacatatatcatggggatagacaacgccaaatatttaaagaaacattggattcagagcactaaaccttatccaatttctttaagtcttcaaaaacttaaagatatattggatgtaaataagccgatggatacagattgttttaacatggctgttcggatgatcgcatgcaatgatgccttgttcttgttggaagacaaataccactacatggatctacagttctgttccataactaaatttggtcgagaccctcgccttcgtgcaaagccagatatcaacatgttggcaaaattattagaatgttggcctgacatggagtgcgatgtttcagattgcaaacaaattctattgcccttttctttcatgggtcacttcaccttatatgtacttaacatggacactagaatcatctatataatggactccatgcctataccatcatag

SEQ ID NO: 38171 - DNA, 264 bp, Zea mays
  Peptide Sequence Number=SeqID_79950
atggagcctggcggagggacagctgtcggagcggttgggtccttgctgacgtcctcttgcttccgtaagggggctgagagccgccgtcgtcacagagttgggcgatgtggaggctcctccgaagccgaggtcgagtctgtcttccacggccgaggccgagtccgagcccctgggtcgggcgaggcggaggtcgtcggcagaggccagggcgaagtccgagccctggggtcgggcgaagcggagttcgtcgtcttctggggctga

SEQ ID NO: 38172 - DNA, 1749 bp, Zea mays
  Peptide Sequence Number=SeqID_79951
atgcagaccggctccgagcagaagaagccaaaccgccgcgtgtggggcacgcaaccgcccagcggttacaagcgatcctccacctttgcccagaccaacgggcgagagaggcgggcagccatgcaggcggcatgcaaccgcgccaagtggacgcgcttctccgactcccagcgcgcccagcctggaggcccaggcccacgcgtcacgcaaccggcgcgccggatgctgcatgcaagcaagtgcaccgccacttgcgccaccaccgcgcctctttggttgcggaaccaataccgcgactcgaggcgactaggcacaagacccagcagcgccagcctaacgcgacgatcaatgcggccgaaacgagagagctccctctcacggtgtgaagacaacgcgcccgtgatccgttcctcgaacggctcgcacacgcgcaacggctgccccgccaaccactcgccccgttgcattaactccgcggctggacaggtggcgcttctggcagcagcaacgggcgacgcttcgccctcgccgaaacaaccgcaccaaaaaaggctggcccccgaagggttcaatagccgcctcagatcgcgtgggccctacacccactactggctggccctcgaagggttcacagtcgcctcagacgccgagcgagggatgaccagggatcacccgcaggtacttttgggcgtgcctctgggcccctacccgacccctaacgaacggggcacggacgtccactcggattacccgcttgcagctcaccggagacaccatgttcggtgcccatcgaggaggctcgggggctgctctcgcaaacccggctccggccgaaccgttgacagcgtcaacataccagcccgagaacttgggccccgaccgtacacccaggctacggccagctcgcatgagggaacaaccagaccagccgaagcattacgcaaggcattaagacctcgaaggagtgaaatcactcctccgaggcctcgggggctacacccggcgggtgcgctcgcgcgcacccaccggaaccaaaagcaaccgagaaaggcgggtccccttgcaaaaaagtgcgacgaaagcctccaagcgagtgctaacactcccttcgaggctcgggggctactgtcggggaccataattaggggtaccctcaagacgcctaattctcagctggtaacccccatcagcataaagttgcagaggcctaatgggggctcggactcggcctctgctgacgaactccgcctcgcccgacccaggggctcggactcggcctctgctgacgaactccgcctcgcccgacccaggggctcggactcggcctctgctgacgacctccgcctcgcccgacccaggggctcggactcggcctctgctgacgacctccgcctcgcccgacccaggggctcggactcggcttctgctgacgacctccgcctcgcccgacctaggggctcggactcggcctctgctgacgacctctgcctcgcccgacccaggggctcggactcggcctcggccatggaagacagactcgaccccggcttcggaggagcctccacgtcgcccaacctagggcataggccagccacgtcgacaggaagcgccatcatcaccctaccccgagccgactcgggtcgcagagaacaagacctgctccgttgctcctccgacagccacgacatcacgccagcagggtgccaagatctctccggctgccacattggcatgtacttagggcactag

SEQ ID NO: 38173 - DNA, 543 bp, Zea mays
  Peptide Sequence Number=SeqID_79952
atgtcgtcgggtacacctttggcagcggcagaggaggctccaactgcgcccgcccccgccatcaaggtcgacgcggggggcgcgtccagctccatcctgctgcccactccggaggagacggaggtgatttttgagcggcggctccggtccggcgccgagctagaagcggcgccgattcccctccctcaggtgttgtctcgtgcccatcaggctcttcacgagaccaaggcggcgatcctgcgggagtgggaggctctggaggccgaacaccagcacctcagcgactggcgtactcagctggaagagcgcaccaaggtggcgtcctgccagttcgccttcgagcggtccgagcttgagcgggaccacaaggactacaagaaggacctccagaaggtgtacgcccgagagctggaggtggcccggaaggacaagaggttggctaagaaggaggagcacttggaccagagggaggaggtcgtcatggagctacaggccaagctgagtgccttcaataaaatcctggaggagcagcgggtccagtag

SEQ ID NO: 38174 - DNA, 1297 bp, Zea mays
  Peptide Sequence Number=SeqID_79953
ggcttcctccccctctgctcccaaggttgtgcctcccccacccctggctgctgcttccgagacagtgccactgggctcccatgctccagctgggggtctggcagtagcggtgccaacatcaagtggcgtcacagcggcggagcgggtcccaactgccccgacagctgccacagcctcaacgacgacgatgtcgtcgggtacacctttggcagcggcagaggaggctccaactgcgcccgcccccgccatcaaggtcgacgcggggggcgcgtccagctccatcctgctgcccactccggaggagacggaggtgatttttgagcggcggctccggtccggcgccgagctagaagcggcgccgattcccctccctcaggtgttgtctcgtgcccatcaggctcttcacgagaccaaggcggcgatcctgcgggagtgggaggctctggaggccgaacaccagcacctcagcgactggcgtactcagctggaagagcgcaccaaggtggcgtcctgccagttcgccttcgagcggtccgagcttgagcgggaccacaaggactacaagaaggacctccagaaggtgtacgcccgagagctggaggtggcccggaaggacaagaggttggctaagaaggaggagcacttggaccagagggaggaggtcgtcatggagctacaggccaagctgagtgccttcaataaaatcctggaggagcagcgggacaaggccagcagcattgccctagccgaggagaacctcaaggagaaggatgcctccctagataagcgggagaaggagcagacgctggaggagcgggtccaccagttccaggcggcgcaggcagcacaggcagcaccgggcccccaagcggtggaggtgatgaagaagacacttgaagatctccaggtggagcagcacgccggggtccagcgcatcgccgcatgggccagcgaggcgagcatggcactggtgccgctatgggtgagtcccatcccggtgttggagctgccgacgtccatctccgacgcgctcccggtgctggactccgccgccgaccgcctccgatgcttggaccagattcttggcgcccacttggaggccgagggcagcaggctctgccgggcggtgatcgagtacatcatgacgtgcttccggagccacgacccggccatatccttggagccggtgatcgctggtccggtggccgacactgaagacaccgcttgggagggcgttcaagatgccgtggaactggtggccgaatgtttccagcgggatcctactgatgatgagtag

SEQ ID NO: 38175 - DNA, 444 bp, Zea mays
  Peptide Sequence Number=SeqID_79954
atggggcagtcgttgttgtcgcgaacaaggcacctctgtccctggtggatggcccccactgtcagtctcgtcttcaacatcgtatgtgactactacgagctcgttaaacacttctataggccttggacaattcggttatgggttgggcgcgccgggtggctggatctctgtgcgtcggtgaactacaacaccaccgtggggagctcggctacaggcgtaaggtatcctcggactaaagtcggcattgcagtagaccagaataatacgaaggttgatacagagccgaaggtgcgagcaggaaagcttcggcgtgacagcaaagagtggaaccgacttaaagatgaaaaggctattcagacctcgatagactactatagagttattatcaaatgtaaagggcatgaatgtaattttgtaagggctgtgtcccgtgtctataaatag

SEQ ID NO: 38176 - DNA, 378 bp, Zea mays
  Peptide Sequence Number=SeqID_79955
atggaggaagaaggagggcgcagggaggagcttggtcgccggaggacagccgctggcgaggaagatcgccagagagggggtgagacgccagagaagctgagagacagagagcagagagggaaaagggaggcctctggctcggtctcgggctggaggtatcctcggactaaagtcggcattgcagtagtccgaaataatacgaagatagatacagagccgaaggtgcgagcaggaaagcttcggcgcgacagcaaagagtggaaccgacttaaagatgaaaaggctattcagacctcgatagactactatagagttattatcaaatgtaaagggcatgaatgtaattttgtaagggctgtgtcccgtgtctataaatag

SEQ ID NO: 38177 - DNA, 270 bp, Zea mays
  Peptide Sequence Number=SeqID_79956
atgccaagtcagcgtgaacagtacggggatactgttcacctatttatagacacgggacacagcccttacaaaattacattcatgccctttacatttgataataactctatagtagtctatcgagattgtaatcttgccgacggagagtacgtgctcatccccgagcaaggacctgtccaagaggaggaccaggagcaggcttcagaggctgctattgaggatctccccgcagccccagcaattgaaggcaagccccggttttatgcataa

SEQ ID NO: 38178 - DNA, 201 bp, Zea mays
  Peptide Sequence Number=SeqID_79957
atgtcttcaatgtgtgaaccactgctgccaactctaggtcatggattgggtaattcttctcatgagccttcagctgtcgggacgaacaaaaataaattacaaatgtaccttcgtcttgaaggagagaaaatacaaatgtggtgcaaaagtgaatgccaagtcagcgtgaacagtacggggatactgttcacctatttatag

SEQ ID NO: 38179 - DNA, 171 bp, Zea mays
  Peptide Sequence Number=SeqID_79958
atgatgcttgccaaaggtattcaagactcagaaaatggaagtgagttcaccggagacaaaaataaattacaaatgtaccttcggcttgaaggagagaaaatacaagtgtggcgcaaaagtgaatgccaagtcagcgtgaacagtacggggatactgttcacctatttatag

SEQ ID NO: 38180 - DNA, 264 bp, Zea mays
  Peptide Sequence Number=SeqID_79959
atggctaagctgaacttcaacttcaaccggggtccagggcaagttcaaccggggtccagagaggttcaaccggggtccagggcaggttcaaccggtgtccagggaaagttcaaccggggtattttccccggacctcactggtcaaaaccggttgaatcggtcctaggggaggttcaaccggtgtcagggtcacctgaccggtcggacctcctgactggcagactgactgccagtgtgacccctagacggttgaaccggccctag

SEQ ID NO: 38181 - DNA, 264 bp, Zea mays
  Peptide Sequence Number=SeqID_79960
atggctaagctgaacttcaacttcaatcggggtccagggcaagttcaaccggggtccagagaggttcaaccggggtccagggcaggttcaaccggtgtccagggaaagttcagccggggtattttccccggacctcactggtcaaaaccggttgaaccggtcctaggggaggttcaaccggtgtcagggtcacctgaccggtcggacctcctgactggcagactgactgccagtgtgacccccaggcggttgaaccatccctag

SEQ ID NO: 38182 - DNA, 369 bp, Zea mays
  Peptide Sequence Number=SeqID_79961
atgagcggcaaggccgaccgagccgagggactcctacgcctccgggatacggatacctcactcatcaccttccgcgagaggaatgaactacctccacaccagaggggctacgagataacaaactccaagcgactcgccgacgaccactgcaccagcagcgacaatgacctccacctcgggtggctagacagcagcagcgattgcctcagggcaaacgctaatgtgaaaatgccctcgctcacgtccccttatgagggacgcgaaccagccattaaagccaaagatccggaggtccggagcgcaggtggcactgacggtctcgtcggcggaggcaaccgcttctgcaaggggaagcctcacctatggtga

SEQ ID NO: 38183 - DNA, 459 bp, Zea mays
  Peptide Sequence Number=SeqID_79962
atgagcggcaaggccgaccgagccgagggactcctacgcctccgggatacggatacctcactcatcaccttccgcgagaggcctcaacagccacagagaacaaacactcatactcagggcaaataccgttacattcccttacaaacgggactccagctccattcccgcaggaatgaactacctccacaccagaggggctacgagataacaaactccaagcgactcgccgacgaccactgcaccagcagcgacaatgacctccacctcgggtggctagacagcagcagcgattgcctcagggcaaacgctaatgtgaaaatgccctcgctcacgtccccttatgagggacgcgaaccagccattaaagccaaagatccggaggtccggagcgcaggtggcactgacggtctcgtcggcggaggcaaccgcttctgcaaggggaagcctcacctatggtga

SEQ ID NO: 38184 - DNA, 366 bp, Zea mays
  Peptide Sequence Number=SeqID_79963
atggtgagagaacgaagaacacgtataagcacaatgaacaagaacacaagagacacaagatttatcccgaggttcggtcacaccaccaaggtgccctacttcctcgttgaggcgcccacaaagagccgggtctctttcaagcctaatcctccctttgccgaccacaaagactgttggttagaggtcagaggggtcagagaccagctgaactgcccctcaggaccagttcaactggtcttgaccagagagtttaggagagaaaaccccagctcaactgcccggaggcaagttcagctggtgtatggtcaaagaggttcacagctgaagttgagttcagctgaagttgagaaagctcaactcagctga

SEQ ID NO: 38185 - DNA, 366 bp, Zea mays
  Peptide Sequence Number=SeqID_79964
atggtgagagaacgaagaacacgtataagcacaatgaacaagaacacaagagacacaagatttatcccgaggttcggtcacaccaccaaggtgccctacttcctcgttgaggcgcccacaaagagccgggtctctttcaaccctaatcctccctttgtcgaccacaaagactgttggtcagaggtcagaggggtcagagaccagctgaactgcccctcaggaccagttcaactggtcttgaccagagagtttaggagagaaaaccccagctcaactgcccggaggcaagttcagctggtgtatggtcaaagaggttcacagctgaagttgagttcagctgaagttgagaaagctcaactcagctga

SEQ ID NO: 38186 - DNA, 270 bp, Zea mays
  Peptide Sequence Number=SeqID_79965
atgtcgccttgttcttcttcaccgagggtcccgaaatcggccggccttcaggcacctccacacacgggaacatcatacatgaagaacgtagaccgacctccatctaatccaaagcggattataattcagtctactcaagagtgctttagtgtcgacataccccgtgttccggcgaaaactgttagacacaaaccaatgcaggctggtgatgaggacgataactttatgccattatcgaagaagcgtaactttgatgacagtcctccataa

SEQ ID NO: 38187 - DNA, 711 bp, Zea mays
  Peptide Sequence Number=SeqID_79966
atgggaacatcatacatgaagaacgtagaccgacctccatctaatccaaagcggattataattcagtctactcaagagtgctttagtgtcgacatacctcgtgttccggcgaaaactgttagacacaaaccaatgcaggctggtgatgaggacgatgactttatgccattatcgaagaagcgtaactttgatgacagtcctccaaaagtcttgaagaagatagttacaaagcggaggaaaaggcttaatgtgagatgcaatccccaagacgttatagtaagcatccagattttaaatgacagacagcgccaagctattgcacagagggggttctccagtattcttgatatgagagttgacgcacttggcagtagatctcatttagcttggctgatggaaaagcttgaccataatgacatgacaattcgagccggcctagggaaggacatcaaaattacaaaggagacgatgcatcttattttggggttaccaaatgctggtggaggaacgacattaggcattgatgaagctgttgctacaaacaatttaacggctgaacttggtttatcaaaagaagaatttggtgttgcagctcttcaagatcgtctgaggaaagggtttgacgatgatctaagcatcagatccttcttcctgatactattcaataggttgttgttccctactgccagctggggaataactaaccatgag

SEQ ID NO: 38188 - DNA, 582 bp, Zea mays
  Peptide Sequence Number=SeqID_79967
atggcgccattaatgaccatcaatgggggagaaacggctccattgaagcttctttactcgagtgatgaatggacggcgtgggattttggtcgcgaagtcttcggtgctcgggtgcacgggtcctcagcgcggcgcggaatcggggtcgcggggcggcctctggtccggctcaaggcgcgcatggcgtggtccggcagcggcctgggcagggtgcgcgtcgcggagtgggctcggtcgctgcaggcagggcgtcgaggcgctggcgtccgctcggccggcttgcgcgcggtagcggccttgggcgcgagcagcctgggcggcgtcgggctgggggctcgcgtgcaggggcgcggtaggcgtgtgctcggcgcggcgtcggtggaagcaggggcggggcgcgcttggctgcttggcttcggtccggtcgctggcgggtcgcggcaggggagagggaagcgaggggagagagaaagccaggtgagagagagagaaccgggaggggaggaagaaatggcggctgctaagggagcaggagggagcggcggccggctggaggaagaaggcaagcggctgggagtttag

SEQ ID NO: 38189 - DNA, 522 bp, Zea mays
  Peptide Sequence Number=SeqID_79968
atgacaaccgtccccatcgattccccgttcgcgtccaggcctcaccgccttggcatacaatgctccactgaccccggctgccgccgtgcagtgaccgcacttccaagcgcgccccgcccctgcttccccccgacgccgcgccgagcacacgcctaccgcgcccctgcacgcgaagcccccagcccgacgccgcccaggctgctcgcgcccaaggccgctaccgcgcgcaagccggccgagcggacgccagcgcctcgacgccctgcctgcagcgaccgagcccgctccgcgacgcgcaccctgcccaggccgctgccggaccgcgccatgcgcgcctcgagccggaccagaggccgccccgcgaccccgattccgcgccgcgctgaggaccctgcagcagccgcgaccgaccgcgccaagaaccgtgcacccgagtaccgaagacctcgcgaccaaaatcccacgccgtccattcatcactcgagtaaagaagcttcaatggagtcgtttctcccccattga

SEQ ID NO: 38190 - DNA, 186 bp, Zea mays
  Peptide Sequence Number=SeqID_79969
atggcggctttgcagaaaagccctcgagggagctccggccacgatggccgtaagcacaacggcaacatgatcgtgttcccagcgatgggcgccggtctagctcgattcaatggttcggctccgagagcggtggctctcaatttgaccgcgatgcgtcgacggccggagaggaggaagaagcactag

SEQ ID NO: 38191 - DNA, 186 bp, Zea mays
  Peptide Sequence Number=SeqID_79970
atggcggctttgcagaaaagccctcgagggagctccggccacggtggccgtaagcacaacggcaacatgatcgtgttcccggcgatgggcgccggtctagctcgattcaatggttcggctccgagagcggtggctctcaatttgaccgcgatgcgtcgacggccggagaggaggaagaagcactag

SEQ ID NO: 38192 - DNA, 267 bp, Zea mays
  Peptide Sequence Number=SeqID_79971
atgcagattattgaaagaaggtgcgaggctcaaaagggtgctggtataaggagaaaaaaaacactcgataaactcaccgatcaacctagaaatctgataccacttgatagagctggagtgcccgatctttcggtgagtggagataattccgatttggtggaagtagaccctcacgattcgactacgacgagcgatcctgaagcgccaatgcaatcgctgaaccaacttccaatggttaccgaccttgctgatgcgagatcggcctga

SEQ ID NO: 38193 - DNA, 306 bp, Zea mays
  Peptide Sequence Number=SeqID_79972
atggcagactgggcgtggcctgcagcggagacggggaggagagagaggggggagagaaggcaccattcgtgggatgtgttcgctgagatgtgttccctggccgcaattcgtgggatgtcccacccgcaccgggcgctggccgagcaccacgacgccaggtccagggcctccaccaccaccacatcgtcctcgtcctcctccgcccgccgcgacgacgaccccgacccgccgccgaggtcgctcaaggacccgccctacacgctggtccccaagatcttcgactgggacgagcagcgcgccgcctag

SEQ ID NO: 38194 - DNA, 540 bp, Zea mays
  Peptide Sequence Number=SeqID_79973
atggattctcaggcgccaacgaactcggatgacgaaggaaggatccaggcggtggcagactgggcgtggcctgcagcggagacggggaggagctccttcactgctgtgcggatgagcgctccccctcgcgtgatgtgttccctggccgcaattcgtgggatgtcccaccctcaccgggcgctggccgagcaccacgacgccaggtccagggcctccaccaccaccacatcgtcctcgtcctcctccgcccgccgcgacgacgaccccgacccgccgccgaggtcgctcagggacccgccctacacgctgggccccaagatcttcgactgggacgagcagcgcaccgtctggcaccgccgccacctggagacgccgcccttcctcaacgacatcaagccacgggtgctgctcgtcacaactatttatgttgtttctggccccattgttcttgacaaataccagcttcatgaagctgtccaggagaaagaacgaggagtagactcgcttggtaggactccttgctacaaagacacacactga

SEQ ID NO: 38195 - DNA, 432 bp, Zea mays
  Peptide Sequence Number=SeqID_79974
atggcgtccaccaccaccacatcgtcctcgtcctcctccgcccgccgcgacgacgaccccgacccaccgccgaggtcgctcagggacccgccctacacgctgggccccaagatcttcgactgggacgagcaacgcgccgcctggcaccgccgccacctggagacgccgcccttcctcaacgacatcaagccacgggttcttgataaataccagcttcatgaagctgtccaggagaaagaacgaggagtagactcgcttggtaggactccttgctacaaagctaatgtggccaccgctgtcggcatgtctgatgccgtcgagcagcagtcgcctaaagataacgatgctgacatacaggaggacacattttttgtgttgctaaatatatgtatgtcaggcgacagtcaaaatgaagccaacccaacattgtga

SEQ ID NO: 38196 - DNA, 1086 bp, Zea mays
  Peptide Sequence Number=SeqID_79975
atggccgagcaccacgactccaggtccagggcctccaccaccaccacatcgtccttgtcctcctccgcccgccgcgacgacgaccccgacccgccgccgaggtcgctcagggacccgccctacacgctgggccccaagatcttcgactgggacgagcagcgcgccgcctggcaccgccgccacccggagacgccgcccttcctcaacgacatcaagccacgagtgctgctcgtcacggggtcctcgcccaagccctgcgagaaccccgtcggggaccactacctcctcaagtccatcaagaacaagatggactactgttgcgtccacggcatcgaggtcttctacaacatggcgctgctcgacgccgagatggcaggcttctgggccaagctcccgctcatgcgggcgctgctcctcgcgcacccggagctcccgtgggagcgcagcgctacggggccgtacaacctcatcatgcacggctgggacgagatggtctacgacgacaagaattggatcgggctcaacaccggcagcttcttgctgcgcaactgccagtggtcgcttgacatgctggatacctgggcgccaatggggccaaagggccctgtccgcattgaagccggcaaggtgctgaccaagtccttgaaggatcggccagtattcgaggccgacgatcagtcggccatggtgtacatcctcgcgacgcagcgcgagaaatggggtgataaggtttaccttgagaatgggtactacctccatggatactgggggatcttggtcgacaggtacgaggagatgcttgagaattacaagccagggctcggcgatcaccggtggccactcgtcacacactttgtcgggtgcaagccgtgtggcaaatttggagactaccctgtcgagcgatgcctcaagaatatggaccgtgcattcaattttggggataaccagatcttgcagatgtatgggttcacacacaagtcactagcaagcaggagagtgaagaggatcaggaacgagaccagcaacccacttgagacaaaggatgagcttgggttgcttcatccagcattcaaggcttccacatga

SEQ ID NO: 38197 - DNA, 234 bp, Zea mays
  Peptide Sequence Number=SeqID_79976
atggggactgatattggaacaaccagcaatgctatgttgaaacggaaacataacgacagaacagaaaatgaagctgccgaatcaaatgactggatgagccctggatatgctaatgctggcagcagcccagttcctacacccccttcagggaaaggtttaaaagcatccaccaagcctaaggctacgaagggccagaaatctggtcctcagacccctttgggttttgatgagtga

SEQ ID NO: 38198 - DNA, 189 bp, Zea mays
  Peptide Sequence Number=SeqID_79977
atgggagcggagtcgccgggaaggaagaatcgccggagattcctggagtcgtgcgggggttggggttttgcggttatggaaactgagccgggagcaaaggagctaatcgcgggatcacgtaggtatttatatggaaaccgaaagggtataccatccacgcactacgactatgtacgagagccggcctga

SEQ ID NO: 38199 - DNA, 357 bp, Zea mays
  Peptide Sequence Number=SeqID_79978
atggcggagaacgtggaagcagtcgggtcggcggagagcgaaggagcagaaccgtcgcgcggagaaggtagggttttcgccggtcgccgaatgcagcggcgcgaatattggagcgacgattggggaaaccgagggcgcgccgctcaaatgccgcttgcgactggatcgacagcgagcggcgaggggttggaagagtcgtcggaaaggggagcggagtcgccgggatggaagaatcgccggagattcctggagtcgtgcgggggttggggttttgcggttatggaaactgagccgggagcaaaggagctaatcgcgggatcacgtaggtatttatatggaaaccgaaaggtcacatga

SEQ ID NO: 38200 - DNA, 309 bp, Zea mays
  Peptide Sequence Number=SeqID_79979
atggcggagaacgtggaagcagtcgggtcggcggagggcgaaggagcagaaccgtcaccggagaaggtagggttttcgccggtcgccgaatgcagcggcgcgaatgttggagcgacgattggggaaaccgagggcgcgccgctcaaatgccgcttgcgactggatcgacagcgagcggcgaggggttggaagagtcgtcggaaatgggagcggagtcgccgggaaggaagaatcgccggagattcctggagtcgtgcgggggttggggttttgcggttatggaaactgagccgggagcaaaggagctaa

SEQ ID NO: 38201 - DNA, 546 bp, Zea mays
  Peptide Sequence Number=SeqID_79980
atggcggagaacgtggaagcagtcgggtcggcggagagcgaaggagcagaaccgtcgcgcggagaaggtagggttttcgccggtcgccgaatgcagcggcgcgaatattggagcgacgattggggaaaccgagggcgcgccgctcaaatgccgcttgcgactggatcgacagcgagcggcgaggggttggaagagtcgtcggaaaggggagcggagtcgccgggatggaagaatcgccggagattcctggagtcgtgcgggggttggggttttgcggttatggaaactgagccgggagcaaaggagctaatcgcgggatcacgtaggtatttatatggaaaccgaaaggaagcggacactagcgctctacgcgtgcacagatccgtagccgctagcactggcatgcagcggatatccattggccatggcgataccttgcgttgtagcctcgatgacctgcttgctgatcgcggcaggcagccacgcacggggggagccggcgaccggcgtcgtcccgtgccgccctcgaaagcgggagcggcgtag

SEQ ID NO: 38202 - DNA, 189 bp, Zea mays
  Peptide Sequence Number=SeqID_79981
atggcggagaacgtggaagcagtcgggtcggcggagagcgaaggagcagaaccgtcgccggagaagcagctccactctacttacttcaagtcgtcgagaactgcaagagttccaaagcgatggattcagaaaacaaacatggaacatgagccagcagaaagagctgagaggcgccggcaagccaagtaa

SEQ ID NO: 38203 - DNA, 960 bp, Zea mays
  Peptide Sequence Number=SeqID_79982
atgaagcaagtcgaccgtcctccaaataaccccaagcgtataacaatccagtcaagccaggagtgcttcagtgtagacattccctctgcagaacatcctaacccatgtccagaagttgaaaatccttcaaatgctgacagtcaaaatgtgaccaatgaaacagttcagattgattctgatgaagatgacttcatgccagctatgaagaagcgcaatgtttctgaaagccacacaagagtgttaagaaaagtcgtgacaaagagggttaaacatgaggagctaccccgacagaggcttaatgtgaggtgcaaccctcaagatgtcattgcaagcattaacattttgaatgaaagacaacgtgaggctataagacgcaaaggcttctcttccattcttgatatgacagtagatgcgctgtgcagtagatcacacctccaatggttgatggacaagctagaccccaaggatatgacaatacgtcctggtccaggaaaggaactcaagatcacaaaggatattgttcatcttattcttggcgtgccaaatcatggaggtggtaaacctttgggtattgatgaagcagttgcagcaagcaacttgagggcagagcttggtgtggccaaagatgagttcaatgtggcatttctacaggatcgattaaggaaaggcgaggatgatgacctttcaatcagatgtttcttcctcattctattcaaccgtttgctgtttccaactgctagctggggcatcacatatcatgaggtgcttctcacagaagaaatgcaccgtttccatgagatcgactggtgccagttgatttttaatgatctatgtgaagctgccaagaagtggcacaaccggatcaccacaaatgtctccacgactatctatggacgctcctttgctggcggggcaagtatgcgtattctcgatttatctttctttactggctgtaaataa

SEQ ID NO: 38204 - DNA, 2118 bp, Zea mays
  Peptide Sequence Number=SeqID_79983
atgacgcctgccgggcggaccgagctgaagcggacctcccagctccgtccgtcccatcatcgtcgacgacgtttccataaccgcaaaaccccaacccccgcacgactccaggaatctccggcgattcttccatcccggcgactccgctcccctttccgacgactcttccaacccctcgccgctcgctgtcgatccagtcgcaagcggcatttgagcggcgcgccctcggtttccccaatcgtcgctgcaatattcgcgccgctgcattcggcgaccggcgaaaaccctaccttctccggcgacggttctgctccttcgctctccgccgacccgactgcttccacgttctccgccatcctcaacattcgccgccgccaacgggcaccgctccaatcgatgattacagctaatacattatttggttacagcaagcaagtcgaccgtcctccaaataaccccaagcgtataacaatccagtcaagccaggagtgcttcagtgtagacattccctctgcagaacatcctaatccatgtccagaagttgaaaatccttcaaatgctgacagtcaaaatgtgaccaatgaaacagttcagattgattctgatgaagatgacttcatgccagctatgaagaagcgcaatgtttctgaaagccacacaagagtgttaagaaaagtcgtgacaaagagggttaaacatgaggagctaccccgacagaggcttaatgtgaggtgcaaccctcaagatgtcattgcaagcattaacattttgaatgaaagacaacgtgaggctataagacgtaaaggcttctcttccattcttgatatgacagtagatgcgctgtgcagtagatcacacctccaatggttgatggacaagctagaccccaaggatatgacaatacgtcctggtccaggaaaggaactcaagatcacaaaggatattgttcatcttattcttggcgtgccaaatcatggaggtggtaaacctttgggtattgatgaagcagttgcagcaagcaacttgagggcagagcttggtgtggccaaagatgagttcaatgtggcatttctacaggatcgattaaggaaaggcgaggatgatgacctttcaatcagatgtttcttcctcattctattcaaccgtttgctgtttccaactgctagctggggcatcacatatcatgaggtgcttctcacagaagaaatgcaccgtttccatgagatcgactggtgccagttgatttttaatgatctatgtgaagctgccaagaagtggcacaaccggatcaccacaaatgtctccacgactatatatggatgctccattgttgtccttttgtactacttggatcacctgcatacagccgctgccccccataataagagtggcacacctcgcattaaattttttgataagaatagcataaaagctttgaccaaagctgacaagaggaaggttcgccatggggctgaatctttcggacactgtgaaaatacgaaggtggacatggattcttactattttttgctcaacaaccagccggagtgcaggaccaatatttttgatgcaccgcgccctggccccatgcctcggccaacttttaacatcaaacttccatctatcaaagagatgatgtcaagtaagatcaacgatctcccacatcgtcatcgatctaaattcacagatattcttgctgcatatgacttggaggttgacaagtcatgcgtagccataaaagacagcatcgacaaaattattgtcaagcaatatgacatagcagacaagtttatagaattgatagacgaggtactacgtgccgagtctgaaaatttggaaaacgagacggatgagccacagcaaccggggaattcggctgattcagcaggacacacagttgatgccacccagcccacacccgatatgccatcccaagcttcgcagcttgagacccaactgggtgctactcagtttgaagaaattcacgaaagacaacagcatatccgtacagtccttgagacctttcccgacgaatcggatgtggtttcagatcaacagcagtatgcgaaccacactttttttgtcaacaggatttctgttttgatgttcgaaacataa

SEQ ID NO: 38205 - DNA, 656 bp, Zea mays
  Peptide Sequence Number=SeqID_79984
agcaagagtgtatccgttctctgtgggatttaatttgttccaaggacattgaccaaagcagggtagttattgattacggtgattacagtgcaaactgtatggatatttatgattctttcgcggagggtaaatgtcttgaggatgtcttcatgcagtgtttcatagagtgtgttcgtgatgattctaaaaatcatcgtcgaactctgacatctaacagattaatacttgatgtcaacgttggggctctgttaaattttgaagaacaggaacgtcacagcaagaatcctcagccgtttgatcaaaatgtcctacagaattgcttgcacaacacattgcctgctttggtgaatctggataaatgcaagtcgataatggtacctatgcttagcaggggtcattggacactctatgtgatcaatctacaccaccgggttatccacattttagattcgaatccctatggtatacaacttggtggcaccgaatggaaggactatcattatgatccaatttatttaggtggcaggaaattcccatgggctagggtggtgtcatatcttctttcaatcaaccagacaattcccgagatctacgtgctcatgcccttcatcaactcacattccatcgcatcaacaaggcgttgccacttccattag

SEQ ID NO: 38206 - DNA, 1902 bp, Zea mays
  Peptide Sequence Number=SeqID_79985
atggacaagctagaccccaaggatatgacaatacgtcctggtccaggaaaggaactcaagatcacaaaggatattgttcatcttattcttggcgtgccaaatcatggaggtggtaaacctttgggtattgatgaagcagttgcagcaagcaacttgagggcagagcttggtgtggccaaagatgagttcaatgtggcatttctacaggatcgattaaggaaaggcgaggatgatgacctttcaatcagatgtttcttcctcattctattcaaccgtttgctgtttccaactgctagctggggcatcacatatcatgaggtgcttctcacagaagaaatgcaccgtttccatgagatcgactggtgccagttgatttttaatgatctatgtgaagctgccaagaagtggcacaaccggatcaccacaaatgtctccacgactatatatggatgctccattgttgtccttttgtactacttggatcacctgcatacagccgctgccccccataataagagtggcacacctcgcattaaattttttgataagaatagcataaaagctttgaccaaagctgacaagaggaaggttcgccatggggctgaatctttcggacactgtgaacaatatgacatagcagacaagtttatagaattgatagacgaggtactacgtgccgagtctgaaaatttggaaaacgagacggatgagccacagcaaccggggaattcggctgattcagcaggacacacagttgatgccacccagcccacacccgatatgccatcccaagcttcgcagcttgagacccaactgggtgctactcagtttgaagaaattcacgaaagacaacagcatatccgtacagtccttgagacctttcccgacgaatcggatgtggtttcagatcaacagagaggtgcaatggcaacagaggaaatggaacaaaatgacagtgggccagtttttgaccagaccccaactcctcatgttgatacactcaaaggtactacaaactctggatctgatccaccacttacagagcaagagtgtatccgttctctgtgggatttaatttgttccaaggacattgaccaaagcagggtagttattgattacggtgattacagtgcaaactgtatggatatttatgaatctttcgcggagggtaaatgtcttgaggatgtcttcatgcagtgtttcatagagtgtgttcgtgatgattctaaaaatcatcgtcgaactctgacatctaacagattaatacttgatgtcaacgttggggctctgttaaattttgaagaacaggaacgtcacagcaagaatcctcagccgtttgatcaaaatgtcctacataattgcttgtacaacacattgccttctttggtgaatctggataaatgcaagtcgataatggtacctatgcttagcaggggtcattggacactgtatgtgatcaatctacaccaccgggttatacacattttagattcaaatccctatggtatacaacttggtggcaccgaatggaaggactatcattatgatccaatttatttaggtggtaggaaattcccatgggctagggtgataatgagtaggctgagcaaagcgttacaacacgtttgccccaacgcagaatttcctaagtttggtaattttccattggatatgccatctaactgcccaacaatgaggacagggtcaaatgactgtggattttttgtgatgagttacatgaaatcttatgatcacaatgcaggtgtcatatcttctttcaatcaaccagacaattcccgagacctacgtgctcatgcccttcatcaactcacattccatcgcatcaacaaggcgttgccacttccattagatatccagagatttatgtttgcgcgcaattag

SEQ ID NO: 38207 - DNA, 276 bp, Zea mays
  Peptide Sequence Number=SeqID_79986
atggccgtcgcagccaccgcgcacccttgctacccccttgactgtgcgcgagtgctctcccatgtcgagccccctccatctggttttgggctacagcagccgctgccccttcgcgtcgagtgtgccgacacggatctacgcagtcccgacgcgatgttgtcaaactccgcccttgtcgtcgtcacgcctcgcgcatcgctcctcggcaaagagccccaaaccgatggcacacatgcgcaacttggatccgagtttgtcaggttgatggatttatga

SEQ ID NO: 38208 - DNA, 333 bp, Zea mays
  Peptide Sequence Number=SeqID_79987
atggatggcgcacgcccttgctgtgtttctccctgcggcatctcctctcggcttcctctctgcagtagggagcgccgggacatgctcgacgttttagcgcccagccatggtggaagtcgtcgagtcccctccatctggtttcgggctgcagcagcaatctcggcatcatcgcgcagcaagctccatcgtcgatctgcgcagcccctatttggttgtcgttctgcctccgtcgacctcctccgtgcacgtgcaacagcagccgctgccccttcgcgtcgagtgtgccgacacggatctacgcagtcccgacgcgatgttgtcaaactccggtaa

SEQ ID NO: 38209 - DNA, 378 bp, Zea mays
  Peptide Sequence Number=SeqID_79988
atgacatctttgtatggattgggtgtacatccatttagtgcatatttggtgtcccacaacaagttaaggcctcaaacagaagagggtgaattatctcctaatggtgaaatgaaagaggaacacttctgtgtttgctcagatgaagctatagatggaacttctaaacaaaatgaaggctacatcaagtttatcagtgcactatacaacttacttgatggttcttctgaggagaagcccgcggcggagaagacgaccgccgggaagaagcccaaggcggagaagcgggtccccgcgggcaagtctgccggcaaggaggacggcgagagcaagcgtggcaggaagaagggaaagaagaacataaacataaaattgttatag

SEQ ID NO: 38210 - DNA, 258 bp, Zea mays
  Peptide Sequence Number=SeqID_79989
atgaaggttctaccagcagatttaatggaaatgaatcattttatgttctgttcaggctacatcaagtttatcagtgcactatacaacttacttgatggttcttctgaggagaagcccgcggcggagaagacgaccgccgggaagaagcccaaggcggagaagcgggtccccgcgggcaagtctgccggcaaggaggacgacgagagcaagcgtggcaggaagaagggaaagaagaacataaacataaaattgttatag

SEQ ID NO: 38211 - DNA, 288 bp, Zea mays
  Peptide Sequence Number=SeqID_79990
atggccgaagccctggcggcaatggcgggcggaattgagctcgccggagctaagggaaagtggttggccggtgaggggacagggagttgtagcgtcaccaaggtgccagtgtcagaatgcctggtcccgaggtcaagctacgccaaaaccatgtcaaatgaatttggtttgagttcaaactttttcaggatgtgttcaagggaatttggcacgactttgatatttggatctcctggctttgagtttcgaaaaacagagaacgtggatgatctttgggaagaggtctga

SEQ ID NO: 38212 - DNA, 288 bp, Zea mays
  Peptide Sequence Number=SeqID_79991
atggccgaagccctggcggcaatggcgggcggaattgagctcgccggagctaagggaaagtggttggccggtgaggggacagggagttgtagcgtcaccaaggtgccagtgtcagaatgcctagtcccgaggtcaagctgcgccaaaaccatgtcaaatgaatttggtttgagttcaaactttttcaggatgtgttcaagggaatttggcacgactttgatatttggatctcctggctttgagtttcgaaaaacagagaacgcggatgatctttgggaagaggtctga

SEQ ID NO: 38213 - DNA, 354 bp, Zea mays
  Peptide Sequence Number=SeqID_79992
atggagctccatgatgctctatcaggtcgactgaatggcgatcgccatggtacagtacctggctgggatcagaccgtcagcacccaaaagatctcaccgtcgatgagtcttgccatgattcgtgtcactggcgccaggattcacactcggggtggatggataacgtcgcggggtaaaggatcctcgccgccgaaaatagatgagaacgaagaagagatcgaagtgaccgaagagaagacaccaccacctttggaatctcaggcagggacttgtctctactttgacatctgcggtcccgagcctgactcacctactaacgaaggcaagccccggtgcatttgccaccttccttga

SEQ ID NO: 38214 - DNA, 561 bp, Zea mays
  Peptide Sequence Number=SeqID_79993
atggcggtcgaggtcctccacgtagtgggcaaaccagctgatgacccaggcacagggggcgagaggagcaccagagccgcgaccgaagctgcgaggcggtgccccgcaatggaggattggggaaaggatggcgagggaaagagtcgcgtggcctcccatttataccctgaagccaggaagatccgtgtctgcaccggatcagatcgccagcgccagaaaaatctcaccgtcgatgagtctcgccgtgattcgtgtcaccggcgccaggattcacactcggggtggatggataacgtcgcgggtgaaagatcctcgccgccggtgctcgccggagctcggctgtgcgcgaacgccgtcgtggacttccaaccgagaatagataggagtgcggggggtctttttgtaaacgaaaatgaagaagaaatcgaagtgaccgaagagaagacaccaccaccttcggaatctcaggcaggaaattgtttctacttcgatatctgcgggtccaagcctgactcacctactaacgaaggcaagccccggtgcatttgccaccttccttga

SEQ ID NO: 38215 - DNA, 282 bp, Zea mays
  Peptide Sequence Number=SeqID_79994
atggcctgctcatgtgatgacggccatggggtggccctggaggccacaacaagccgagtgaatgcatctggagttggagaggacgggtgggagggcgttgcagcggctgatggcgcggcggctggtggcggtgagggatgggcggctggtggtggtgaggataacctagagctgataccaggtgtcatggaccttcagtccatggggatagctgtcttctccggcgaggttatacccctctgccgcaggcttggttctagggtagcagccccacatgagtga

SEQ ID NO: 38216 - DNA, 558 bp, Zea mays
  Peptide Sequence Number=SeqID_79995
atggaccttctgtccatggagatatctgtcttctccggcgaggttatacccctctgccgcaggcttggttctaggctatgtcctcctgtcctcctggatctcaaggaaagagctgaactgcggacttcacgttggatgaaaggggggctgcatacccagatctcgacttctgcagggggttcaaaaagtatagacgagacctggtggttgggcgcgcaggctgcgagttggtgcagcgatgagctgatcagcaagtgcagcttccgcaccgcccgcctaacaaggaagccacgcactgcggcttgcaggcgcaccacggcctgctcatgtgatgacggccatggggtggccctggaggccacagcaaggtgcttctccccacgaagggactcggtggaacatcacaacgaactgatcccacttctctgtgagacaaccaaaactctcttcgagccgagtgtcatggaccttctgtccatggagataactgtcttctccggcgaggttatacccctctgccgaaggcttggttctaggatagcagccctaggcgcttga

SEQ ID NO: 38217 - DNA, 1578 bp, Zea mays
  Peptide Sequence Number=SeqID_79996
atggcggacaccctcaacactgagggcgggaccgggatcacagcccagtttgcctctccctatccaggagctggaggtcaccgtcttgggcacaagacccagcagcgccagcctgacgcgacggtcaatgcggccgaaagtgggccggcagtaatgacggtggcagacgcgcgggagcagcgggcacgtcgacaaccaagctcacgtcccatccgggggcagcgagagagctccctctcacggtgtgaagacaacgcgcccgtgatccgttcctcgaacggctcgcacacgcgcaacggctgccccgccaaccactcgccccgttgcattaactccacggctggacaggtggcgcttctggcagcagcaacgggcgacgcttcgccctcgccgaaacaaccgcaccaaaaaaggctggcccccgaagggttcaacagccgcctcagatcgcgtgggccctacacccactactggtcagaggttcgaaggccggcccccccgaagggttccacggccgcctcaggctactcgggctccgtgcccattactgatgaggggttcgaaggctggcccccgaaggacgtccactcggattacccgcttgcagctcacaggagacaccatgttcggtgcccatcgaggaggctcgggggcttctctcgcaaacccggctctggccgaaccgttgacagcgtcaacataccagcccgagaacttgggccccgaccgtacacccgggctacggccagctcgcatgagggaacaaccagaccagccgaagcattacgcaaggcattaagacctcgaaggagtgaaatcactcctccgaggcctcgggggctacacccggcgggtgcgctcgcgcgcacccaccggaaccaaatgcaaccgagaaaggctggtccccttgcaaaaaagtgcgacgaaagcctccaagcgagtgctaacactcccttcgaggctcgggggctactgtcggggaccataattaggggtaccctcaagacgcctaattctcagctggtaacccccatcagcataaagctgcagaggcctgatgggggctcggactcggcctctgctgacgacctccgcctcgcccgacccaggggctcggactcggcctctgctgacgacctccgcctcgcccgacccaggggctcggactcggcctctgctgacgacctccgcctcgcccgacccaggggctcggactcggcttctgctgacgacctccgcctcgcccgacccaggggctcggactcggcctatgctgacgacctccgcctcgcccgacccaggggctcggactcggcctcggccatggaagacagactcgaccccggctttggaggagcctccatgtcgcccaacctagggcacaggccagccacgtcgacaggaagcgccatcatcaccctaccccgagccgactcggggcgacgtcagcaaggacacaaccgttccaacagctgtccctccgccaggctccgttgctcctccgacagccacgacatcacgccagcagggtgccaagatctctccggctgccacattggcatgtacctagggcactag

SEQ ID NO: 38218 - DNA, 1578 bp, Zea mays
  Peptide Sequence Number=SeqID_79997
atggcggacaccctcaacactgagggcgggaccgggatcacagcccagtttgcctctccctatccaggagctggaggtcaccgtcttgggcacaagacccagcagcgccagcctgacgcgacggtcaatgcggccgaaagtgggccggcagtaatgacggtggcagacgcgcgggagcagcgggcacgtcgacaaccaagctcacgtcccatccgggggcagcgagagagctccctctcacggtgtgaagacaacgcgcccgtgatccgttcctcgaacggctcgcacacgcgcaacggctgccccgccaaccactcgccccgttgcattaactccacggctggacaggtggcgcttctggcagcagcaacgggcgacgcttcgccctcgccgaaacaaccgcaccaaaaaaggctggcccccgaagggttcaacagccgcctcagatcgcgtgggccctacacccactactggtcagaggttcgaaggccggcccccccgaagggttccacggccgcctcaggctactcgggctccgtgcccattactgatgaggggttcgaaggctggcccccgaaggacgtccactcggattacccgcttgcagctcacaggagacaccatgttcggtgcccatcgaggaggctcgggggcttctctcgcaaacccggctctggccgaaccgttgacagcgtcaacataccagcccgagaacttgggccccgaccgtacacccgggctacggccagctcgcatgagggaacaaccagaccagccgaagcattacgcaaggcattaagacctcgaaggagtgaaatcactcctccgaggcctcgggggctacacccggcgggtgcgctcgcgcgcacccaccggaaccaaatgcaaccgagaaaggctggtccccttgcaaaaaagtgcgacgaaagcctccaagcgagtgctaacactcccttcgaggctcgggggctactgtcggggaccataattaggggtaccctcaagacgcctaattttcagctggtaacccccatcagcataatactgcagaggcctgatgggggctcggactcggcctctgctgacgacctccgcctcgcccgacccaggggctcggactcggcctctgctgacgacctccgcctcgcccgacccaggggctcggactcggcctctgctgacgacctccgcctcgcccgacccaggggctcggactcggcttctgctgacgacctccgcctcgcccgacccaggggctcggactcggcctatgctgacgacctccgcctcgcccgacccaggggctcggactcggcctcggccatggaagacagactcgaccccggctttggaggagcctccatgtcgcccaacctagggcacaggccagccacgtcgacaggaagcgccatcatcaccctaccccgagccgactcggggcgacgtcagcaaggacacaaccgttccaacagctgtccctccgccaggctccgttgctcctccgacagccacgacatcacgccagcagggtgccaagatctctccggctgccacattggcatgtacctagggcactag

SEQ ID NO: 38219 - DNA, 345 bp, Zea mays
  Peptide Sequence Number=SeqID_79998
atggggaagcctgtcccatcactcctcatgctcctcctcagccgaggcagggtcccactcaacagtccaacccggtgcatcatggatcaagcagtctcattagctgcgagaagcagacgattcgaatcgagttttatccttgcaaggttatgcataaaaccggggcttgccttccaaagcagtggcaggcaggtcctctggtgcaggctcgggtgctggatctggggctacctcctgagcagctccttgctccggcacgaggatgtactctccgtcagcaagattacagtctatcgaaatgcaatgaacatgtatgtcatgattatgcaagatttaagaacataa

SEQ ID NO: 38220 - DNA, 345 bp, Zea mays
  Peptide Sequence Number=SeqID_79999
atggggaagcctgtcccatcactcctcatgctcctcctcagccgaggcagggtcccactcaacagtccaacccggtgcagcatggatcaagcagtctcattagctgcgagaagcagacgattcgaatcgagttttatccttgcaaggttatgcataaaaccggggcttgccttccaaagcagtggcaggcaggtcctctggtgcaggctcgggtgctggatctggggctacctcctgagcagctccttgctccggcacgaggatgtactctccgtcagcaagattacagtctatcgaaatgcaatgaacatgtatgtcatgattatgcaagatttaagaacataa

SEQ ID NO: 38221 - DNA, 393 bp, Zea mays
  Peptide Sequence Number=SeqID_80000
atgaccagtgggacccacgttgtcagcatttctgtcgcgctcgccgggacgctcgtgactcgcgcgccttacttcaccgccaagtgggacccgatgcccctctcttcacgtcgcgcagatcgcggaatctcggccgtggcggaacttgccgcgaacctcggagccattgaccgaaatccccacctcggcttcgtccctaggcactataagaatctcatctcttctctctcctcctcaatttcgctcgcagtgtcaccacaagtccacccttcaccgtgggcggcggattcctccttcgcattttccggcgccgccgcgtctggccaccaggaagggctagtgcgcagtggaggtgcgcggaccgttgatcttttatgcaacgatcgtgattag

SEQ ID NO: 38222 - DNA, 510 bp, Zea mays
  Peptide Sequence Number=SeqID_80001
atgtgggccctactcgtcaggagcatcttcacaacagagcatgccgcgaccgcttttgccgccgcggagatcgcggaatcccggccgtggcggaacttgccgcgaacctcggagccattgaccgaaatccccacctcggcttcgtccctaggcactataagaatctcatctcttctctctcctcctcaatttcgcgtgcgccgccgccacaccttctcgcagttcggccatcggcggggattacttggcgctgtagattgggcctcggtgtggcgctgcgacgttgcgttggagctcggggggtgtgttcgtggtctcggtggtggcgtcagtgctccgggggcgagcgaattgctcgccgcagtcgcagtgtcaccgcaagtccacccttcaccgtgggcggcggattcctccttcgcattttccgacgagcaagccactgtggaatctgaggttcagcaagtagagactgctgagcaggagcttgtggaaggcaagttgtgcccttga

SEQ ID NO: 38223 - DNA, 396 bp, Zea mays
  Peptide Sequence Number=SeqID_80002
atgcactcgtgcctcttcgcgccctacttttcgtggaagtacagccaccagcgccaccacgccaacaccgcgtccctggagcgcgacgaggtgttcgtgcccaagcagaggcccgagatgccgtggtactccccgctcgtgtacaagcgcgacaaccccgtcgcccgcctggttctcctcgccgtgcagctcaccgtcggctggcccatgtacctggcgttcaacacctggggccgccgctactcccgcttcgcgtgccacttcgacccctacagccccatctacggcgaccgggagcgcgcccagatcgccgtctccgacgccggcgtcctggccgtgtcgttcgcgctgtacaggcccttaagccaaccgcagcccgtgaactttttagtataa

SEQ ID NO: 38224 - DNA, 1152 bp, Zea mays
  Peptide Sequence Number=SeqID_80003
atggagcagcagacgaagacgacgacacagcaagagggcaaaggcctcaccaccatgcagcggtcgatcgtggacaagccgccattcacgctagcggatctcaggaaggccatcccgccgcactgcttccagcgctcgctcatcaggtcctgctcctacctcgcccacgacctcgccatcgccgcggggctcctgtacctagctctggccgtcatccccgccctcccgggcgtcctcctccgcgccgccgcctggccgctctactgggcggcgcagggcagcatcatgttcggcgtgtgggtgatcgcgcacgagtgcgggcacagcagcttctcccgctacggcctcctcaacgacgccctcggcctggtgctgcactcgtgcctcctcgcgccctacttctcgtggaagtacagccaccagcgccaccacgccaacaccgcgtccctggagcgcgacgaggtgttcgtgcccaagcagaggcccgagatgccgtggtactccccgctcgtgtacaagcgcgacaaccccgtcgcccgcctggttctcctcgccgtgcagctcaccgtcggctggcccatgtacctggcgttcaacacctggggccgccgctactcccgcttcgcgtgccacttcgacccctacagccccatctacggcgaccgggagcgcgcccagatcgccgtctccgacgccggcgtcctggccgtgtcgttcgcgctgtacaggctcgccgcggcccacgggctctggcccgtggtcagcgtctacggcgtgccgctgctggtgacgaacgcctggctcgtggtggtcacgtacctgcaccacacgcaccgcgcgctcccgcactacgactccagcgagtgggactggctgcgcggcgcgctcgccaccatggaccgcgactacggcctcctcaaccgcgtgctgcacaacgtcaccgacacccatgtcctgcaccacatcttccccaacatgccgcactaccacgccatggaggccaccagggccatgcgcccgcttcttggagagtactacatgttcgacgacacgcccatcgtcaaggccacatggcgcgaggccaagcagtgcatctacgttgagcccggggaggagcacaagggcgtgtactggtacaacaacaagttctag

SEQ ID NO: 38225 - DNA, 261 bp, Zea mays
  Peptide Sequence Number=SeqID_80004
atggcagctcgaggacaagctggtcctcaagggagggggagatgtcatggtcatcatagggagcggtcactcatgtggggccgcacctatgcgcgccaaaagcgagaggccgcagggggcgctggcagcagcacgcgcaaggaaggcacggacgctggcagcagcgcgcgtaaggaaggcatggcaaaggaaagcgcgcacaaggaaggcatggcaaatgaaagcgcgcgcaaggaaggcatgacaaaggaaagtgactga

SEQ ID NO: 38226 - DNA, 210 bp, Zea mays
  Peptide Sequence Number=SeqID_80005
atggctaatctttctcctgactctaatgagtccacttttgctgactggtgggcgaaagtggtttttgatggtgtcagtccttcaattattggcataaaggcaaatttttttgataaagttgaattctggaggcttgccggtgctaggcatcttgaggctttggttcctggtgctggaatttttaggtcaagggttcttttgggtgattaa

SEQ ID NO: 38227 - DNA, 1017 bp, Zea mays
  Peptide Sequence Number=SeqID_80006
atgatgatactgttaaagcctcttcttttggatttgtgcacttgcttactcactttcgtccaccagtcagcaaaagcggactcattagagacaggagaaagattagccatccccaacgaagaaagaattctatcagctgtccaacatttatttcttattgccaaccaaagaaaaaatttgcatttgggtgaagcccaagtcttccacaacctcttccatggttcaaaatttgacaagagtggtaagatatctggtgctgccattagaacttacttgcttgagagatctcgggtttgccaaattaatagtccagagaggaactaccattgcttttacttcctatgtgcagctccatcggaggatcttaagaagtataagctcggggacccatcgtcctttcactatctcaaccagtcagcttgcattcaagttgatggaatcaatgacgctgaggagtaccttgcaacaagaaatgcaatggatactgttggaatcactgatcaagaacaggaagctatattccgtgttgttgctgctgtgcttcatcttggaaacataaattttgcaaaagggagagaggtagattcatccataataaaggatgacaaatctagattccatcttaagacagcaggagagctcttgatgtgtgattgtgagaagttagagaatgccttgataaaaagggaaattaatacacccgaaggagtgattaccacaacagttggtccaaattctgctactattagccgggatggtttagcaaagcagatatactctcgattatttgagtggcttgtaaacagaataaatgcatcaataggacaagacccagactctaacaaactgattggagtacttgatatatatggttttgaaagttttaaaaccaacagttttgaacaactgtgcatcaattttaccaatgaaaaactccagcaacattttaatcagaatgtcttcaaaatggaacaagaggaatacacaagggagcaaattaaattgggagttacatag

SEQ ID NO: 38228 - DNA, 228 bp, Zea mays
  Peptide Sequence Number=SeqID_80007
atggcgtcgagcgctggcggcgcatcatcatcgctggcgcacgacgatcgtgggcggttcatattgcgggtggttccagacgtgggcaccgggcgtgagatttttaatgcctactgctctctccacatgatcatttatcactggctccagcatgtcatgctgctcatgctgctgcaagggattgtctatgtttggaaagaatggttccggaacaaaataccattataa

SEQ ID NO: 38229 - DNA, 657 bp, Zea mays
  Peptide Sequence Number=SeqID_80008
atggcgtcgagcgctggcggcgcgtcgtcgtcgctggtgaagaacgagccctacatgcgtgctgtcaagatctacctcaagagcctagacatccaaatggagaaacagctagccaagacatggagaagcacaaggggtcacgtgggcaccgggcgtgagatttttaatgcctactgctcgctccacatgatcatttatcactggctccagcatgtcatgctgctcatgctgctgcaagctaagaaatttaaggttccttcctctgaaaatcttagggagattgctgaacactgtaatgaaagaaagtgggctggtcgccgtgcagaagaagctggacagaagctctacatgtgggctctgataaagaacaaagagactgtagtatgcaatgctagagttctgggacttggtcccaggttcatgtcagtttatgttcccaagcttgcgatggaacaaaggatatattatgatgaagttgagggattatcagttgaatggaacaagcctgctcaaaggagaggaactcatatgaagtgcaggccgattgaggaagtcgcggtggtggtgaacccttcagagttgtctgaagaagatgaggaatcaggaccatgtcccgacgacgatgtccgtgctgttcccttccagtcgatgggatag

SEQ ID NO: 38230 - DNA, 741 bp, Zea mays
  Peptide Sequence Number=SeqID_80009
atggagaaggatcgccaagatgcgctgcggaagcgccgggcgtacgccaggttggcggacccgaggcgcgaggcgaaggtggcgcggcccattgcgaagcctgccgccccgggcgccagcatgcctctgcccgccgcgcccactagtgagcgaatgcctcccttgccactgcgcgctgctgagacagcggtggcgggcaccaaagtctccatggagctctccgtggacgactacctggtgggtggggtcgctatgttcgacgctcatacggggctggctcctgctggtgagtttttttacaaggtgactgtcttcgccgaacgcattgcttcgggggcgctgacgtcagagttttctgccgagaggcggcgacttgaggggaggatcgagcgcctccggacgcaacatacggaggcggtcagggacaagtcgacggttgagaacaagggccgcaaccttcttgagaaactgacggtggcggagacggagaaagaggacctcagctgtcggcttgcggaggagagggagggcacggaaaaggcccgcgtagatgcccaggctacccgcgctgaggctgacaccgcgtgcgctgaggccagccttgctctcaagcgtgttgccgacgcaaagtcggggctaaagagcttgcacaactacaccgagaagacggaggcctccacccacgctggggttgaacggccgcacgcgttgctcgtggatgcgtaccgttctgacgtctga

SEQ ID NO: 38231 - DNA, 1560 bp, Zea mays
  Peptide Sequence Number=SeqID_80010
atgtcttcgcccgagctccaggaatcttctgcgcgaatgctgaaggttaccgggggtcgctggcctaggaatgttccgataccccaggcggccgacgaggacatatttacgtctcaattagctcgtgacatgaagattttcccttatggaaggaatgttggtgttgttgtatcggcagtgatggagaaggatcgccaagatgcgctgcggaagcgccgggcgtacgccaggttggcggacccgaggcgcgaggcgaaggtggcgcggcccattgcgaagcctgccgccccgggcgccagcatgcctctgcccgccgcgcccactagtgagcgaatgcctcccttgccactgcgcgctgctgagacagcggtggcgggcaccaaagtctccatggagctctccgtggacgactacctggtgggtggggtcgctatgttcgacgctcatacggggctggctcctgctggtgagtttttttacaaggtgactgtcttcgccgaacgcattgcttcgggggcgctgacgtcagagttttctgccgagaggcggcgacttgaggggaggatcgagcgcctccggacgcaacatacggaggcggtcagggacaagtcgacggttgagaacaagggccgcaaccttcttgagaaactgacggtggcggagacggagaaagaggacctcagctgtcggcttgcggaggagagggagggcacggaaaaggcccgcgtagatgcccaggctacccgcgctgaggctgacaccgcgtgcgctgaggccagccttgctctcaagcgtgttgccgacgcaaagtcggggctaaagagcttgcacaactacaccgagaagacggaggcctccacccacgctggggttgaacggccgcacgcgttgctcgtggatgcgtaccgtgagctcggcgcgcattttgaagtcttggatcgggtaaccgaggacttcgaccatggaatcttccagatgatgaatgacgaagaagtcgaggacttcggcggccttgaaagctcgatgactcggacagagggcgtggagacggggctgaagggcactcagcgtctcaagccgaccctagcgaagactctgcagcggcggctgctccggcataggtggcagggtcgcattagggttgttgggttttgggtttctttttgtgatactgaagggatgaggatcccgctttcgtggattgaggagtcttctaaggaagatttagactactttgctgcgttggatttggccgcatcggagtccccgccgcaatttgatgcgcgcgaagaatctacttcctcggccagggcgatagccgaagaccaccacaggcaaaaggtggtgtcgaagcagagtgttggtgggatgtcacgaagtgggagacgtcaccgaatgggtatggagcgatcccgtcttcgactagatcggggtagccaacgcgatctactgtcctcgacggccgggacgtgtattggggagggggacttgcagaatctatttgagggcaaagagttgaggatgatgttgtttaattttcgggaggcggttcttatttga

SEQ ID NO: 38232 - DNA, 384 bp, Zea mays
  Peptide Sequence Number=SeqID_80011
atggctgggaagggagggaaaggcttgctcgccgcgaagactacggcggccaagtccgccgagaaggacaaggggaagaaggccccaatctcacgctcctcccgcgccggcctccagttccctgttgggcgtatccaccgtcagctgaagcaaaggactcaggcaaatggtcgcgttggtgccaccgcagccgtctactccgctgccatcctggagtacttgactgccgaggttctggagctggctgggaatgctagcaaggatctgaagctagccattcgtggagacgaggagctggacaccctcatcaagggcaccatcgcaggcggaggtgtcatcccgcacattcacaagtccctgatcaacaagtcctccaaggagtga

SEQ ID NO: 38233 - DNA, 1105 bp, Zea mays
  Peptide Sequence Number=SeqID_80012
gcgcaagcaagctacgcctacaaaaagaagcatctgctctttacgctgctcagtctcatctcgtgcaaggcgaaaggtcggtgccagttcgttcaatgctcatacctcactactggcaagggataagctttatgatggtgaacaacctctgagtgcagagttgggtgaagagcttggaaagactcagccactcagtgggtactattcctcactgcttatagatggcaaagacagaatagaagatgggaacaggatagaagtaccagttacagaagatccaatagaaattccctcaataaagaagccatcagcgcctcgaccggacagtgacataggtgatccacagatttttttatccttcaagtaccttagaaggctgcaattattttgtagatacttcatgtacacagcaaaagatttggaagagtggttagaaaatcatgattcctttcgccacgagcagaatttggttcagtggactgagaaaaaacggccatatgttgaagcccttttcatcgtggtttatattcagtatgtgcactctcatttttgctcatatggccctgcagatttggttgtcctcaaatggtttcacctaatacgtttagtgtcgaaccaaatatttgccagagtcgtactggaagacgggatctcgctgacggaggtaggagggctgctgcaggagtgggatggcagggaagagccagcaggacagcatgccctggaggacagcctcgcatccgaggatctggggagcatgctggagtccatcaaagtggagagggccaaatattcactgatgtgctttcagttccctgttggacgtatccaccgtcagctgaagcaaaggactcaggcaaatggtcgtgttggtgccaccgcagccgtctactcagctgccatcctggagtacttgactgccgaggttctggagctggctgggaatgctagcaaggatctgaaggtgaagcgtatcacccctcgccatttgcagctagctattcatggagacgagctggacactctcaccaagggcaccatcgcaggcggaggtgtcataccgcacattcacaagtccccgatcaacaagtcatccaaggagtga

SEQ ID NO: 38234 - DNA, 372 bp, Zea mays
  Peptide Sequence Number=SeqID_80013
atggcggagcaggatggcgacgcggggcagaggccacccgactccgttccggtcccgctggaggcgaaagcttgcgagaaagggggcggtgatgaggttgtcgttttctttgttcaaatcgtctcaattgctaatggaatggtcaacccaggggatcaaaatactaatcagcatcaaccattttttcgacgatgtgccaaccacttcgcactgttttcgggaacattcctcggtgctaatgaagactcaactagaacccttgcagaaatcgagaagaagattgcaagggctaccgtgttacccagaaatcatggggagccattccaaactcctccacctggtcccttggtctccatcaggaagccaccatag

SEQ ID NO: 38235 - DNA, 615 bp, Zea mays
  Peptide Sequence Number=SeqID_80014
atgccccgccgtgggcgctctggcagatccctgttcgacatccgcggtgagccccgaccctacttcattctcgaaatcgtaactggcgcccacatccctctctattccatggcggagcaggatggcaacgcggggcagaggccacccgactccgttccggtcccgctggaggcgaaagcttgcgagaaagggggcagtgatgaggttgtcgttttctttgttcaaatcgtctcaattgctaatggaacggtcaacccaggtcaaaacaaaataagaatggtcatagttctgatctgtgtttgttctgaactatctgatttgtcaatttgttgtgaatgggaaatgggtatcataggaagtaatagctattccaatcgtgactccaatgaacctgctcaattggctgccgaataccgcggacaagggtttcaaactctgaagctcaaggttgggaagaacttgaattcagatatagaagttcagaaagctatacgacttgtccatccagattgctcatttattttggatgcgaatgagggatacacaagaaatcaagcaattgaagttctcgatagactaaatgctatactgatatacaattctccaaaatgttaa

SEQ ID NO: 38236 - DNA, 453 bp, Zea mays
  Peptide Sequence Number=SeqID_80015
atgggtgtaggcaagggacggcttggaggtgagtggttgccttcttcttctataaatagtgctcttgcttctccggcgttttcacatttcttgctactgcttgctatttcatctcatctccttccttccattccgccatgggcaagagcaagaaaggtatggacttacatccggcccgtcgagcgcgtcgggctcgagggctcggatgagtccaagtactcctcggacgaggcgaattcctctgactcgtccgaggagggcagcagcggtgacggcgacgacgacggaggcgacggtgacggcggcggcgacggcggcaagggcggtgacggcagcggcaagggtggcagcggcgacggcggcaagggcggtgacggcagcggcaagggtggcagcggcgacggcggcagcggcaaaggcagcagcaagggcagcaacaaggctagtggctag

SEQ ID NO: 38237 - DNA, 252 bp, Zea mays
  Peptide Sequence Number=SeqID_80016
atgggtgtaggcaagggacgacttggaggtgagcgattgccttcttcttctataaatagtgctcttgcttctccggcgttttcacatttcttgctactgcttgctatttcatctcctctccttgcttccacttccgccatgggcaagagcaagaaaggtggtggctctttgcatcactcgggcgacaagcgcaagcgcgagccgactcctccctcggaggacttcggcgactcggagtactcagaggagtag

SEQ ID NO: 38238 - DNA, 384 bp, Zea mays
  Peptide Sequence Number=SeqID_80017
atgagggtggccttcgcctgcagcgtgtgcgggcagcgtacgaccagggccatcaatactcatgcctacaccaatgagactatgtttgttcagggtgttcagaagcacgaagaggttagtaaagtcaaggacgacaatgttctcagcagtagttggccacgtgctcctagccgcacgctgtcaccgctctctgcttggcgctctcctctcccgaccacagctacaccacacgactgtgagctcgcgaagggattcgatgagtacatgaacttggtcctcgatgatgctgaggaaatcaatgtcaagaaaaacactaggaagacactgggccggatactcctcaaaggtgacaacataactttgatgatgaacattggcaagtga

SEQ ID NO: 38239 - DNA, 507 bp, Zea mays
  Peptide Sequence Number=SeqID_80018
atggcgagtaaagtcaaggacgacagtgttctcagggttttttcatggatctttaaccatctaaagaagagcagcagttggccacgtgctcctagccgcacactgtcgctgctctctgcttggcgctctcctctcccgaccacagctacaccacacgactgtgagctcgtgaagtcaatcaagaggcatcgagttctgtttgatgaggaggggaagatagtggtaaggaggatagacaactcgatgagtaggcatgtgactttttccaagaggtggaacagactgctgaagaagatgaaggagctctctatcctctacgatgcggatattggcctcatcatcatctccagcaccagcaggctctacgagttcgccaacaccaagacataccgactgacctttgaaagtactaaagaactgatagatacaagatctatggcatttgacattaacatcctagagaggcagacctgcaaaagtctaaccacatctggaccaagacgttag

SEQ ID NO: 38240 - DNA, 927 bp, Zea mays
  Peptide Sequence Number=SeqID_80019
atgatttctacaaggaaaggagatcccttgaaaccagctgtgacgggcttcttagtgttcgtttccactccagatccaattggcaacaagtactatcttggccctgctcctttgcagtatatggcaaggcaaattgctacagccaatggccctactggctataatagggattacctgttctcaatggagaaggcattagccagcattagccatgaagatgattcgatcatagatcttgcaaacgaaggtggaggaaggcgcgtgaactcttctactacctcaagggtgagtaggtggactatggcgagtaaagtcaaggacgacagtgttctcagggttttttcatggatctttaaccatctaaagaagagcagcagttggccacgtgctcctagccgcacactgtcgctgctctctgcttggcgctctcctctcccgaccacagctacaccacacgactgtgagctcgtgaagtcaatcaagaggcatcgagttctgtttgatgaggaggggaagatagtggtaaggaggatagacaactcgatgagtaggcatgtgactttttccaagaggtggaacagactgctgaagaagatgaaggagctctctatcctctacgatgcggatattggcctcatcatcatctccagcaccagcaggctctacgagttcgccaacaccaagacataccgactgacctttgaaagtactaaagaactgatagatacaagatctatggcatttgacattaacatcctagagaggcagacctgcaaaagtctaaccacatctggaccaagaccggaaaaactcagggagaagctgaggcaggagtgcctgcggaaggggacaaaactggcgcatggggtggctgacgccctcttcgctgtaccacacaccgaggataaaggcattgaagagcactaa

SEQ ID NO: 38241 - DNA, 627 bp, Zea mays
  Peptide Sequence Number=SeqID_80020
atggcgagtaaagtcaaggacgacagtgttctcagggttttttcatggatctttaaccatctaaagaagagcagcagttggccacgtgctcctagccgcacactgtcgctgctctctgcttggcgctctcctctcccgaccacagctacaccacacgactgtgagctcgtgaagtcaatcaagaggcatcgagttctgtttgatgaggaggggaagatagtggtaaggaggatagacaactcgatgagtaggcatgtgactttttccaagaggtggaacagactgctgaagaagatgaaggagctctctatcctctacgatgcggatattggcctcatcatcatctccagcaccagcaggctctacgagttcgccaacaccaagacataccgactgacctttgaaagtactaaagaactgatagatacaagatctatggcatttgacattaacatcctagagaggcagacctgcaaaagtctaaccacatctggaccaagaccggaaaaactcagggagaagctgaggcaggagtgcctgcggaaggggacgaaactggcgcatggggtggctgacgccctcttcgctgtaccacacaccgaggataaaggcattgaagagcactaa

SEQ ID NO: 38242 - DNA, 627 bp, Zea mays
  Peptide Sequence Number=SeqID_80021
atggcgagtaaagtcaaggacgacagtgttctcagggttttttcatggatctttaaccatctaaagaagagcagcagttggccacgtgctcctagccgcacactgtcgctgctctctgcttggcgctctcctctcccgaccacagctacaccacacgactgtgagctcgtgaagtcaatcaagaggcatcgagttctgtttgatgaggaggggaagatagtggtaaggaggatagacaactcgatgagtaggcatgtgactttttccaagaggtggaacagactgctgaagaagatgaaggagctctctatcctctacgatgcggatattggcctcatcatcatctccagcaccagcaggctctatgagttcgccaacaccaagacataccgactgacctttgaaagtactaaagaactgatagatacaagatctatggcatttgacattaacatcctagagaggcagacctgcaaaagtctaaccacatctggaccaagaccggaaaaactcagggagaagctgaggcaggagtgcctgcggaaggggacgaaactggcgcatggggtggctgacgccctcttcgctgtaccacacaccgaggataaaggcattgaagagcactaa

SEQ ID NO: 38243 - DNA, 387 bp, Zea mays
  Peptide Sequence Number=SeqID_80022
atgatgagggtcagtgcttgccgaaggtggtcgaaaaagggttcaccaaaggcatgggacgcagcccatgtgaaattacattcatgccctctacatttgctaatgactataagctcttttgcgcgtagcttcggcgctgcatcattcttcgtattgttcatgcttctctcgttgtggttctgtttcgaatccgagggtacctgttcatgtatttcaactccagaaacattgttaaatcatgcttttgaggaccttcggaagacgaaggcccccaacaacgccaccaccggtcagcacccggaggagcttatgcaggggagagagctactccaggagaggatccaaacccgttacacgacttcatcaacgagtttttcgcttctggag

SEQ ID NO: 38244 - DNA, 549 bp, Zea mays
  Peptide Sequence Number=SeqID_80023
atgaataaagacatccttgtagcagccgatgaccacgaaggtggtctctgcctgcccaaatcaagcgctcgcctgactcaggagtcaggagtcgggtacaacaaggcgtcatcactatccttttctgctgaatccagaagacaaatacactactgccgtgcccccctcccttctctctctcttcgccgcagcgtcagccgacggcaaaaccctagatctctctccctcttaaaccctctcaacaagtgcgggaggatgtcagagccgtccaaggtaatccacatccgcaacgtcgggcacgagattgccgagtctgatctccttcagctgctgcagccgttcggcatggtctccaagatcgtcatgttgcgtgccaagaaccaagctcttctgcagatggaagacctccatgcttccgtgagcgcgctgcaatattacacttctgttcaacctagcataaggggaaggaatgtatacatgcagttctcatctcaccaagagcttaccactgaccagagctctcatggaaggaattctgatcaggcataa

SEQ ID NO: 38245 - DNA, 915 bp, Zea mays
  Peptide Sequence Number=SeqID_80024
atggcccctcgcaagggttcgacagccgccccagagcactcgggcttcaagctcattactgatcaggggttcgaaggctggcccctcggaagggttcgacagccgcctcagagcactcgggctccgcgcccactattgatcaagggttcgaaggctggcccctcggaaggattcgacagcctccccagagcacgcagagtgagggatgactctgggtacatccgttacatggccgaggcttgggctacgctcccgaggtcaaggcctcgtctaccaagggacgcaatcccgcctcgcccgagcccggcctcgggcgggaacagtagtcctggacgaattcacgccttgcccgagggcctcctcaagcgacgggcgcaccctcgactcgcccgaagcccagctcgggcaggcttcattgtgaagcaaccttggccaaatcgcatcaccaaccgaccgtatcgtaggcgcattcaatgcgaggatcgcctgacaccttatcctgacacacgtgcctcagtcggcaaggtcgaagtgacccctcgggcgcaacaggaagctccgcctcgcccgaccttaggcctcggctcgggaggaggtctccgcctcgcttggccccagggctcggcctcaacctcggcctcggaaggtggtctccgcctcgcccgaccccacggctcggccttaacctcggcctctggaggaatcgcgtcctcgcccgaccccagcctcggcctcaggaggagtctccgcctcgcccgaccttgggctcggaccaaccgtgccacgggggatacatcattacccctacccctagctagctcaggctacgggggaacaagactggcgtcccatctggctcgccccgggctcaggcactcctccgacggccacgttaccgcgtacacagagctctag

SEQ ID NO: 38246 - DNA, 865 bp, Zea mays
  Peptide Sequence Number=SeqID_80025
atggcccctcgcaagggttcgacagccgccccagagcactcgggcttcaagctcattactgatcaggggttcgaaggctggcccctcggaagggttcgacagccgcctcagagcactcgggctccgcgcccactattgatcaagggttcgaaggctggcccctcggaaggattcgacagcctccccagagcacgcagagtgagggatgactctgggtacatccgttacatggccgaggcttgggctacgctcccgaggtcaaggcctcgtctaccaagggacgcaatcccgcctcgcccgagcccggcctcgggcgggaacagtagtcctggacgaattcacgccttgcccgagggcctcctcaagcgacgggcgcaccctcgactcgcccgaagcccagctcgggcaggcttcattgtgaagcaaccttggccaaatcgcatcaccaaccgaccgtatcgtaggcgcattcaatgcgaggatcgcctgacaccttatcctgacacacgtgcctcagtcggcaaggtcgaagtgacccctcgggcgcaacaggaagctccgcctcgcccgaccttaggcctcggctcgggaggaggtctccgcctcgcttggccccagggctcggcctcaacctcggcctcggaaggtggtctccgcctcgcccgaccccacggctcggccttaacctcggcctctggaggaatcgcgtcctcgcccgaccccagcctcggcctcaggaggagtctccgcctcgcccgaccttgggctcggaccaaccgtgccacgggggatacatcattacccctacccctagctagctcaggctacgggggaacaagactggcgtcccatctggctcgccccg

SEQ ID NO: 38247 - DNA, 276 bp, Zea mays
  Peptide Sequence Number=SeqID_80026
atgggagatttcgtcttaggtcgtgtgaggggatatgtctgcgggcaggttcaatcaggtatccgcacgttaatccttattccaatttcatctcgtagaccacgcatccccatggatccgtttccacagaccaatcatccatatggtatgaaagtttgggttttgcctaaggataagcatagtggattgaaacttggattttccttagatgttttagcaggctgtcctataaatttgaggtggatactgattcagatactatttgtgcaaaattaa

SEQ ID NO: 38248 - DNA, 414 bp, Zea mays
  Peptide Sequence Number=SeqID_80027
atggggaagcctgtcccatcactcctcatgctcctcgtcagccgaggtagggtcccactcgactgtccaacccggtggcaagatggacggccaagtcactccagcaaccatgtcctccagagaacctgtaaaaattatgccacaagcaaggctgagtatactaatactcagctagacttacccggttacaatggatcaagcagtctcattagctgtgagaagcagacgattcgaatcgagtttttatccttgcaagtgaccgcacttgtacccaccataactggaatgggagaccacatctcaggtcgtgtgaggggcaaagtctgcgggcaggttcaatcaggtatccgcacgttaatccttattccaatttcatctcgtagaccacgcatccccatggatccgtgtccatag

SEQ ID NO: 38249 - DNA, 303 bp, Zea mays
  Peptide Sequence Number=SeqID_80028
atggtgcgcctccaagggcgatattccatacttcgagacctctgcgaaggaggaccccaacgtcgacactgcttttcctatgcatcgctaggctcgccttggagcatgagcatgaccaagacatgttgccaaatcctggcgactcccagattgatttgcagttctaatcatagatacgcgtttgatatttgtccgttttgtgtgcccccagttacttcaagacagttgcggaacaagtcccggacactgaacagacaagcagatgtgcttgctaggagccaaccatttcctggaaggctgtaa

SEQ ID NO: 38250 - DNA, 468 bp, Zea mays
  Peptide Sequence Number=SeqID_80029
atgtggatgggggaagatacccttaataaccatgcagttcctgagcctgctcagtcatccctgttctctcttgacacacgtgaatatcctaatattattgttgttcttgttctgtcctggcaaaaatacttgatgcatttgtctatgattttcctggagatcgaattgtccttttgtgatcctaggtttgatacagtgctgcaattttctgctctcccaccgagaatagccgatctgttgatgtgcttggccttaagactgcttttgcaaccttcatgggttccagagaagaaagcgagggaatggtgcgcctccaagggcgatattccatacttcgagacctctgcgaaggaggaccacaacgtcgacactgctttcctatgcatcgctaggctcgctttggagcatgagcatgaccaagacatgttgccaaatcctggcgactcccagattgatttgcagttctaa

SEQ ID NO: 38251 - DNA, 336 bp, Zea mays
  Peptide Sequence Number=SeqID_80030
atgtcggctgcacataggagaagctttaatacgctcgatacctggcatgatgagttcctcaatcaagctgacccatcggatcctcagcgctttccgttcattttggtcgggaacaagattgattcagatggcgggagcaaacggatggttcctgagaagaaagcaagggaatggtgcgcctccaagggcgatattccatacttcgagacctctgcgaaggaggaccacaacgtcgacactgctttcctatgcatcgctagcctcgccttggagcatgagcatgaccaagacatgttgccaaatcctggcgactcccagattgatttgcagttctaa

SEQ ID NO: 38252 - DNA, 1206 bp, Zea mays
  Peptide Sequence Number=SeqID_80031
atgcccttcgcgcgcaggtacgccctccgcgccgctcgcctgtacccgacctccccacgtgccccagtggtggccaccgccgccaacgtgctcctcgccgacgcctcctcccaccacgccgcgctgctgctgcccgagcccgacgaccccgacgcctcgccgctctccgtctccgagctctgccgccacttcaagtcgctcatcaagtccctccgcgtcggcctcgacgccaccaccgcagccgcctacccctccgttgctgccgccgccgaggaggcactcgaccgcgccaccaaggcctacgaggcgctcaccgcccctgcccctgggaccttctggaccgcctgcgccgggtgccgcctcctccacgagttcgagcgcaagctatacagagaattaagaagttgtcttgacctcactggacctagagactactcatcaccagaggaaatggtacaaagactaacatcagcttctactgtactaaggagggtgttggataacccagcactccaggactgtcaagagaataatggatttggagacatgatggatgaagatgttataagcaatatttcgctgtccggccgcatgtaccgcgtcaccttcaccaaccggctcaacggggccgcaggcgcgattttcctggagatcgaattgtccttttgtgatcctaggtttggatacagtgttgcgattttttgctctcccaccgtaagaacacaagatgtggatagaaaattgttgatagtcttggtgttggttggacttacttttagtgtccctatagtgaattactttcgtgtcttcatagtcaattcaaagctccttacagacacctcatgtttcacagtgtaccacatttgcaggagaatagctgatctgttgatgtgcttggccttaagactgcttttgcaaccttcatgggtaaggcaagttggcccatcggatcctcagcgcttttcgttcattttggtcgggaacaagattgattcagatggcgggagcaaacagatggttctggagaagaaagcgagggaatggtgcgcctccaagggcgatattccatacttcgagacctctgcgaaggaggaccacaacgtcgacactgctttcctatgcatcgctaggctcgccttggagcatgagcatgaccaagacatgttgccaaatcctggcgactcccagattgatttgcagttctaa

SEQ ID NO: 38253 - DNA, 753 bp, Zea mays
  Peptide Sequence Number=SeqID_80032
atggaaggcgcgatccactctcctcgccccatcatcggcgtccactatccatcgaagagtctcgccttcccagtcccccttccccacagatggccggcgaacccatcgccaccgtgccatcggggcctgaatccgtggccgaggccgaccgtctcctggcgctggccgagtcggagctctccacgggcaggcacgcccttcgcgcgcaggtacgccctccgcgccacccgcctgtacctgacctccccgcgcgccccagtggtggccaccgccgccaacgtgctcctcgccgacgcctcctcccaccacgccgcgctgctgctgcccgagcccgacgaccccgacgcctcgccgctctccgtctccgagctctgccgccacttcaagtcgctcatcaagtccctccgcgtcggcctcgacgccaccaccgcagccgcctacccctccgttgctgccgccgccgaggaggcactcgaccgcgccaccaaggcctacgaggcgctcaccgctcctgcccctgccaaaaggctgttcggtctggagcaccggactgtccggtggtgcaccggacagtgtccggtgcgccagactgactcgggcgaactggccgctctcgggaatttaccggcgacgtacggctataattcaccggactgtccggtgtgcaccggactgtccggtgagccaacggtcggccgggccaacggtcggccgcgcgatctgcgcgggacacgtggccgagctaacggctag

SEQ ID NO: 38254 - DNA, 333 bp, Zea mays
  Peptide Sequence Number=SeqID_80033
atgcccgtgctcgtggccgcgagaggggttgcggcaccggcggggaggcacgggaagttttgtgaggcgcgggcgtgcggcgcggcggcggtggctgcagggcgcaggctgaggaggcggcgggttacccagccgatcaaacgccgagaacttggaacggacggagccggcgttgtcattacaccaactacatggataataggcaagaaatccattctattctacaacacagactacaccgtaacaccaacttgtacctatgtatccacattacataagaatgaagcagtgcggaagccagtagcgcttgcattgcagggagccaagctttga

SEQ ID NO: 38255 - DNA, 1209 bp, Zea mays
  Peptide Sequence Number=SeqID_80034
atggcgcggcggcgggcgaggcgaggtcgcgactgcggccgagggcgcaacggcggcggcgacgcaggccggtggcttaacgagtgccacaaaggcacaaacccacaaagaaatcgagccaaatccgccagggcccggtgccattgcattgccccgaaggccaactggccaaggcacccgcgccgcggtcgctactcgctgctcgccatacccggctccgtccgttccaagttctcggcgtttgatcggctgggtaacccgccgcctcctcagcctgcgccctgcagccaccgccgccgcgccgcacgcccgcgcctcacaaaacttcccgtgcctccccgccggtgccgcaacccctctcgcggccacgagcacgggcattatctccgcgccacgatcccatcggaaccagacacgcccggccgcgagccgcaccctgcccaccaagctccgatggactcggcggcgtcggcggctctgaagccctcggcgctggacctgctagcggcactgctgacggggcgggaccccgaaggcggggcgcactgggcgtccgcgctcgccgagaatcgacacctcttcctgctgctcaccacctctctcgccgtgctagtcggctgcggcgttgccctgctcgtccgccgctcctccgcgcctcgggcggccgcggccgcggcacaggcgccgccgcgcccgctcgccgtgaagcccaaggacgagccggaccccgacgacggcaggcagagggtcattgtcttcttcggcacgcagaccggcaccgctgagggctttgccaaggcgctcgccgaagaggccaaggcgaggtacgacaaggctgtcttcaaggtggtcgatctggaagattacgccgctgaggatgaggaatacgaggagaagcttaagaaggagagcatcgcattgttcttcctggcaacttatggcgatggagagccaactgacaatgcagcgaggttttataaatggttctcagagggtaatgagagaggcgagtggttgaataatcttcggtttggggtgtttggcctcggaaatagacagtatgagcactttaacaaggttggaaaggtggttgatcaactcctcgcagaacaaggtaacaaaatctctggccacatcaatgattcttgttactacagtatgtatgactatatgcttgtgttccctgaaaacttctgcacgtcgcactag

SEQ ID NO: 38256 - DNA, 318 bp, Zea mays
  Peptide Sequence Number=SeqID_80035
atgggcttgaaggcaacaggtgcacgatcgaacacaatgaagcttgataacaatgctgaaatgaacagtgtcgatacggctggagtggaggacctgatggacactatcgaggaagttaaaccttgctggaccaaaccaagtccaaaaaatcagccatctaatggttttgttacattctccttgactatgggccctgaatatcacatctcacggatcacagatgctgtggttgttgcgaggtatctaggtgcaacatttgtactcctagacatcagaggaaatgaattaggaaataagcgtatgggcctttacctctag

SEQ ID NO: 38257 - DNA, 1266 bp, Zea mays
  Peptide Sequence Number=SeqID_80036
atggcggtcgacccgcggcaggtcgtggcgggcttcctcaccctctccatgttcgtcatgctgggcaacatgatcaagcacgaccacttctctcccgtcaccgaggagatgggcttgaaggcaacaggtgcgcgatccaacacaatgaagcttgataacaatgctgaaatgaacagtgtcgatatggctggagtggaggacctgatggacactatcgaggaagttaaaccttgctggaccaaaccaagtccaaaaaatcagccatctaatggttttgttacattctccttgactatgggccctgaatatcacatctcacagatcacagatgctgtggttgttgcgaggtatctaggtgcaacatttgtactcccagacatcagaggaaatgaattaggaaataagcgaaaattccaagacatgtacaatgtggataaattcgtgaggagcctagatggtgttgtcgaagtaatagatgaaatacctgatgaagtgagtgctaagaagccagcagttatcagagtaccaaaccgtgtgactgaaagcttcatcatggacaccatccagcccatctttaaaaaaaacaagtacttaagacttgcggtcattttctcttcagtaagtttaaggccaaaggagacgagtaacaaggacttggatgcgactgcttgccttgcaatgttcagtggcctcgaactgaagcatgaatattctgaagtcgccagaaaaatgttggataggcttcaagaattaagcaagaaatcagatgggaaggtcttggcaatcgatttgcggaccgacttgctggaaaagaagagttgcaagacaaccagtggcgctcgaagaaaaggctgctataaccctaatgaggatgacattatgccagctgagaacaaaggtgaattcctgaaatccagcaatgcagacctagcaagcgctttggaccttgagatctgctcgcagagtgacgtgttcatccctgctgtcgctggcctgttctacgggcatgtcacagctggttggaagctggaaaagcgaggtatctgccagggcatgttcaaactggccgtgcgttttgtggacgagcgagggagctccgcgcccacgagggcacgaagtcctgctcccctgtccggctgtcccagatgcgtcgtggcatgggcgttgggctccggccccttggactgggagaaggacgtcggagtcccggtcccaccgtttagcgcgtgtttggttagcgggttgatgcgggttggaatgagttaa

SEQ ID NO: 38258 - DNA, 207 bp, Zea mays
  Peptide Sequence Number=SeqID_80037
atggctgcccacggtgcgcagcagcacgattcacggcacatggtggcacagattctgccatggagtgcgatgtccggcgagggctcgcccagcaccgcccctgccaccaccaaattggacgccgagaagacttccgttcaccaccgcgacgagcacgtagcagtcctgcgatccatccctcaacttctctcacctctgttcttgtga

SEQ ID NO: 38259 - DNA, 372 bp, Zea mays
  Peptide Sequence Number=SeqID_80038
atggctgcccacggtgcgcagcagcacgattcacggcacatggtggcacagattctgccatggagtgcgatgtccggcgagggctcgcccagcaccgcccctgccaccaccaaattggacgccgagaagacttccgttcaccaccgcgacgagcacggtcgggcgagggagcagggctcgggatttatagtgccgcggattccgcaagagctggcgggcgaatcgctccatcatcccctagccgagccgttcaatccgtgcggagtcaaccatgacccgttcgtggcacgcgagatctacggggaagagatatctgacgactcgggcccacaccacggcggcagcgaagacggtgcaagcgcgaaagaatga

SEQ ID NO: 38260 - DNA, 210 bp, Zea mays
  Peptide Sequence Number=SeqID_80039
atggctcctcgaggaagctgtccaaaggctcggttgaggctgaaggtctctggaaatggctggccacgatggccggcgctcgagtggctcgggcgggtggcgcagatctcgtcggagctaagggtggtgtctagccagagaaggcttatgggttttgctgactggatcaaaagatatggagggatgaagttgggtttgtctcactgctga

SEQ ID NO: 38261 - DNA, 210 bp, Zea mays
  Peptide Sequence Number=SeqID_80040
atggctcctcgaggaagctgtccaaaggctcggttgaggctgaaggtctctggaaatggctggccacgatggccggcgctcgagtggctcgggcgggtggcgcagatctcgtcggagctaagggtggtgtctagccagcgaaggcttatgggttttgctgactggatcaaaagatatggagggatgaagttgggtttgtctcactgctga

SEQ ID NO: 38262 - DNA, 1730 bp, Zea mays
  Peptide Sequence Number=SeqID_80041
atggacaaggatcatcagggagctgcgcagaagcgccaggcggtcgtcaggcttcatgaggccaggccgaagaggccgcggggggctgcgaaggctgctgcccccggcggaagccagccgccgctggcggcgaagtcggccgtccctgcatccagtagggcgccggaggctgcgaaggcagctgccgccggtggttccaagtctgtgaaggccgcccctgtgtccagcagggtgcccgagagttgccgccgccaggcaagcgcgtcgccgacttcgccaccgacattagtgtggaagattatcttgttgggcagtgctcttagtgccggtggtgagataccggcactcactgccgtcagggacgaggcaggtgctgtgtcccgccggctgaaggagctgaaggaggcactaagtcagttgtgtctgccgaagtcgagagacttcagacgcaacatgctgacgccgtccgggaaaagttggccgccgacagcaagtgccgcaagctggcggataaggtggcccgcgctggagggtgagaggactgacctccggcgccaactggcggaggaaaggaagaaggctaatgaggccctcgccaaggcgcagtctgcgcaggcggaggccaatttggcgcgggcggagggcagtcttgccaggcagcgcgccgaggagttggaggggcggctcaacgctctgcagacccgtgtggagagggtcgaggcttcgacgcgcttggaggctgagcggacacgcaaacagcttatggattcataccatgagctgggcgcacggaccgctgacttcgaagtgccggaccgagagcccagacttcgctgcctcgagtggatacaggaggagttgctggcgctccccgccatcgtggaggggtttatgtcctatgcctccctgacttgcaagggggcgatgaacgtgctctctcgcgaagggtgccggcactatgaggtcttcgaccaagctgatgaggatttcgagcgcgatatttacaaggttgaggaccctgtggtgaaggaatccgcgggagccctctacgaccggatgtggggcccccacggtcgggaggtggtcagggagcgggccgagacgacgaggggtcaggcggtgcgtggcgagagggtggatgactttggggctttgaacagcgcgcagcctgactcggagtcgaacccgctggtggctgcgtccgagaccgccccggagctgcccccggaaaccgtcgaaggcgttcccgatgctcccgcaaccactgcggccggcggaggcccgtcgccaactgtcgcgccgagggctgaggatcctgtgaagatggcggttcaagattttgggcctgcacacgcaaccgctactgctaattttttggtggcttcgaccgtggatgatgggaataaatcagatgagtctgcatctaagttttctgattttggtgactctgggagctcggttgagtggaccgaagagtcgtcggatgaggacttggactactttgcggccttggatgtggcagcggcggaggcttcgccgcctgctgcagatgctgaagttgtgccttgttcgagtgctgggcgtaggcggcgaagggcggtcgcgaagcgtagagtgagtgaggcggacggtggtgaaggggagctgcgaagtctttttgtgggtgaggagctgaggataatgctatttaactatagggagatgggaattattccgaaggttgagccgat

SEQ ID NO: 38263 - DNA, 318 bp, Zea mays
  Peptide Sequence Number=SeqID_80042
atggcgttaacattgtctgagaggcctcaagcaggaataccatctaaggccagacttcaggcaaatgtttggctttctgtatccatgatgaacatggagaaggtcaaaatgttggcgtcggccacacaaacacgacacataacctcggtggccatacgcacacacaaaggtgtccaagtgagtgtaggtgcagcagacaaatgccccgcgcaactgggcaggcaggctggtgtccaagagcaatgttgctgtcgatctcatctagctggtgttttgcgcttggatttgagcgcgagagcatgcagtttgagaccttag

SEQ ID NO: 38264 - DNA, 375 bp, Zea mays
  Peptide Sequence Number=SeqID_80043
atggcgttaacattgtctgagaggcctcaagcaggaataccatctaaggccagacttcaggcaaatgtttggctttctgtaatcgacgagtacgaggagcagctccgcaggcgcgcgcaggccgggctctgggtgctcctgctgctcgggctcctcgcgctggtcgtgctcgcgcaccacgtgctgtttgatgccgagccggccgtgtccttgtggcggcgcctgcagcttgaagcaggtggcgcgtgggacacggaccgcggcagcggcggcacgtcgccgtgggctgtcgcggcggcggtggcgctcctgctggtgttggcgtcgcacaaatcgtccttccaggtgttccggccgccgttctaccacaagtag

SEQ ID NO: 38265 - DNA, 408 bp, Zea mays
  Peptide Sequence Number=SeqID_80044
atgacgtcccagggcccagcgtcgaacgaggtcttggtgatcgtcttccagcggctgtcgcccaggtccgtcaccgtctgccgcgccgtgtgcctcaggttgtccgagctgctctcttcgcttcgtctcgagtttctcgccgacgtcgacgacggcaacgccgactcgtccgcatgcttcgctggcctcggcggtgccagcgcgggctgcgcccggcgcagacgcaggcgcagagattggatcctcccgtccagacaacctgatagaacgacagtgtataagaacagggctcttaggacgccttttgtcaagttgggtcataactctaccctgagaattgagatagatgatcatgtggtgcaagatattgagtccctcatctttgatgacacacataacaaatggtaa

SEQ ID NO: 38266 - DNA, 306 bp, Zea mays
  Peptide Sequence Number=SeqID_80045
atgcagtttccagccgtgtgcctcaggttgtccgagctgctctcttcgctccgtctcgagtttctcgccgacgtcgacgacggcaacgccgactcatccgcatgcttcactggcctcggcggtgccagcgcgggctgcgcccggcgcagacgcaggcgcagagattggatcctcccatccagacaacctgatagaacgacagtgtataagaacagggctcttaggacgccttttgtcaagttgggtcataactctaccctgagaattgagatagatgatcatgtggtgcaagataacaaatggtaa

SEQ ID NO: 38267 - DNA, 735 bp, Zea mays
  Peptide Sequence Number=SeqID_80046
atgtacagtgttgtagttagacactttctacacgaagcaagcttttctattggtgttgtgtgtccatacaatgctcaagttagagcaatacaggaaaaggttgggaaggcctgcaggaggaatgattatttctcagtgaaagtaaaatctgtggatggtttccaaggcgcggaggaagatataattatcatatcaacagtcaggagtaatggagctggcacaattgggtttctatcaaacttacagaggactaacgtggctctaacaagggccaaattggggaagactttacattcgacaactttactatatacccttctttgtcaaggatttgatgataagccaatggttaaaagggctgtcattgtaacccccacaagcttagttagcaactgggaatctgagataattaagtggttgaaaggcagagtgcagagtaaacagcagcagatcgtgggctcgaaacatctggtcagtgacagtttgcttgagagactaattaattgtcttctgtttggctctaatcagttctgtatcattggaaacaaactctgtttaagagattggatcctcccatccagacaacctgatagaacgacagtgtataagaacagggctcttaggatgccttttgtcaagttgggtcataactctaccctgagaattgagatagatgatcatgtggtgcaagatattgagtccctcatctttgatgacacacataacaaatggtaa

SEQ ID NO: 38268 - DNA, 627 bp, Zea mays
  Peptide Sequence Number=SeqID_80047
atgtacagtgctgtagttatcaagtcagtttatgtttgggcaggttataatgtttttgcctttttatctattgtagagacactttctacacgaagcaagctttccattggtgttgtgtgtccatacaatgctcaagttagagcaatacaggaaaaggttgggaaggcctgcaggaggaatgattatttctcagtgaaagtaaaatctgtggatggtttccaaggcgcggaggaagatataattatcatatcaacagtcaggagtaatggagctggtacagttgggtttctatcaaacttacagaggactaacgtggctctaacaagggccaaattggggaagactttacattcgataactttactatatacccttctttgtcaaggctttgatgataagccaatggttaaaagggctgtcattgtaacccccacaagcttagttagcaactgggaatctgagataattaagtggttgaaaggcagagtgcaggtgctggccctctatgaaagcacacgtgctgatgttctttccggaattgaaagtttcttaaaacccttgagccgtctccagggggaggaactgcgcaagcacattggcgcaacttgttacatcgaatgcagctaa

SEQ ID NO: 38269 - DNA, 627 bp, Zea mays
  Peptide Sequence Number=SeqID_80048
atgtacagtgctgtagttatcaagtcagtttatgtttgggcaggttataatgtttttgcctttttatctattgtagagacactttctacacgaagcaagctttctattggtgttgtgtgtccatacaatgctcaagttagagcaatacaggaaaaggttgggaaggcctgcaggaggaatgattatttctcagtgaaaataaaatatttggatggtttccaaggcgcggaggaagatataattatcatatcaacagtcaggagtaatggagctggtacagttgggtttctatcaaacttacagaggactaacgtggctctaacaagggccaaattggggaagactttacattcgataactttactatatacccttctttgtcaaggctttgatgataagccaatggttaaaagggctgtcattgtaacccccacaagcttagttagcaactgggaatctgagataattaagtggtttaaaggcagagtgcaggtgctggccctctgtgaaagcacacgtgctgatgttctttccggaattgaaagtttcttaaaacccttgagccgtctccagggggaggaactgcgcaagcacattggcgcaacttgttacatcgaatgcagctaa

SEQ ID NO: 38270 - DNA, 1278 bp, Zea mays
  Peptide Sequence Number=SeqID_80049
atggaatgtctttttcatggtgacatccaattgtctgatgaagccctcagtgcaaatatacactgtatcaggggtgaagagcatttacttcagagagaaggtggaaaggtcttcttggagaacacattcatttccagtctgcttaagcgtgatggcaaccctaagatgctcttaaattgtaaggaagacacaattgaaaaaagggtggacaactatttacagtctgacatggtgttccttccaatgaatatagaaaattttcactggtacctggcagttctgaatgcaaaaaaaagtgagttaaaaggtctagaaagacagattaaacttgcagcagaacataaagagctttaccaaggcaagtggtcgaatcttgatgttgcatcatggccagttatagagaagatcacaacacaaatgcaaaccgatggggtatcttgcgggctatggatgataaactatatggaatactggacaggatcctccctatctgataacgtaactcaggatgatataacaatgtttaggtttaagctacctgcaatattatgggactcgagattaaacacaaagaaaagacatcaaaatcttgaccacaatgtggatgaagatggagagagttcaagtgatgttcaaataatcgatactccgtgtgagttatctaaatcgtcaaatacatcacatcagattgaaccatatatatctccatatgttctgcctgctaaagtaacatcaacaaacatgcaagaactgatgtttgtattatgcacatatatcatggggatagacaacgccaaatatttaaagaaacattggattcagagcactaaaccttatccaatttctttaagtcttcaaaaacttaaagatatattggatgtaaataagccgatggatacagattgttttaacatggctgttcggatgatcgcatgcaatgatgtcttgttcttgttggaagacaaatacaactacatggatctacaattctgttccataactaaatttggtcgagaccctcgccttcgtgcaaagccagatatcaacatgttggcaaaattattagaatgttggcctgacatggagtacgatgtttcagattgcaaacaaggatttatctggctttcttgttatcaactttatgcacgattggaatggtataagaatgggaatgacctgaggaccaaattcttagtagaattattgaagtacaaggacaatgaatccaaagacaacattccagaagaaatacaagaaattattaggcacattagatag

SEQ ID NO: 38271 - DNA, 192 bp, Zea mays
  Peptide Sequence Number=SeqID_80050
atgggttccaagaacattaaactgggatttatctggctttcttgttatcaactttatgcacgattggaatggtataagaatgggaatgacctgaggaccaaattcttagtagaattattgaagtacaaggacaatgaatccaaagacaacattccagaagaaatacaagaaattattaggcacatcagatag

SEQ ID NO: 38272 - DNA, 420 bp, Zea mays
  Peptide Sequence Number=SeqID_80051
atggcgcaccggacagtccggtgcacaccggacagtccggtgccccttgccacgtcatcactgccgttggattcgaccgttgaagcttctgacttgtgggcccgcctgggtgtccggtgcacaccggacatctactgttccttgtccggtgtgccggagtgggcgcgcctgccatctgcgcgcgcagagcgcgcattaaatgcgcggcagagagccgttggcgcggagaagaccgttgctccggagtcgcaccggacagtccgtttcgccctattcaccccccctctaggcgactttcaacgcccttccaccttcgccgcaaccagcggtcaagaaggagaaccgccgcacaaggagcgtgcaaccgtcctgcggttatttgcccttccatcttcaccacaaccagcggtcaaggagtga

SEQ ID NO: 38273 - DNA, 1152 bp, Zea mays
  Peptide Sequence Number=SeqID_80052
atgacagcggtgatggctgcctcaatgcatgcgccattccgaagaggtcctcgcccccgtcctcctatggtgggcgacaacgaggccattaaagccaaagagtgggaggctcggcggcaggtggcactggtggtctcgccagcggaggcaaccacctctgcaacgggcagcctcaccagcggcggcgaccacctcagcaccgacgacaacggccacctctgcaccggtggcttaccagcgacggcggccgttctcaccgcgtgcagaaaggtcctcgcccccatcctcctacaggccgtgccccgtttggcggcgggaggcggcgctggaggcggcaccaaagccatccaagctaaggagccagacacgcggcagctgacggcgcctgcagccggccggctccgcgtagccgaagtttgcctcctccgcaaggctgcgaggatgatgaacatccttgaagctgagggcagggggaggccgcagcccggctcgcttctctccaccacgaggctggtgccgggctgcatgatgaaaatctttgaagccgagcgatggcagaagagcgccaacacccacgaggtcgtgctcctccaacaacagcaaggaggagacaagatcggcagcaccaccgcgcaggaaacaaatagcacgagctccccggtggcagatttccccgctcatgccctgaagcgtcatgggcaaggtctcccccgatgcgcaccaggattcccattctatgatatgggggccaggcctcacacgtcgtacaagctggcccgaagcgcgaagaaggcgaatcgttgcacagggagtgtgcaaccgccctgcggttacacgcccttccaccttcgccgcaaccagcggtcaagaaggcgaatcgccgcacaaggagcgtgcaaccgtcctgcggttattcgcccttccatcttcaccacaaccagcggtcaaggaggcgaaccgccgcataaggagcatgcaaccgccccgcggttgcgcgccccctcagcttcgctgcagccggtggtccaacctctggcatgggggcccagggccacatgtcatacacccggcgcgccggtttctgggtgcaggaaagtcgcaccgccgctcgcgccaatatcgcgcctcctcgagtccgtcgcagaagactaa

SEQ ID NO: 38274 - DNA, 363 bp, Zea mays
  Peptide Sequence Number=SeqID_80053
atgacctcagggcagacgctgctgcgacaaggccctcgcccacgtccccactcgaggggcgaggacaagcagaaggctgtagagttggagctgagggcggggcagaggccgcagaccggctcgcttctccccaccatcagactagtggtcaccgtcttgggtgaccacctgtcggcgtttcgagaccggggggggtccctgggccgacgagtgaaatgtcgccgcgtgccccagcccagatgggtcggcgcgaggtcgagcgcgaaggggggaagaaagtcagccggagacgggcgtgagagaggtggaaatcccgcggccttcgtgttcgtcccgcgcccaggtcgggtgcacttgcagtag

SEQ ID NO: 38275 - DNA, 1266 bp, Zea mays
  Peptide Sequence Number=SeqID_80054
atgcatcgcgtctttccaccttccgagcccccggatggggggcgcccgcggttcttctgccttgtcgtcgttggaggaacgcaacttcgtggaagttggtacctttcagccatcgttcggcttcaaggattttcatcaggcagcccggccgtatcccctcgccggtggtcacccaagacggtgaccactagttcgatggtggggagaagcgagccgggctgcggcctctgccccgccctcagcttcaaggatcttcatcatccttgctggggcggagagcgaggtgagccggggctctacctcccgcacgggtcggctggccacctcttcttccagcttctggtggtggaaaccatcctccagctctacggaggaggcgtcctccagccatgccgggaaaggcgaactgttgctgcccagctaggatgcaacattccgtcctctgtcctcgctttcgtggcggacgccgccgttggtgctgacgtggtggcagctggagaaagcttctccgccgtcgaggccgtcagcgccgcctatggaccgacctccggctctttggctttaatgtctggttcgcgtcccttgagtggggacgcgaacgagagccttccgttggctgcgtccgtcctgggaccatggctgctgcagcagaggtcactggcgagtcgcccggagcttgtcgccccgcaggctctccggtgtggaggttgttcatacccgcgggggcggaaccgaagttccgtttgtaatggcaccttgaatgccgggaaccctcggccgctcttcgatgagccgaagccggaggcagcggtgttagcatggacagaggcagagtttgctcgaaaagaagacttcgtcggcccgagcctggccgggccgtccactagcgggaccagcgccggagtcgagttgccgaagccacgagccgggctggtgtcctcggaggacagctggctgaggcttcggggcggccgtccgagccaccctccgaccgtgttgccgtccgaggctcggtcggacttcgccgaaggtggcgttgacgccgagggtgctgctgctccccctccgtcgacgtctgagcctgcaggatcggttcatcttgtagtaattgtttgtccgagcaagagttacttttcacggaaggtgatgagtgagaaggtgatgagtgaggtatccgtatcccagaggcataggagtccctcggctctgtcagccttggctgcttatgtgtactccgtcattttcaggatcccactttcgaagtag

SEQ ID NO: 38276 - DNA, 372 bp, Zea mays
  Peptide Sequence Number=SeqID_80055
atggtctcgtcggcggaggcaaccgcctctgtagtgggaagcctcacctatggcggccaccacctcagcaccgacgacagcggccacctacgcaccaacgctgcacccgcagatggcggccgccccagcgtgcataaggaggtcctcactctcgtcctcgccacgggagtgaggacaagaccatccaaggacgcggacaccgcccctgtggcgtacgacgtcttgtacagtcccccggtgcggccggcggcgcggaagggccatggatgcagccgacctacgcacgacacgatcgtcgcccgtgtagtggacggacaaccacaccctgaccaggcggcaggtggtagttcgcctcctccgcaaggctggtga

SEQ ID NO: 38277 - DNA, 225 bp, Zea mays
  Peptide Sequence Number=SeqID_80056
atggggaagcctgtcccatcactcctcatgctcctcctctgccgagtgaccgcacttgtatccaccataaccggaatgggaaacaacgtctcaggtcgcgtgaggggtaaagtctgcgggcaggttcactcaggtatccgcacgttaatccttattccaatttcatctcgtagaccacgcatccccatggatccgtgtccacagaccatcatcgttctgatataa

SEQ ID NO: 38278 - DNA, 150 bp, Zea mays
  Peptide Sequence Number=SeqID_80057
atgggagaccacgtctcaggtcgcgtgaggggcaaagtctacgggcaggttcactcaggtatccgcacgttaatccttattccaatttcatctcgtagaccacacatccccatggatccgtgtccacagactatcattattctgatataa

SEQ ID NO: 38279 - DNA, 348 bp, Zea mays
  Peptide Sequence Number=SeqID_80058
atggggaagcctgtcccatcactcctcatgctcctcctcagccgaggtagggtcccactcgactgtccaacccggtggcaagatggacgaccaagtcactccaggaaccatgtcctccagagaacctgtagaaattatgccacaagcaaggctgagtatactaatactcagcttgacttacccggttacaatggatcaagcagtctcattagttgcgagaagcagacgattcgaatcgagtttttatccttgcaaggtatccgcacgttaatccttattccaatttcatctcgtagaccacgcatccccatggatccgtgtccacaacccaacatcagtatgatatga

SEQ ID NO: 38280 - DNA, 222 bp, Zea mays
  Peptide Sequence Number=SeqID_80059
atgggagaccacgtctcaggttgcgtgaggggtaaagtctgctgccaggttcactcaggtatccgcacgttaatccttattccaatttcatctcgtagaccacgcatccccatggatccgtgtccacagactatgatcattccgggatcaaagtggatacaacccactcctgacctcgcgcgagtgctagaaaaatcactcgacttctaccgagatctctaa

SEQ ID NO: 38281 - DNA, 948 bp, Zea mays
  Peptide Sequence Number=SeqID_80060
atggtcttggggttcatcatctccaagcggggcatcgaagccaacccggagaagatcgcgaccatcgcacagcaccccaagccctcgctgggggcacccgggggctacacgcacccccgggaaaggccgcttgtcatcgccaaagttctgaagcccggaacgtacaagctggccaacagtcaaggcgagccaaggctgaccgagccgagggactcctacgcctccgggatacggatacctcactcatcaccttctgcgataaagcctcatggacgggtgaaagtgcgcgtaagcggcaaggccgaccgagccgagggactcccacgcctccgggatacggatacctcactcatcaccttccgcgagaagcaactctcgctcgcacaaacatccctgttgtcgacaaaacagtacagatactcgaaacaagaggaaaagagacgcggctttacaacacagcgagggtgtgtgttctggcctcgacggccgcagaaggcacacgctacaagacactctgatcctgcaggctcgggtcttggcgctggaaggggcagcagcaccctcggcatcgacgacaccttcggcgaggtccgacctagcctcggacggcgactcagtccgaggatctccgctccgaaggacgacgtcatcgccacgcccgggcaatcgctgccagggtcttctccgggaatccggcccgagcaggcggctcagccggtcaccccgggggcctcgaccaaccatcttccaagggcgccagcccgacccgaggcctcggctgccaactctgcccctgttcatgctgatatcgctacccctggcctcggctcatcgaagagcggccaaggggtccctttaactaagctagagaagcctcagacaacaaggccgaccgagccgagggactcctacgcctccgggatacggatacctcactcgtcaccttga

SEQ ID NO: 38282 - DNA, 546 bp, Zea mays
  Peptide Sequence Number=SeqID_80061
atggtgacctccagcttgatggtgggggaaagcgagccgggctgtggcctctgcccctccctcagcctcaaggattttcatcaccagggctggggaggggactgcagcgtgcttggctttcggacgcgagtggcttcggagccgctcgcggcgccggcgtctgccacgacagctggaagaggttcttccaccgacgagatagccagggccgcccatggaccgacctccaactctacggccttctgcccgtccttgcctcacaagtttgggcatgggcgggggcctcctagcagcagcacccgccctgaggtcagtgctgccgctgttcggccccctggagcagaagtcgtcgtcgtcgctgctgctggagcaggtgacggcacgccgttcatcggtcttctgttgctccgcaggccctcccccatggagtggggttactcgcctgttggttgtctgaaccgcttcaccaagcatgagtcgccccgtgtcaaggtgacgagtgagggaccccttggccgctcttcgatgagccgaggccaggggtag

SEQ ID NO: 38283 - DNA, 1821 bp, Zea mays
  Peptide Sequence Number=SeqID_80062
atggatatagtggtggagaaaggaaatgtcgatgttggcaatactgctgaaccatcgtatgaggttgtggctagaagtggttgttcagcacaattgtcaactaatgacaccgatgaacatgaattggagagcgaggatagtaaggtcagtgttggtaatgctgcaaaacaatcacacgatgttgtgggagtaggcattgactgtattttcaatcatgtaaaagtgtcaactgaagccgatcttgggccacaaccggatgtgatacacctgacatctttggatgttccaaatgaatcaagtcaactaagttctgatgcggatatggtaaagcagaaccaacaagatgctttggacacacttattagaatatcacaacataagaaaccaaagaaattgaatgtagctcgagttgtctctgaagattataagtgcaccccagaagatgttcagcttattgaatacattaaaacattaccggggaaacaagttgtggtgaacatcgacagcgcatggttaaatagaaatgatatggaatgtctttttcatggtgacatgcaattgtctgacaacgtgttccttccaatgaatatagaagattttcactggtacctggcagttctgaatgcaaaaaaaagtgagttaaaaggtctagaaagacagattaaacttgcagcaaaacataaagagctttaccaaggcaagtggtcgaaccttgatgttgcatcatggccagttatagagaagatcacaacacaaatgcaaaccgatggggtatcttgcgggctatggatgataaactatatggaatactggacaggatcctccctatctgataacgtaactcaggatgatataacaatgtttaggtttaagctacctgcaatattatgggactcgagattaaacacaaagaaaggacatcaaaatcttgaccacaatgtggatgaagatggagagagttcaagtgatgttcaaataatcgatactccattaacatcaacaaacacgcaagaactgatgtttgtattatgcacatatatcatggggatagacaacgacaaatatttaaagaaacattggattcagagcactaaaccttatccaatttctttaagttttcaaaaacttaaagatatattggatgtaaataagccgatggatacagattgttttaacatggctgttcggatgatcgcatgcaatgattccttgttcttgttggaagacaaataccactacatggatctacagttctgttccataactaaatttggtcgagaccctcgccttcgtgcaaagccagatatcaacatgttggcaaaattattagaatgttggcctgacatggagtacgatgtttcagattgcaaacaaattctattgcccttttctttcttgggtcacttcaccttatatgtacttaacatggacactagaagcatctatataatggactccatgcctataccatcatggtttaagggtgatcatcctagcatgcattatattcataatatacattatattgccaataatatgaatgctgccatggaattggccaatcctacatggaaagacgatatttatatgtggcgtcgtatagtaccaacatgggttccaagaacattaaactgggatttatctggctttcttgttatcaactttatgcacgattggaatggtataaggttaccctgcatttgcactaatgggaatgacctgaggaccaaattcttagtagaattattgaagtacaaggacaatgaatccaaagacaacattccagaagaaatacaagaaattattaggcacatcagatag

SEQ ID NO: 38284 - DNA, 477 bp, Zea mays
  Peptide Sequence Number=SeqID_80063
atggagtacgatgtttcagattgcaaacaaattttattgcccttttctttcttgggtcacttcaccttatatgtacttaacatggacactagaagcatctatataatggactccatgcctataccatcatggtttaagggtgatcatcctagcatgcattatattcataatatacattatattgccaataatatgaatgctgccatggaattggccaatcctacatggaaagacgatatttatatgtggcgtcgtatagtaccaacatgggttccaagaacattaaactgggatttatctggctttcttgttatcaactttatgcacgattggaatggtataaggttaccctgcatttgcactaatgggaatgacctgaggaccaaattcttagtagaattattgaagtacaaggacaatgaatccaaagacaacattccagaagaaatacaagaaattattaggcacatcagatag

SEQ ID NO: 38285 - DNA, 279 bp, Zea mays
  Peptide Sequence Number=SeqID_80064
atggtcgccgccctctttgggattatgcagaggtcagagaaacaaatagctatatttttcaaagaaaagaaaaaaataagaacagttgtggagtccaaggacagaaggatctcagttgctttagcatttgctggtcatcaagaagaacaatgttctgtaccaatgcatgtgcctctaaggccttggcagcaacaaggctatggaaattctgatgtagttagcttggttgatctgatccagattctaaaccataaggactgcttttgcatttttggataa

SEQ ID NO: 38286 - DNA, 906 bp, Zea mays
  Peptide Sequence Number=SeqID_80065
atggtcgccgccctctttgggattatgcagaggtcagagaaacaaatagctatatttttcaaagaaaagaaaaaaataagaacagttgtggagtccaaggacagaaggatctcagttgctttagcatttgctggtcatcaagaaggatattcacttcatatgccctttacacaaaaggaaccatttaggtccaagctatcaacaataagcacatcttttcagcagggggacttcatgaatatgccaatagctgataacacctttgatgcggcctatgcaatacaggctacatgttacgcaccagaggcacatttgaccgtcaaggctgagattgagcttggcgatggcctgcctgacatccgtaccactcgccagtgtgtccaagctatgaaagatgcaggattcgaggtcgtttttgcaaaggatcttgctcaagcgttttccttgcccatggatcctacacttgctgttgttgcttatagacgtgggcagtgtgacgatgaacttattaacgtcactaacaagaattcgttattcaagctgcaagctaggtatgtggttgagagaatggatggtgatctgtgggataaagttcttcagcccgagaatgaatatagaaggcaactcattgaccaagtggtttcgactgcattacctgagagcaagatggatgcttctcaggcatctaatggggagctccacactagcgtgctcaaccacacagaatcaattagaaccttaatctggcgccttagaccaactcggccatctcgtcaagttggacagtctactgagcaaacgttgttaatgctgcaaggtgcattgattggtgcacagaatgttcagctttcgtggggtacaagcctgtcgaacaaggagactcagatgaagtggctaatattctga

SEQ ID NO: 38287 - DNA, 993 bp, Zea mays
  Peptide Sequence Number=SeqID_80066
atgactggtggctcaatgggacacgacagaaaaggctgcacacatcgtgccaaggatggagatggccacgctgttctcgtcgtaccgtcgcgcagtgttttcgcccatagaccacctacgcccaagcgttcaggacttcggggtggatcccgagcttccgcttgctgcggaccagagagccacggtagagcaagctcaacaagaaaatacagtttgtattcagtgctgatgggattgattttagcatggaatatatttcagaaccactttggggccaacattgtcgtaacaagagggcccctatcgtgtcgtgatggaagctatcctccatattatgctgctaatataacatctagatattttttttactgtaagaaccctcagtgtaggctccaagcgaaacacaaaggcataacaagtcagatcgagattgagaatctaagcatgttgaaaactaagaatgtaaaggtcaaggacattgatacagcttattgctcttctcaagttcatggaaccatatcccagaggcgcatggtaatcgtgtggcgctgtgagatctcagaaccattgcctagaagcacaagaagtttcttgtcaattcctgattcaatcatagtctcaacaacctttaactttccaacctttatcaaagatgcaagtcttgcaaacacatttttatacattgctcattttctgcaaacaagagatctgcaatttgatcaatgggagttcttaccaattttcatcagcaattatgccattaacatgcttatatacataacaaaagagaagttggctagagttgaagtatcttcacaggcaccaagaagatcaattaatctatctatggaacctattatttcaagagagcaagtaagatttatgcagtctgctggaacaaatataactacaattgcggtagtgaatataataataagatctggtgatcctatggaaattatctctgctattcgagggacaagtatttactga

SEQ ID NO: 38288 - DNA, 765 bp, Zea mays
  Peptide Sequence Number=SeqID_80067
atggtgcaggagatcaccggcctccccttccctgcccccctccttctccgctgccttggaggctgccaccgtcgtagcgcccaaatggatgcctgcgcacgcgtgtgtgctcctgaactgaacctggacacgtccgctttctccctgcttgaccgtgccctggtcatagaacataagccctacgatcgtagagcagatgtttttagctttgctattgttctatgggaactgctaacccacaaggaaccgattgaagaaagaacatccaccatttgcatcatcaagtatcatttaaggcatcattattgggcactcttatatgaccatgtcataagatcaccttacaacattaaaaatattgagaaaaaaaaatacagtttgtattcagtgctgatgggattgattttatcattaaatatatttcagaaccactttggggccaacattgtcgtaacaagagggcccctatcgtgtcatgatggaagctatcctccatattatgctgctaatataacatctacatatttttttactaaacacaaaggcatagcaagtcagatcgagattgagaatccaagcctggtgaaaactaagaatgtaaaggtcaaggacattgataaaggttggccattttttagactgcttattgctcttctcaagttcatggaaccatatcccagaggcgccttaagaatcggtcatcgcataagaatcggtcagctacagttacaagaagatatactccaatactccagcgagttctag

SEQ ID NO: 38289 - DNA, 411 bp, Zea mays
  Peptide Sequence Number=SeqID_80068
atgccgcaaagaggacaaaagctccaacggtcgactcagctccgaaaccctaacggatggggtgacgtggcggcgcaccggacacggaaacagtgcctgtccggtggtgcaccgggactgtctggtgccaaaggttcaacacaaaccaataaaaagatcaaacttagggttcaaaagaaaggagcaaaagaagtcgaagagaaccctggtctggcacaccggactggccgtgtgcgtaacccagagacaactgatcaagccaaggttggaggcaagaagagcttcgaggtaccgagtgcatgggagaaggtcaaggagactaggaacccaaagccaggggtgaataagaagacttgcaaagtcaaggttgatcgagttaagagttatggtgcatcaaggatcactacataa

SEQ ID NO: 38290 - DNA, 222 bp, Zea mays
  Peptide Sequence Number=SeqID_80069
atgagcaagaaatggagcaatcaggacttgggtacctccacaagtcgagtaattgagacaactgatcaagccaaggatggaggcaagaagagcttcgaggtaccgagtgcacgggagaaggtcaaggagaccaggaacccaaagccaggggtgaagaagaagacttgcaaagtcaaggttgatcgagttaagagttatggtgcatcaaggatcactacataa

SEQ ID NO: 38291 - DNA, 366 bp, Zea mays
  Peptide Sequence Number=SeqID_80070
atggtaaagggggagaatttgtgcattaaagcttacctcgacctgagaggaaagcttatcttaagtgtgaagagggtgaagattaattttttgtgtgctaaaggactcaaaggggtttccttgaggtcctatgatcttaaggaagaatgtgttagttttgttgataatactaatcatatgcttcttgttgtattatatgagacaaccgatcaagccaaggatggaggcaagaagagcttcgaggtaccgagtgcacgggagaaggtcaaggagaccaggaacccaaagccaggggtgaagaagaagacttgcaaagtcaaggttgatcgagttaagagttatggtgcatcaaggatcactacataa

SEQ ID NO: 38292 - DNA, 267 bp, Zea mays
  Peptide Sequence Number=SeqID_80071
atggtaaagggggagaatttgtgcattaaagcttacctcgacctgagaggaaagcttatcttaagtgagaggaaagcttatcttaagtgtgaagaggagacaaccgatcaagccaaggatggaggcaagaagagcttcgaagtaccgagtgcacgggagaaggtcaaggagaccaggaaaccaaagccagaggtgaagaagaagacttgcaaagtcaaggttgatcaagttaagaagagttatggtgcatcaaggatcactacataa

SEQ ID NO: 38293 - DNA, 261 bp, Zea mays
  Peptide Sequence Number=SeqID_80072
atggaggagcttagctcagccatggataacttacaggtctattataatacactacatgaagaagttcatgtgttgtattcacaactgcacccgaacgtccctgcggatcctgtcgggatggaagccggaccttctagagtagcgggagaagcacttggtggccaagacatagatgtcatcttgggcatgaactggttagcccagcataaagcaattctcaaccctgatctgagaaccatcaggttgagttatgaccaatag

SEQ ID NO: 38294 - DNA, 639 bp, Zea mays
  Peptide Sequence Number=SeqID_80073
atgaaagagtctttgattattgagaagccttaccttgactcccttaaccagcatacccttgagagtcttttctttagtcgggtgaggaagcgacaaatttttgttgcttctgttctaaggtggtaccaaaggaagaatgcaaggaatgaagtgcgggaggaaaggaccctccatttagaacttttatgtaagaacttatcgggaggagtttttgcctcccttggtaagtttatgaaattgcttccgcattctcgtaactccgatgcttgtaatgtctgcgtgacgggtgaaacgctcttgggaaagggtgaaagaatatacaaactgagagcagccatccgctacttgcaagacgaactcgcgaaacgagatctagcgctcgaatgggcggttaactctcgtccactcgcctgggctaaggaagccaaagctcaagcccgcatggaggagcatagctcagccatggataacttgcaggtctattataatacactacatgaagaagttcatgtgttgtattcacaactgcacccgaacgtccctgcggatcctgtcgggatggaagccggaccttctagagtagcgggagaagcacttggtggtgaactgaacctgttcaggaccccctccctctattaa

SEQ ID NO: 38295 - DNA, 963 bp, Zea mays
  Peptide Sequence Number=SeqID_80074
atggccatcatcttcaacaccttgctcaacttcaatgctggagagatcttccacttcggatccatctcctgcattgcagatcaggaaggtgtaaaaggttcacactcagccaataaaaagatcaagttttggattgaacaaaggagcaaaaaggcaaccgaaggcacctctggtctgggggcaccggactgtccggtgtacaccggacagtgtccgcgcgcgcagatgtcaggcacgcccatactggcgcaccggacatccaacagtacatgtccggtgtgcaccggacatccaggcgggcccagaagtcagaagctccaacggtcagaatccaacggcattggtgacgtggctagggcaccggacatgtccggtgtgcaccggactgtccggtgcgccatcgaacagacagcctccaccaaacttgaccgttggtggaggctgtctgttcgatggcgcaccggacagtccggtgcacaccggacatgtccggtgccccagccacgtcaccaatgccgttggattctgaccgttggagcttctgacttctgggcccgcctggatgtccggtgcacaccggacatgtactgttggatgtccggtgcgccagtatgggcgtgcctgacatctgcgcgcgctacgcgcgcattaaatgcgtcgcaggtagccgttggcgccgaaatagtcgttgctccgcggatgcaccggacatgtccggtgaattatagcggagcatccttcgtgaaatcccgaggctggcgagttctagagccgcgtcccgttggagcaccggacactgtccggtgtacaccggacagtccggtgaattatagcgcgccggctccggattttcccgaggctgaagagttcgagttggagtcctctggtgcaccggacactgtccggtggtgcaccggacactgtccggtgtacaccggacagtccggtgcccccagaccagag

SEQ ID NO: 38296 - DNA, 963 bp, Zea mays
  Peptide Sequence Number=SeqID_80075
atggccatcatcttcaacaccttgctcaacttcaatgctggagagatcttccacttcggatccatctcctgcattgcagatcaggaaggtgtaaaaggttcacactcagccaataaaaagatcaagttttggattgaacaaaggagcaaaaaggcaaccgaaggcacctctggtctgggggcaccggactgtccggtgtacaccggacagtgtccgcgcgcgcagatgtcaggcacgcccatactggcgcaccggacatccaacagtacatgtccggtgtgcaccggacatccaggcgggcccagaagtcagaagctccaacggtcagaatccaacggcattggtgacgtggctggggcaccggacatgtccggtgtgcaccggactgtccggtgcgccatcgaacagacagcctccaccaaacttgaccgttggtggaggctgtctgttcgatggcgcaccggacagtccggtgcacaccggacatgtccggtgccccagccacgtcaccaatgccgttggattctgaccgttggagcttctgacttctgggcccgcctggatgtccggtgcacaccggacatgtactgttggatgtccggtgcgccagtatgggcgtgcctgacatctgcgcgcgctacgcgcgcattaaatgcgtcgcaggtagccgttggcgccgaaatagtcgttgctccgcggatgcaccggacatgtccggtgaattatagcggagcatccttcgtgaaatcccgaggctggcgagttctagagccgcgtcccgttggagcaccggacactgtccggtgtacaccggacagtccggtgaattatagcgcgccggctccggattttcccgaggctgaagagttcgagttggagtcctctggtgcaccggacactgtccggtggtgcaccggacactgtccggtgtacaccggacagtccggtgcccccagaccagag

SEQ ID NO: 38297 - DNA, 834 bp, Zea mays
  Peptide Sequence Number=SeqID_80076
atggcgagcgacggcgaccacggcggcgcgctgcagaagccgctcttgccgaaggcgcccaggagcgggggctggttccggaaaggtacgagcacggcgcgcctcggcgccgccgctgccggcacctcgtccaaggccgcagcgctgcggccgccgcaccacgtgcccgcgctactctgcacgctcgtcgtcgcgctcggcaccgtccagttcggcttcaccagcgggtactcgtcgccggcgcaggacggcgtcacgcgggacctcgacctctccatctccgagttctcggtgttcggctcgctgtccaacgtgggcgccatggtcggggcgatcgccagcggccagatggccaagtacgttggccgcagagggtcactgatgattgcggcggttccgaacgtcatgggctggctcgcgatctccctggcaagggacacttcgtttctgtacgtggggaggttgctggaaggattcggtgtcggcgtcatctcctacgtggtgccggtatacgtagcagagatatctcctcagaacatgagaggagctcttggcgccgtgaacccggtagcatcttcaaagctgcagatttcttcttttgggatgaccctaagccttcttgtggttgctgttgtattttacatcaaggacaatatttcacatgactctgacttgggtaacaccttaagtatggtgtccttggttggtgtcttggcttatgtcactgcctactcctttggtatgggtgccattccatggatcataatggctgagtgtaggatcgcatatgaattaccaaaccttacaagttacatttgtttccaaatcgtgcag

SEQ ID NO: 38298 - DNA, 492 bp, Zea mays
  Peptide Sequence Number=SeqID_80077
atggcttccatcatcggcgctgaggtggtggcggctgaagaaatcctcgtcgccgatgggatcaccgccaccatccgtgctctgagcctacagctctttggctttgatagcttgtcctcgcccctcgagtggagacgtgggcgagggcattgttgcagcggcgtccgccctgaagccatcgccgctgcggtttggccacctggagcggaggtcgttgtcgctgctgccggagcaggcggcgccgaagctggaggcagcggtgtcagcacggacagaggcggagttggctcgaaaagaagacttcgtcggccggagcctggccgggccatccacttgcgggaccagcgccggagtcgagttgccgaggccatgagccgggctggtgtcctcggaggacagctggctgaggcttcgaggcggccggccgagccgtctgctcgggccggattcctggaggagaccctggcggtgatggcccgggcgcagtgctga

SEQ ID NO: 38299 - DNA, 1068 bp, Zea mays
  Peptide Sequence Number=SeqID_80078
atggctgaggacgcaaccatcgttcggcttcaaggattttcatcaggcagcccggccgcatcccctcgccggtggtcacccaagacggtgaccaccagctcctgggtggggagaagcgagccaggctgcgatcttggtcccgccctcagcttcaaggatcttcatcatcctggctggggcggaggccaggctgagtcggagctctacctctcgcgcgggttcgtgggtcaccttctccctcagcattcaagggagagggcgctcaccggcctagcgggagggtcggacttcgacaacacggggctggtcggcggcgagcgtcgtcagcttcagcgcgttgggctcgctggctcggctctcggtgccccctcccgccgcaagagcggttgtcgcgccacgcgcaccggaggaccgcccaagacgtcgcgcgctgctagggcggcgttcgtgttctggggctgtcctgcctttgccccggtacggcgcttctgcgcggaggtcgcggcgtccgccctgaggccatcgccgctgcggtttggccacctggagcggaggttgttgtcgctgctgctggagcgggcgacgggcctgaacatggaccctcgaccgctcttcgatgagccaaagccggaggcagcggtgtcagcacggacagaggcggagttggctcgaaaagaagacttcgttggccggagcctggctgggccgtccactggcgggaccgacgccggagtcgagtcgccgaggccacgagccgggctgatgtccttgggggacagctggctgaggcttcagggtggccggccaagccgtctgctcggactggattcctggagaagaccctggcggcgatggcccgggcgcggtgctgatgtcgtcctttggagtggagatcctccgaccgcgttgccgtccgaggctaggtcggacttcgccgaaggtgttgttgacgccgagggtgctgctgctccccctccgtcgaggtccgagcctgcaggatcggtttatcttgtagcgtgcgagtccctcggctcggtcagccttgccgcttacgtgtactcttactag

SEQ ID NO: 38300 - DNA, 831 bp, Zea mays
  Peptide Sequence Number=SeqID_80079
atgggagatcaagaggtagcaggggagattgagaggaagcaggggagatcaagaggtgatgtaaattgtgtccataagaaaccattcaccttgtgtattatggaatgtcgtagccctttcgactactgtgatgttgttacgtcaactactcacaagaatcttaggggccctagaggtggtataatattcttcaggaaagggaaaaatttaaggaaacgagctggatctttttctcaaggagatgagaatgaatacgacttcgaggataggataaattttggtgtttttccttcaatgcaagggggaccccataataatcatattgctgccttggctattactctgaagcaagtcgcaactcctgagtataaagcgtacattcaacaagtcaagaaaaatgctcaggctctggcatcagcgttgctcagaagaaaatgcagattggttactggtggcacagataatcacttaatactttgggatctcagaactcttggcttgactggtaagatctttgagaaggtctgtgaggcatgccacatatctatcaacaagacaccaatttatggggataatggctcaatatcccctggtggtgtgcggatcggaacacctgcaatgactactagaggttgcctagaagaggacttcgagtcgattgcagacttcctcataaggtctactcagattgctagcaatgttctgaaagaacatggcaaagtgcaaaaggagtttctaagaggcctaatgaacaataaggatgttatggaactccgaaatcaggttgaggcatttgcgtcacagtttgctatgccaggttttgatgtatga

SEQ ID NO: 38301 - DNA, 420 bp, Zea mays
  Peptide Sequence Number=SeqID_80080
atggggagcacccacattgctttcgtcttgctattgttggaggagcgcaacttcgcggaggttggcaccttacagccatcgctcgacttcaaggattttcatcaggtgacgagtcaggtatccatatcccggaggcataggactccctcggctcgatcgggcttgccactcaaggcttctcttgctcagttaaggaaccctcggctgctctgtgatgagccggagccggaggcagcggtgtcagcatggacagaggcggagttggctcgaaaaggggtttcgtcggcccaggagcaggtggcttcccaggccgaggaggtgcagcagcggcggccggagcctggccgggtcatccgtgagcgagaccatcttcggagtcacgctgccgaggtcgtgagccaggctgatgtcctcgtgtga

SEQ ID NO: 38302 - DNA, 420 bp, Zea mays
  Peptide Sequence Number=SeqID_80081
atggggagcacccacattgctttcgtcttgctattgttggaggagcgcaacttcgcggaggttggcaccttacagccatcgctcgacttcaaggattttcatcaggtgacgagtcaggtatccatatcccggaggcataggactccctcggctacatcgggcttgccactcaaggcttctcttgctcagttaaggaaccctcggctgctctgtgatgagccggagccggaggcagcggtgtcagcatggacagaggcggagttggctcgaaaaggggtttcgtcggcccaggagcaggtggcttcccaggccgaggaggtgcagcagcggcggccggagcctggccgggtcatccgtgagcgagaccatcttcggagtcacgctgccgaggtcgtgagccaggctgatgtcctcgtgtga

SEQ ID NO: 38303 - DNA, 285 bp, Zea mays
  Peptide Sequence Number=SeqID_80082
atggggcggaagtggaacgagctgctgtcgtcggctccgaggacgggggaggcggcagaggacgaggacgcggcaaggatgagccgagaggggaaggtcagcgtcaccagcaaccccgaggagatgcccaccatgagcgtgcctcggagcagacgcccggacctcgacctcaccattgacgacttcgaggaggacgagatcgaccccgagctgcgctactccttccagcggaacagcaagcagcttccaatcacccttgctacctgcaccatcatcagagcctaa

SEQ ID NO: 38304 - DNA, 1305 bp, Zea mays
  Peptide Sequence Number=SeqID_80083
atggggcggaagtggaacgagctgctgtcgtcggctccatggaggacgggggaggcggcagaggacgaggacgcggcaaggatgagccgagaggggaaggtcagcgtcaccagcaaccccgaggagatgcccaccatgagcgtgccctggagcagacgcccggacctcgacctcaccatcgacgacttcgaggaggacgagatcgaccccgagctgcgctactccttccagcggaacagcagggggccctgttatgcatcagacacctttggtgtgcgacgagccgatgacaccgtgcttcctttactacaggaattttatctagatttggcagaagacaacagaaaaattactccacgagattacctagagctagcattgaggcctgttcaaggtggaggaagggacatatctgcaaagaatgcgatacgggactccatccgtgcactttttccggacagggaatgttttacacttgtgcaacctgtgaacaatgagaaagatctccaacgtcttgatcaacttcctcaaatatcatatgttgcagagttcagatccggtctggatggtttcatgaaatttgttcttgaccgaacaagaccaaaacaacttgaagctagtacaatgacaggtcccatccttgctggattgacacaatcatttcttgatgctattaataatggtgttgtccctacaatctcttcatcatggcaggactacaaaaggaatgcttttctggaggctgacttgcaatgttctaataaagttcagaacatggaatcaaaggtgcgagcagcatgtaacagttcgaatgaaaaattagatgacatagtcaggctccttgatgacctactcaaagagtatgagtcaacggcctatggtcctggaaaatggaaaaggctagccacattcttacagcagtggtattcacctcttcaattgtcttgttggttgatgtggaatgatctcattatctcacacaatcattttttcctttgttggaatgaacactgcagtttggctggccctgttctggaccttttcagaagacagttagagcatatagatgctgaaaggaacgccctgagattgaaatgcaattcaagagatgtggaactatctgagaaggataagaacgtgggtacccacgttcttaatgttaagttcgacggtacccacgttcttaaccttaagaacgtgggggccgtcgaacttacttctttaagttcgtccaaaaatcgccgtcggctatattcgtcggtaaacccacgttcttatggtaagttcgacggcctattacattaa

SEQ ID NO: 38305 - DNA, 249 bp, Zea mays
  Peptide Sequence Number=SeqID_80084
atgcaggaatcccttgcaggaccgccatcgcagcaaaatcctcccgagggcctccctacactgaccactcccctactgcccttgcccctttcggataataaaagtgtgatcatgaataatgtatcttcatacccaaaaccacataaagcactagcaggagttcttgccttaaacggtggtgactaccgttctgtcctcgacgaagtgcggaaccagggcgaggttaacgcgggtgagacgaatctctag

SEQ ID NO: 38306 - DNA, 616 bp, Zea mays
  Peptide Sequence Number=SeqID_80085
atgcaggaatcccttgcaggaccgccatcgcagcaaaatcctcccgagggcctccctacactgaccactcccctactgcccttgcccctttcggataataatagtgtgatcatgaataatgtatcttcatacccaaaaccacataaaagcactagcaagtactacccaaaaagttcagtggtaaacaagcactggactggggctcatttaaacaggaacatagggggctcgggatcggtgattgacggccacgattttaaaacgcaagatctaatctcacccgccagatcaggactggacggcccacatcatcctaacccaatcgtgccccttgatttaatctctaccgcacacttaaatccgacggccaagggtggtcctcccaacccggttgaatcccggcggcggagcgaaatcacacggcgacgcgagctcccgcggcggacccacgctggagttcgtgcaaatcgcgcaccagagccccaacaacccacccgaaagaacctacatgcagtggagaacattgcagacgaggtgggtgacatcttaccggaggtggggcggcgaggatggcagtccacggagaaggcgggcctgcggcggagcagcaagcacg

SEQ ID NO: 38307 - DNA, 363 bp, Zea mays
  Peptide Sequence Number=SeqID_80086
atggaggcgccgacgttgttgaccacggtgcggcggatccgtggcggaaggggggtgtccgttgagcaattgcctgcgcaccagtgcttatccgcagctgacgactccaagatcacttccacaagtcacggcagaactctgggtcgaagatccgagggccgttcgccaagaccccctggaccacggttccaaatactaggacacctgtcgcaaagtggtgagcgtgcaggctcacggtacgggaccaggctgagcggctacacggctccggaccaccctaggagacaagcttttgggtacggaaccaagctaagcggccacactgctccggaccaccccatggaacgagctcctgttctttag

SEQ ID NO: 38308 - DNA, 369 bp, Zea mays
  Peptide Sequence Number=SeqID_80087
atggcgaccctggagccatccacgtggtggagtcgggtgctgtttaccacgtggctagagatagtcgcgtgggcaccacgtcttcatgctatagaaaggggtacccctatttcagggtaccgacagtggccctcgggcccacctcaggggaggatgcgagcctgcagtgcattaactcggcgcgctcgcgctgtcagcctgccaccggtcatatcaactgtcgtttctatcatcgctgccgacttgacccatggcccccaggaggacacccgtcgcagagtggtggagcgtgcaggctcacggtacgggaccaggctgagcggctacgcggctccggaccaccctaggagacaagtgtccattctctag

SEQ ID NO: 38309 - DNA, 228 bp, Zea mays
  Peptide Sequence Number=SeqID_80088
atggcgaccctggagccatccacgtggtggagtcgggtgctgtttaccacgtggctagagatagtcgcgtgggcaccacgtcttcatgctatagaaaggggtacccctatttcagggtaccgacagtggccctcgggcccacctcaggggaggatgcgagcctgcagaccaacaggacgggcttatgagggcggacctcactgggctggcatactgaaagggaaatag

SEQ ID NO: 38310 - DNA, 231 bp, Zea mays
  Peptide Sequence Number=SeqID_80089
atggcgagagtggcacgtaccctcctggcaacggatcgcctcaaaggggtggtgtactctcgggtggcgcggacctgttcatgcagtggaggatccatgggaatagtagacatcaaggtgaggaaacgacaaatttttgttgcttttgctccaaggtggtaccaaatgaaggaaaacaggagtgaagatgcgggaggacttggtcctccatataggatctttttgttttaa

SEQ ID NO: 38311 - DNA, 231 bp, Zea mays
  Peptide Sequence Number=SeqID_80090
atggcgagagtggcacgtaccctcctggcaacggatcgcctcaaaggggtggtgtactctcgggtggcgcggacctgttcatgcagtggaggatccgtgggaatagtagacatcaaggtgaggaaacgacaaatttttgttgcttttgctccaaggtggtaccaaatgaaggaaaacaggagtgaagatgcgggaggacttggtcctccatataggatctttttgttttaa

SEQ ID NO: 38312 - DNA, 282 bp, Zea mays
  Peptide Sequence Number=SeqID_80091
atggccgccccctccctcagccgtggcgggtgccgccgccacctcacccttggtgctcgccctcagccctgtcgtgcccctgcgctcggtcctcattggttctgggagaggtcggtgttgtgcgcggagaggggcagcacgttcggcggcggggcgacggatgcagcgcgccaggagcgtgagcgcgtggacgcgcccggcgccgccgccgccgcccgtgcagtcgcagtgcctccccaccgccctccgcgcccggccggcgacgtcccattccagatccag

SEQ ID NO: 38313 - DNA, 204 bp, Zea mays
  Peptide Sequence Number=SeqID_80092
atggcgggaagagacgccgtttgcggcggagggaaggatgcatacctggatctggaatgggacgtcgccggccgggcgcggagggcggtggggaggcactgcgactgcacgggcggcggcggcggcgccgggcgcgtccacgcgctcacgctcctggcgcgctgcatcctggacgtcgacggtcacggctggggccccgcatag

SEQ ID NO: 38314 - DNA, 489 bp, Zea mays
  Peptide Sequence Number=SeqID_80093
atggacgccgcgccacccaccataaccaagtccccgccgtccctggttccaccagcggggcccactcccggtggttccctcccgctctcctccatcgacaagaccgccgccgtccgtgtctccgtcgacttcatccaggtcttccccgcccctacgtcggggaaggaggactggagcccctcatctgcgatcgcggccatgcgcgagggctttgccagggcgctcgtgccgtactaccctatcgccggccgcatcgccgagcccgtgcctggtgagcctgagattgagtgcacgggggaaggggtgtggttcgtggaggctgaggcaagctgctccctcgaggaggcgcgtaacctcgagcgcccgctgtgcatcccgaaggaggagctgctcccgcgtccgccggccggtgtgcgcgtggaggacaccctgctgctcgcgcaggatcacatcgacgtctccgccaataacatcatcaatcggccctag

SEQ ID NO: 38315 - DNA, 492 bp, Zea mays
  Peptide Sequence Number=SeqID_80094
atggacgccgcgccacccaccataaccaagtccccgccgtccctggttccaccagcggggcccactcccggtggttccctcccgctctcctccatcgacaagaccgccgccgtccgtgtctccgtcgacttcatccaggtcttccccgcccctacgtcggggaaggaggactggagcccctcatctgcgatcgcggccatgcgcgagggctttgccagggcgctcgtgccgtactaccctatcgccggccgcatcgccgagcccgtgcctggtgagcctgagattgagtgcacgggggaaggggtgtggttcgtggaggctgaggcaagctgctccctcgaggaggcgcgtaacctcgagcgcccgctgtgcatcccgaaggaggagctgctcccgcgtccgccggccggtgtgcgcgtggaggacaccctgctgctcgcgcagctagtaaatttggaacgcaagttttggtctggatctgagggggtttag

SEQ ID NO: 38316 - DNA, 456 bp, Zea mays
  Peptide Sequence Number=SeqID_80095
atggaggatctactcgggagaaagggagagttcaaacaagagagagtacaccccaggcaacaacgaaatctgggcatggcagacatgtacacaaaacatcttgcaaaagaaaataaggggggtagaaatttacctcagttgaatgtgatgccggtgatgaacacatcaactagatctaacggactagctcagaaatctgcagtcagaaacgaatcaaagggagcaatgaggggccgaataaacaaaaacacggttcgatttgaatcgtatccaattgatagatggggattgaagggtggaaacagcgttccgaccactagcaatgtgaactatccggatcaacgaacggattcggaaccactacacgacggttcacttacagcgacctacggttggttgctaaaacggccttcagcgacctacggttggtcgctaaaaacttttagcgacccataa

SEQ ID NO: 38317 - DNA, 207 bp, Zea mays
  Peptide Sequence Number=SeqID_80096
atgtcggtcgctaaagcctttagcgacgacacttacagcgaccatccttatgggtcgctaaaagtttttagcgaccaaccgtacgtcgctgaaggccgttttagcaaccaaccgtatcactgctttagaaaatctcggagaattcgggcggtacacccaatgggtgtctgcccagtaaaagacgtctatcgtgttatcgtgaaatag

SEQ ID NO: 38318 - DNA, 282 bp, Zea mays
  Peptide Sequence Number=SeqID_80097
atggatgctcaaaatgatgtgactcaagaatggcttgatagggtgaagatagcaaggaaagggcttcgaggaactaagcgaagttcgtcgcggttatcggacgcagccaaagcataccgcctcctcgccaagcttctccacgctaaagctcgtgccctcctgctgctcgtcagtcgattgccgattgtcgtgctcgctcgacgttgtcgttgtacccgtgctgttgtgctccttcgccgtctccgcgccaagcgtcgatcccacgccgaacgccgttgctga

SEQ ID NO: 38319 - DNA, 513 bp, Zea mays
  Peptide Sequence Number=SeqID_80098
atggcgtctttccctcctccctttcttcttcctcaagccagcggcgcctcagctctccctccccatgtcgccaccccccgcaacttcctccccatggcgcccttcttccccagcatgccaagtattcggcataatggcgagggagatgtgttgttgcagcacgccgtgacgcccgcgacgtcgtcgacccccgttaatgcagatgagggtatgattagtccagttggagtcactagtgttgttgatgtcttgtgcgtaacgtggggacacgtatcagaattccaggattccaaatctgagacggatgttgatgttgactataacagcatgtactcaaggcagctagatggtgaggacggtgagctttcatggtttaatgctggtgtccgtgttggagttggaattggccttggcgtgtgtgggtatcggattgggcgtcggcctactggctcgtacataccaaagcaccagcaggaacttcaggcggcggctgcaaatggtccccatgcatga

SEQ ID NO: 38320 - DNA, 411 bp, Zea mays
  Peptide Sequence Number=SeqID_80099
atggagttcccatttatgatttatgtcacttacgtatcagaattcctggattccaaatctgagacggatgttgatgttgactataacagcttgtactcaaaggaggactttctacagggtaagaaaactggtagagatgagaaagaagtccttaaagctattgattatgtgcatgaattgagtatgagtacaaggggtcaagcagtctcattagctgcgagaagcagacgattcgaatcgagttttaaccttgcaaggtgctttagaatttacaactttttgacgatgtatgacctacttgagttaaacaaggttaactttacttatgtaagaccttatgtggtatacttggtaaattgggttaaactcagcttaagtggggctctggtggcttgtctaaatgaggtttga

SEQ ID NO: 38321 - DNA, 903 bp, Zea mays
  Peptide Sequence Number=SeqID_80100
atgaccgcgtcaaaaaggtacgccacgtcgttcaaattcatatccctttttctcttcccctttctctctcttgcaaccgggaccgggaaaggggatactccgaaagggatccttctccgcgaaggaagcgggccccgagccctcctactgatcagaggttcgaaggctggcccctcggaagggttcgacagccgcctcagagcactcgggctccgcgcccactactggtcagaggttcgaaggctggcccctcggaagggttcgacaaccgcctcaggccactcgggctccgcgcccactactgatcaggggttcgtaggctggcccccgaagggttcgacagccgcctcagaacacgcagagcgagggatgactctggtttataggaagctccagtgcagggttcttgccctgaccgccatcgcagcaaaatcaacccaaggacctccctacactgaccactcccctactgcccttgcccctttcggagaagtgcagggggttaaaccaaaattttcccatgactcaggattccccaaagaggacggcgggttcattcaggcaaagtccggggactcttttctatcctatcacggcaccgaggcggcgccacagtgcttctgcggcggcgagcttgccggtgacggccaaaatggcccgctggcgactaatctccccgaccgagacaacctaaacagcgagagcacaatggtgaacacagtaatgtggcttaccgagcgcgcggaactatggcggaagcaggccacgacggggtgcggagagagattgggcgcgagcaccggcgaggaattcccggactgccccgcccgtggagtaactctgatgcggggcaacaccttcctcccgcgcagcgacgtttcaagggcaaagccagagctctga

SEQ ID NO: 38322 - DNA, 780 bp, Zea mays
  Peptide Sequence Number=SeqID_80101
atgcacaataaaaatgatttaaattcgcaatcaggtttgaattcaaaatttggattcaaaagaactaagaataaaagaaaacagaaaatcaaatcaaaagataaagagaaaggagagtcataccgatgtttagcttttatgggtacgggtgacccgatgggtgacccatacccacatgggtatgggtatggggacgcgccacactcctgctgtgcttctgctgtgtgggacccgttggtaagtcccatccctatccccagtccgttcagccaaatccagggggccgcaccttccgccgcgatttcctctcgcctcggcctcaacctcaacggattccgccctgatttccggtcggttgcggcatcttcgggcgaccgggctcctttaaatgtcaagctccgcttgaatctcgaatcactgtgtagacctcgtcaccagagtgctgtgagttcgtcacctaggccggctacacccccttgctcgccgtcgacataccgcaccgctcagagctctggctttgcccttgaaacgtcgctgcgcgggaggaaggtgttgccccgcatcagagttactccacgggcggggcagtccgggaattcctcgccggtgctcgcgcccaatctctctccgcaccccgtcgtggcctgcttccgccatagttccgcgcgctcggttgtctcggtcggggagattagtcgccagcgggccattttggccgtcgccggcaagctcgccgccgcagaagcactgtggcgccgcctctgtgccgtgataggatag

SEQ ID NO: 38323 - DNA, 216 bp, Zea mays
  Peptide Sequence Number=SeqID_80102
atggcgagatgcagaggcgagaggatccatgggaggcgaggctgtgggcgcgacaatctcgggggcggagccacggtgaagttgtggacgcccacgttagagtcttataaagtagtagagataaatacttttgaacagcgtaaggagaggatccaggcgtacaatgggagtgtagcagagtgctacatgtctagtgggggagagctagcgccctaa

SEQ ID NO: 38324 - DNA, 246 bp, Zea mays
  Peptide Sequence Number=SeqID_80103
atgaactccagactcccgaaacggaggcactgtcccgggctggagaggttgctggagactgcccatctggagcttgacgggaagctgttcgtcaacacgcagcagggcccctacctggtgcgccaactgtcggcgtttcgagaccggggggtccctcgggccgacgagcgtaaggagaggatccaggcgtacaatgggagtgtagcagagtgctacgtgtctagcgggggagagctagcgccctga

SEQ ID NO: 38325 - DNA, 303 bp, Zea mays
  Peptide Sequence Number=SeqID_80104
atggcggagctaaccgaagcgctggcgcgacttggaggtgactggagtgggctggccacggtggccgaagctctggcggcaatggcaggcggaaaggagctcgccggagctaaggaggggtgtctggccggcggtggatttgagttagggatcaaggtgaacacgcttgatctttggctcaagattcgaagggcaggaggaggggttgggtgtgattacgtaccagcttccttaggtaggcaatcggggaagttggatctcaagaattcctcagtctcccaagtagcttcttccaccgagtga

SEQ ID NO: 38326 - DNA, 240 bp, Zea mays
  Peptide Sequence Number=SeqID_80105
atggcgggcggaattgagctcgccggagctaaggagaggtggctggccggtgaagccttcccccttaaaggaatctcgtcccgagatttgggccagagtcctcccagggtgaagcgaaggattcgaagggcaggaggaggggttgggtgtgattacgtaccagcttccttaggtaggcaattggggaagttggatctcaggaattcctcagtttcccaagtagcttcctcctccgagtga

SEQ ID NO: 38327 - DNA, 771 bp, Zea mays
  Peptide Sequence Number=SeqID_80106
atggagttggacgcaacagaactcgcgcaggaagccgcgcgtcatgggagagaccaagctagggccgacgcgagcacaggaccgccatgggggagctcgaggacacgcccgcacgacaccagggagcgagcaggacgccgcggcatggacgagggagaagcaggggcgtcgctggctgcgacggcgagcaaagcgcagagcgcacgagcgcgcgcagcagggggcgcggtcgagcagagcatcggccaacagagaaccgagagggagaggaaggagctggagggaaagctccgtgatggtgacaaaaaagtaaacgtggatccagatgatgatagcgactggctgcatcggaatgagacattccagtcaaacgactatgtcgcaatgacacaccttctgacaccaggcagtgtgcatgattctgttggtgtcattggggaaccgggtatcgacgtgagggagtataggcttgaacaccttaggttgtataatcagacaccaaagcagaaagaggcaaagatagagtacatgataaaacatagagcgctacaggctgacactttgaatgttgcgtccatcgccatggagaacccaacatatacccctaaggttgtacaccttacaacagatgcaacagaacctgatcgatcctctagttatcgcctgcgactgggtttccctgaattcatcaggacgccgcggaagctgccgcagggggaagaagacagactgggcagcgggatcttatcccagaccagagcggcggcttga

SEQ ID NO: 38328 - DNA, 432 bp, Zea mays
  Peptide Sequence Number=SeqID_80107
atgacacaccttctgacaccaggcagtgtgcatgattctgttggtgtcattggggaaccgggtatcgacgtgagggagtataggcttgaacaccttaggttgtataatcagacaccaaagcagaaagaggcaaagatagagtacatgataaaacatagagcgctacaggctgacactttgaatgttgcgtccatcgccatggaggacccaacatatacccctaaggttgtacaccttacaacagatgcaacagaacctgatcgatcctctagttatcgcctgcgactgggtttccctgaattcatcaggacacctttcctgccagctcaaacacagaccgaggatgtcggttcatttgatatgtctagtgaagcaataagacgtaaagtgccacatggggaaagacaagctatcttagcctgtcgaaactag

SEQ ID NO: 38329 - DNA, 246 bp, Zea mays
  Peptide Sequence Number=SeqID_80108
atggagacgtcgccgcctttccaggagttcggccactgcgacgtctgccgctgcaccttcaacaccttccaccgctgtgatgcaaacatacttgatgtgattgtccccagggtgcgacaaacatttgatacaagggaagaagcctacctcttttaccttgactatgcaaagttggctggttttagtgtcaggacaaagaggtgtaattgcaactgctggtgtggtatgattgcaaccccgcattag

SEQ ID NO: 38330 - DNA, 219 bp, Zea mays
  Peptide Sequence Number=SeqID_80109
atggactccatggtagtgtttgaggttgctgaattggatggagtagcaatggatgcaaacatacttgatgtgtttgtccccaaggtgcggcaaacatttgatacaagggaagaagcctacctcttttaccttgactatgcaaagttagctggttttagtgtcaggacaaagaggtgtaattgcaacttctggtgtggtgtgattgcaaccccgcattag

SEQ ID NO: 38331 - DNA, 207 bp, Zea mays
  Peptide Sequence Number=SeqID_80110
atgcacctgggtgcattctctatattgaatgcacccaaggatgcaaacatacttgatgtgtttgtccccagggtgcggcaaacatttgatacaagggaagaagcctacctcttttaccttgactatgcaaagttggctggttttagtgtcaggacaaagaggtataattgcaactgttggtgtggtgtgattgcaaccccgcattag

SEQ ID NO: 38332 - DNA, 159 bp, Zea mays
  Peptide Sequence Number=SeqID_80111
atggatgaatacataaggacaaataacgacttccgccagagaaaggaggaggatgcaaacatacttgatgtgtttgtccccagggtgcggcaaacatttgatacaagggaagaagcctacctctttttccttgactatgcaaaagttggctggttttaa

SEQ ID NO: 38333 - DNA, 150 bp, Zea mays
  Peptide Sequence Number=SeqID_80112
atggcccatggaatggtgcggcaaatatttgatacaagggaagaagcctacctcttttaccttgactatgcaaagttggctggttttagtgtcaggacaaagaggtgtaattgcaactgctggtgtgctgtgattgcaaccccgcgttag

SEQ ID NO: 38334 - DNA, 333 bp, Zea mays
  Peptide Sequence Number=SeqID_80113
atggagtcccacaatcttagcgtgggtatccgcattgtcatattgattctgaagctaagaggacatggtgcctcactggtatgtgatccgaaatctatctcgatgtcaacatatagtacctctatagtggagcttttacatggtaaagctgaaaaattgagcagggatgcaaacatacttgatgtgtttgtccccagggtgcggcaaacatttgatacaagggaagaagcctacctcttttaccttgactatgcaaagttggatggttttagtgtcaggacaaagaggtgtaattgcaactgctggtgtggtgtgattgcaaccccgcattag

SEQ ID NO: 38335 - DNA, 240 bp, Zea mays
  Peptide Sequence Number=SeqID_80114
atggatattggatatgatggggcggccagcaacctcatcacagcgaccgcgtacctgcctagctgcatgtatgatgcaaacatacttgatgtgtttgtccccagggtgcggcaaacatttgatacaagggaagaagcctacctcttttaccttgactatgcaaagttggctggttttagtgtcaggacaaagaggtgtaattgcaactgctggtgtggtgtgattgtaaccccgcattag

SEQ ID NO: 38336 - DNA, 261 bp, Zea mays
  Peptide Sequence Number=SeqID_80115
atggatgaatatcttggtccaccagtcttatccgacgctctgcgcttcatattattgtatttctgggcccacctatcgaggctcagctcccttgatgcaaacatacttgatgtgtttgtccgtagggtgcggcaaacatttgatacaagggaagaagcctacctcttttaccttgactatgcaaagttggctggttttagtgtcaggacaaagaggtgtaattgcaactgctggtgtggtgtgattgcaaccccgcattag

SEQ ID NO: 38337 - DNA, 270 bp, Zea mays
  Peptide Sequence Number=SeqID_80116
atggtgtcattaggatttgagctagggatcaaggtgaacacgcttgatctttggctcaaggtggtgatgaggaggatggttatgattatgcttatggtaatggatgcaaacatacttgatgtgtttgtccccagggtgcggcaaacatttgatacaagggaagaagcctacctcttttaccttgactatgcaaagttggctggttttagtgtcaggacaaagaggtgtaattgcaactgctggtgtggtgtgattgcaaccccgtattag

SEQ ID NO: 38338 - DNA, 1056 bp, Zea mays
  Peptide Sequence Number=SeqID_80117
atggccagcctccaagtcactcctacttcggcgttcactgagtggaacgagctgaagttcgaaggcctgtacctgttccacacgcccctgggctcaggcgccaaccaagctcgggtcatagacaacaaggcgccgattggcatcggtgccaccgtagttaacaactggacagtgtatgacgggccagggccgaacgcaaagctggttgcccgtgcacagggcttgcatatccaagccggcaactgggtcaactccttcagcctagtgttcgtggatcaaaggttcagtgggtccacgcttgaagtgaccgggatagtagttgaatccggggagtgggctattgttgggggcaccggtcagtttgccatggcaaacggtgtcatcttcaagaagttccatgagcagagaagcgaagggaacatcatacaactcaccatccatgctttctgtccgcgctcggccgcaaaagttggaccgtggggtgggagcggcgggtctccggtggacatcacggcagagccccagcgtctgaagagcatcaccgttgctactggcatcgccgtgacctcgattgccttctcctacgtcgactccgccggccaaacccaatctgctggtcgctggggcggttccggtggagaaactgagccggtgatccagctcggcgactccgaggtgctcacggagctgtccgggacgatcggcaacgtcgacggccacaccgtcataacctccatcaagttcgtcacaagcctcaagacctacggccctttcggagcatggggggacgggagtgacactccgttcgcgatccccgtgcagcaagggagtgccatcgttggcttcttcgcacgagctggggtctacctcgacgcccttggcgtttacgatgcaaacatacttgatgtgtttgtctctagggtgcggcaaacatttgatacaagggaagaagcctacctcttttaccttgactatgcaaagttggctggttttagtgtcaggacaaagaggtgtaattgcaactgctggtgtggtgtgattgcaaccccgcattag

SEQ ID NO: 38339 - DNA, 895 bp, Zea mays
  Peptide Sequence Number=SeqID_80118
atgcaggcggtatgcaactgcaccaaggggatgaaccttttcaacttcgacgtgtccagcatggaggcccaggcccacacgtcatgcgggcggaagcagcattcaaatcgtcttcaggctcacgtcccctcctgggacagcgagagagccctctcccacggcatgaagacgacgcgcccttgttccgttcctcaaacggctcgtgcatgcacaacggctgccccgcgaaccactcgtcccgtcgcattaactccgcggcagggcaggcgacacctttggcaggcgaagcgggcgacgcttcacctccgccatgatgaccgcgtcaaaaaaggaaccgagaaaggggatactccgaaagggatccttctccgcgaaggaagcgggccccgagccctcctactgatcagagccacctcaggccacccgggctccgcgcccactactgatcaggggttcgaaggctggccccccgaagggttcgacagtcgcctcagaacatgcagagcgagggatgactctgggtacgtccgatacatagccaaggctcgggctatgctcccgagaagtgaccgcagtcacttcgcccctccactggccgacctgacaggaaaacagcgccgcctgctgctccgactgctgtgccgcctgtcaagggctcggactcaacctcgacctcgaacgacggactccgcctcgcccaacccccagggctcggactcaacctcgacctcggacgacggtctccgcctcgcccgaccccagggctcggactcaacctcgacctcggacgacggtctccgccctcgcccgaccccagggctcgaactcagcctcgacctcagaggagcctccgcctcgcctgaccttgggctcggaccgaccacgccgcaggggg

SEQ ID NO: 38340 - DNA, 996 bp, Zea mays
  Peptide Sequence Number=SeqID_80119
atgcaggcggtatgcaactgcaccaaggggatgaaccttttcaacttcgacgtgtccagcatggaggcccaggcccacacgtcatgcgggcggaagcagcattcaaatcgtcttcaggctcacgtcccctcctgggacagcgagagagccctctcccacggcatgaagacgacgcgcccttgttccgttcctcaaacggctcgtgcatgcacaacggctgccccgcgaaccactcgtcccgtcgcattaactccgcggcagggcaggcgacacctttggcaggcgaagcgggcgacgcttcacctccgccatgatgaccgcgtcaaaaaaggaaccgagaaaggggatactccgaaagggatccttctccgcgaaggaagcgggccccgagccctcctactgatcagagccacctcaggccacccgggctccgcgcccactactgatcaggggttcgaaggctggccccccgaagggttcgacagtcgcctcagaacatgcagagcgagggatgactctgggtacgtccgatacatagccaaggctcgggctatgctcccgagaagtgaccgcagtcacttcgcccctccactggccgacctgacaggaaaaacagcgccgcctgctgctccgactgctgtgccgcctgtcaagggctcggactcaacctcgacctcgaacgacggactccgcctcgcccaaccccagggctcggactcaacctcgacctcggacgacggtctccgcctcgcccgaccccagggctcggactcaacctcgacctcggacgacggtctccgcctcgcccgaccccagggctcgaactcagcctcgacctcagaggagcctccgcctcgcctgaccttgggctcggaccgaccacgccgcagggggccccctacggaagcaaggagacgtcagcaaggacccgacagctccgacagctatgctcctacagggctcaagcgctcctccgatggccgcgacatcacatga

SEQ ID NO: 38341 - DNA, 822 bp, Zea mays
  Peptide Sequence Number=SeqID_80120
atgtcttcgtgctcccttatgcatcgtgtctttccaccttccaagcccccggatgggggattcccgtcgtctttccgcttcgtcgttggaggaacgcaactccgcgggagttggtacctttcaaccatcgttcggcttcaaggattttcatcatgcagcccggttgcacccctccgccggcggtcacccaagacggtgaccaccagcccctgggtggggagaagcaagccgggctgcgatcttggtcccaccctcagcttcaaggatgttcatcatccttgctggggtggaggccgggctgagccggagctctacctccgcgtgggttcgtgggtcagcctctccctcagcgttcgagggagagagcgctcgctggccctgcgcgaggggggacttcgacaatgcggggctggtcgacggcgggcgtcgtcagcttcagcgtgttgggttcatcggcttggctcccggtgccccctcctgccggaaggcggctgccgcaccgtgtgcacgggaggactgcccaagatgtcgcgcgctgctagggcgacgttcgtgttctggggcgggtcccgcctttgcaccggtatggcgcctccgcgcggaggtcggtgccccactcgtccgggaggatctgagtggggatctgccggaggactggcggtccatgtcgtcggtgccgaggtggaggcggctcgagaagtccccgttgccgacgggatcaccgccaccatccgcgcttcgggcctccggctctttgtacttgtcctcgcccctcgagcgtcggcgtgggcgagggcaagattgcagcagcacccgccctaa

SEQ ID NO: 38342 - DNA, 609 bp, Zea mays
  Peptide Sequence Number=SeqID_80121
atgtcttcgtgctcccttatgcatcgtgtctttccaccttccaagcccccggatgggggattcccgtcgtctttccgcttcgtcgttggaggaacgcaactccgcgggagttggtacctttcaaccatcgttcggcttcaaggattttcatcatgcagcccggttgcacccctccgccggcggtcacccaagacggtgaccaccagcccctgggtggggagaagcaagccgggctgcgatcttggtcccaccctcagcttcaaggatgttcatcatccttgctggggtggaggccgggctgagccggagctctacctccgcgtgggttcgtgggtcagcctctccctcagcgttcgagggagagagcgctcgctggccctgcgcgaggggggacttcgacaatgcggggctggtcgacggcgggcgtcgtcagcttcagcgtgttgggttcatcggcttggctcccggtgccccctcctgccggaaggcggctgccgcaccgtgtgcacgggaggactgcccaagatgtcgcgcgctgctagggcgacgttcgtgttctggggcggtcccgcctttgcaccggtatggcgcctccgcgcggaggcctga

SEQ ID NO: 38343 - DNA, 708 bp, Zea mays
  Peptide Sequence Number=SeqID_80122
atggaggcccaggcccacgcgtcatgcaaccggcgcgccgaatgcttcgtgcatgcgactgcaccgccacttgcgccaccaccgcgcctcctcgactgtggaaccaataccgcgactcgaggcgacccagaacacaacccagcggcgccagcctggcgcgacgacgacgcgcccgtgttccgttcctcgaatggcccacgcacgcgcaacggccgccccgcgaaccactcgccccgtcgcattaactccgcggcgggacaggcggcgcctctgggaccgggaaagggggataccccgaaaaggatccttccccgtgaaggaaccaggctccgagcctccctactgatcagaggttcgaaggctggcccctcggaagggttcaacagccgcctcagagcgcgtgggctctacacccactactggtcagaggttcgaaggccggcccctcggaagggttcaacggccgcctcaggctactcgggctccgcgcccactactgatcaggggttcgaaggctggcccccgaagggttcacggccgcctcagacacggtgtcggtgttttggatccgaccgcacacccggggttgcccctcaaggtgtttttaggagtaggacggtgtcgacgactgtagcaaaatggttcgtgccaattgcacgagggacggtggacacagtttacaggttcgagccgcttagagatgcataa

SEQ ID NO: 38344 - DNA, 642 bp, Zea mays
  Peptide Sequence Number=SeqID_80123
atggcggtggcaggcgggctggagcagcggtcacgtcgtcagccaagcctacgtcccatccaggagcgacgagagaaccctctctcacggcgtgtagacgacgcgcccgtgttccgttcctcgaatggcccacgcacgcgcaacggccgccccgcgaaccactcgccccgtcgcattaactccgcggcgggacaggcggcgcctctgggaccgggaaagggggataccccgaaaaggatccttccccgtgaaggaaccaggctccgagcctccctactgatcagaggttcgaaggctggcccctcggaagggttcaacagccgcctcagagcgcgtgggctctacacccactactggtcagaggttcgaaggccggcccctcggaagggttcaacggccgcctcaggctactcgggctccgcgcccactactgatcaggggttcgaaggctggcccccgaagggttcacggccgcctcagacacggtgtcggtgttttggatccgaccgcacacccggggttgcccctcaaggtgtttttaggagtaggacggtgtcgacgactgtagcaaaatggttcgtgccaattgcacgagggacggtggacacagtttacaggttcgagccgcttagagatgcataa

SEQ ID NO: 38345 - DNA, 312 bp, Zea mays
  Peptide Sequence Number=SeqID_80124
atggggaagcctgtcccatcactcctcatgctcctcctcagccgaggcggggtcccactcgacagtccaacccggtggcaagatgtacggccaagtcactccagcaaccatgtcctccagagaacctgtaaaaattatgccacaagcaaggctgagtatactaatactcagctagacttacccgtgaccgcacttgtacccaccataaccggaatgggagaccacgtctcaggtcgcgtgaggggcaaagtctactgccaggttcaatcaggatttaataacattatgctaagagaagaaaaactaagttaa

SEQ ID NO: 38346 - DNA, 255 bp, Zea mays
  Peptide Sequence Number=SeqID_80125
atggggaagcctgtcccatcacttctcatgctcctcctcagccgaggcggggtcccactcgacagtccaacccggtggcaagatggacggccaagtcactccagcaaccatgtcctccagggaaccttgaccgcacttgtgcccaccataaccggaatgggagaccacgtctcaggtcgcgtgaggggcaaagtctactgccaggttcaatcaggatttaataacattatgttgagagaagaaaaactaagttaa

SEQ ID NO: 38347 - DNA, 399 bp, Zea mays
  Peptide Sequence Number=SeqID_80126
atggaggaggagaaatccacgcgcgccatagaagggcttcgacagggacagggcgctgctgggaaatggagggagagaagcaagggggcagctaggctcttggccgaccggagttggaggaggaagccgcggcctgaacaccggcgagccaggcgcggccatggctggggaagaggaacagcaggcgatttggagcgcggcatgcttgaagatggagcagaggaagcagtgcagagaaggaacgcggggcgtagggagagagaaacgggcgtggaggagctgcgcgacgacgatgacgacgaccgacggcagccgcgaccagataaagctcccgcgcgcttttggatcgggcgagacgtcgtcagaacaaatccgaacggtgtgaacaaccgtatttaa

SEQ ID NO: 38348 - DNA, 564 bp, Zea mays
  Peptide Sequence Number=SeqID_80127
atggagcagggaactcgaccaggaaagggactcggaaccgggcgcggcggctggacacagggcgagccatggagatgggcgccgagctccatggatgcagggaggagggaggagctcacatgctggctggggatggaggaggagaaatccacgcgcgccatagaagggcttcgacagggacagggcgctgctgggaaatggagggagagaagcaagggggcagctaggctcttggccgaccggagttggaggaggaagccgtggcctgaacaccggcgagccaggcgcggccatggctggggaagaggaacagcaggcgatttggagcgcagcgtgcttgaagatggagcagaggaagcagtgcagaaaaggaacgcggggcgtagggagagagaaacgggcgtggaggagctgcgcgacgacgatgacgacgaccgacggcagccgcgaccagataaagctcccgcgcgcttttggatcgggcgagacgtcgtcagaacaaatctgaacggtgtgaacaaccgtatttcagacggtgttcaatttgatttgaaagacacctga

SEQ ID NO: 38349 - DNA, 405 bp, Zea mays
  Peptide Sequence Number=SeqID_80128
atggctcgccctgcgtccagccgccgcgcccggttccgagtccctttcctggtcgagttccctgctccatctctgccctctgccggcgctccagctcctccatccatggccatgccctgttgctcgtcggtgctcgccgcgggagacggcgcttggtcgcccaaccttcctgctcctcaccggctgtcgctcccaatcttcagctcatcgactcaccgtcgtgtttcttgttctccctcatcagtcggcctcgccgtggctaagtatgtccgccatgctatgtgcttcggtctttggtcgctgcctattgctcaccatcccctattcgatcttgtcgtcaagcttcgcctcagccttagctcatcggtcacgctcgtcagatgtgcgatcgaggacttcagctga

SEQ ID NO: 38350 - DNA, 405 bp, Zea mays
  Peptide Sequence Number=SeqID_80129
atggctcgccctgcgtccagccgccgcgcccggttccgagtccctttcctggtcgagttccctactccatctctgccctctgccggcgctccagctcctccatccatggccatgccatgttgctcgtcggtgctcgccgcgggagacggcgcttggtcgcccaaccttcctgctcctcaccggctgtcgctcccaatcttcagctcatcgactcaccgtcgtgtttcttgttctccctcatcagtcggcctcgccgtggctaagtatgtccgccatgctatgtgcttcggtctttggtcgctgcctattgctcaccatcccctattcgatcttgtcgtcaagcttcgcctcagccttagctcgtcggtcacgctcgtcagatgtgcgatcgaggacttcagctga

SEQ ID NO: 38351 - DNA, 621 bp, Zea mays
  Peptide Sequence Number=SeqID_80130
atggcatacatatctcttattcattgtattcatttagattgcaacctcgctgacggagagtacatgctcatccctgagcaaggagttgacggtttattccgatttaagtgcgtcgttgcctctaaggcgagtcttgggcacttaagctggaataattcggacggttctgccacagctgatgacttcacccacccctgccaatggaggagacacccgtttcagtttcgactaccttgcccacgagggttttccctctatcttgtggaggtgctctgctccgccggttaccctacaccccctctctacacagtgcagttgtacgaggagcatcgggtgccacgttgtcgggtttggctaactctgaaagctcaccctctacagcctggatggcgttcccttgattccgagactatcgggtttagggcggacgacaccactaaggccgcagcactaaagaccctaacaaccttctgcggataccatcccttggaaatggtgatgcacccactgggactcttccccgccgagaagagggatgaccccatgtggtgcaacagagtgagccacgtgaaggacgtgtgggccatgcatcccgaccatgttaggaggatcactgtttag

SEQ ID NO: 38352 - DNA, 327 bp, Zea mays
  Peptide Sequence Number=SeqID_80131
atgaactccccccatgcgcacgaggacagaccaactccggccatctccgacgccgacccatacctcgacgtgaccgccgtaacctccccgacctccctggacagctcaccggagctagctcgccgctgggcggacgacaccactaaggccgcagcactaaagaccctaacaaccttctgcggataccatcccttggaaatggtgatgcacccactgggactcttccccgccgagaagagggatgaccccatgtggtgcaacagagtgagccacgtgaaggacgtgtgggccatgcatcccgaccatgttaggaggatcactgtttag

SEQ ID NO: 38353 - DNA, 342 bp, Zea mays
  Peptide Sequence Number=SeqID_80132
atggagattcggtcactatgtgctataaaagctgttccaaccgagggatcgataagaaccaaacatttcaatcgcaaaaagacaaacaaaaagttcgaggcgaaaatatatgtcctcacaaaggatgaaggtggccggcacactgcctttgtcacaaattacaacccccaattctacttcaggacagctgatgtcactagaagggttgagctgcttggggagatgaagatggttttgcccggtgacaatggttgggatcaagatgcccacgatcaaggtgcggtcggcaatagtagcttccccaccgtcctcaattgcgtcgtcaacagtcaacacgcctga

SEQ ID NO: 38354 - DNA, 870 bp, Zea mays
  Peptide Sequence Number=SeqID_80133
atgctgatgtgggtgtccacagccaccttcaaagcctgctgctgttgccaccgttgtcagctgtcacacaagcgctcggcggcggccagggacttaaacagtggcggccccattaaacaggggtggcactggcaggcaagtggacagtggacatctgcaactccatcaaaggtatcaatgtctggtgttggcgtgacttttggcagaagcacctgtgccggcattgaggacttgaaacgccttgccgcccacttgctgctggggcccgctgctgtcgttgtcggtggcgactggggccttggtttgacagatgtagatggcccatggtgcttggtgctggtggctgcagggagggccggtcgtggaactgttgttactgggcgtgttgaacagggaacaatcaaaactggtgaagatgttgagatcttgggtttggcacagactggtcccttgaagactacagttactggtgttgagatgttcaaaaagatactggaccatggagaggctggtgacaacgttggccttcttctccgtggtcttaagcgtggtgatgttgagcgtggccaggtggtgtgcaaacctggtagtctgaagacatgcaaaaagttcgaggcggaaatatatgtcctgacaaaggatgaaggtggccggcacactgcctttgtcacaaattacagcccccaattctacttcaggacagctgatgtcactggaagggttgagctgcttggggagatgaagatggttttgcccggtgacaatgtaactgcgaattttgagttgatatcacctgttcctcttgaacctggtaacgattacattctcaatttctttcgacagtatagaactatagaccaggtcttctga

SEQ ID NO: 38355 - DNA, 1820 bp, Zea mays
  Peptide Sequence Number=SeqID_80134
ttttatctcatgactggttgctcctagactatatttgcacgcaaggtgatcttgctctcatcgattttatcaaggaaatcccttgtgaaccaagggtagaagtcgttcttattgatgatgcctttgttgaaaggaagtggatggagtgtttatttcagccgagcgcatatctaggtgacgaggttatagactgttacataaatttgataaaagctcaaaagcatctaaagtgccgatctggaggtcgcgttcacatagaaaatgctttccagttcaatttcctgaagcgagatggtgatcttgaaattaaaacagaggagctatatccaattaaagacatggcacacatatgtagcgctgaacgaagggtgttactttacctagaccatgacatggtgtttattccgataaacatccgagagacgcactggtatcttgctgtgatccatgcaagaaatatggagatacaagtgctcgattcacttggtacttcacaagaccgcaaagacctcactgactctattaaaggactgcaaagacaaatagatatgatatctcaacgtaaggagttaaaagaccacaggtggccagacctccaagttgcttcttggccgctcagagaaatagacatgggatatgcaaagcagacagatagctcttcatgtggcctctttcttttgaactatatcgaatactggacaggggatgaactgtctgacagttttacccaggatgacatgtcacactttaggaaaaaaatggctgctatattactatcttcagacctgaataagagaagggggtgtctgttatacaagaatgaaaaagaagttgactctggaagctcatctgatgttgagatattagaaaacccaacagattctaataagaggaaactactccacgtgcttgatgatagcgaagtggtgtatgaagatgaggaaggccctattactcaagcagacttgcaaaggtggtttgttgatgattgggataaaaaagctcctgtaaaagtatctaccgatggttgcaccaatgactttttaatggttggcctttccacaaaggacatgccagtgaccaaagccgattcaatagatgttttatgtgattatatcatggcaatagaagacgatacgacactagaatgttttgacatggctgttcggctgcttgccaataaagagtcacgtaggccgaaagaagaaatcataaataatagaaagcattatatggacatgcgtttttggagaatggttggttttggtaaacttccaaagtaccatcaggatcctacaacagaagagttagccaaaacactcgattgttggccatcaatgaattattatatcacgggttgtagatatgttctcatgccatggaaattcaatggatgttacgcccttttcgtaatagatcatgttaaaaagcatgtgacttttatcgattttacaccgactcaagattggtgtaagcacatgccatacaagaggttcgcggaagcgattatcatggcctcaaaaaaatataagattgcttacagcaagaaacgttctggatgggcggaggatatctttaagtgggaacatacaattcagactggtgttccaattgacttaagagggtttaataccagctacctcgttctacaagctatggccatgtgggggaatgacagacgactgaaatttgttggggatgcaaagactcttcgaaaaaactttgtgattgatcttttaagttatgaggacaattcgtgccgatatgccatccctgcaaacatacaacaaagacttgtcgatatcgctaaaaaggattag

SEQ ID NO: 38356 - DNA, 786 bp, Zea mays
  Peptide Sequence Number=SeqID_80135
atggctggcccaggccaggatagctgttcaaccaatactaggtatatgcccgtgtgttgccacaaggtggggaagcaggtccgtgccgcctacccacagccggggttggccagcgctagccaccaggccgtcgcggctccaacttccaacgtcgtgccccgcctggcaaccgaccgtgtccactgcctcctggctggctgggcaggcatccttttctgctccgagacacctgctgaagctggaagtacatggtgccttattcctctcttttctccttatggtacaaggatgattactttaattgaattggtctgccactggctgctgccatccactgcgggctcggtcgccacgtcgacgccatccctgtcctcgagcgcgctgtcacagtcgtggcgccgacacaagaatcgtctgccgacagcgagcctgaggccggtgcagccggcggcgacgactaccagcagctgcagcctgtcgagcccgactagaggggtggaaaatttacgagaccagctactgaaggagggaagtttgagggcttctctggagtctgggctaatgaatatgcgaagaggacaagtgtccttcccctcaacgatagacaccaagactaaggctgatcttgaggaagttgttgccgctgaagctgatattatgaacttgaagcaaaaggtttctgatcttcggggacaactcaacaaccaagttcagttgagttccacctcgttatgtgaatcatgcaacaacaagcgatccataaatgcagacaagcttgtcgagtaa

SEQ ID NO: 38357 - DNA, 294 bp, Zea mays
  Peptide Sequence Number=SeqID_80136
atggcggagaggaaaagggaggagacgaggagcagtcgcgccgcctcggtggacgcaagagcaaggccagagctacacttggacatacgcgaggaagctgccaagaagaacagggaaccaccgaccgcgtccaacatacgccggcattcatcgtcactgcaggtccgtgccgcctacccgcagccggggttggccagcgccagccaccaggccgtcgcggcttcaacttccaacgtcgtgccccgcctggcaaccgaccgtgtccaccgcctcctggctagttgggcagggtag

SEQ ID NO: 38358 - DNA, 210 bp, Zea mays
  Peptide Sequence Number=SeqID_80137
atgagtgggtggaaatgttttcaaaaagaaaatacttatgatggtgaatctgtcaaaggccttgatgggttcaacatcggaaaggatgtacctctgacaggttataactttgtgctgctgttgatggtgttaagtgccggtgggctcggccttcttataagtctaagtaactcttctatacttcttattgaggatggtcacttgagctag

SEQ ID NO: 38359 - DNA, 234 bp, Zea mays
  Peptide Sequence Number=SeqID_80138
atggtggtatctttctgcaaagttccctataatgctcttttcatcctaaggatggaagtacttaaatcgggacttgggctaggaacaggtgatgttctaccgaggttgattaaggattggatgggttataactttgtgctgttgttgatggtgttaagtgccggtgggctcggccttcttataagtctaagtaactcttctatacttcttattgaggatggtcacttgagctag

SEQ ID NO: 38360 - DNA, 570 bp, Zea mays
  Peptide Sequence Number=SeqID_80139
atgtcgacccaccccattagcttgttccccgctaagaaggaggacgaccccatgtggaaggacagggttgggcacgccaaggatgtgtgggctctctaccctggacataccgctcacctgacgattcggtgcatgagtgccctgtatcgtttgcaggccttacaaggagaggcgatgtcccagcttatgggcctagtggagtccaccaagatcaccctggataaccgggaagaccttgtagtggatctatccactgagctggtggaaaaggatctccaggtggaacaaatggccaaccacatacaagagctcgaggatcaggtggaagctagggaaaatactattgaggttctagaagaccagctccagaacactcagcaacagcttgaggaagccaaccaacatttggatctgcaccaccaagcgtttgaggacatggaggcagaaggggctgatgaggacgtagatatcgagggaggagaggagccggagcctgcatctagcttagacactgctggttcaggaagatcaccttcccccgagtctagtgttgcctcgtttgctcgttag

SEQ ID NO: 38361 - DNA, 885 bp, Zea mays
  Peptide Sequence Number=SeqID_80140
atggggatgcgtgtctacgagacgaaaattggaataaggattaaggtgtggtaccgtgtgtcaagcgttgaacgtactaagcacatgctgagaaatatgggagcgggttacactacacctcccaagtacgcggtgcagttgttcgaggagcaccgagtgcctcgctgtagggtgcggatgaccttggagcctcatcccctgcatcccggctggcgctctctggactcggagtctttcggtttcagggccgatgacactatagagtccacaactctgcatgtgctgacgaccttctgtggatttcaccccttggagatgtcgacccaccccattagcttgttccccgctaagaaggaggacgaccccatgtggaaggacagggttgggcacgccaaggatgtgtgggctctctaccctggacataccgctcacctgacgattcggtgcatgagtgccctgtatcgtttgcaggccttacaaggagaggcgatgtcccagcttatgggcctagtggagtccaccaagatcaccctggataaccgggaagaccttgtagtggatctatccactgagctggtggaaaaggatctccaggtggaacaaatggccaaccacatacaagagctcgaggatcaggtggaagctagggaaaatactattgaggttctagaagaccagctccagaacactcagcaacagcttgaggaagccaaccaacatttggatctgcaccaccaagcgtttgaggacatggaggcagaaggggctgatgaggacgtagatatcgagggaggagaggagccggagcctgcatctagcttagacactgctggttcaggaagatcaccttcccccgagtctagtgttgcctcgtttgctcgttag

SEQ ID NO: 38362 - DNA, 255 bp, Zea mays
  Peptide Sequence Number=SeqID_80141
atggggcagatacttacccggtctacgctcaccggcagtcgggcgaagtccggcgaccgtggactggcttctccggcgaagcaaagggctcgggtggccgcgggcacgccgtgcgcggggcaaacgccggtggtttcgggctccggtgaggtcgagcctccgtccaaagctgctccacttgggcttctaggtctccgatggggtcgttactgccgctgctgctctcttcatgtcttggagccagctgatgccgag

SEQ ID NO: 38363 - DNA, 300 bp, Zea mays
  Peptide Sequence Number=SeqID_80142
atggcgagagtagcgtgtaccctctgtggcaagaggctggacggtgatgtatctgttctctcagttggcgtgaacctgatctgttttcccccttatggagatatgctgccatgtacgaggaaaactgcgcgtaagtccactggacctattggtgtacctcggcatcagctggttccaagacatgaagagagcagcagcggcagtaacgaccccatcggagacctagaagcccaagtggagcagttgcggacggagctatgtcatagaaacaggtgtgggaagaagatggtcagcgtataa

SEQ ID NO: 38364 - DNA, 252 bp, Zea mays
  Peptide Sequence Number=SeqID_80143
atggggaagcctgtcccatcacacctcatgctcctcctcagccgagtgaccgcacttgtacccaccataaccagaatgggagaccacgtctcaggtcgcgtgaggagggcaatctgctgccaggttcactcaggtttgaggttcttgcctaagcataatggattaagacttggaatgcctcttaaatgttttagtgggtactcaaagggttttgctggtttggttaggggtgggtttgaactacaactgtga

SEQ ID NO: 38365 - DNA, 165 bp, Zea mays
  Peptide Sequence Number=SeqID_80144
atggggaagcctgtcccatcactcctcatgctcctcctcagccgaggtttgaggttcttgcctaagcataatggattaagacttggaatgcctcttaaatgttttagtgggtactcaaagggttttgctggtttggttaggggtgggtttgaactacaactgtga

SEQ ID NO: 38366 - DNA, 384 bp, Zea mays
  Peptide Sequence Number=SeqID_80145
atggataagggtcagccctcgccgacgataagaacgccaccgcagcgtgggatggtcgtcggtggtcgcgaaaacgaagaagagatcgaagtgactgaagagaagacaccaccaccttgggaatctcaggccggaaactgtttctactttgacatctgcggatccgagcctgactcacctactaacaaaggcaagccccggcttgctgaccgaggaccctttaactggtcacatgcctcgtcatggcatatccttgagagtcttttactttgtcgggtgaaggagcgacaaccttttgttgcttctgctctaaggtggtaccaaaggaagaacgcaaggaatgaagtgcgggaggaaaggatcctccatctaggacttttgtga

SEQ ID NO: 38367 - DNA, 204 bp, Zea mays
  Peptide Sequence Number=SeqID_80146
atggtgaaagtagaccatatgcaaacagagtctattaatactttatctggcattaaaatgttgaaacatatccttgagagtcttttactttgtcgggtgaaggagcgacaaccttttgttgcttctgctctaaggtggtaccaaaggaagaacgcaaggaatgaagtgagggaggaaaggatcctccatctaggacttttgtga

SEQ ID NO: 38368 - DNA, 204 bp, Zea mays
  Peptide Sequence Number=SeqID_80147
atggtgaaagtagaccatatgcaaacagagtctattaatacttattttgacattaaaatgttgaaacatatccttgagagtcttttactttgtcgggtgaaggagcgacaaccttttgttgcttctgttctaaggtggtaccaaaggaagaatgcaaggaatgaagtgcgggagcaaaggatcctccatctaggacttttgtga

SEQ ID NO: 38369 - DNA, 270 bp, Zea mays
  Peptide Sequence Number=SeqID_80148
atggcttctacctgcaagaatatattttcattgggagcatggtgggatcttactgcaaagttcccgcatatccttgagagtcttttactttgtcgggtgaaggagcgacaaccttttgttgcttctgttctaaggtggtaccaaaggaagaacgcaaggaatgaagtgcgggaggaaaggatcctccatttaggacttttgtgtaaaaacttatcgggaggagtttttgcctcccttggtatatgtaataatattactctgcactcctag

SEQ ID NO: 38370 - DNA, 750 bp, Zea mays
  Peptide Sequence Number=SeqID_80149
atgcatatccttgagagtcttttactttgtcgggtgaaggagcgacaaccttttgttgcttctgttctaaggtggtaccaaaggaagaacgcaaggaacaaagtgcgggaggaaaggatcctccatttaggactttggtgtaaaaacttatcgggaggagttttgcctccattgttatgtaatcgctccgcatttctatattttccaatgttctgtaatgtctgcaagacggatgaaacgttcctggaaagaaaaaggagatcggaagatgcagagaagagaaatcgtcagctccatgtggatctcaccacagctcaagcccgtgtagctgccttggaaagtcatgaagccattgctgttgaagccctgaagcaagccaaggatgagcacgtccagaagttgatggaggcctacttggtaacccataaccaacgtagagccctgcggatccaagaacccgcttcatccaacccagtccaacccatgagagctgaagatccccaaattcttgaaggtcactcggtctctatcaaaggagagaagaaggcttgggaactcctggaaggagccatagtcttcgaaggaattccagtcttccctcaggctatggataagcaagagcaccccgagtcctcccaagatcccccgccagagttgtttgagccccacaccatgaagaagattctagcaccgtcccgtgagatcaaggaagaagctgcaagcaccccgccagcaccgccgcccctctaa

SEQ ID NO: 38371 - DNA, 1537 bp, Zea mays
  Peptide Sequence Number=SeqID_80150
cgagtttgactatggtgacccacgcactgacacgccggacccaaccgacgccaacaacaccgcgttcgtcgccgcgggatcgggctgggcttccgcagccatggccaagccaccgccgcccacctccacctccgaccccgcgctccccaccactgctacaaccacctcgtcggcccccaagtcgtcgtctcgcccctccccccgcccccggggcctcctcgatccgctcgcagcctccgcgcgctccctcctcgcctcggcgcgccgctccccggtcaccacgttagccgccgccttcttcctcctcgcgctcgtcatgtacggcgaggacgcccgcaccatcgccgagctctccatcgacgactacctctacccggacgccgacctctacaacgtctccggcctgccgcccctcgcgctgcccccgctcacctgcgacctctccagcggcagatgggtcttcgacaacgtctccgttccggcgtaccgggagaaagactgcaccttcctcaccaagcaggtctcctgcctcgccaacggccgccccgacgacatgtggcagtactggagatggcagcccaacgagtgctccctccccacgttcgacgctcggagattcatggaggcgatgcgcgggaagcggctcatgttcgtgggggactcgctgaaccgcaaccagtgggagtcgctggtgtgcctcgtgcagtccatcctgtccaagggcaggaagaagatcgtcaagcggggctccttcaacaccttctacgccaaggagtaccgcgccacgctcgagttctactgggcgcccttcctcgtcgagtccaactctgacaaccccaacttccacagcatcaaggaacggatcatcagtcccgagcggatcgaggcgcacgccaagcactggaaggatgctgactacctcgtcttcaacacctacatctggtggatgaacaacgccgatatcaaagtcaggagacccaattcgaggtactggtctgacaacgatgaggttcccaggattgaggcgtacggccgtgtgttcaagacatggtctgattggctcaatgacaacatcgatcctgcccgaacgtccatcttcttcatgacgatttctcctcctcacctcagcccacagaattggggaaacccggacggtatcaaatgtgtaagagagacgcttccatatcagaactacagccaacacttggatctttaccatgacatgcggctgtatgacttagtggtcaatgtggccagctccatggagaaggtcccagtgacagtgatcaatatcacaaggatgtcagattaccggaaggacgcccacacgtccctgtacaccatccggcaagggaagctgctgacgcctaagcagaaggcagaccccgagaagttcgcggattgcatccactggtgccttcctggcgtgccggacgtgtggaaccaaatactctacacgaggattctttcgaaatcatcatggcattctaattttagcccccctccatcccagtctctgcctcttcctccccaatga

SEQ ID NO: 38372 - DNA, 204 bp, Zea mays
  Peptide Sequence Number=SeqID_80151
atgcacgacctcctacttgtgctagggctgcttggccattctggttggttgctggggcaagaagacgagctgcctggttgttctgacaatactactgctgccattgctaaggaaactgcctctggtactggtgctggtgctgacgctgatgctggtgctgacgctgatgctagtgctggtgctggtgctggtggccttgcttga

SEQ ID NO: 38373 - DNA, 630 bp, Zea mays
  Peptide Sequence Number=SeqID_80152
atgggcagaaaaggcaggaaatgtctcgtagttgggagaggtgatctttgcatgagtccagtagaatttgaaccttctgtaagtgatgatttagtactggagcagaaatctggaaatgggcagcatgatgtcagaggcacacatcatcacagaactaggatgaaacctgaaaaaccaattgacttgcttaggaaagttgatggcaataatatgtgtgctgactgtggtgcttcagaacctgattgggcatcattaaaccttggcgcacttctatgcatagagtgttctggggtgcacagaaatcttggagtgcatatatcaatggttagatctctgacacatgatgtcagagtttgggagccatctgtaatcaatctctttcagtcattaggcaacatgtttgtcaacagtatttgggaagagacgctgccagatgataattcaagtgctgatggatcagacacatcacagtacctctctattagcaagcctaaacacaaagatgtattctctgccaaggagaagtttattcatgccaaggtattcactacattcacaactgcttatattcctttgttctttagcaatgtatggggtgttaaaaaccaaattatctccagtgaagaatga

SEQ ID NO: 38374 - DNA, 507 bp, Zea mays
  Peptide Sequence Number=SeqID_80153
atggactcacatcttcgatattttaaacaaggatatgaactattgcatcaaatggaaccatatattaatcagaaatctggaaatgggcagcatgatgtcagaggcacacatcatcacagaactaggatgaaacctgaaaaaccaattgacttgcttaggaaagttgatggcaataatatgtgtgctgactgtggtgcttcagaacctgattgggcatcattaaaccttggcgcacttctatgcatagagtgttctggggtgcacagaaatcttggagtgcatatatcaatggttagatctctgacacatgatgtcagagtttgggagccatctgtaatcaatctctttcagtcattaggcaacatgtttgtcaacagtatttgggaagagacgctgccagatgataattcaagtgctgatggatcagacacatcacagtacctctctattagcaagcctaaacacaaagatgtattctctgccaaggagaagtttattcatgccaag

SEQ ID NO: 38375 - DNA, 733 bp, Zea mays
  Peptide Sequence Number=SeqID_80154
tacccgcgagaaagaaaagggtggcgcggcttaccggtggcgagagaggtccggcgaggggcgggattggctccgggaggttctgacggtcacaacggtgtacggcttgacggcgggggtcctcggttcaagctcgtgcaagcttcacggcctctcagggaagctatccgagggcttggaccgagcggaggagggtgggaaaggggttggccacggtggttgccctcgggcggctctggcgggtcgaggggaggtcgccggagctatgggcgagctcgggggagttaggcgtggtacggaggaggcaacggggaaggcagccgggcactgggacgggctttatagccgtggcgcgggcgtggtcacgggcggccacgggcgcacggggccctgggtggacaccctgagtaacacctggggtgttacagcacccgtcgacaccgaggccaggggccacgtccaccgccgctgtggcccaggagtcgcgcccgtcgacgccgaggccaggggccgcgtctgccgccgctgtggttgtgggcggctggggaggtggagtagaggtggagggagaggcggtgagggcgccgagtgcagagatgggggaagggaggaggcccagcgcagagacggaggaagggaggaggtcgcgacggcgggtttggtccgtgtaggtcgcagcggttgtcgggtggtgggctacggtggagtcggggccgcaacggtctttggctaa

SEQ ID NO: 38376 - DNA, 954 bp, Zea mays
  Peptide Sequence Number=SeqID_80155
atgcaggggcactccgtccccacacacatcaaccgtccccatcgattccctggcaacagatcagggctcaccgccttggcgtacaatgcctcactgaccccgactgccgtcgtgcagctctggtgctggatccggggctacctcctgagcagcttcttgctccggcacgaggacgtactctccgtcagcgaggttacagtctatcgaaatgcaatgaatattacccgcgagaaagaaaagggtggcgcggcttaccggtggcgagagaggtccggcgaggggcgggattggctccgggaggttctgacggtcacaacggtgtacggcttgacggcgggggtcctcggttcaagctcgtgcaagcttcacggcctctcagggaagctatccgagggcttggaccgagcggaggagggtgggaaaggggttggccacggtggttgccctcgggcggctctggcgggtcgaggggaggtcgccggagctatgggcgagctcgggggagttaggcgtggtacggaggaggcaacggggaaggcagccgggcactgggacgggctttatagccgtggcgcgggcgtggtcacgggcggccacgggcgcacggggccctgggtggacaccctgagtaacacctggggtgttacagcacccgtcgacaccgaggccaggggccacgtccaccgccgctgtggcccaggagtcgcgcccgtcgacgccgaggccaggggccgcgtctgccgccgctgtggttgtgggcggctggggaggtggagtagaggtggagggagaggcggtgagggcgccgagtgcagagatgggggaagggaggaggcccagcgcagagacggaggaagggaggaggtcgcgacggcgggtttggtccgtgtaggtcgcagcggttgtcgggtggtgggctacggtggagtcggggccgcaacggtctttggctaa

SEQ ID NO: 38377 - DNA, 216 bp, Zea mays
  Peptide Sequence Number=SeqID_80156
atggagggtaggggcatgagcataataaaggatggagctaaagcaatgattgtaaccgacaagggagagaatgcagccaaggtgcaagataagcatcatgataaagatcaagagatgacaagggttaaggtgataacagacaaacacaaccaaggatgtattttagacaaaacttgtgaggcatcaaagaaggggaagcaatcaatggtgaagtag

SEQ ID NO: 38378 - DNA, 216 bp, Zea mays
  Peptide Sequence Number=SeqID_80157
atggagggtaggggcatgagcataataaaggatggagctaaagcaatgattgtaaccgacaagggagagaatgcaaccaaggtgcaagataagcatcatggtaaagatcaagggatgacaagggttaaggtgataacagacaaacacaaccaaggatgtattttagacaaaacttgtgaggcatcaaagaaggggaagcaatcaatggtgaagtag

SEQ ID NO: 38379 - DNA, 288 bp, Zea mays
  Peptide Sequence Number=SeqID_80158
atggatatagtggtggaggaaggaaatgtcgatgttggcaatactgctgaaccatcgtatgaggttgtggctagaagtggttgttcagcacaattgtcaactaaggacactaatgaacatgaactggctatagagagagaggatagtaaggtcagtgttggtaatgctgcaaaacaatcacacgatgttgtgggagtaggcattgactgtattttcaatcatgctaaagtgtcaactgaagccgatcttggaccacaaccgggtaggctctcttatctacactcctaa

SEQ ID NO: 38380 - DNA, 1461 bp, Zea mays
  Peptide Sequence Number=SeqID_80159
atggatatagtggtggaggaaggaaatgtcgatgttggcaatactgctgaaccatcgtatgaggttgtggctagaagtggttgttcagcacaattgtcaactaaggacactgatgaacatgaactggctatagagagcgaggatagtaaggtcagtgttggtaatgctgcaaaacaatcacacgatgttgtgggagtaggcattgactgtattttcaatcatgctaaagtgtcaactgaagccaatcttggaccacaaccggatgtgatacacttgacatctttggatgttccaaatgaatcaagtcaaataagttctgatgcggatatggtagagcagaacaaacaagatgctttggacacacttatcagaatatcacaacataaaaaaccaaagaaattgaatgtagctcgagttgtctctgaagattataagtgcactccagaagatgttcagcttattgaatacattaaaacattaccggggaaacaagttgtggtggacatcgacagcgcatggttaaatagaaatgatatggaatgtctttttcatggtgacatccaattgtctggcgaagccctcagtgcatatatacactgtattagggatgaagagcatttacttcatagagaaggtggaaaggtcttcttggagaacacattcatttccagtctgcttaagcgtgatggcgaccctaaggtgctcttaaattgtgttcattccaatgaatatagaaaattttcactagtacctcgcagttctgaatgcaaaaaaagtgagttaaaaggtctagaaagacagattaaacttgcagcagaacataaagagctttaccaaggcaagtggtcgaaccttgatgttgcatcatggccagttatagagaagatcacaacacaaatgcaaaccgatggggtatcttgcgggctatggatgataaactatatggaatactggacaggatcctccctatctgataacgtaactcaggatgatataacaatgtttaggtttaagctacctgcaatattatgggactcgagattaaacacaaagaaaggacatcaaaatcttgaccacaatgtggatgaagatggagagagttcaagtgatgttcaaataatcgatactccattaacatcaacaaacacgcaagaactgatgtttgtattatgcacatatatcatggggatagacaacgccaaatatttaaaaaaacattggattcagagcactaaaccttatccaatttctttaagtcttcaaaaacttaaagatatattggatgtaaataagccgatggatacagattgttttaacatggctgttcggatgatcgcatgcaatgatgccttgtttttgttggaagacaaataccactacatggatctacagttctgtattctattgcccttttctttcatggggtcacttcaccttatatgtactttacatggacactag

SEQ ID NO: 38381 - DNA, 666 bp, Zea mays
  Peptide Sequence Number=SeqID_80160
atggaaatacttaaattgaaacttgggttaggaacaggtgatgttctacccagagatcctcagctgagtataatcgattcggatcgccataccttcgcggttatgaagacttggtcacttttctacaacgtgaggaagcgacaaatttttgttgcttttgctccaaggtggtaccaaatgaagaaaaacaacactgaagtgcgggaggacttggtcctccacataggatcttttgcttataacttatcgggaggagtttgtgcctcccttggtttgtataatattactactctgcactcacttttagttctggatcagcttgctgatcgagacttagcacttgactgggcagtacagtctcgtttgctagcgtgtgctaaggaagcaagggctcaggcccgaattaaagaacttagctcaactgtcgataacctgcaggtctactgcaatacgttgcatgaggaagtccatatactatactcacaattacaccctagtgtgcctgcacaccctgctgaggcggaagccggaccatctcacgttgcgggacgcgcgctgggtggggagttagacctttttgaaccccctccttctttgaggttggttgatgtctggactcccacacctgacgatgaggccaccaagagtaatggaaagcaggaatga

SEQ ID NO: 38382 - DNA, 285 bp, Zea mays
  Peptide Sequence Number=SeqID_80161
atggatcctcagctgagtataatcgattcggatcgccgtaccttcgcggttatgaagacttggtcactcttctacaaccatacccttgagagtcttttccttagtcgggtgaggaagcgacaaatttttgttgcttttgctccaaggtggtatcaaatgaagaaaaacaagactgaagtgcgggaggacttggtcctccacataggatcttttgtttatagcttatcgggaggagtttgtgcctcccttggtttgtataatattactactctgcactcactttag

SEQ ID NO: 38383 - DNA, 276 bp, Zea mays
  Peptide Sequence Number=SeqID_80162
atgtccgtgatgggttcaacatcggaaaagatgtacctctgccaggaccgtgtcgatgtaggcctgctgaccgaggaccctttaactggtcacatgcctcgtcatggatcctcagctgagtataatcgattcggatcaccgtacctccgcggttatggagacttgaacacgtccatgttcatctaccggcacaacgatgacaccatctacgttgatgacatcgtgctcacagcgtccagtgccgctcttcttcagcacacgatcgtctctctttag

SEQ ID NO: 38384 - DNA, 372 bp, Zea mays
  Peptide Sequence Number=SeqID_80163
atggatcctcagctgagtataatcgattcggatcgccgtaccttcgcggttatgaagacttggtcacttccctacaacctaagtcaggatgtgaacactatggataaaaatgatgtgcatacccttgagagtcttttccttagtcggataccagagtatgtgggtaaccatcctacagcatctgttgcttcggctagtcatccacaggcatcctggccacagcctccacctccgccaccacaacaacctgcatattcacgaggccagcagccagaagagagccaacagactcatcagcagcgagatttcaggaaggagtccgaagctcgcacagtcaatagtactgtgccagaatcgaagcatatctactaa

SEQ ID NO: 38385 - DNA, 510 bp, Zea mays
  Peptide Sequence Number=SeqID_80164
atggcggccacctgcgcggagatggcagcggcggcagaggaggagaggttggaggtggcggcggggacggggacggggtgcacgcggggggagaggaaggccagcagcgcgaggaggagaagcttactcaagcccttcggtacttcaaggatttcatcttttgatttattttcttatattcatcttgagtccatggagttcgacagagcacacgatattcaagcattctttgccagtgataggaacaaggagctagcaacaaactaccttcttgagcatgctgggagtactgcttattacataacatgtataactctttcacttgtggagcagtgggccaccgagaagaagtccatggagagctgcaagctcatcttcacccgagaaaaacagtatgctaaggaatacgatacccagggttgggatcgagatgcccacgatcaatgtgcgatcggcaacagtagcttccccaccgtcctcaattgtgtcgtcaacagtcaacacgcctga

SEQ ID NO: 38386 - DNA, 840 bp, Zea mays
  Peptide Sequence Number=SeqID_80165
atgagcagtgaactgctctccctcctctccaccaacctcctcgcgctgctggccttcctctccccccgcgtgcaccccgtccccgtccccgccgccacctccaacctctcctcctctgccgccgctgccatctccgcgcaggtggccgccatcgcgcatgagctggacgcgacccgcctcgtcccacactgcgtgtcggcgggcgacggcaccggcaccaccctgccctcggagctgctcctcttcctctccccgcacgcgctaccgctggggcgcgacgcgcgcatggggcacacccacatgccgacctccgtcgcacacgcctgcttccgctccccctccacgctcgcgctcctcgccgcgttcgccacctacgcgccccacgctgcctgcccgcgcgacgccacgctcgcacaccgcctcgtttccaaggcctgcgagccgctgccacgccgccgctacctctcccagggcccgcgcgccgcgctctcggcgtcaaacatgggcgtcgacggtcgccgctgggtgaggtcgcgccacgaccacgagttcctcgtcgacgacgtcctgcgcctcgccgccggcaagatacggaccggcctcgacgtctccggcggtgccgccaacttcgcggcccggatgagggagcgcggggtcaccatcttcaccacggtgctcgacaacgccgggaaacccatgaacgagttcgtggcggcccggggactgttcccgctgctgctctcaccggcgcaccggttcccgttctacgacggggtgttcgacctcgtgcacgtcggggccaccgcattggccgaaggcgggtcgtcggtgctgggatag

SEQ ID NO: 38387 - DNA, 480 bp, Zea mays
  Peptide Sequence Number=SeqID_80166
atggagatgggagggatgagcgacgctgagcggctgttcttcttcgagatggcctgcaagaactccgaggtcgcgtacgagcagaaccccaacgacgccgacaacctgacgcggtggggcggcgcgctgctggagctgtcgcaggtccgaaccggccccgacagcctcaagcttcttgaagttatatgcgagatgcagattttcatatttcatgaatgcctgctgcgttctgctatgcggaagccaaactggaggaggcacttcaaattgatcccaacaagtccgatgcactctggtgcttgggaaatgctcagacctctcatggattcttcactccagacaatgcactctggtgggaccaaggaatgcagtacactctttgagaaagtttttccttttgttcctgcattcctaggacacggaacatggctctgtaccatgttcctgtatttccatgacctcattcttgaatgttggtaa

SEQ ID NO: 38388 - DNA, 366 bp, Zea mays
  Peptide Sequence Number=SeqID_80167
atggagctggacgagtgcgaggagacgatgccctacgacgtgaacatcgaagaggagatgcagaggcggcagcagcagcaccaggaggcctacgacgaggatgatgatgtgccaggcggggcttttagcttaatggccgggctaagcgttctcctggagaaccacagcaagagctacaccgggaaggcggcggcggcgcagatcatcagcaaggccaccctcgtgacgacgacccacggccccaaccaccaccagcagcagcggaagatccctgtctctgcggcggctgcgggctccttcctgcagcgctgctgcctgtgccacaaagagcttgccgagggcatggacatctacatgtacaagtag

SEQ ID NO: 38389 - DNA, 645 bp, Zea mays
  Peptide Sequence Number=SeqID_80168
atgcggcgatcggaatcacgtgcgcatcagaagattgatagccgtcatggcccagatgtggaagccaaactggaggaggcacttcaaattaatcccaacaagtccgatgcactctggtgcttgggaaatgctcagacctctcatggattcttcactccagacaatgcaatagctaatgagttctttacaaaggcaaccggatgtttccagaaggctgttgatgtggctgaccaattgtcacaaaattcccgtatttccatgacctcattcttgaatgatgattctttcaaggcaatcaacgatgaaggcatgcccatgtatcagaggcccttcatgaagggcaagctgtacatccacttctcggtggagttcccggactcgttgagcccggagcagtgcaaggccctggaggctgttctcccgcccaagccagtatcacagtacattgacatggagctggacgagtgcgaggagacgatgccctacgacgtgaacatcgaagaggagatgcagaggcggcagcagcagcaccaggaggcctacgacgaggatgatgatgtgccaggcgggtgggcagagggtgcagtgcgcccagcagtaggcagcttgtggcaaatttgttgtttcgctttgggcgactattga

SEQ ID NO: 38390 - DNA, 387 bp, Zea mays
  Peptide Sequence Number=SeqID_80169
atgacctcattcttgaatgatgattctttcaaggcaatcaacgatgaaggcatgcccatgtatcagaggcccttcatgaagggcaagctgtacatccacttctcggtggagttcccggactcgttgagcccggagcagtgcaaggccctggaggctgttctcccgcccaagccagtatcacagtacattgacatggagctggacgagtgcgaggagacgatgccctacgacgtgaacatcgaagaggagatgcagaggcggcagcagcagcaccaggaggcctacgacgaggatgatgatgtgccaggcgggtgggcagagggtgcagtgcgcccagcagtaggcagcttgtggcaaatttgttgtttcgctttgggcgactattga

SEQ ID NO: 38391 - DNA, 678 bp, Zea mays
  Peptide Sequence Number=SeqID_80170
atggtggcaggcaattcgtttttgagaagtcgacaacgggagtctctggaagtgaagagttcgcatataggattacattatgctgcgaatgtggaagccaaactggaggaggcacttcaaattaatcccaacaagtccgatgcactctggtgcttgggaaatgctcagacctctcatggattcttcactccagacaatgcaatagctaatgagttctttacaaaggcaaccggatgtttccagaaggctgttgatgtggctgaccaattgtcacaaaattcccgtatttccatgacctcattcttgaatgatgattctttcaaggcaatcaacgatgaaggcatgcccatgtatcagaggcccttcatgaagggcaagctgtacatccacttctcggtggagttcccggactcgttgagcccggagcagtgcaaggccctggaggctgttctcccgcccaagccagtatcacagtacattgacatggagctggacgagtgcgaggagacgatgccctacgacgtgaacatcgaagaggagatgcagaggcggcagcagcagcaccaggaggcctacgacgaggatgatgatgtgccaggcgggtgggcagagggtgcagtgcgcccagcagtaggcagcttgtggcaaatttgttgtttcgctttgggcgactattga

SEQ ID NO: 38392 - DNA, 135 bp, Zea mays
  Peptide Sequence Number=SeqID_80171
atggtggccgcggggaggagctgcgcaggggtcgtcgggacctgggcgtccctgctggaatggagctcggccaggggaactgctccctgcgcctgcaccagggaaggagcggtggggaataacaaagcgaattag

SEQ ID NO: 38393 - DNA, 696 bp, Zea mays
  Peptide Sequence Number=SeqID_80172
atggcagcgagggttttctcaccacgggtttcgacggcgtcgcggatggggctgcgcaaaaacagcaagccaccggcgggcatcgacggcgtgctgtccactgctcaacacaaagcagcgagccgtgcggagacgtcggggctgctgcaggaaatcgacgacgcgtggcttgctgcacatttcgtcgagcacatagcaagcaccgacggggcactgcgcagcagcacgcaaacagggaggaagccgggtcgcgagccatggcggggatgctctagggcgtctgctgcagcgcgccatgggagaggtttgcgccagcgaggagaggagggtcgagctgctgctgtcgagtccttgctgctggaatttctgggcaccatgggaggaagaggtggacgagctgctgctcgccgtggagcagggagaacagcgagctcggccaggcagcaaggggagagggctcgcggggaggggctggagcttgggtgccggccatggaaattgaagggggcgccatgggagactagggaagctgctgctgctgcgcttgaaggggagaggcgtcgagcaccatggtggccgcggggaggagctgcgcaggggccgtcgggacctgggcgtccctgctggaatggagctcggccaggggaactgctccctgcgcctgcaccagggaaggagcggtggggaggaagataa

SEQ ID NO: 38394 - DNA, 981 bp, Zea mays
  Peptide Sequence Number=SeqID_80173
atggaggcccgcgtcatcgccggggaggccctcggcgtggcgtcccccgtgtacacgctcacccccaccatgtatgtggacttcaccatgcgccccgggtctcgcctgcaccagtctgtcctggagggctggaacgccttcatctacgtcatcgacggcgatggcgtgttcgggcgggcgacggccacggcgcactactgcctcgtcctcggccccggcgacggcgtcagcgtgtggaacaggtccaccaggccgctgaggttcgtcctcgtcgccggtcagccgctgggcgtgcccgtggtgcagcacaggcccttcgtcatgaactcgcgcgccgagattcagaaggccatggaagactactattatggcaagaacggctttgagagggccggacagtggagctcctccgccggatcggcgaggcgggaagctgatggggatcagtcatcaaattttagcatctatttgtcatgcagtcctaaatggactgatggcagcattcctttggatgtactttctgataaactcacaaaaataagcaagatcgctgctagccagaccaagatttacatggtgcttcagcttgtcaatgggggcaaactgttcgatggtattacacacaatgttaccaaggaattaatgaagtatcactcgcagactcttggatatgtaattggtggcaataacatgagaagcgacgccaaccatctcacagaagggatcaatatcttaattgccacactggacaggcttttggaccatctgcaaaataccggtagtttcaaatacaaagagctaaagagtaccaaaaaggtgagcaggcgctatcctaaaattgagaagagccaggctactagaaaaagaagaagagcattcttcaagatcaagattatgtcggccctcccttttttgatggatgcttctcgtgattatacaaaaatgatatttaggggttttagggaaccatgtttccattaa

SEQ ID NO: 38395 - DNA, 903 bp, Zea mays
  Peptide Sequence Number=SeqID_80174
atggaggcccgcgtcatcgccggggaggccctcggcgtggcgtcccccgtgtacacgctcacccccaccatgtatgtggacttcaccatgcgccccgggtctcgcctgcaccagtctgtcctggagggctggaacgccttcatctacgtcatcgacggcgatggcgtgttcgggcgggcgacggccacggcgcactactgcctcgtcctcggccccggcgacggcgtcagcgtgtggaacaggtccaccaggccgctgaggttcgtcctcgtcgccggtcagccgctgggcgtgcccgtggtgcagcacaggcccttcgtcatgaactcgcgcgccgagattcagaaggccatggaagactactattatggcaagaacggctttgagagggccggacagtggagctcctccgccggatcggcgaggcgggaagctgatggggatcagtcatcaaattttagcatctatttgtcatgcagtcctaaatggactgatggcagcattcctttggatgtactttctgataaactcacaaaaataagcaagatcgctgctagccagaccaagatttacatggtgcttcagcttgtcaatgggggcaaactgttcgatggtattacacacaatgttaccaaggaattaatgaagtatcactcgcagactcttggatatgtaattggtggcaataacatgagaagcgacgccaaccatctcacagaagggatcaatatcttaattgccacactggacaggcttttggaccatctgcaaaataccggtagtttcaaatacaaagagctaaagagtgtgaaaaccactaggatctatgatgaggagtttgctgatttgggatggggaagaggcgaaaatgagattgaggatgtgtttatcgttgttttgtag

SEQ ID NO: 38396 - DNA, 1674 bp, Zea mays
  Peptide Sequence Number=SeqID_80175
atgaaggcggcgactgaccgtcgtgggcgtgaggtgctcgaccgagccaatggtggccggcgccgcgcggggatggcgagaggggaaggcagccgcgcggggatggcgatggcggggtcggaccttccttccttggagcagccgcgcggagatggcgagagagagcggaccttccatgatggcggccgagagaggagagcgggggcggggatagtgggatcagagtttccttccttggagcaaccgcgcggggacaacgatggcgaggtcggaccttccatgatggcggccgagagagctcttgtttcagatgtagaggggcgacatcatcgtcatgtctgtcctcatttctcctgcggtggtttaagcaatatatcgtatccatttcgtcggcaaggtgatccatctgggtgcggtgtccaatcgtatgagctggtttgcacggatacagatgctacaattcgcatcggcagtggaacatacaaggtgcttagcatcaactccacatattcttacttctgggttattgatgccgacctggacatccagagcagttgcccccttccccggtgggattaccatgctcgttggatcaatctctacttacatctttggaggattgagttcatctatcagtatttctatccttcttctttttatattgattcggggcggtgggctatctttgtgaattgttctcagccaatagagaacattgatactgataaatatcatatatatgagccggtgtcttgcttgagcaattcttctttcatctacttgctggtaactcactactgggatgctgacaactgggatgttactgctggggttctggagccttcatgcggttacctagccatgactcctttgggtggtccaggcatgcaggtgccctggaatacaagctatccagatgttgttaagttcatgaggagtggatttgcccttggatttcccgtttggtatggtgataacatcagagaatgtctcgcaaacaatatgcggttcatattgatgccgctggcagtatttgtcttcctagcctataaatactggaaaacacggataacaatagatgcagttgagaagttcctgcgaatgcaccatatgctcgttccgatgagatatgcatacacaaacatcattgctatcaccggccatttcagagacaagctcggacaaggaggctacggtactgtatacaagggggtgctacagccaggtgaagttcatgtcgctgtcaagatgttgggcaactcaaactgtaatggagaagagttcatcagtgaggtcgccaccattggcaagatccaccatgtcaatgttgtgcgcctcattgggttttgctccgaggaaaatattagggcacttatctatgagttcatgccccgtggatctctcgataagtacatcttctcgtcggagaagacattctcatgggacaaactcaacgagatcgctctgggcattgctagaggtcttaactacctgcatcacgggtgtgatatgcagattgtacactttgacatcaagccacacaacatccttcttgatagcaactttgttccaaaagttgctgattttgggctagccaaactgttcccaagagatgacagtttcgtgccactaagcgctatgcggggaacgataggctatatagctccagagatg

SEQ ID NO: 38397 - DNA, 2023 bp, Zea mays
  Peptide Sequence Number=SeqID_80176
atgaaggcggcgactgaccgtcgtgggcgtgaggtgctcgaccgagccaatggtggccggcgccgcgcggggatggcgagaggggaaggcagccgcgcggggatggcgatggcggggtcggaccttccttccttggagcagccgcgcggagatggcgagagagagcggaccttccatgatggcggccgagagaggagagcgggggcggggatagtgggatcagagtttccttccttggagcaaccgcgcggggacaacgatggcgaggtcggaccttccatgatggcggccgagagagctcttgtttcagatgtagaggggcgacatcatcgtcatgtctgtcctcatttctcctgcggtggtttaagcaatatatcgtatccatttcgtcggcaaggtgatccatctgggtgcggtgtccaatcgtatgagctggtttgcacggatacagatgctacaattcgcatcggcagtggaacatacaaggtgcttagcatcaactccacatattcttacttctgggttattgatgccgacctggacatccagagcagttgcccccttccccggtgggattaccatgctcgttggatcaatctctacttacatctttggaggattgagttcatctatcagtatttctatccttcttctttttatattgattcggggcggtgggctatctttgtgaattgttctcagccaatagagaacattgatactgataaatatcatatatatgagccggtgtcttgcttgagcaattcttctttcatctacttgctggtaactcactactgggatgctgacaactgggatgttactgctggggttctggagccttcatgcggttacctagccatgactcctttgggtggtccaggcatgcaggtgccctggaatacaagctatccagatgttgttaagttcatgaggagtggatttgcccttggatttcccgtttggtatggtgataacatcagagaatgtctcgcaaacaatatgcggttcatattgatgccgctggcagtatttgtcttcctagcctataaatactggaaaacacggataacaatagatgcagttgagaagttcctgcgaatgcaccatatgctcgttccgatgagatatgcatacacaaacatcattgctatcaccggccatttcagagacaagctcggacaaggaggctacggtactgtatacaagggggtgctacagccaggtgaagttcatgtcgctgtcaagatgttgggcaactcaaactgtaatggagaagagttcatcagtgaggtcgccaccattggcaagatccaccatgtcaatgttgtgcgcctcattgggttttgctccgaggaaaatattagggcacttatctatgagttcatgccccgtggatctctcgataagtacatcttctcgtcggagaagacattctcatgggacaaactcaacgagatcgctctgggcattgctagaggtcttaactacctgcatcacgggtgtgatatgcagattgtacactttgacatcaagccacacaacatccttcttgatagcaactttgttccaaaagttgctgattttgggctagccaaactgttcccaagagatgacagtttcgtgccactaagcgctatgcggggaacgataggctatatagctccagagatggtatctcgaagctttggtgtcatctctagcaaatccgatgtgtacagctttgggatgctactattggagatgacgggcgggcgaagaaacgcagatcctcatgcaggaagctctagtcaagcatactacccatccttggtgtacaggcagctcagccagggtgatgcgaacaggatcagtgaaggtgttgatatgcacgagttagagaagaagctatgtatcattgggctttggtgcatccagatgaagccgcaagatcggccgacaatgagcgaggtcatagagatgcttgaagctggtgtcgatggcatccaaatgcctccgaggccatacttttgtgatgaagagg

SEQ ID NO: 38398 - DNA, 324 bp, Zea mays
  Peptide Sequence Number=SeqID_80177
atgggcatatacctagccgcggccgaggtcggcccagggaagggcaccgagcgctactgtccatggcgcaagggacccagacgccatgactatttgccggagcagaggcgtcggtctgtaatgggggcgccgagccagagaaaagcaaagaacgccgagggggatggagagaaggggaggaggggtgcgcgcccagggaaggctggggaagaacgccctgctggatgggtgtcgggcaccatggcaaggagccgagctctggcgtgcgtggagcctgcggctggaaaatggcagaggaggaagagaagagatgttggcggctag

SEQ ID NO: 38399 - DNA, 438 bp, Zea mays
  Peptide Sequence Number=SeqID_80178
atgggcatatacctagccgaggccgaggtcagcctagggaagggcaccgagcgctactgtccatggcgcaagggacccagacgccatgactatttgccggagcagaggcgtcggtctgtaatgggggcgccgagccagagaaaagcagaggccgaccagggtgacagcggctcacctgctcgagctgggggccggtccgaccatggccagcgaccgagagagcagagagaggaaaaaaatggagcagcggcctggagggagcagaacgccgagggggatggagagaaggggaggaggggtgcgcgcccagggaaggctggggaagaacgccctgctggatgggtgccgggcgccatggcaaggagccgagctctggcgtgcgtggagcctgcggctggaaaatggcagaggaggaagagaagagatgttggcggctag

SEQ ID NO: 38400 - DNA, 1155 bp, Zea mays
  Peptide Sequence Number=SeqID_80179
atgcctcgctcctcttgcattcatcgcgcccttccaccttccgggcctccagatggggtgcgccagtgttctctggagagatccgcgtcagggtcgtcccctccagcgatctcaccgccggagagctcgcgctcgtggtggtgctgccgatcttgtcttcttcttgctgctgttagaggagcacaaccctgtgggggttggcgcacttccgccatcgctcggcttcaaggattttcatcatgcagcctggcctcaacctccggccggtggtcatccgcaaggatgactaccagccttgtggtggagagaagcgagtcgggctgcggcctcccccctgccctcagcttcaaggatgttcatcatcctcgctggggcggaaggcgagccgagttggggtcttgccctccgcatgggctggcgacccgcttcttcctccagcattcaggggagaagggcattcaccagccttgcggaggaggcgaacttcggctacgcggggccggccagctgcggcgccatcagctgccgcgtgtctggctccttggcctggatggctttggtgccgcctccgacgctgtctcctgctgcttggtcggggcgtggctgtccgtccactgcacgggcgacggtcgcgtcgtgcgcaggtcggacacatccatggcttctcctgcgccgccggccgcaccggggggtcatactagacatcgtacgccgcaggggtggcgtccgcgttcttggatggtcttgtccccctcccgcagtgaggacgggagcgaaaacctcttcgcgtgcgctggggcggccgccattcgccggtacggcactggtgcggaggtggccgctgtcgtcgatgcagaggcggtcgccgccgctggtgaggctgcccactgtagaggtggttgcctccactggcgagaccgtcagcgccacctgccgtcggacctccggatctttggctttaatggcctcgttgtcgccccccacaggaagacgggggtgaggaccttttcgcagtggcgtacgagcgggggtaatcgccactgctggcgagtcgttggtgcagacgtggccgtcgccgtcggtgctgatgtggtcgcctccgctggcgagccgctcggagctagctatcccgtgaccctactggtgtggaggtag

SEQ ID NO: 38401 - DNA, 1155 bp, Zea mays
  Peptide Sequence Number=SeqID_80180
atgcctcgctcctcttgcattcatcgcgcccttccaccttccgggcctccagatggggtgcgccagtgttctctggagagatccgcgtcagggtcgtcccctccagcgatctcaccgccggagagctcgcgctcgtggtggtgctgccgatcttgtcttcttcttgctgctgttagaggagcacaaccctgtgggggttggcgcacttccgccatcgctcggcttcaaggattttcatcatgcagcctggcctcaacctccggccggtggtcatccgcaaggatgactaccagccttgtggtggagagaagcgagtcgggctgcggcctcccccctgccctcagcttcaaggatgttcatcatcctcgctggggcggaaggcgagccgagttggggtcttgccctccgcatgggctggcgacccgcttcttcctccagcattcaggggagaagggcattcaccagccttgcggaggaggcgaacttcggctacgcggggccggccagctgcggcgccatcagctgccgcgtgtctggctccttggcctggatggctttggtgccgcctccgacgctgtctcctgctgcttggtcggggcgtggctgtccgtccactgcacgggcgacggtcgcgtcgtgcgcaggtcggacacatccatggcttctcctgcgccgccggccgcaccggggggtcatactagacatcgtacgccgcaggggtggcgtccgcgttcttggatggtcttgtccccctcccgcagtgaggacgggagcgaaaacctcttcgcgtgcgctggggcggccgccattcgccggtacggcactggtgcggaggtggccgctgtcgtcgatgcagaggcggtcgccgccgctggtgaggctgcccactgtagaggtggttgcctccactggcgagaccgtcagcgccacctgccgtcggacctccggatctttggctttaatggcctcgttgtcgccccccacaggaagacgggggtgaggaccttttcgcagtggcgtacgagcgggggtaatcgccactgctggcgagtcgttggtgcagaggtggccgtcgccgtcggtgctgatgtggtcgcctccgctggcgagccgctcggagctagctatcccgtgaccctactggtgtggaggtag

SEQ ID NO: 38402 - DNA, 297 bp, Zea mays
  Peptide Sequence Number=SeqID_80181
atggcaaagactcaacggcaagctgcaaaggaaggcgatgtgagaactaagacctgctttgtgccaagacaaaggttgccaaagtttgacttgcatctccaggtcacagcgacaaagaaaggtgggcgatgcagtggcgacgcgggagcacaaccaccaggtatgtatggtattgatttggggacaatagtgggactggagcttgacgtcgatatcgtggcggcgaacacaacgacaaagaaggtgaacgctgcatctgtctcgttttttaggacattgagttgtccaaagaaataa

SEQ ID NO: 38403 - DNA, 189 bp, Zea mays
  Peptide Sequence Number=SeqID_80182
actgctttgtgccaagataaaaggttgccaaagtttgacttgcatctccaggtcgcagcgacaaagaaaggtgggcgatgcagtggcgacgcgggagcacaaccaccaggtgcagctattctgcctactacgttccattcctgcagagcacaacctttaggtgtagcggtccagactactactaaatag

SEQ ID NO: 38404 - DNA, 423 bp, Zea mays
  Peptide Sequence Number=SeqID_80183
atgaccatatggatcggtataaagcttactgtcttgcgagggtgtaattgtagattgaggatgatgtcagaactcagaagcttcagcttacatgtttattgctattggaaactcgtcaataatttatccaagcttttacctctgttcttaactaaatctatcggtgtattgctaccaaaatccgctattaagtttgagaggtatctgatggatgagattctatcgatcgatgctgatgttagtgaagttgagcttgggagaagacctgctttgtgccaagacaaaggttgccaaagtttgacttgcatctctaggtcgcagcgacaaagaaaggtgggcgatgcggtggcgacgcgggagcacaaccaccagctattggcctacatatctaccaatggacgtgtatcaggaagacagtcctga

SEQ ID NO: 38405 - DNA, 204 bp, Zea mays
  Peptide Sequence Number=SeqID_80184
aatttatccaagcttttacctctgttcttaactaaatctatcggtgtattgctaccaaaatccgctattaagtttgagaggtatctgatggatgaggacgacatgacaggcgacgaaatccagtcatctcctaagggagcgactttgtacgacagccactacgggtggtggagctgggcgtcgttctcgccgcggtgcacgtga

SEQ ID NO: 38406 - DNA, 885 bp, Zea mays
  Peptide Sequence Number=SeqID_80185
atggcggcgtcgatgacctcccccgactttctcgccgtgggcgccgtcctagggaagcccacaatgctcgtggggagtggccgagaagatcttccctcgccgtcccgttctcttgcctccccaccatcggcatcgaggtctactactttctcgttggctagggcgagcagtgctctagcacctgtcaccatcaccgacatcagcctcgccgcagacgacaagaccgacgagctgttcgccaaaatctccctcaggctaggccccccatactgccttcttcagtttccttcactcttggtgtccaccatactgccttcttcagtttccttcactcttggtgtcttagactctcggctcggtggaacgcattgcgaccgattcgatccatcctcttcggcagccgtccactctctccacggctccatcgctagactagagagagaaaccctggtacccgtgttccttttcatcccccatttctccgagttttcgagcccatcaccgagcatcgagtccaaggaagcggagccggcggagaaggggagatttgattttcccgtcgggtgcctagggagcaggagggatgcagcgaatttatccaagcttttacctctgttcttaactcttgcagtttataaatggtctttggattccctggtagccaagaaatttgtcagtgtattgctaccaaaatccactattaagtttgagaggtatctgatggatgagattctatcgatcgatgctgatgttagtgaagttgagtttgggaagaaggacggcatgacaggcgacgaaatccagtcatctcctaagggagtgacgttgtacgatggccactgcgggtggtggagctgggcgtcgttctcgccgcggcgcacgtga

SEQ ID NO: 38407 - DNA, 318 bp, Zea mays
  Peptide Sequence Number=SeqID_80186
atggacgagtctggtgtgaaaaaggagatcggcctcctgggactagtaattgtatcacatttgagtcccagaggatctggggcgcttcaacccatcacccgtgacgccgctcgcgggtgtcacttccatgatgcgctcgacaccctgctacgccaggcactcgaccggcgtacttggtctatcgagtatcgttgtgtggtcttccagcacagtcgcggggtttactcggaccgctgggaggcgacctgctttggtgcgccgtccggagaacagtctctggggtgcgaaggtctgctcagagcactattccatctctga

SEQ ID NO: 38408 - DNA, 714 bp, Zea mays
  Peptide Sequence Number=SeqID_80187
atggtgattaatgtgaactgtaccagtttacaaatattcggaagatattggcaagggaaatctgtggttgagccatacgatgttgatctcaaagaaatctgctgtcaacaatatttagcagtgatctccacgtttatggttcatgacttgactatgtggccattaagatgtcaaattagtactaaatctgactacatcaactacccacgagcagatgttggcgtgttgtattggcatttggaccctaagaagtctgaaagcgaggaggaactagcaaaaatccgcagagacagaggatacagttacatggatcttattgagatatgtcccgacaaactggaaaattatgaggagaaggtgaagaacttcttccgtgagcacatgcacgctgacgaagagatccgctattgcttggagggcagcgggtactttgacgtccgcgacaaagatgacaagtggattcgaattcgaataagggaaggagacatgatcatcgtaccagctggaatttatcatcggttcaccctcgacagcgctaaatacacgaagctcatgaggcttttcattggggaaccagtctggaccccattaaaccgccctgaggaggaccacccggcgaggcaagagtatgtcaagaatgtgagtgcgggcactggatttgctcttgcagctcacttcctggccaacacgaacctgccctccaagcccttctag

SEQ ID NO: 38409 - DNA, 340 bp, Zea mays
  Peptide Sequence Number=SeqID_80188
atggtcgaggtctcaccgacgcagcagacgagtcgaggtaggtccacggtaccgcgcgagttcggtgaagggctccactccggcgagggattccccaatcctcaaggcacctccggccccaattcgccaccgacgcgccccacgaagccaggcgagttgcctagaccccgtggttactccgaatcgacagcggacaagcaattcgacggcggcgcagccgagtcgatgcagattttgcagtcgcccgttgttcgaagtagccgatgctcccctcagaccagggcacacttggtttattttggtccatggtatttcaaccttaacttcaatctttttattg

SEQ ID NO: 38410 - DNA, 261 bp, Zea mays
  Peptide Sequence Number=SeqID_80189
atggtcgaggtctcaccgacgcagcagacgagtcgaggtaggtccacggtaccgcgcgagttcggtgaagggctccactccggcgagggattccccaatcctcaaggcacctccggccccaattcgccaccgacgcgccccacgaagccaggcgagttgcctagaccccgtggttactccgaatcgacagcggacaagcaattcgacggcggcgcagccgagtcgatgcaggataaaagatatcttttaaagcctatatag

SEQ ID NO: 38411 - DNA, 258 bp, Zea mays
  Peptide Sequence Number=SeqID_80190
atgcaggaatcccttgcaggaccgccatcacagcaaaatcctcccgagggcctccctaggaatcccttgcaggaccgccatcacagcaaaatcctcccgagggccttcccaggaatcccttgcaggaccgccatcacagcaaaatcctcccgagggcctccctacactgaccactcccctactgcccttgcccctttcggtttattccctgactggactgcgcaccaaaaactagaaagtgcaggggctaaaccatag

SEQ ID NO: 38412 - DNA, 477 bp, Zea mays
  Peptide Sequence Number=SeqID_80191
atggtcgaggtctcaccgacgcagcagacgagtcgaggtaggtccacggtaccgcgcgagttcggtgaagggctccactccggcgagggattccccaatcctcaaggcacctccggccccaattcgccaccgacgcgccccacgaagccaggcgagttgcctagaccccgtggttactccgaatcgacagcggacaagcaattcgacggcggcgcagccgagtcgatgcagatgcaattgtggacattactccacaacccatcacactcaatcaaagatccaaatcagacaggaccgccatcacagcaaaatcctcccgagggcctccccaggaatcccttgcaggaccgccatcacagcaaaatcctcccgagggccttcccaggaatcccttgcaggaccgccatcacagcaaaatcctcccgagggcctccctacactgaccactcccctactgcccttgcccctttcgggtaa

SEQ ID NO: 38413 - DNA, 291 bp, Zea mays
  Peptide Sequence Number=SeqID_80192
atggcgagctcgccggtgctcgccgtctcctccatccctgtaacacccggatttttagggggtccaaaacccgggcgcgaacataatcaccaggaatcccttgcaggaccgccatcacagcaaaatcctcccgagggcctccccaggaatcccttgcaggaccgccatcacagcaaaatcctcccgagggccttcccaggaatcccttgcaggaccgctatcacagcaaaatcctcccgagggcctccctacactgaccactcccctactgcccttgcccctttcgggtaa

SEQ ID NO: 38414 - DNA, 288 bp, Zea mays
  Peptide Sequence Number=SeqID_80193
atgcaggaatcccttgcaggaccgccatcacagcaaaatcctcccgagggcctccccaggaatcccttgcaggaccgccatcacagcaaaatcctcccgagggccttcccaggaatcccttgcaggaccgccatcacagcaaaatcctcccgagggcctccctacactgaccactcccctactgcccttgcccctttcggaacagaggcactaatgggtagacaatattattacaaaaatttaggaattggaatggaccaatttggagtttatatgacttttctatga

SEQ ID NO: 38415 - DNA, 294 bp, Zea mays
  Peptide Sequence Number=SeqID_80194
atgcaggaatcccttgcaggaccgccatcacagcaaaatcctcccgagggcctccccaggaatcccttgcaggaccgccatcacagcaaaatcctcccgagggccttcccaggaatcccttgcaggaccgctatcacagcaaaatcctcccgagggcctccctacactgaccactcccctactgcccttgcccctttcggagttcatgtcaaaacagtgattctaaatggtagagaatattattacaaaattttaggaattggaatgactcaatttggagctaaaatgaattag

SEQ ID NO: 38416 - DNA, 294 bp, Zea mays
  Peptide Sequence Number=SeqID_80195
atgcaggaatcccttgcaggaccgccatcacagcaaaatcctcccgagggcctccccaggaatcccttgcaggaccgccatcacagcaaaatcctcccgagggccttcccaggaatcccttgcaggaccgccatcacagcaaaatcctcccgagggcctccctacactgaccactcccctactgcccttgcccctttcggagttcatgtcaaaacagtgattctaaatggtagagaatattattacaaaattttaggaattggaatgactcaatttggagctaaaatgaattag

SEQ ID NO: 38417 - DNA, 300 bp, Zea mays
  Peptide Sequence Number=SeqID_80196
atgcaggaatcccttgcaggaccgccatcacagcaaaatcctcccgagggcctccccaggaatcccttgcaggaccgccatcacagcaaaatcctcccgagggcttccctaggaatcccttgcaggaccgccatgacagcaaaatcctcccgagggcctccctacattgaccactcccctactgcccttgcccctttcggagttcatgtcaaaacagtgattctaactgatagagaatattattacaaaattttaggaattggaatgactcaatttggagctaaaatgaattttctatga

SEQ ID NO: 38418 - DNA, 294 bp, Zea mays
  Peptide Sequence Number=SeqID_80197
atgcaggaatcccttgcaggaccgccatcacagcaaaatcctcccgagggcctccccaggaatcccttgcaggactgccatcacagcaaaatcctcccgagggccttcccaggaatcccttgcaggaccgccatcacagcaaaatcctcccgagggcctccctacactgaccactcccctactgtccttgcccctttcggagttcatgtcaaaacagtgattctaaatgatagagaatattattacaaaattttaggaattggaatgactcaatttggagctaaaatgaattag

SEQ ID NO: 38419 - DNA, 694 bp, Zea mays
  Peptide Sequence Number=SeqID_80198
cggggtgaagagaatgattgaccctgcgcccatttattcacagaaatgcacactagccgcggaggatttggcccaccgtcccatcaacagcgctgtcgccgagaggtgggcccgggcagagcagagcaagggggaaacagtgaacgccagtggcatcacccaaatcaaattcaaaatcagtgcagtccagtccagtccagtccagtccagtcctctcttccggctccacttctgctctacagctcaccgcccactgccactcactcgtctgatcgtagtcgccctacataacacccggcaatccctcgttcttgccacgccactccactccactgccctcctcctgcaccctgcgcttcaaatcgtttcggcggtagtgagcaacgccaagcatccagcaacagcagccgctacctccctttgtctagctgtctccctcacccggtccagtcctgcattgcattgcctcatgaggacccaaagaaacctccttcccctcctcctgctgctgtccgccgcgctgctcgccgtcgccgacgcgcaggagcgcaagaactacgtggttcatctcgagccgagggacgacgacggcggcggcgggtcggtggaggagtggcaccggtctttcttgccggaggccacgctggactcggcggcggatgacgggcccaggatcatccactcgtacagccac

SEQ ID NO: 38420 - DNA, 243 bp, Zea mays
  Peptide Sequence Number=SeqID_80199
atggtcctgatgaacaaggcggtggaggggtacaccatcttcgccgacgcgcacgtgctggccgcgtcgcacgtgagccacgccgcggggtcgaggatcgcggagtacgccaagtcagcgcccaggcccacggcgtccatcacgttccggggcacgagtttgtctgttgactacgtctccaaaacagagaagccaacgccaacacctctatttcgtcgaatcctcttctctcttcttctataa

SEQ ID NO: 38421 - DNA, 306 bp, Zea mays
  Peptide Sequence Number=SeqID_80200
atgccgctcaggtgcggcgtcgacatggacgtcccggactccaccaagaacggcaggctcacgtcgtccgcgaactccgggtgcatctcgctgggcacccacgccgccaggatgttcatgccgggctccgtgatgtccggcttcaggatgcccgggctcgccctgttgggcccgcgcgacgagaagatgtcaggtccaagccagaggaggaacaagacatcgacagcgaactcggcacgacgcaaacggcatgcgcggcatcgtcgtcctaactcaaagtttgttgggccgcagtgggctctgtaa

SEQ ID NO: 38422 - DNA, 555 bp, Zea mays
  Peptide Sequence Number=SeqID_80201
atggcggccatcagcccgcccgccggcggtggaatcgacgacgtcttcccctcgtggcggaagagcaacatccaggtctatcccgtcacattccccgccgacggaggaggaggcggggcaggcatggccaagcaggaggtggcacctcgtcggctgtcgagcgagtcgacggctgtaacaccccagcttctgggcggcttctggccgccagaagctgaagctgaaaccaaacgcccaacttttcgcgcggcttctgggcgaagcgattgggtaagaagccgcccgcccacttacctcacgaagcgccgctcagttggcttccgtccaaagccgtgcgcagttagcctagggttccctcgcacgctcctccaccgccgccgcgaaccgaacggagcgccgccggtccgcaccacatgcatcgtcgccggtgtacgcagattttcgtatcacttcgagttgaaggtgttcggttccaagatcatctgggattcgaggacttcggttgcaacctccagtcaagcaaagaagagattaccaaatattgttctcggttaa

SEQ ID NO: 38423 - DNA, 729 bp, Zea mays
  Peptide Sequence Number=SeqID_80202
atgggatgttgcccaactgcccctgatagtaagcgccgcacaaagttctttctttttcttccattcaccttggcgtggaagaacttggtgtttgcatctcccagctttagcttctgggcggcttctggccgccagaagctgaagctgaaaccaaacgcccaacttctggcgcggcttctgggcgaagcgattggtgacgccgacgtccttgctccgtcctcaaggttccgcgtcgtcccaaccatcgcgtctgcatcttcattgtcgtatcacttcgagttgaaggtgttcggttccaagatcatctgggattcgacgacttcggttgcaacctccagtcaagcaaagatggattcagcagactccatagccgacaaggcaattggaaggatgcaagagattgcggacaagattttttgcgtagctcgtgaaactattcgtccaggacgcgggttgacctcatttgaggcaaccaaattacgtgtagcattggaggacattgcttgcatgcttgagcaagactctctggtgttgcaagaaaaattggacaacgtgaacaacgtaaacaaccctgcggacaggagctatgaaccgtctgccttgtcctcaccacccccagctgacgtgtaccttagtccggattgggactttgctgagcactttgcaaacttctggggtgttgaatatgactcggaccaaatgccatcgtttagtgacaatgaagtttaa

SEQ ID NO: 38424 - DNA, 1593 bp, Zea mays
  Peptide Sequence Number=SeqID_80203
atggcccggcagcgcatggtttgtggtgtgcgtcgggtccaaactccccctcgccccgtcgtaggagcaggaccagatgggaaacatacagccttggaagctgtaactatagttcttgatctgccaccacctcagcctggttcaatgtctggactcacttctgttgatatggtacctgcctctgatccaaaatctgcaatggcactccaaagattagttcaagctactgtttggtttctaggagaaaatgctaattatgctgcatctgagtatgcctgggagtctgcaacaccacccggtactgcattaatgatgctagatgctgataaaatggttgctgctgcaagttcccgtaatcctacacttgctagcgctctgacaaggcttcaaaggtgtgcatttagtggaagctgggagtcaaacttttcagaattgcagctaagtaatggggaaaatcaaggtgccagtggtactggtcttggatctttaacaagcccaatgcttagggtcctagatgaaatgtatagaggccaagatgaccctgtcagagatattcgccagcgtgataacaacaaacaggaatggagtgatgaggaactcaagaaactttatgaaacccatgagaggcttcttgattttgtttccttattatgttttgttccaagggctaaatacttgccccttggtcctaccagtgccatcaatcctcatgcctacaccaatgagactgtgtttgttcagggtgttcagaagcatgaagaggagccggaggacctcgccgtccaccacctcccctactcccttcctccatcagcgtggcgtcggcgacctgtctcggtcgagcatcagccgagaaggagcaggtataacatggtgaaacaaggtctcatcagcgaccctgttttctctttctggtttaaccgacatgctgatgaaggagaaggtggtgaaattgtatttggtggaatggattctagccactacaagggtgatcacacgtttgtcccagtcactcggaagggatactggcagttcaacatgggtgatgtactggttgatggaaagtccactgggttttgtgccggcggctgtgcagctgtcgcagattctggaacttccttgcttgctggccccacagccataattactgaaatcaatgaaaagattggtgctgctggtgtagtcagccaggagtgcaagactgttgtttctcaatatggacagcagatcctagatcttttgctagctgagctctgcggtaactcaacttgctattgggttattttgcagacacaaccagcgaagatctgttctcaggttggtctgtgcacttttgatggcactcatggtgtcagtgctggaattcggagcgtagtggatgatgaagctgggaaatcaaatggtggtctcaagagtgatccaatgtgcaatgcctgtgagatggctgtggtatggatgcagaaccaacttgcccagaacaagacgcaggagctcatcctgaactacattaatcaggcgagcttaactgacccagagcacagaggcgtttctgtaccatttagcatgctactttgcttaactatttcactatga

SEQ ID NO: 38425 - DNA, 609 bp, Zea mays
  Peptide Sequence Number=SeqID_80204
atggccataattactgaaatcaatgaaaagattggtgctgctggtgtagtcagccaggagtgcaagactgttgtttctcaatatggacagcagatcctagatcttttgctagctgagctctgcggtaactcaacttgctattgggttattttgcagacacaaccagcgaagatctgttctcaggttggtctgtgcacttttgatggcactcatggtgtcagtgctggaattcggagcgtagtggatgatgaagctaggaaatcaaatggtggtctcaagagtgatccaatgtgcaatgcctgtgagatggctgtgctttgcgagcgtcttccgagtccgatgggagaatcagccgtggactgtggcagtcttgtgtccatgcctgacattgtgttcaccattggaggcaagaagttcaagctgaaaccagagcagtacattctgaaggttggtgaaggacaggctgtccagtgcatcagcggattcacagctatggatatcccaccaccccgtggccctctttggatcttgggtgatgttttcatgggagtctaccacaccgtcttcgattatggcaagctgagggttggcttcgcagagtcggcctag

SEQ ID NO: 38426 - DNA, 183 bp, Zea mays
  Peptide Sequence Number=SeqID_80205
atggctgcatgtgtcgctgtgtacggcaagctccggcgcagccgccgcttggacacagtccagagcggctgcaccgtgctgtctatcgtcaaacagggggacctcatggtcgtcgccaacgccccgccggaggtgacgcagaggaggaccgacaacaatgaccactcgttatcgtcagggtag

SEQ ID NO: 38427 - DNA, 627 bp, Zea mays
  Peptide Sequence Number=SeqID_80206
atggggaggctagaaccccgggcagaatgggaatcacagcttgtgggtaaagtgtgcaaactctgtagagtgttagaaactgatggcccgtatctggtgcaccgcacggggaggtggagtctgagaggccgccttcccctgcccctcagccagagatgcctcctgcaccaccatagggcatcccgactgctggaggagaccctgacggagaccttctcagagcactattctatcactgagaaggacactgccgaggcagccatgcaggatgcagcacgacgggcactttctcagtattgctcgttgttcagcggggtagctgatggccttgacctaaagtactaccctcgccgttcgaccggcaatgctggaggcgtgattgtctcgccagttggtgagggcaatcccaagctgagcagcatggtcaacctggctgtcgtgctcaacacagagttggaccacgcccttgacgagttgggcaaagttcgggcggaggttgcgaattgcgtgttgaatgcgcgacacaccactatcttgaaggtggttctcccgcccctgtcgggattcagcacccttaccgttcaccgccctgtggtcgcttcgactatggtaccccaaactgcatga

SEQ ID NO: 38428 - DNA, 168 bp, Zea mays
  Peptide Sequence Number=SeqID_80207
atggggaggctagaaccctgggcagaatgggaatcacgtcttgtgggtaaagtgtgcaacctctgtagaatgttagaaactggttgtccccactgttctcagtgctcaggaggtgaagctggcaacatggatgacttcgaggagttccaggaatacgacgagttctag

SEQ ID NO: 38429 - DNA, 2046 bp, Zea mays
  Peptide Sequence Number=SeqID_80208
atggcgcggggctcaaaagggacgcgggtgcgcggacgtggccggataacgcgcggacgtgggcacgtccacggcggggagatcgtgggcgagaggttagagatggctgacaggcctcgtgaccatggatccgccgcccgccgggctctcgacgctgccgaggagcgtcggcacccgcagcgtggaatcgacgacgggcgcctccagtcggttcagaaatgcgcaaatgcgcgtctgaatgaagcctggttggaggtggtagagccgatggtggtgggaacggcactgctgcgcggggtttcctccgcgtggatcctcctgttcctctcctccctgctcctctcgccgtcagcggcgtctgtcgatttcggccactgcggcggctgcgacgacgccgacgacggcgccctctccagcacctataacatcctgcaatgccagaaggtcagcgacttcctcatcgccgcggcctacttctccatcccgctcgagctgctctacttcgccacctgctccgacctcttccccctcaaatggatcgtgctgcagttcggcgccttcatcgtgctctgcggcctcacgcacctcatcactgtgttcacctacgagccgcactccttccacctcgtactcgcccttaccgtcgccaagttcctgacggcactggtctccttcgcgacggccatcaccctgctgacgctgataccacagctcctgagggtgaaggtcagggaaaacttcctgatgaacaaggcgcgtgagctggaccgggaggtggggaggatgaaaaggaaagaagaggcgagctggcatgtgcgcatgctcacacaggagatccgcaagtcgctcgacagacataccatcttgtacaccaccatggttgagctctcgaaggcactggaactgcagaattgtgctgtctggatgcctgatgagaccaggagcacgatgatcttaacacatcagctgagggaaagggatataatggacccacagaaacactcgattcctattgatgatccggatgttcaagaaataaaggcaaccaaggatgcaaaagttcttggcccagattcggcgctaggggtttctagccgaagcaagcatgaagcagggcctgtggctgcaataaggatgccgatgttaagggtgtcaaatttcaaaggagggactccggaagtgatgcagacgagctatgctatcttggttctggttttgcctaatgatggttcattagggtggggtcgaagagagttggagattgttgaggtagttgctgaccaagttgcagtcgctctgtcacatgctgcactcctagaggagtctcagctgatgcgagagaagcttgccgagcagcatagggacttgctgcaggcaaaggatgaagccatgagggcaggggacgctaggaattccttccagactgcaatgtacgatggaatgcgaaggccaatgcactcaatccttggtctcgtctcaatgatgcaacaggagagcatgaatccagagcaaaggcttgtgatggatgccattgccaagacaagcagtgttgcatccacactgatgaacgatgtgatgcaaacatcgacaatgaactgtgagcacttgtctttggtcaggaggccgttcaaccttcattccttcattaaagaagttgttggagtggtcagatgtctaactggttgcaagggtgtggagtttgagtttcaagtggagaattctttgccagaaaggatcattggtgatgagaagagagtcttccatattgtcctgcacatggtaggcactctaacagaccgatgtaatgctggctgtatctcattatatgtaaatgtccataatgaggttgaagataggcataatcatgactggatgctgcgaagagcaaacttctctgggggctatgtatgtgtgaaatttgagattaggattagaaaatcaaagggctatctgttgagttcatcaagcagtcagataagtcagggatccaaacccaacaattctgagatggggcttagcttcaatatgtgcaagaagattgtgcag

SEQ ID NO: 38430 - DNA, 2949 bp, Zea mays
  Peptide Sequence Number=SeqID_80209
cccagctccaggggcgaggctgtgaaagaagagggaggaaagggagaaaaaaagaccctcttttcttccgtcggcaggcctcgtgaccatggatccgccgcccgccgggctctcgacgctgccgaggagcgtcggcacccgcagcgtggaatcgacgacgggcgcctccagtcggttcagaaatgcgcaaatgcgcgtctgaatgaagcctggttggaggtggtagagccgatggtggtgggaacggcactgctgcgcggggtttcctccgcgtggatcctcctgttcctctcctccctgctcctctcgccgtcagcggcgtctgtcgatttcggccactgcggcggctgcgacgacgccgacgacggcgccctctccagcacctataacatcctgcaatgccagaaggtcagcgacttcctcatcgccgcggcctacttctccatcccgctcgagctgctctacttcgccacctgctccgacctcttccccctcaaatggatcgtgctgcagttcggcgccttcatcgtgctctgcggcctcacgcacctcatcactgtgttcacctacgagccgcactccttccacctcgtactcgcccttaccgtcgccaagttcctgacggcactggtctccttcgcgacggccatcaccctgctgacgctgataccacagctcctgagggtgaaggtcagggaaaacttcctgatgaacaaggcgcgtgagctggaccgggaggtggggaggatgaaaaggaaagaagaggcgagctggcatgtgcgcatgctcacacaggagatccgcaagtcgctcgacagacataccatcttgtacaccaccatggttgagctctcgaaggcactggaactgcagaattgtgctgtctggatgcctgatgagaccaggagcacgatgatcttaacacatcagctgagggaaagggatataatggacccacagaaacactcgattcctattgatgatccggatgttcaagaaataaaggcaaccaaggatgcaaaagttcttggcccagattcggcgctaggggtttctagccgaagcaagcatgaagcagggcctgtggctgcaataaggatgccgatgttaagggtgtcaaatttcaaaggagggactccggaagtgatgcagacgagctatgctatcttggttctggttttgcctaatgatggttcattagggtggggtcgaagagagttggagattgttgaggtagttgctgaccaagttgcagtcgctctgtcacatgctgcactcctagaggagtctcagctgatgcgagagaagcttgccgagcagcatagggacttgctgcaggcaaaggatgaagccatgagggcaggggacgctaggaattccttccagactgcaatgtacgatggaatgcgaaggccaatgcactcaatccttggtctcgtctcaatgatgcaacaggagagcatgaatccagagcaaaggcttgtgatggatgccattgccaagacaagcagtgttgcatccacactgatgaacgatgtgatgcaaacatcgacaatgaactgtgagcacttgtctttggtcaggaggccgttcaaccttcattccttcattaaagaagttgttggagtggtcagatgtctaactggttgcaagggtgtggagtttgagtttcaagtggagaattctttgccagaaaggatcattggtgatgagaagagagtcttccatattgtcctgcacatggtaggcactctaacagaccgatgtaatgctggctgtatctcattatatgtaaatgtccataatgaggttgaagataggcataatcatgactggatgctgcgaagagcaaacttctctgggggctatgtatgtgtgaaatttgagattaggattagaaaatcaaagggctatctgttgagttcatcaagcagtcagataagtcagggatccaaacccaacaattctgagatggggcttagcttcaatatgtgcaagaagattgtgcagatgatgaatggcaatatttggtcagtatcagattctaaaagcatcggagaaactatcatgctagtcctccagttccagttggaacctgtgactccggtctctggagcgtcctcagatttgtacagatcatccgcaattcccaactttaatgggctcagagtcctccttgcggacagcgactgcaccaaccgagctgtaactcacaggctcctagagaagcttggttgccgagtcctttcggtcgcttctggcgtccaatgcatcagctccttcgctgcggagtcgtccttccagctggtggttcttgatcttgacatgcagacgatggatggattcgaagtagcccgcgcgatcaggaagttcagtagcaatagttggctgccgttgattattgccctagcagcaagaatcgacgacaacatccgggatcgttgccagaggtcaggaataatcgctatcatggtactcaaaggtcagtgcggcagtctctacgtactttttataaggcaagccttgtccctcaagacattgccgcgtaggttgtcagttgtcacggcggacctcttggagattttctatctcaagttggagtctggagctcctgccggggggatgcacctgacgaagccggccaggcctgaacctaaagaaaggcaaaggccttcagatctgtggttgatgatgagcctcgcctttgagctgagctgcccatgcctcctgcaacttgccgcatccagtgtgcctgcctgcctgcccaactgtacaagaatgccccatgaccaaatacattgctccgaggtctgggcagaggtatggtatggtatggtactacacactgtttggtgtttggatgctgcgaacctgtggcgccaaatggtgctggtagcccttactgctgctacctactcctgctacagtgctgcatatatggaagagtga

SEQ ID NO: 38431 - DNA, 1377 bp, Zea mays
  Peptide Sequence Number=SeqID_80210
atggttgccaagacgaggacgaggcgacagctcgccaagctcgcgctgcttctactcgccctgctcctcctgctcgccgccatcctgctctgcgtcttcttgatcccgcgccaccacaggaggccgctgccccccgcctcgccgccgggggcggggaacgcctcgaatcccgacgacagcatcgtggcgttcgacttctcaccgtacctcatcatgtacaagagcggccgcgtgaaccggctggacggcaccgcccggtgctcggccggcgtggatgaggccacaggggtgacctccaaggacgtcgtgatcgacagcgggaccgggctcgcggcacggatgtacctgcccccggcgccccgcgggacgcaaagcaagggcctcggcaagcggcacccggtgctggtgttctaccacggcggcgcgttcgtcatcgagtcggcgttcacgccgctgtaccacgcctacctgaacggcgtggcggcgaaggcgcgcgtggtggcggtgtccgtggagtaccgcctggcgccggagcaccggctgccgacggcgtacgacgactcgtggcaggcgctcaactgggtggccaggaacgccgggtccgggccggagccgtggctgcgggaccggggcaacctgtcccggctgttcgtcgccggggacagcgccggcgccaacatcgcgcacgacatggccatgcgcgcgggcacggggggcgggctggacggcggcgcggccatcgcgggcctcctgctcctggacccctacttctgggggaagaagccggtggccggggagacgacggacccggccaggcggcgccagtacgaggcgacgtggtcgttcatctgcggcgggcggtacagcatcgacgacccgctggtggacccgctgtcgatgccggcgtccgagtggcggaagctggcgtgctcgcgcgtggcggtgacgtcgtcgggcctggacgacttccggccgcgcgggctggcgtacgtggcggcgctccgcgacagcgggtgggacggggagacggagcagtacgagacgcccggcgagcggcacgtctacttcttggataggcccaaggaccccaattccgtcaaggagctggccttcgtcaccggattcctgagccgggagtgcaaaggctgcgacgggctgtactctggtagctgcccaatgcttgtggtagcggaagacggcaaagctacgacggtctcggcttcgctgctgttgaggaactgtggtagcggcagcacgctcgggataggggtagagggcgtcgagaacgaaggccctggcgtacacatccactgcaggactccctttcttgccgtgatatcttcggctggacgcgggtaccagccggcgacgaactag

SEQ ID NO: 38432 - DNA, 405 bp, Zea mays
  Peptide Sequence Number=SeqID_80211
atgggtacgggttttttaatgggcatatatatttttcacgggtacgggtttgggacggcaaaacccagcgggtttgtacccgttgccatctctaatcgcgccaccaccactccggcgccactagttcgtcgccggctggtacccgcgtccagccgaagatatcacggcaagaaagggagtcctgcagtggatgtgtacgccagggccttcgttctcgacgccctctacccctatcccgagcgtgctgccgctaccacagttcctcaacagcagcgaagccgagaccgtcgtagctttgccgtcttccgctaccacaagcattgggcagctaccagagtacagcccgtcgcagcctttgcacctaaaaatcgaaagcagcgagatcgcgttcataatccgagctaa

SEQ ID NO: 38433 - DNA, 1449 bp, Zea mays
  Peptide Sequence Number=SeqID_80212
atggaggaggagaacactccattgccagcaagtttggggtctcgatctcgaactcgaaccaagcaactcacaaagaagccacccatttcgatgcagaagatgcatgcagcgacagcatcatcggcgtccggcaatcggtctaatgtttctatatctgtggagccaacaactaattctagagaggaggaagacaaggatgaggacaatagcctcgacatggaggatgatttctctctaagcctatcttcagaggatggtgggagccagggtgaagatgaggttcataatgcaaagagaggagtcaaaagggcaaagggtgatgttccattatctccttcaaagtgtaaggtcaagagggtgaagcgagcagattgctggaagtattttaaggtggtcgaagttcaatcaaagaagaagtttggggaaatggtgacgaaggccaagtgcaagttttgttacaaactgtatgtgtaccaacctgggggtccaacatcacagctcaatcgacatcttgataagtgcaccgcctaccagaacaagttggccaatgcaaaatcaaaggttgctcaaggtactatcagcttcgctcttgatgatggttctcttgttgttaatcccactgaatatgatcatgatcacactagaaatttgattgctaagatgattattgttcatgagtattcacttcgaatggtagagcacagatggtttaatatcttgatgaaatggatgaataacagctatgaaagtattggtagaaagactataaaaaatgagtgcatgaaagtggctgcttttggttactatgctgaaaaagatcataactatttgtgggagccttcgcagtcacaatgggacatgtatgaacagattagaccaatcttagggacaatggctggagcaaccactgcattttcaggatcactttatcccacagccaatgtcttctacccttatatagtgaaagtaaagattgcattaattggagcaaagaattctggtgatccatatctatggagtatggctgttgccatgttagaaaaatttgataaatattgggaaaagaggaacaatatcatggtcattgctacgatccttgatcctaggtttaaaatgagttggataaggggctctcaacatgagaaaactgcacctattcttgtggagggggacgatggtgatatcgagtttgtggagttccctaaggcagcaggccagcggcacgccacccgcctcactcccgcctccgatccgctgcttactcgccacccggagatggccaccgccgccgccttctctgtctcctcgccggcggcctccgccgtcgccgcgcgatccaaggcagagctccgcgccgtcccctgccgtcattcagttcctcctgcccattcgcgcttggtttcagtggactgggggggtctgaacgtcacatgttctggctttgtttga

SEQ ID NO: 38434 - DNA, 249 bp, Zea mays
  Peptide Sequence Number=SeqID_80213
atggcccttgcagtggatgtttctcgttttgaaggagtgccaatggctcctccagacccaattcttggggtttccgaggcctttaaagcagataaaagcgagctgaagctcaatcttggtgttggtgcctataggacagaagagctgcagccctacgtgctcaatgtagtcaagaaggctaaaaatcttatgctggagaaaggaggaaacaaagaggtacaatggcgatcagaacagttcgatgcgtag

SEQ ID NO: 38435 - DNA, 1464 bp, Zea mays
  Peptide Sequence Number=SeqID_80214
atggccaccgccgccgccttctctgtctcctcgccggcggcctccgccgtcgccgcgcgatccaaggcagagctccgcgccgtcccctgccgtcattcagttcctcctgcccattcgcgcttggtttcagtggactgggggggtctgaacgtgtttggaggagttaaccaggcgagaactagaactggctgccgcgtcggcatcacgcggaagaactttggccgtgtcatgatggcccttgcagtggatgtttctcgttttgaaggagtgccaatggctcctccagacccaattcttggggtttctgaggcctttaaagcagataaaagcgagctgaagctcaatcttggtgttggtgcctataggacagaagagctgcagccctacgtgctcaatgtagtcaagaaggctgaaaatcttatgttggagaaaggagaaaacaaagagtatcttcccattgaaggtttagccgcgtttaacaaagcaacagcagagctattgcttggagctgataaccctgttattaatcaaggactggttgctacacttcagtctctctcgggcactggatcactgcgtctcgctgcagcattcatacaaagatactttcctgaagctaaagtgctgatatcgtcgcctacctggggtaaccacaagaatatcttcaatgatgctagggtaccttggtcagagtaccggtattatgaccccaagactgttgggttggattttgagggaatgatagctgacattgaggctgctcctgaaggttcttttgttctgctacatggttgtgctcacaacccaactggaatagacccaactcctgaacagtgggagaaaattgcagatgtcattcaagagaaaaagcatatgccattctttgatgttgcatatcagggttttgccagtggaagccttgatgaagatgcattttctgtcaggctttttgttaagcgtggcatggaagtgtttgttgcacaatcttacagcaagaaccttggtttatattctgaaagggttggtgcaataaatgtcgtgtgctcagcaccagaagttgcagatagggtaaagagccagctgaaacgattggcacgtcccatgtactcgaacccccctattcacggtgccaagatagttgccaacgttgttggtgatccaaccatgtttggtgaatggaaacaagagatggagctaatggctggacggatcaagaatgtaagacagaagctctacgacagtttgtctgccaaggacaagagcggcaaggactggtctttcattctgaggcagattggcatgttctcctacaccggcttgaacaaagcgcagagtgacaacatgacggataaatggcatatttacatgaccaaggatgggcggatctcgttagctgggctgtccctggctaagtgtgattatcttgccgacgccatcatcgattccttccataatgtgaactag

SEQ ID NO: 38436 - DNA, 933 bp, Zea mays
  Peptide Sequence Number=SeqID_80215
gctgccggcactttgaggccctcgaccaggtggatgaggattttgggcgagatatctttgagggtcgaagaccccgtggtgaaggagtccgccggggccctctatgaccggatgtggggttcatacggtcgagaggtggtccgggcgcgggccgaggctgcgagggctcaggcggagcgtggcgagcgggtggacgattttggggcgctgaacagcgcgccgcccgagccggaaaccacccctgcggaggccgccactggagtcgccctgggactgaccctggtgaccgcggaagatgcaccaggcgcccttgtacctgctgcggccggcgaaggccttctcccaagggtggccgaaggcgcgtctgatgcccccgcagctgctgtgccgggcgctgaagatccagcggaggcaacggcggaggcggcggcggaggctcccgcagcggcagggccttcgcaggttcaagattttgggcctgcgcacgcaaccgctactactgggtttttggcggcttcgaccgcggaaggtggaaatgaatgtggtgggtctgtttctgagttttttgattttactgactctgggagctcggttgaatggaccgaggagtcgtcggaggaggacttggactattttgcggccctggacgtggctacggcggaggctgcgctacatgctgcggacgcgccaagcgtgcccggtcctagcaccgggcaccgacgacgaagggcggttgcgaagcgtaggattagtgcggaggaaggggctcggcttcgcgttagtagggttggtcggcaggagctgctctctttgccggccgtctcgggtgtgggggaaggggagctgcgaagcctttttgctggtgaggagcttaggataatgttatttaattatagagagatggggattattcctaaggttgagccgatgtag

SEQ ID NO: 38437 - DNA, 302 bp, Zea mays
  Peptide Sequence Number=SeqID_80216
atggccagcgcccagcagcagctccacctcccctcgcccctgctctcaccatgcccgtggcctgcttttcccggcaccctgcgcagcgtctcccgccccaagctcccccagtggacagcacgccgggatgcccgccgggtgtttgctgttttgcgcagccccaacatcgtcgtcgttcacccccggaaccccgtgtttttcgtggaggagaaggcaagccgctcaacgctcgtcgacgttcagagctatgcacaaatcgaaatcgccatcgttcttacgaacgccgattgggtttgtttatg

SEQ ID NO: 38438 - DNA, 648 bp, Zea mays
  Peptide Sequence Number=SeqID_80217
atggcgctcggcgcacatgcagcaggatgccggccaggggaaccagcagctgaagcccctctccagctcggcttctcccctcccatggcgcccctgttctcctccagctgcttggtgcacctccctgcgcagcacctcccagcctacgtcctttgctgctccacggggcgcgagctccaccccctgcaatggacgtcgtgcagaggcttctccatggacgtgcccctccctgctcacgtcaagggtctccagcaccttctctccttagcgcgcagccatggctggcatccctccatggccagcgcccagcagcagctccacctcccctcgcccctgctctcaccatgcccgtggcctgcttttcccggcaccctgcgcagcgtctcccgccccaaagctccccagccccgacgtctccgcacgctgtcggctcgttgttttgtgaagccagtggacagcacgccgggatgcccgccgggtgtttgctgttttgcgcagccccaacatcgtcgtcgttcacccccgaggaaccccgtgtttttcgtggaggagaaggcaagccgctcaacgctcgtcgacgttcagagctatgcacaaatcgaaatcgccatcgttcttacgaacgccgattgggtttgtttatggtga

SEQ ID NO: 38439 - DNA, 930 bp, Zea mays
  Peptide Sequence Number=SeqID_80218
atggcgtcacgagctgcacgaaaaccaaacgcctcgatccgcgtggcctgccacttggcagcagaaacacctcgtggatgcaaaaatagcgtcataatactacatgttccatttgggcctgtaagcgcagcccgggagaatttttggggccagctgttgggccgaggtcgacgacggggtcgacctctccgtggagacagccaaggcggccgtgagccacgccgccacgagccaccacgagcacggcggcgagctcagcgatctggagtcggatctggtggggcggcagaagactggctgctcgtcgtcgccggcggcaacaacgccggctgcagagctgatcgtgccgccagcacagcagatctagcaattccaggtggtacaaaagggtttttcatcaacaagtggtcaccaaaagaagaactgaaacatcaagatgcaagggagggctatccttggctgccggctaccaaagagcaacaggggaggctagccccatcgggtggtgctcacccagggattctaggaagcagggattacactccctgggtgctgactcccctgggctcccttcccccagctgccaaaggaagcctaactcaacctagtcgcccggcactctgggcgacggcgagtatggcgaagggacggcagggccagcgaaatattagccatgcggccgttacaccaagcctgctacgttcctacgccgcctcccgccggtgtaagcaagcatctgatctgacccgtctccgtaaggttattgaacaatttaaggctcttgcagacttaaaaactgttgatgtattgaggaaagctactaagctaggttgtacgggcaatgatgatacaaagtcatgcaccactctgaatgagggaattttctctctttgggctgacaaacgaactttttacccatttttcatctga

SEQ ID NO: 38440 - DNA, 897 bp, Zea mays
  Peptide Sequence Number=SeqID_80219
atggcgtcacgagctgcacgaaaaccaaacgcctcgatccgcgtggcctgccacttggcagcagaaacacctcgtggatgcaaaaatagcgtcataatactacatgttccatttgggcctctgttgggccgaggtcgacgacggggtcgacctctccgtggagacagccaaggcggccgtgagccacgccgccacgagccaccacgagcacggcggcgagctcagcgatctggagtcggatctggtggggcggcagaagactggctgctcgtcgtcgccggcggcaacaacgccggctgcagagctgatcgtgccgccagcacagcagatctagcaattccaggtggtacaaaagggtttttcatcaacaagtggtcaccaaaagaagaactgaaacatcaagatgcaagggagggctatccttggctgccggctaccaaagagcaacaggggaggctagccccatcgggtggtgctcacccagggattctaggaagcagggattacactccctgggtgctgactcccctgggctcccttcccccagctgccaaaggaagcctaactcaacctagtcgcccggcactctgggcgacggcgagtatggcgaagggacggcagggccagcgaaatattagccatgcggccgttacaccaagcctgctacgttcctacgccgcctcccgccggtgtaagcaagcatctgatctgacccgtctccgtaaggttattgaacaatttaaggctcttgcagacttaaaaactgttgatgtattgaggaaagctactaagctaggttgtacgggcaatgatgatacaaagtcatgcaccactctgaatgagggaattttctctctttgggctgacaaacgaactttttacccatttttcatctga

SEQ ID NO: 38441 - DNA, 492 bp, Zea mays
  Peptide Sequence Number=SeqID_80220
cttgattcgtgctgagctcgcagggagggttggcggccatggaagtcacaggggcgccatgggaggtggagcgcagaactgcagctggtcctgcctgaagggaggcgagccagaggaggggtgcgcgcgtccaggtgaaaaagggggcgaccacagggcaccagggaacagggagccgagcgccatgggggaagctcgcctgggcgcctgccatggaggagcttctgcgcggcgtccaaaacagggaaggtggagctcgcgcccatgggagaagaagggcaggggagggagcatgcttgggcgccggcttgaggaagaagggcttgggcgccatggagaggaagggagccgagctccctgcgcgctgggaagaaggtgctgctgcgtgtgggggaagaagacagggaggttgtggcggctggaaattgttgaggggtgggagtgcaaaataaccaagtgcaaggagagggggctgctatttataggaatgag

SEQ ID NO: 38442 - DNA, 936 bp, Zea mays
  Peptide Sequence Number=SeqID_80221
atcaacgacacgacatgggctgtccccaaacaccaacgcgacggcgtgggtcgggactgcgcagatcgagcgaagcacgcgatgcggaggggatccgaggctgctgttttggaccggcatcgctgcgcagagaacttggatgccctggctgccggcagaacaggggttccttgctgtcgcactagggggaaaggaggtagggggcgagcagcagcaggggaggggatggtgttgtccttggctgggagagcttgcgcgcactgccctgatgccggtctggaacagagaggaaaagaggagggcgccgttggggagaggaggaagacagcttggggaagattgcagggcgcgcttggtagagagagagaggagcagggacgagctcaaggcgcacccggcctgggcgtttcctggccgggcagggaagagcagggggcgccatgaatggggaggagctgagctcgcagggagggttggcggccatggaagtcacaggggcgccatgggaggtggagcgcagaactgcagctggtcctgcctgaagggaggcgagccagaggaggggtgcgcgcgtccaggtgaaaaagggggcgaccacagggcaccagggaacagggagccgagcgccatgggggaagctcgcctgggcgcctgccatggaggagcttctgcgcggcgtccaaaacagggaaggtggagctcgcgcccatgggagaagaagggcaggggagggagcatgcttgggcgccggcttgaggaagaagggcttgggcgccatggagaggaagggagccgagctccctgcgcgctgggaagaaggtgctgctgcgtgtgggggaagaagacagggaggttgtggcggctggaaattgttgaggggtgggagtgcaaaataaccaagtgcaaggagagggggctgctatttataggaatgag

SEQ ID NO: 38443 - DNA, 285 bp, Zea mays
  Peptide Sequence Number=SeqID_80222
atgccggtccaaaacagcagcctcggatcccctccgcatcgcgtgcttcgctcgatctgcgcagtcccgacccacgccgtcgcgttggtgtttggggacagcccatgtcgtgtcgttgatctgcgcagttcgaccgtctacgcgtctcacttcgccggatctgcgcagccccaacatcgacgacgttcaccccgtcgatgtggtgtacaattgtgttggagtgtgggtaggtataaaaatgttttggttataggccgtagcaaggttgccttcacgttttggtaa

SEQ ID NO: 38444 - DNA, 354 bp, Zea mays
  Peptide Sequence Number=SeqID_80223
atgccggtccaaaacagcagcctcggatcccctccgcatcgcgtgcttcgctcgatctgcgcagtcccgacccacgccgtcgcgttggtgtttggggacagcccatgtcgtgtcgttgatctgcgcagttcgaccgtctacgcgtctcacttcgccggatctgcgcagccccaacatcgacgacgttcaccccggcgaggaaccccgtgttttgcgtggaggagaaggcaagtcgttcaacgctcgtcgacgttcgaagttatgcgcaaatcggaatcgccatcgtccttacaaacaccgattgggtttgtttatggtgagccgatgcatgtcgctcttgatcgactcgattaa

SEQ ID NO: 38445 - DNA, 201 bp, Zea mays
  Peptide Sequence Number=SeqID_80224
atggctctgcgcgctgccggcttgctgttttggttgcgcagagaggcaccccatgttttgcgtggagaagaaggcaagtcgttcaacgctcgtcgacattcgaagttatgcgcaaatcgggaatcgccatcgtccttacaaacaccgattgggtttgtttatggtgagccgatgcatgtcgctctcgatcgactcgattaa

SEQ ID NO: 38446 - DNA, 492 bp, Zea mays
  Peptide Sequence Number=SeqID_80225
atgcgtctcacgggtagacgggtatgggtactacgcagccgaacccacccaaaaatacccgatgggtatatgattttgtccaataacgcacccgcgggtgataaaatgcttccacacccgcctctataccgggtgcttcaccccaaaaatccatttgctccaacattgcattttaactaccgttactttgagacagatgcacccaaagatgcacctggtgcaccaagacagtggtggtttggcggtggtactgacttgactccctcatacatcattgaagaggacgtgaagcattttcattctgttcaaaagcaagcatgtgataaatttgatccaagttttcacccaagattcaaaaaatggtgtgatgattatttctatattaagcaccgtaacgagcggcgtgggcttggtggaatattttttgatgaccttaatgattacgatcaagaaatgcttctcaacttcgctacaagtgaaaccatttgctag

SEQ ID NO: 38447 - DNA, 552 bp, Zea mays
  Peptide Sequence Number=SeqID_80226
atgcaggagcaggatgcctccgccgttcaggcgctcagcgactcagcaatcagcatggggagttggggattgggcgactggcgcttggggttttgggagagcgagcaccgagctgccgaccgagcgtccgaggctccgagcggagagccagcggcggcggcgtgggttggggcttggggagagcgagctagggtgcttcaccccaaaaatccatttgctccaacattgcattttaactaccgttactttgagacagatgcacccaaagatgcacctggtgcaccaagacagtggtggtttggcggtggtactgacttgactccctcatacatcattgaagaggacgtgaagcattttcattctgttcaaaagcaagcatgtgataaatttgatccaagttttcacccaagattcaaaaaatggtgtgatgattatttctatattaagcaccgtaacgagcggcgtgggcttggtggaatattttttgatgaccttaatgattacgatcaagaaatgcttctcaacttcgctacaagtgaaaccatttgctag

SEQ ID NO: 38448 - DNA, 186 bp, Zea mays
  Peptide Sequence Number=SeqID_80227
atgtcctatttccaaggatttttcttctgcccagaagtggcgtctttgctgctacacaacttctgcgtctaccacatcaatccccaggggcatgaggtcagtgatgatggttcaatccctgtaataaggtggagggaagaagttttgttgaagtcccctcttagtgtggtggagattggcaaatga

SEQ ID NO: 38449 - DNA, 411 bp, Zea mays
  Peptide Sequence Number=SeqID_80228
atgcctaatggtggctgggttcatgatgatgaggacatagttgatgcagcacttatatgtcttactttgcatgtgccgatgcatttagatttggttacaatattagcaggatatattgcaaaggaacatcttgtgaggacgagatgtggttctgtgactgttgccgtgtacggagacgaggacaagccagcgcttataacgtacccggatgtagctctgaactacatgtcctatttccaaggatttttcttctgcccagaagtggcgtctttgctgctacacaacttctgcgtctaccacatcaatccccaggggcatgaggtcagtgatgatggttcaatccctgtaataaggtggagggaagaagttttgttgaagtcccctcttagtgtggtggagattggcaaatga

SEQ ID NO: 38450 - DNA, 654 bp, Zea mays
  Peptide Sequence Number=SeqID_80229
atgcgggacccagcccccgagtcgcaggggagggccttggagcgtgttggagaagactcggcccgcggcgcttgggggcgcacgaacgcaactccatgggagctggtacctctcagccatcgttcggcttcaaggattttcatcacgcagcccggtcgcaccccttcaccggcggtcacccgagatggcgacctccagcttgatggtgggggaaagcgagccgggttgcggcctctgccccttcctcagcctcaaggattttcatcaccaaggctggggaggggagagtgccgagttggggtcggcccctgcgtgggcggtggcccgctccttcactcagtgatggggggagaagcgggcattgcccgtggcgtccggcagctgcagcgtgcctggtcttcagccgcgagtggcttcggggccacttgcggcgtcggcgtctgccacggcagccggaagaggttcttccgccggcgcgacggccgggactggccacgggctgacctccaacttctacggccttctgcccgtccttgcctcacgagttttggcacgggcgggggcctcctggcagcggcatccaccctgaggtcagcgttgccgctgttcggccccccggagcagaagtcgccgtcgtcgccactgctggagtag

SEQ ID NO: 38451 - DNA, 276 bp, Zea mays
  Peptide Sequence Number=SeqID_80230
ccccatccaaccctctgagacgagtgtatacgccccagtgaagctccccgagcgaggaatcgaagcctacttcgccggagaggccagtccacggtcgccggagctctcaaccccgccggagttcgtggaccggtacactcgccaccgacgagaactcccgcctgcgcacgtggaccggacgattccgaccatccccgccgtcaagccgcacctcgctgtgaccgccagaacctccccgagccaaccctacccttcaccggacctatctcgccgccg

SEQ ID NO: 38452 - DNA, 750 bp, Zea mays
  Peptide Sequence Number=SeqID_80231
atgtggcataccacccaaggcacccactggaaaaagctgagcccgagacttggacgtttgacatgccttggcatggtttttgtcgcgagattgaaagctccacgtgttcgacgcgccctgagcttgccagagcacgcccgcgcgtgccccgcgtcgcgccaacggccagccgacgccctgtcccgcgcccgcgcctataaagccctcccaggcgtcggttacactcttccgcgcacgctcaagcctcaccgccccatccaaccctctgagtcgagtgtatacgccctagtgaagctccccgagcgaggaatcgaagcctacttcgccggagaggccagtccacggtcgccggagctctcaaccccaccggagttcgtggaccggatcgccgtggtttggccggtacactcgccgccgacgagaactcccgcctgcgcacgagaaccgggcgattccggccatccccgctgtgaagccgcacctcgctgtgaccgccagagcctccccgagccaaccctgcccttcgccggacctatctcgccgccggaggtagccccggacccagcaccagagcctgcaccagaggacctgcctgccactgctttggaaggcaagccccggaacccttttgagatgaatactagttctctggaggaaatggttgctggagtgacttggccatccatcttgccaccgggttggactgtcgagtgggaccccgcctcggctgaggaggagcatgaggagtga

SEQ ID NO: 38453 - DNA, 261 bp, Zea mays
  Peptide Sequence Number=SeqID_80232
atgaccaccagccttgtggcgaggagaagcatgccgggctgcggcctctctcccaccctcagcttcaaggatgttcatcatcctcgctgtgatgggagcattcggaggggaagggtgttcaccagtcctgcgggaggggtggaccttggctacacggggccggccgactgcaggctgtcagctacagcgtgtctggccctttggggctggatggctctggtgccgcctccggcgctgcctcctgccgtctgggcgcactag

SEQ ID NO: 38454 - DNA, 1275 bp, Zea mays
  Peptide Sequence Number=SeqID_80233
atgaccaccagccttgtggtggggagaagcaagctgggctgcggcctctcccccacccttagcttcaaggatgttcatcatcctcgctggggtggaaggcgggttgagccggggccctaccctccatatgggttggctgtcagctgcagcgtgtctggccctttggggctggatggctctggtgccgcctccgacgttgcctcctgccgtctggtcggggcgtggttgcccatccaccgcacaggcgacagtcgcgccatgcgtgggtttgccacatccatgccttccctgcccgacgggcgcactgggggaccgtacaagacgtcgtacgccgcggcggtggcggcggcgttcttggatggtcttgtcctcactcctgttggtcgaacgagagcgagaaccccttcgtgcgtgctgaggcagccgccgcccatcggtgcagaggtggtcgccgccgctgaggcggtcgtcgccgtcggtgctgatgtggttgcctctgctggctcacggtacgggaccaggctgagcgactacatggtttccggaccccccccaggagacaagtgctcgttcttcagagccggacctccaggctcacggcacgggaccaggctgagcgactgcacgtgctccggaccaccccaggagactaatgtccattctctagctctggacatggttgagcggctacacgggctccggactaccctatggaacggggtcccgttttctagagccatcccccaggctgtcggacctccctactttcgtgtcaggggccctaaactgcaagcctggctgttcaattcggatgtcgccatgtcagacaaatggaaaccgtacggactaatagtccgggtttatgggggcagaccccaccgggttgtcatacacgagccctcgcctctagctgtgatcacttctgcatgtacctgtctgcagctcggacccgtgggggtccggaagggcctccgaaggaaggcgtgcttcagctccgtaggccggggaacacggggtccctccgaggtccatctagttgtcttcaccggagtaggagcctccagcgaagatatccttcaggtccccctcgggcgactgatacccaaggtcccgctcaaccgtggctacctcgtcgtcgtccaccttctctttgtcgggccgtcggcaaggcggggagccgtctttggaggactgttcgctgacgcattttgcgaggtcaatgatctcgtgacactctgcggcgctgtggcgaccatgcgggtgcacagggcatga

SEQ ID NO: 38455 - DNA, 732 bp, Zea mays
  Peptide Sequence Number=SeqID_80234
atgggggagatccgccgtctttccgcctcgtcgttggaggaacgcaactccgtgggagttggtacctttcagccatcgttcggcttcaaggattttcatcagctagcccggctgtaccccccgccggcagtcacccaagacggcgactaccagcccctgggtggggagaacttcaaggatgttcatcatcctcgctggggtggaggccgggctgagccggagctctacctcccgcgcgggttcgtgggtcaccctctccccgcggtgttcgagggagagggcgctcgctggccctgcgggcgggccggacttcgacaacgcgaggctggtcaacggcgggcgtcgtcagccccagcgtgtcgagctcgtcggcttggctcccggcggcccctcatgccggaaggcggctgccgcgccgtgtgcacgggaggaccgcccaagatgtcgcgcgctgctagggcggcgttcgtgttctggggcggtcctgcctttgcaccggtatggcgcctccgcgcggaggtcggtgccccactcgtctgggaggatctgagtggggatctgccgggagcggctcccgtcgttggtgccaaggtggaggcggctcgagaagtccccgtcgctgacgggaccaccgccaccatccgcgcttcgggcctccggctctttgtacttgtcctcgcccctcgagcgccgacgtgggcgagggcaagattgcagcagcacccaccctga

SEQ ID NO: 38456 - DNA, 549 bp, Zea mays
  Peptide Sequence Number=SeqID_80235
atgggggagatccgccgtctttccgcctcgtcgttggaggaacgcaactccgtgggagttggtacctttcagccatcgttcggcttcaaggattttcatcagctagcccggctgtaccccccgccggcagtcacccaagacggcgactaccagcccctgggtggggagaacttcaaggatgttcatcatcctcgctggggtggaggccgggctgagccggagctctacctcccgcgcgggttcgtgggtcaccctctcccgcggtgttcgagggagagggcgctcgctggccctgcgggcgggccggacttcgacaacgcgaggctggtcaacggcgggcgtcgtcagccccagcgtgtcgagctcgtcggcttggctcccggcggcccctcatgccggaaggcggctgccgcgccgtgtgcacgggaggaccgcccaagatgtcgcgcgctgctagggcggcgttcgtgttctggggcggtcctgcctttgcaccggtatggcgcctccgcgcggaggtcggtgccccactcgtctgggaggatctga

SEQ ID NO: 38457 - DNA, 600 bp, Zea mays
  Peptide Sequence Number=SeqID_80236
atgtcttcgcgctcccttatgcatcgtgtctttccacctcccaagaccccgaatgggggagatccgccgtctttccgcctcgtcgttggaggacgcaactccgtgggagttggtacctttcagccatcgttcggcttcaaggattttcatcagctagcccggctgtaccccccgccggcagtcacccaagacggcgactaccagcccctgggtggggagaacttcaaggatgttcatcatcctcgctggggtggaggccgggctgagccggagctctacctcccgcgcgggttcgtgggtcaccctctcccgcggtgttcgagggagagggcgctcgctggccctgcgggcgggccggacttcgacaacgcgaggctggtcaacggcgggcgtcgtcagccccagcgtgtcgagctcgtcggcttggctcccggcggcccctcatgccggaaggcggctgccgcgccgtgtgcacgggaggaccgcccaagatgtcgcgcgctgctagggcggcgttcgtgttctggggcggtcctgcctttgcaccggtatggcgcctccgcgcggaggtcggtgccccactcgtctgggaggatctga

SEQ ID NO: 38458 - DNA, 381 bp, Zea mays
  Peptide Sequence Number=SeqID_80237
atggctgaaaggtaccaactcccacggagttgcgttcttccaacaacaaggcggaaagacggcggatatcccccatccgggggcttggaagatggaaagacacgatgcataagggagcgcgaagacatggtcgccttccaaggggggaccgggaaagggggataccccgaaaaggatccttccccgagaaggaaccaggctccgagcccccctactgatcagagaggctcgggggctgctctcgcaaacccagctccggtcgaaccgttgacagcgtcaacataccagcccgagaacttgggacccgaccgtacacccgggctacggccagctcgcatgagggaatgcccagaccagccgaagcattacgtgaggcattaa

SEQ ID NO: 38459 - DNA, 543 bp, Zea mays
  Peptide Sequence Number=SeqID_80238
atggctgaaaggtacccactcccacggagttgcgtcctccaacaacgaggcagaaagacggcggatatcccccatccgggggcttggaagggaccgagaaagggggataccccgaaaaggatccttccccgtgaaggaaccaggctccgagcctccctactgatcaaaggttcgaaggctggccccccggaagggttcgacagccgcctcagatcgcgtgggccctacacccactactggtcagaggttcgaaggccagcccctcggaagggttcaacggccgcctcaggctactcgggctccgcgcccattactgatcaggggttcgaaggctggcccccaaagggttcacagccgcctcagacgccgagcgagggattaccatggaggctcgggggctgctctcgcaaacccggctctggccgaaccgttgacagcgtcaacataccagcccgagaacttgggacccgaccgtacacccgggctacggccagctcgcatgagggacgaccagaccagccgaagcattacgcgaggcattaa

SEQ ID NO: 38460 - DNA, 936 bp, Zea mays
  Peptide Sequence Number=SeqID_80239
atgaatcaacaagaagctcctacaggagttggagagtttctacgagattttggtgttccagtggtcctgtggcgactacttcaagaggtcggatataccgaagcacccaagtaccagtggtcacgcactgttcttagaggacaaccatggtatgaggtagtagtacgtattccagaacgtgatagaaaaccatcttggccatattggatgttccatgccgaaggaatgactccttgggagggtgctcaggtagctgccttagaggtgctaacaaccatttgttaccagaaaagggaagaaatacaagccacatctatgaggttgttccctgcagttgccttaagtgacccattggtgtatcatcaccaggcccgagtaatggaaagcattcctattgggcaggattctgttgaatcggcatctgctcgagttttgatggccgtgctagagttgcaacttactcgggggcacagtcgtcaaaagtggcagcagttgtacactgggagttacgcagcatttaagatgatggaaacagccaagaatagagcttgtacccaggcacaagaacgacttgaggaaacaaaggttcaagcggaacaggttattggactagagcatcaggtgacagaacttcagatgcaacaccaagctgatcagaatcgcattaaggagcttgagcatcagctaactaatgctcattctaaattaaaaattttaagtcagcaacaagaagaaatttatttgtatgctgttgctgttagagaagaccttaaggaaaccatgagctacataagccatcaggatcaggcgatcaaagaattgaatcgtgctcatcccatggagtttcaagtagcacaacggcttgtcaatcatctgcagcaatcagtgcataggctcaatgctgccgttgatcctactcctgcatcggtggactag

SEQ ID NO: 38461 - DNA, 336 bp, Zea mays
  Peptide Sequence Number=SeqID_80240
gttattggactagagcatcaggtgacagaacttcagatgcaacaccaagctgatcagaatcgcattaaggagcttgagcatcagctaactaatgctcattctagattaaaaattttaagtcagcaacaagaagaaatttatttgtatgctgttgctgttagagaagaccttaaggaaaccatgagctacataagccatcaggatcaggcgatcaaagaattgaatcgtgctcatcccatggagtttcaagtagcacaacggcttgtcaatcatctgcagcaatcagtgcataggctcaatgctgccgttgatcctactcctgcatcggtggactag

SEQ ID NO: 38462 - DNA, 357 bp, Zea mays
  Peptide Sequence Number=SeqID_80241
atggcgaagcctggccatgctactcctcctggtcctctcctgcggaagcagcaacccactcgaccatctatcccggtggcagggatggaggccaagtcacaccatccaccaaatcaaggaggtacctgcaaaaattatgccacaagcaaggctgagtatactaatactcagctagacttacccggtatccgcacgttaatccttattccaatttcgtgtcatagacaacacatccccatggatccgtgtccacagaccatcatcattctattatcaaaatggatacaaccaattcctgacctcgcgcgagagctagaaaaatcactcgacttctaccgagattctgatttagcatag

SEQ ID NO: 38463 - DNA, 273 bp, Zea mays
  Peptide Sequence Number=SeqID_80242
atgaaggccaagtcacaccatcaaccaaatcaaggaggtacctacaaaaattatgccacaagcaaggctgagtatactaatactcagctagacttacccggtatccgcacgttaatccttattccaatttcgtctcatagacaacacatccccatggatccgtgtccacagaccatcatcattctgttatcaaaatggatacaaccaattcctgacctcgcgcgagtgctagaaaaatcactcgacttctaccgagatcctgatttagcatag

SEQ ID NO: 38464 - DNA, 627 bp, Zea mays
  Peptide Sequence Number=SeqID_80243
atggggtcgcgctcctccaacaagccgcaagacgaaggcaacatgggtgctccccatccgggggctcggaaggagagccctctcccaaggcatgaagatgacgcgcccgtgctccgttcctcgagcacgcgcaacgggcgccccgcgaattgcccgtctcgtcgcattaactcttcggcagggcaagcgacacctttggcagggaccgagaaaggggatattttgaaaaggatccttcccggcgaaggaaatgggcccccgagccctcctactgatcatgggttcgaaggctggcccctcggtagggctggcccctcggaagggttcgacagccgccctagagcacgcagagtgagggatgactctgggtacgtctgttacatggccgaggctctggctacgctcccgagaatcccaccagaagaaggcatcgagccctcggaccctatcgaatgggtccgggtccggcaaatcacctacagccacttcgccctttcactgaccgatctgacaggaaaacagcgccgctcaacccgcttcgactgctgtgccagccacccgggcaaggctgacaacagcaagttcagcctcgggcgcaacaggaagctccgcctcgcccgaccttag

SEQ ID NO: 38465 - DNA, 342 bp, Zea mays
  Peptide Sequence Number=SeqID_80244
atggccgagcccccttcctccctggccgcccagctcactgtccagggcgcccagaaaattccagcagcgagccccttcctcgctgttcgtcgtggtgcccgccggctgttcgacaaaatgcgcagcaagccgcgcgctgcagtagccctcctgttcgatctccactcccctcatcgcgtgtcgtcgctctcgtgctcgctgcgcagccccatccgtgacgccgtcgaaacccttgctagtggtcgacgctgcgcttcgcgccttgcccgttcgacgaaatgccgagccatgtggacagcccatgcgtctagtcacgactcgttcaggttgattgatttatag

SEQ ID NO: 38466 - DNA, 675 bp, Zea mays
  Peptide Sequence Number=SeqID_80245
gtcggcggtggagctcactgctggaattttctgggctccctggacagtgagctgggcggccagggaggaaggggctcagccatgggcgacggtgactcgctgcgggtgctgtttggtggggaagatgggggaggagatggagcagcggcgctgcgcagggatgctgctgggcgccggacagagggaatcctcggcgccatggctgctggccggagctggagctcggcagcaacagaggggcggctggccatggagctcctactgggcttgggcgccatggctgagggcgcgtggaacaggcagcccactggcggatgtcgctgccgcaaagcagggagaagaagggcgccgtggggcttcctgctgcgcgatggagaaggagcagagagctcggcggccaccatggctgggccatggagaagagggaaacgcagggccgacggccatgtggagggaggagccgagctgctggtttcaacagggtcgcacgtggggaggagggtgccatggataagagctggaggcgcctgctccaaggggctcggccagcgcccaagcagggaggtggaggcgccatgggaggaagggagccgagctccctgcgcgttggggaagaaggccccctgctgcgcgtgggggaagaagccagagaggctatggcggctggaaaaatga

SEQ ID NO: 38467 - DNA, 567 bp, Zea mays
  Peptide Sequence Number=SeqID_80246
atgtcgtgctgcaccaggaaagcgtccagtgtggcactattgccgttcccgccggtggggggcgcagccagcccggtgagccgcggcctcccccagaaggagcctggacgcggggtggggtgggggccgttacttgacggtgacggctggagcaactcgcatcggcgaggggaacggacggggacggcccgcgccagtgctggactgctggcgtcggagacgatgcagctcgccagcggaaccggggcaccgccctccctgtcgaagtcctgtggatccgcgctgaggcagaacacgggcctttcctcccgcaatccctcgaagagcggcgggaagagcgcaccgcggaggaggtcccgcacctcgccgagcttggcggacgcgatggaaatccccgagtcatcgccgccgctctggccgaccgcgcaagggagagacgggagccagtcgggacttgcccacggggtggtggtagaggacccggctccaccgctgcttccgcttctcggctggggcggtggcgggcagtcgcggacgtggacgcgacgaggaggcggacgtgggtag

SEQ ID NO: 38468 - DNA, 2370 bp, Zea mays
  Peptide Sequence Number=SeqID_80247
actgcccccgctccctgccccgcaaccgcctcccgcgcctcacgccccgccgtcctccgcactcccgcgcgtcgcacccgccgcgaatccagctcccgcgcgccgcatccgccgcgaatccagctcctgcacgcccgcgccagcgcctccctactcccgcccgcccgccagcgcccgcaacgtcgcgagccgaggcggcagcagaggcacaaggaaagcaggcacctcgattctgccgctacttcgccgtttccgggctacccacgtccgcctcctcgtcgcgtccacgtccgcgactgcccgccaccgccccagccgagaagcggaagcagcggtggagccgggtcctctaccaccaccccgtgggcaagtcccgactggctcccgtctctcccttgcgcggtcggccagagcggcggcgatgactcggggatttccatcgcgtccgccaagctcggcgaggtgcgggacctcctccgcggtgcgctcttcccgccgctcttcgagggattgcgggaggaaaggcccgtgttctgcctcagcgcggatccacaggacttcgacagggagggcggtgccccggttccgctggcgagctgcatcgtctccgacgcctggcagccatcagatcaagcagggatgcgcgagcgagacttggggggcgagcccatccacccacgccggccgcaccacccccacccggcggccttcaagtctgcatctacattctgcagcccaacgccacccgcaccgcttgctttaccagcagtccagcactggcgcgggccgtccccgtccgttcccctcgccgatgcgagttgctccagccgtcaccgtcaagtaacggcccccaccccaccccgcgtccaggctccttctgggggaggccgcggctcaccgggctggctgcgccccccaccggcgggaacggcaatagtgccacactggacgctttcctggtgcagcacgacatggagaacatctacatggaccggcggggtggggagggagccagcggcttctcctcccgtcgtctacacgcagcaccacaacgaggcagatccggactttggttcctgttggtacaaggagatgctcgaccatctcgacaacgtgctggacaacgaacccgtggtggtgaagagaggccagcacatcgtggaggtgaacccccaaagcatcagcaaaggcatggtggacagcctgctgtcgtccatagtcagaacggggacagacctggtggatgggatggaggacgccgcgaaggtgttcgacgaaatgttgactaagggcgaggaggtaccatctgcggtgatgtacaatgctctgatcaatagctactgcacaggtgcaaatatggaaggcctttgtgcagacaatactcgacaattggttgacatcatggactggatcgtggacacagagattaccttgctcagggacaacaacaggccaaaacctggtggcaatgttacctttggcgagttgctcaagagcagtgtgctgacagaaggtgtccgggtgcttatgctggtctggaatgctaggactttcgtcgagtgtcaactgaagcagtacccatgggagcaggaacagatggcttcgatgaaggagtacattgctcgctttggtcctggttctgcaaagcttgtgaggggaattaagcaaccatggccgccaccaagggcagtcccgccgcggcttgattacagcgatgatgaggcttctgttggtagtgctgggactagattgtaccccttgacaaagaagcgtgccaagcctgcagtgccattgggtgccaactatagactgattgatattcctgtcaacagttgtctcaacagcaacatatccaagatctatgtgctagcgcaatttaactctgctttcctcaaccgtcacctctcaagagcctatgggagcaacattggagggtacaagaatgaagggtttgttgaagtcttagctgcacagccgagcccagataatccaaactggtttcagagtactgcagacgctgcacacagagaaacatatgctgatattactgttgctgccctaccgatggctgagaaacgtgcaactgcatttggcctcatgaaaatcgatgaagaagggaggatcattgagtttgctgagaaaacgaaaggagagcagttcacagaaatgatggttgacaccaccatacttagccttgatgacgtgagggcaaaggaaatgccttatattgctagcatgggtatctatgtttttagcaaagatgcaatgcttcagctcctccgtgaacaatttcctgaagccaatgactttggaagtgaggttattccaggtgcaaggcagaatcctaaagagacagcacgggttacatag

SEQ ID NO: 38469 - DNA, 480 bp, Zea mays
  Peptide Sequence Number=SeqID_80248
atggcccatgtttcgttcaaaagcaaagatgtggacagcggcatgtcccggtggtctgaatacctaagtgttgaagagccaattccttccgcaatggcaacctggaggaacatgagcgctgatgcgccgcaaggctcttctgctggtagccacaaacatcttcagatggagccggtggttcagctgtccaaggttgcggaaggcttgctggccaaaatgtaccggctgaacagcatcctggactatccagatccaaacacgcacacattctcggatgcattttggaaagctggtgtctttccaaatttccccaaaatttgcatcacgatgtcaaaaaaatttccggaacatcctaacaagctgcagctagaaagggtagataagtttggtcttgatgctttaaacgagaatgctgaaggttacatgcacaatcttgagcagtggatcctgggaaagactgcatactatagacccaaatga

SEQ ID NO: 38470 - DNA, 792 bp, Zea mays
  Peptide Sequence Number=SeqID_80249
atggcccatgtttcgttcaaaagcaaagatgtggacagcggcatgtcccggtggtctgaatacctaagtgttgaagagccaattccttccgcaatggcaacctggaggaacatgagcgctgatgcgccgcaaggctcttctgctggtagccacaaacatcttcagatggagccggtggttcagctgtccaaggttgcggaaggcttgctggccaaaatgtaccggctgaacagcatcctggactatccagatccaaacacgcacacattctcggatgcattttggaaagctggtgtctttccaaatttccccaaaatttgcatcacgatgtcaaaaaaatttccggaacatcctaacaagctgcagctagaaagggtagataagtttggtcttgatgctttaaacgagaatgctgaaggttacatgcacaatcttgagcagtggatcctgttgcttcttgatttgctggcatttcgtgaacaagctttgcgacttattttggatttgagcagcacggtcataacattgctgccacaccaaaactctttaattcttcatgcttttatggatctgttttgttcatttgtccgagtgaatcttttctctgacaagatgccaagaaagatgatcctccaggtttataacatcttgcacataatgctaaagggtggtcgtgattgtgagttttatcaccgtgcaaaacataattcaaaaattgaaggacagcccaatcgtcttgaaaaatacctgcagcttctcataaacctgaaggattttaaggataaactctag

SEQ ID NO: 38471 - DNA, 180 bp, Zea mays
  Peptide Sequence Number=SeqID_80250
atggagatgcagcagcgacagctggagctaggccaggtcatcggcgagcgggaccaatctcgaagccaagctgccgaggccgtgggccgggctgaggcccttagagagtccgtcaaggcactcgcccaggcggccgagcagaaggaggctgaccgcgtggctatgtccgatgccatctag

SEQ ID NO: 38472 - DNA, 195 bp, Zea mays
  Peptide Sequence Number=SeqID_80251
atggaagttgatccgtgtgataaggaagcggtgttcttgagaccacaaaattacgagaaattcctcgccaatcccctttcccgagcttttgtaatcccagcaaaaacctccggtgttcttcttcagtccaaggaacacctgtcagagcaaccttactcagcaacatggcatagaaagcccaaaatgcggccatga

SEQ ID NO: 38473 - DNA, 156 bp, Zea mays
  Peptide Sequence Number=SeqID_80252
atggaagttgatccgtgtgataaggaagcggtgttcttgagaccacaaaattatgagaaattcctcgccaatcccctttcccgagcttttgtaatcccagcaaaaacctccggtgttcttcttcagtccaaggaacacctgtcagagcaaccttaa

SEQ ID NO: 38474 - DNA, 2568 bp, Zea mays
  Peptide Sequence Number=SeqID_80253
atggacccgctcccaaataatgatgctcgttctccattaaaagaactgtccaacatcactgttgaagatgctcaagcacctactgggtctctatttagctccgagcacatggctattcctgaattgatcccaacaccatttgttcctactccattggtgactgaggatgttgagacaaacaacctgacaacgtctcctagacgaaaaggacataattgtcatgtgtcgtatggcgaaagacagatttgggtatcccgccaaaaccaagaatttcaatccgccattggaagaaagttttctactgcaaccatggattgtgaaatggagagtgatggggacaatgaaattgatcacctgactacttttgagatcaacaacaatgtccctgccacaaatagtgacaaaatgactgaaggagtagacgttgggaagcagcaccagacaaactcgactattactaccaatggggatgatgatgagactgtactttttaaagatgatgatgaagaagaaggatacctattcgctgggcaagatggtgaatctggtgaggatattgagattgatgaaacccaagatgcctttactgtcaaccctgacgtacctgacttgtacgacaaggtgtatagtaacatacctgaagaaacacatttgctgagcactgttcctgactgcgattactgcaaagcgaagaagtttcagtatgaaccacctggattttgttgtcgtaatggacagattaatctagccgcattggagaccccgccccagcttaggaggctgtgggagtgtgcagatgctgatgcgaggcattttcgtgataatattcgattttttaacggccatttctctttcacttctctatattgttgccttgacagtatgactaccaacatggattgtggtatctacacgtttcgtgcacatggcatgatgtaccacaacgtaaggtcattcggtagggaagatggggcggaacataaacaccttgaactttacttctatgatgatgatcccagtctcgagcatagatatcgtaaatgtcgtcaagagcaacttgagaaagacaaggccattattaaacagttggttgaaatatttaagggaaacccatactctgagcaccttaggagtatggggcacgttgataacgttgaaaactaccatatcgccttgaaccttgaccaaacgctgaaccagaagttatataatgtacccatcacttcagaggtcgctgcagtttggattgaggggagtgaacgtcgtggtgaacttggatggcatgcaaatattcctaagtccaatgtttccatggccgaagtagacgcatatcgcgatcaacataggacaaggaatgcaaacgatgatgatactggtatattcaatccaatactttatgggaagcgacttttccaacagttcgcggttgatacctacatcaagattgagagctctcgtttggatttcatacgtaaaaaccaagacagattaagggcggatctatacaagggtttggtagatagcttgcatgaaggagagaacagagcagacaaaattggaaagcgaactgtgttgtctacatcatttatcggtggtcctcgtgacatgagacgccggtatatggatgctatggcccttgtgcggaagtttgggaagccagacatattcctcactatgacgtgcaaccccaattgggatgaaataaccacagagcttctgcctatgcagtcaccacaggatcgtccggaccttgttgttcgcatattccatgcaaaactagaggaactgaagaagagattgactaagcatcatattcttggaaaaatccggtcttatgtctatgtcgtggagtttcagaagcgaggtttgcctcatgcccatttcctactcatcgtgcagagaaagtacaagctaacttgccccgatcagtatgatctccttatctctgctgagatccctgacaagaagaagtacccccaactgtacaagatggttataaagcatatgatgcatggaccgtgcgggttgctaaatcctaaatgcccatgcactaagggtcgtgcttcatgcaaaaaccattatcctagagcttttagcaatgcaacgtctcaaggaaaggattcatatcctatttataggcgtcgtgatgatgggcgtaaggaaacggttcgaggttgtgaattggacaacagatgggtcgtcccttacaacccttacctcctccggctcttcaattgtcacatcaatgttgaggcgtgcgggaacatcaaggctgtcaaatacttgttcaaatacatatacaaaggccacgatcgtgcttctgtggctgtgacagatgcaaacaaggctgatggtgacgttgatgagatcaagcagtatagagatgctaggtgggtgacccctccagaagccctttggaggatattcagctttgatctaagtcaaaactctccaccagtgatgcaactgcagctccatcttgaaaacatgcacatggtgtcatttcacgagcgtgctaaagtaaatcatgttgtccaacgtccaggtgccgatagtgagagcacctag

SEQ ID NO: 38475 - DNA, 225 bp, Zea mays
  Peptide Sequence Number=SeqID_80254
atggcgcggcggcccggccttgccgtcccggcgtcccgtccctgccccggcgcggcacccccgcccggcgtccccaccctcggcacacccgcgatgcccgtctccgtggcggcccggccttgggggcttgagcggtttctcgagtgcctctctgtaaggacctgttcgttggatgaccgcccaggaaaacagtgcaaccataagggtggaatggggtgcccttag

SEQ ID NO: 38476 - DNA, 204 bp, Zea mays
  Peptide Sequence Number=SeqID_80255
atggcggcgcaccggacagtgaacaatgcctgttcggtggcgcatcggactgtctgggggctcgagcggtttcttgagtgcctctccgtaagtacctgttcgttggatgaccgcccaggaaaacagtgcaaccatgagggtggtaatgaaggtgtcgaggtggatctccaggagttccaggacttcgacgagttcgaggattag

SEQ ID NO: 38477 - DNA, 216 bp, Zea mays
  Peptide Sequence Number=SeqID_80256
atgggcaagagcaagaaaggcggaagttcgtcgcaccactccggcgacaagcggaagcgcgagccgagtcccccctccgaggacttcggtgactctaagtactcagaggaggaattctcctccgagtctgagggaggtaaccgccgagttatgctaggccacatcggtgctctagaggtagctgccgagttatgctgggccacgtcggcgctttag

SEQ ID NO: 38478 - DNA, 345 bp, Zea mays
  Peptide Sequence Number=SeqID_80257
atgggtaagagcaagaagggcagaagttcgtcgcaccactccggcgacaagcggaagcgcgagccgagtcccccctccgaggacttcagtgactccgactcggatgattcccaggggatcactaccgaggtgtggacgtacattcgggccatcgagcgctccgggctcaagggctcggatgagtcagagatctcctcgaacgaggaggactcctctgactcatctgaggagggaagcggtggtgacggcgacgacgatggtgacggcggcgacaagggcgacgacggtaccggcaaggacgacggtggcagtggcaaggccagtggcaaagcgccactgggttaa

SEQ ID NO: 38479 - DNA, 429 bp, Zea mays
  Peptide Sequence Number=SeqID_80258
atgatctccgcctcgcccgaccccagggctcggactcgacctcgcctcggaagacggtctccgcctcgcccgaccctagggctcggactcgacctcgactccggaagaaggtctccgcctcgcccgaccccaggtctcggacgagacctcgacctcggaggagtcaccacctcgctcgggccaaccacgccacaaggggaggccatcattaccctacccctagctagcccaggctacggggaacaagaccggcgtcccatctggctcgccccggtaaaacaagtaatgatggcaccccgcgtgctccatgacaacggtggttatcagccccctacggaagcaaggatacgtcagcaaggatccgacagccccgacagctgtgcttctatagagctcaagcactcctccgacggccacgacgccgcatga

SEQ ID NO: 38480 - DNA, 759 bp, Zea mays
  Peptide Sequence Number=SeqID_80259
atggcctccccttgtggcgtggttggcccgagcgaggtggtgactcctccgaggtcgaggtctcgtccgagacctggggtcgggcgaggcggagaccttcttccggagtcgaggtcgagtccgagccctagggtcgggcgaggcggagaccgtcttccgaggcgaggtcgagtccgagccctggggtcgggcgaggcggagatcatcgtccgagttgaggtcgagtccgagccctggggtcggtcagtggaggggcgaagtgactgcggtcacttcggccttgtcgactggaaagcgcgcgtcaggataaggtgtcaggcgatccttgcattgaatgctcctgcgatccggtcggcgggcgaggcgatctggccaaggttgcttctccgtgaagcctactcgagctgggcctcaggcgagtcgaaggtgcgcccgttgcttgaggagaccctcgggcgaggcgcgaatcttccttggtcttccgttcctgcccgaggctgggctcgggcgaggcgagatcgagtccctcgagtgggcggagccttaaccggaattgcgcccatcaggcctttgcagctttgtgctgatgggggttaccagctgagattaggagccttgggggtgatccgagtggacgcccatgccccgttcgataagggtcggctagtggcccagaggcgcgctccaaaagtacctgcaggtgatttgccggacctggtcccgttcgatagggtccgagggctcgatgcctccctttga

SEQ ID NO: 38481 - DNA, 198 bp, Zea mays
  Peptide Sequence Number=SeqID_80260
atggcgggcggaggagagctcaccggagctaagggaggggtgtctggccagcgagggcttgtgggtttcgctaactggatcaagagatatggaggggtgaagttaggtttgtctcactgccgaacactgagagaagatctcgggtttgacgtgtccagggcacgcgtcccaacgccatcttcaggcatgattctttag

SEQ ID NO: 38482 - DNA, 189 bp, Zea mays
  Peptide Sequence Number=SeqID_80261
atggcgggcggaggagagctcaccggagctaagggaggggtgtctggccagcgagggcttgtgggtttcgctgactggatcaagagatatggaggggtgaagttgggtttgtctcactgccgaacactgagagaagatcccgggtttgacgtgtccagggcacgtgtcccaatgccatcttcagcttag

SEQ ID NO: 38483 - DNA, 919 bp, Zea mays
  Peptide Sequence Number=SeqID_80262
atgttgatcctagggcaatagatcttgccatgagaatcactgaaaggatgtttctcaaaataaaggaagatgaggcgaagaacaaaattgaagaagaaaatgatcgatggagaccaaacgacgaatccacctcttcacaaggttcgtctttcaaatccacttctcatatgtgctttgtcgctaatgggagtgatagtgaaagcgaaagtgaggatgaggaggagcctaaaagtgatagtgaagatgagggtgctctccaacaattcttcgctcaactaagcaagaaaaatcggatgagcctgctcaaactcatgaaaagagcagaagaacaaaaagaaatgcttcataagcaagaagatttcctcatcagaaaaattgaagatttagaaaagttgaccaaagagcatgagaagctaaagtgctctcatgatgatttggtccaaagggcggcgcacagagcatcgccgaggcacaacgccggcgagcaggcagaccagcacacaggcgttcaaccgcagaaccgagcttcgctacgagagaagggaaacaaggctaacacactggtaggacccttaccggtgattacggcgtggaggcatccggccatggcgcggtgcggcatcgcggtggcagagcaacttcggcgagaaatcgccacgtatcccagcgagcctccccgaccacctgcatccgccgagtccaccgcaccggtgagatcccaagtcagcggtggcggcatcgccctttcccccgagcgcgcggagcgatggcggccgaggctatgcagcgaggagaatgagggggagacggcttggcccaacaccgttttatgcgcgcgagtccgtttgggggggagaagtgacgccagctgcgcccgcaaccgagtctggttcaacggccccgcgcggattcaagggag

SEQ ID NO: 38484 - DNA, 411 bp, Zea mays
  Peptide Sequence Number=SeqID_80263
atggcgcggtgcggcatcgcggtggcagagcaacttcggcgagaaatcgccacgtatcccagcgagcctccccgaccacctgcatccgccgagtccaccgcaccggtgagatcccaagtcagcggtggcggcatcgccctttcccccgagcgcgcggagcgatggcggccgaggctatgcagcgaggagaatgagggggagacggcttggcccaacaccgttttatgcgcgcgagtccgtttgggggggagaagtgacgccagctgcgcccgcaaccgagtctggttcaacggccccgcgcggattcaagggaggtcaacgaacgaactcccgcggatgcggagaattctgttgaggcagcgccgtgcgcgaggatcacttcttcattggatcaagttgggtgctcgataa

SEQ ID NO: 38485 - DNA, 582 bp, Zea mays
  Peptide Sequence Number=SeqID_80264
atggcaatcccccgtgaacagaggaggacctcaccggaattgcccccagtgactcccggggccctatccgctgacccaacacgcgccttaggcagaggagtatatggtgaacgtgatcgaggcaccgcgaactacggaagtgaatcaccccaaagggagggcgctgggtctaatatcgcggccgacgcggactcaagggggtcaacgaacgaactcccgcggatgcggggaattctgttgacgttgcgccgtgcgcgaggtagagcagctggtttagtagatggctatgagtctaatgagacgggtgggataggttatgtaacctatcatgtaggtcaagttgttgggtatggccgagttgatctaagtcaccaatttaggcatgtaattgtggacattactccacaactcatcacactcaatcaaagatccaaatcagacaagtatcataagaacaaaacattcaaattcatagatgtctataaaaatagttttatttttgttcctaagagtaggtctcctattccaaaaagtcactttaaccacaggatttcaaagtgtgaaatccaagtttgtctttag

SEQ ID NO: 38486 - DNA, 312 bp, Zea mays
  Peptide Sequence Number=SeqID_80265
atggacttgaggcgctccgttggtgaggatagagccgaagtgcggggcccacactccaaagatgtccgggtccgagcgtgcgcagtggggcactggcaagccgggcccagagatgtaattgtggacattactccacaactcatcacactcaatcaaagatccaaatcagacaagtatcataagaacaaaacattcaaatttatagatatctataaaaatagttttatttttgttcctaagagtaggtctcctattccaaaaagtcactttaaccacaagatttcaaagtgtgaaatccaagtttgtctttag

SEQ ID NO: 38487 - DNA, 267 bp, Zea mays
  Peptide Sequence Number=SeqID_80266
atgaggtctcctattcctaaagtcactttaagcacaggatttcaaagtgtgaaatccacatttgtctttagaacaaaaaggtttcgtcctacagtcaacattcctctgataccacttctgtcacacccgggttttaggggtccaaagcccgggcgcgaacataatcaccaggtgggagctcatgtgaagtgtaaggcttaccaaagaggatggttgaagctgagcattgcttttaaagttggtcaaaattttattagcaattactaa

SEQ ID NO: 38488 - DNA, 2409 bp, Zea mays
  Peptide Sequence Number=SeqID_80267
atgaaaaccagatcggcttcaagagcaggagcatggatgcccccgcaccaactcgccatttcctccgccgcgacaaggccctcctccactctctccgccgcagtcgccaggtgcagcagagctgcggccatcacggaccccttcgccatcgcggacgccctctccgccgccagttccgccccggcgtcgcagtccctgtccaccggatcgcagctccacgcgtccggcataaagctgggcgtcgttttcgccgacacctacacctcgaaccagctcctcatccactactccaagcgcgggcaactcgccagcgcgctggacgtgttcgacgaaacgccgagccgcaaccacgtcacctggacggctattgtgtccgccgcggcgcgcggcggggcgcctggcctgggcctgcggctcttcgcctccatgctcaggagcgggttctgccccaacgagttcgctctggctagcgcgctcggcgcttgctgccagtgggtggcggctgacgtgaagctgggcctctcccttcacggcctcgccgtcagggccgtcctgcatggaaacccttacgtggggagctcgctgatgctggtgtatgccaagcacgggcgtgtcgctgctgcggagcgagtgttcgcaggcatagcttccggttccagagacgtggcgtgctggaacgcgatgctggagggctacgtcgccaacggccatgggtatgacgcgacgaggacggtggccctgatgcatggatctggaatagcgcctgacatgttcacctacatttcggctgcgaaggcttcttggatcgcccgcgacttgtatttcgggcggcaggtccatggtctcgtcgtccgcagcgtgttggagtccaacaacacctcagtgatgaacgcactcatggatatgtatttcaaagcgggacagaaggaaaccgctgctgatatctttggcaagattcggtggaaggatactgtttcttggaacacgatgatatcaggcctggaggacgagagggcagctgcggactgctttgtcgacatggcacggtgcggctgcaggtctaaccaagttacgttctctgtcatgctgaggctgagtggcgcctccctcggccttcagatcttcggacttgcctaccgccatggctactctgacaacgttcttgtggcgaacgcagccatcaacatgctctcgcggtgtgggctgctcagctgtgcctatggctacttctgtgatctcggtgtccggaacgtcgtgacgtggaacgagatgatcgcgggctatggtctgcacggctgttctggagacgcgatgaggctcttccgcagcttggtttgcttcggagcaagaccggacgagttcacctatccagccgttctgtctgccttccaacaggaccatgatgcaaggaaccatgagcaagtccacgcaagtgttctgaaacaggggttcgcttcatgccagttcgtgtccacctcgctcatcaaagcaaaagcggcccttggctcctcagttctaggtccactgaagatcatccaggatgctggcgagatggatttggtgtcatggggagtcgccatctctgcgttcgtgaagcatggcttgggtcaagaggcactgtctctcttcaactcgtgcagagttgactgcccagagaagcctgatgagttcatcctgggcaccatcctgaatgcatgtgcaaacgccgcgttgataaggcagtgcagatgcatccattcgctcgttgtcaggacaggacacagcaagcacttgtgcgtgtccagtgctttggttgatgcctatgcgaaatgcggtgacatcactgctgccaaaggcgctttcgctacggtttcgaccaaggacgccatagtgtacaacaccatgctgacagcttatgccaaccatggtctgatccgtgaagtcctcagcctctaccaagagatgactcagcttcagttggcggctccaacaccagctacgttcgttgctgccatatcagcttgcagccacctcgggctagtggagcaggggaagcttctgttcagctccatgctgtctgcgcacggcatgaatcccacaagggccaattacgcatgcctgattgacctcctggcgcgaagagggctcctggaagaagcaacaggcgttatccaggcaatgccgttccaaccgtggcctgcagtatggaggtcactgatgaacggttgccggatccatgggaacaaagaactcggtctgcttgcttcggaacagatcctgaggatggcaccaaacagtgacggcgcatatgtgtcgctgtcgcatgtctacgctgaagatggagattggcggtctgcagaggacgccaggaggaagatggctgagaatcaagtgcacaaggcgcaaggttacagcagtcttcagatctag

SEQ ID NO: 38489 - DNA, 315 bp, Zea mays
  Peptide Sequence Number=SeqID_80268
atggcccctgccatcggtgccgaggcggaggcggctcgagaagtccccgtcaccgacgggatcaccgccaccatccgcgcttcgggcctccgccgaggcctcgggtcgggctggcgcccttggaagatggttggccgaggccccaggggtaaccggccgagccgcctgctcgggccggattcccggagaagtccctggaccgcgtcaccgtccgaggctgggtcggacctcgctgaaggtgtcgtcgatgccgagggtgctacagcccccttccagcgtgaagacccgagcctgcaggatcagattgtcttgtag

SEQ ID NO: 38490 - DNA, 900 bp, Zea mays
  Peptide Sequence Number=SeqID_80269
atgtcttctcgctcccttatgcatcgcgtctctccaccttccaagcccccagatgggggatacccgccgtcttttcgcctcatcgttggaggaacgcaactccgtgggagttggtacctttcagccatcgttcggcttcaaggattttcatcagccagcccggctgtacccccccaccggcggtcacccaagacggtgaccactagctcctgggtggggagaagcaagccgggctgcgatcttggtcccaccctcagcttcaaggatgttcatcatcctcgctggggtgggggccgggatgagccggcgctctacctcccgcgcgggttcgtgggtcaccctctcccgcggcgttcaagggagagggcgctcactggccctgcgggcggtccggacttcgacaacgcggggttggtcgacggcgggcgtcatcacctccagcgtgtcgggctcgtcggcttggctcccggcggcccctcctgctggagggcggctgccgcgccgtgtgcacgggaggaccacccaagatgtcgcgcgctgctagggcggcgttcgtgttctggggtggtcctgcctttgcaccgggatggcgccctcgcgcggaggccggcggaggcggctcgagaagtccccgtcaccgacgggatcaccaccaccatccgcgcttcgggcctccgccgaggcctcgggtcgggctggcgcccttggaagatggtcggccgaggccccaggggtgaccggccgagccgcctgctcgggccggattcccggagaagtccctggaccgcgtcgccgtccgaggctgggtcggacctcgctggaggtgtcgtcgatgccgagggtgctacagcccccttccagcgtgaagacccgagcctgcaggatcagagtgtcttgtag

SEQ ID NO: 38491 - DNA, 585 bp, Zea mays
  Peptide Sequence Number=SeqID_80270
atggatgtagcccccgagcttcgagcacatttaagtattcaatcaactcgaaggtcccaaaatcctgtcgttgtggtatttattctgcttctctggttagcaagtggaccgtgcttcaagcttgatgagaatccgatctgtgcactcaatgggtgcgcccaatgggtggatatgtacatcgtcttgtcaagagagcagttgcttgaggtgacggggcgtaatgatgtgcctgagtggttgatctaccgaatccagaaaaaccctgatggcgggaaagggaggaggcaagggccgaaagaaagccaagggcaagaaaagagggcctaccttcatgatctcgagcacgtcggcctcgatgactcggagcaggacgacgggtatgacaacgacgatgaaggcgacatagtcgacaaggatggtcgcgacggtggaaaaggcgacaacgacagtggcaaaggcggcagtggcggtggtgaaagcgacaatagcagcgatggcgatgacgggagggcaaagggcgtcagcggcggggcgaagggcggcagtggcgatggtgacgccggtggcgaggtgccaccgacttag

SEQ ID NO: 38492 - DNA, 564 bp, Zea mays
  Peptide Sequence Number=SeqID_80271
atgcgcctaggggtcccttttatagccccaaggcagctaggagccgttgagagcaattctggaaggctgatcttgccttctgtcattgggcgcaccggacagtccgagaatccgatctgtgcactcaatgggtgcgcccaatgggtggatatgtacatcgtcttgtcaagagagcagttgcttgaggtgacggggcgtaatgatgtgcctgagtggttgatctaccgaatccagaaaaaccctgatggcgggaaagggaggaggcaagggccgaaagaaagccaagggcaagaaaagagggcctaccttcatgatctcgagcacgtcggcctcgatgactcggagcaggacgacgggtatgacaacgacgatgaaggcgacatagtcgacaaggatggtcgcgacggtggaaaaggcgacaacgacagtggcaaaggcggcagtggcggtggtgaaagcgacaatagcagcgatggcgatgacgggagggcaaagggcgtcagcggcggggcgaagggcggcagtggcgatggtgacgccggtggcgaggtgccaccgacttag

SEQ ID NO: 38493 - DNA, 123 bp, Zea mays
  Peptide Sequence Number=SeqID_80272
atggagtatattgtctttcttggccacgtggcggccctggagccgtccacgttgtggggtcaggtctgtggtatctactatcgcctctgccacttgaggcataactggccagggcatcactga

SEQ ID NO: 38494 - DNA, 942 bp, Zea mays
  Peptide Sequence Number=SeqID_80273
atggagtatattgtctttcttggccacgtggcagccctggagccgtccacgttgtggggtcagggtactgacagtggcctccgggcccgcctcaggggaggatacgagcctgcaggtggggccaaagctggattgcaaattggcccgagcccccgtgccagaggttggggcgttgctttcggtggagacgaagaggcgcattaccgcgggcggtggcgtgctcctcacgcggcggtttgccttctccgcacacggaggccaacacccaaggagtatgacgcgtgggtctgggcccctgtgccagaggctgggcagctgctttcagcggaggtgaagaggcgcactaccgcagatggtggcgtgctcctcacgcagcgtggagacgaagaggcgcattaccgcgggcgatggcgtgctcctcatgtggcggtttgccttcttcgcacacggaggccgacacccaaggagtatgacgcgtgggcctgggcccccgtgccagaggctgggccgctgctttcagcggagacgaagaggcgcattatcgcgggtggtggcgtgctcctcactcggtggttcgccttcatcgcacatggggatcgacgcccaaggagcatgactcgtgggcccgggcccccgcgccagaggctgggtcaccctggcgtgcgtcgggcgagatcttctgcggcgtctcggggcccaccatggcccttgctagatcctcctgagcgcttccagcccaaggtggcactcaacttggtgtgcaacctgctcggatggggtgtgccgacgttcgccggaaggatctgtgtcggcgcctctcctcacggcgatctcaccgccgaagagttcgtgctcttcgtctccaacctccccagcgggctcgcgctgccgatttcgtctttcttcgtgctgctgctggaggagctcggcctccaatcttag

SEQ ID NO: 38495 - DNA, 369 bp, Zea mays
  Peptide Sequence Number=SeqID_80274
atgggccctatgggtgtgctactaacgctccctagtcgaagctgtgttcaggtccaggttccagccgaggctgcctcctgggggccattgccaactcttttagggtcgcgctggaagcgagcggccgccatctccatggcgtacgatgtcttgtacgacctcctgggtagcgtcttcagcagccgggccagcggtcaccgttggaggcagcaccgaagccatcaaagccaaagagatgggggcgcgaaggttggagccgcagctcagcctgctgtccaccttcacaaggctggtgaacatcctttccttcgaatgctggaggaagaagcgggaagaagcgtcgcccccacggacaccttgcagaggtag

SEQ ID NO: 38496 - DNA, 369 bp, Zea mays
  Peptide Sequence Number=SeqID_80275
atgaccttgctagaccctcccgagtgcttccagtccgaggtggcactcgacttggtgcgcaacctgctcggatggggtgcgccgacgttcgccggaaggatccgtgtcggcacctctcctcacggcgaccttgccgccggggagttcgtgcttttcgtctccaacctcccgagcgggttggcgctgccgatctcgtctttctttgtgctgctgctggaggggctcagccttcaacctcagcactttacgccctgtttcatccttcaggcggccatcatcgcctacctctgcaagatgtccatgggggcgacacttcttcccgcttcttcctccagcattcgaaggaaaggatgttcaccagccttgtga

SEQ ID NO: 38497 - DNA, 413 bp, Zea mays
  Peptide Sequence Number=SeqID_80276
atgaccgcggctggccacggtgtcgcgcggcccacggcggagaaccgaagtgcgacgagtgattgctcgagtcttggcggcgttcgacccaaatcgagggcacagacggcttccccaggtgaaggcgacactccacgactcgatttcgagagccgagaccccccaacgacagctatcctcggcggcggcgctctacggtgcttttcgctcggcgatgactacgcgatttctcaccttggtgtccggcttgcaaaggctatggctcagggccatggagtccttggtgcggacgcgagcgtggtgagcaggggctggggcgagtccgagctcaagaatcgcgaggatccgcaacgacccgatctccacggcgatggacgcgcggcgcgggtgattggactgacggtcgtgggcag

SEQ ID NO: 38498 - DNA, 417 bp, Zea mays
  Peptide Sequence Number=SeqID_80277
atgaccgcggctggccacggtgtcgcgcggcccacggcggagaaccgaagtgcgacgagcgattgctcgagtcttggcggcgttcgacccaaatcgagggcacagacggcttccccaggtgaaggcgacactccacgactcgatttcgagagccgagaccccccaacgacagctatcctcggcggcggcgctctacggtgcttttcgctcggcgatgactacgcgatttctcaccttggtgtccggcttgcaaaggctatggctcagggccatggagtccttggtgcggacgcgagcgtggtgagcaggggctggggcgagtccgagctcaagaatcgcgaggatccgcaacgacccgatctccacggcgatggacgcgcgacgcgggtgattggactgacggtcgtgggcaggtga

SEQ ID NO: 38499 - DNA, 413 bp, Zea mays
  Peptide Sequence Number=SeqID_80278
atgaccgcggctggccacggtgtcgcgcggcccacggcggagaaccgaagtgcgacgagcgattgctcgagtcttggcggcgttcgacccaaatcgagggcacagacggcttccccaggtgaaggcgacactccacgactcgatttcgagagccgagaccccccaacgacagctatcctcggcggcggcgctctacggtgcttttcgctcggcgatgactacgcgatttctcaccttggtgtccggcttgcaaaggctatggctcagggccatggagtccttggtgcggacgcgagcgtggtgagcaggggctggggcgagtccgagctcaagaatcgcgaggatccgcaacgacccgatctccacggcgatggacgcgcgacgcgggtgattggactgacggtcgtgggcag

SEQ ID NO: 38500 - DNA, 1146 bp, Zea mays
  Peptide Sequence Number=SeqID_80279
atgaccgcggctggccacggtgtcgcgcggcccacggcggagaaccgaagtgcgacgagcgattgctcgagtcttggcggcgttcgacccaaatcgagggcacagacggcttccccaggtgaaggcgacactccacgactcgatttcgagagccgagaccccccaacgacagctatcctcggcggcggcgctctacggtgcttttcgctcggcgatgactacgcgatttctcaccttggtgtccggcttgcaaaggctatggctcagggccatggagtccttggtgcggacgcgagcgtggtgagcaggggctggggcgagtccgagctcaagaatcgcgaggatccgcaacgacccgatctccacggcgatggacgcgcgacgcgggtgattggactgacggtcgtgggcagtggtaggtacatgaacggaagaacacaagacgatcattatcaagatctcaaaggtctcgatcccactgtaatgctcttgaacaccgaagctcctgacttgtacataaggcagaatcctgttccaaatgcctacaccttagcaatcaacgacaaaaaaccattcattgtcgttcacacaagccttgtggagctgcttactccaagggaattgcaggctgttttggctcatgagctgggtcacctcaagtgcgatcatggtgtttggctcacttttgccaatatactcacaatgggagcatacactgtccctggtttcggcatggttgctggctttctggaagagcagctatatagatggctacgagctgcagagctgacttgtgacagggcagctcttcttgtggtgcaagacccgaaggtagtcatctctgttctgatgaaattgtcaagaggttacagttttttcagattctcctgcagccacgggatggtggcggccttcgcgcgggcagcgtggctcaaggagtaccacgagaaggttagcatgacgctgaacattttggcctacctttcacctcttttgacgtgggacacaaaacaggtgtttgtttttgtggcagcagagtgtgagactccacaggatgcttttattcaagaaaagtcccttgggctcctcacccagaattttgtcaagctcttcttcaccatgaaggttgagacaatctcactttga

SEQ ID NO: 38501 - DNA, 762 bp, Zea mays
  Peptide Sequence Number=SeqID_80280
atggagtccttggtgcggacgcgagcgtgtggtaggtacatgaacggaagaacacaagacgatcattatcaagatctcaaaggtctcgatcccactgtaatgctcttgaacaccgaagctcctgacttgtacataaggcagaatcctgttccaaatgcctacaccttagcaatcaacgacaaaaaaccattcattgtcgttcacacaagccttgtggagctgcttactccaagggaattgcaggctgttttggctcatgagctgggtcacctcaagtgcgatcatggtgtttggctcacttttgccaatatactcacaatgggagcatacactgtccctggtttcggcatggttgctggctttctggaagagcagctatatagatggctacgagctgcagagctgacttgtgacagggcagctcttcttgtggtgcaagacccgaaggtagtcatctctgttctgatgaaattgtcaagaggttacagttttttcagattctcctgcagccacgggatggtggcggccttcgcgcgggcagcgtggctcaaggagtaccacgagaaggttagcatgacgctgaacattttggcctacctttcacctcttttgacgtgggacacaaaacaggtgtttgtttttgtggcagcagagtgtgagactccacaggatgcttttattcaagaaaagtcccttgggctcctcacccagaattttgtcaagctcttcttcaccatgaaggttgagacaatctcactttga

SEQ ID NO: 38502 - DNA, 549 bp, Zea mays
  Peptide Sequence Number=SeqID_80281
atgggggacttgtggagcaacataagggctgatctcgcaaagatgcaagccacgctccagaaggttgagcaagggctgctgcaaatcaaggcagcattgcaacatgagcagcaccagctagcgttgtctgcacggctccggacgtcgacggttgtgggcatacaagctgctgctcgtggcttccttgcacgacagagagtgcgggagatgcaccggcagatgctcgaggcagccttggtgacggttgacctcggcacacgtgggcgcgacctcaccctgttggacggccatcaacactggcaccgggccgctatctccaagtgcgagcatgtgcattgttggagagtcctgctgcatactacgattaaactgagaatcttgatcatcatcaacgccgacgatgagggagacggaagtgtgaccccctccgtcggcggagagatcttagaaacaacgatcgtcacatggcaagtaaggatctgcttcacagatgagaagattgcaacttcgtctcagaaacccataggtccaaagcacagaaacccatag

SEQ ID NO: 38503 - DNA, 1599 bp, Zea mays
  Peptide Sequence Number=SeqID_80282
atgcaagccacgctccagaaggttgagcaagggctgctgcaaatcaaggcagcagtgcaacatgagcaacaccagctggcgctgtccgcacggctccggacgtcggcggctatgctcgaggcagccttggtgacggttgacctcggcacacgtcggcgcgacctcaccctgtcggacggccatcagcagtggcaccaggccgctatctcgaagtgcgagcatgatacgtgtcccgcgggcgacgaacttcaactctacgacagcggcggtagggaagacactcacctcgtcatcaacaagggcgcactatttagcgccaccacattccgctaccgtccgccacgagggcgcctccgctggttattgttgcgacctattccaggtatagagaagcgcgcgagcttccctctagtctgcgttggagcccctcgcgaggattcccacacgaggaccaagctcctagttgggaaggaacttctatggccagaattggataaattgctccgccaggaagatgattcttcaactgcaccaactccttacacagctgctatcccagaatatagagttgtgtttgtcaaaccagaggatgacatagcaaatgtggctgttcggcgagagcttcatacaccagcttctgaccgatcctgcattcatttagagtttgatattgctggaactggcctaaaattgctgattagtcctctttacctatatagatatgaaactggagatcatgttggtgtctatgctgaaaattgcatcgaaactgttgaagaggcagaaaaactgctaggttattcaccagatactttattctctatttatgctgaccaagaggatggtaccccgctctgtgggggttctttgccacctcctttcccgtccccttgcacagtgaggactgcgcttacgagatatgcagatcttttgaattcgcctaagaagagtgctttactggcgctggctgctcatgcatctgattctaaagaggctgagcggcttagacatctcgcgtctcctgctggaaagaaggactatttgtcctcgcctgcagccaagatactactcaatatcttcctcaccgagcattcgactcccttggaagatagcaaagactgcagctgggctccaatttttgttaggcaatcaaacttcaaactgcctgctgatcctactgtgcccattataatgattggccctgggactggtctggcacctttcaggggcttcttacaggaacgactagctttaaaacaggcagaggtggaactgggccatgctgtcctcttctttgggtgcagaaatcggaagatggacttcatatacgaggatgagctcaataattttgttgatgccggtgccctctctgagttgatcgtagccttttctcgtgagggtcctacaaaagagtatgttcagcacaaaatggcgcaaaagggcggctacatttatgtttgcggtgacgcaaaaggcatggctagagatgtccatcgcacgctacataccatcgtccaggagcaggggtctatggacaacaactccaaggcagaaagctacgtgaagagcctgcagatggaagggagatacttgagagat

SEQ ID NO: 38504 - DNA, 351 bp, Zea mays
  Peptide Sequence Number=SeqID_80283
atgaaggccaagtcacaccttcaaccatatcaaggaggtacctgcaaaaattatgccacaagcaaggctgagtatactaatactctgctagacttacccgtgaccgcacttgtacccaccataaccggaatgggagactacgtcttaggtcgcgtgaggagggcaatctgcggacaggttcactcaggtattcgcacattaatccttattccaatttcttctcatagacaatgcatccccatggatccgtgtccacagaccatcatcattccgttatcaaaatggatacaaccaattcctgacctcgcgcgagtgctagaaaaatcactcgacttctaccgagatccctaa

SEQ ID NO: 38505 - DNA, 234 bp, Zea mays
  Peptide Sequence Number=SeqID_80284
atgaaggccaagtcacaccaacaaccattgatccaaaggagtacaatggatgaaggagtctcattagctgcaagaagcagacgattcgaatcgagttttaaccttgcaagacagcgtatccccatggatccgtgtccacagaccatcatcatttcgttatcaaaatggatacaaccaattcctgacctcgcgcgagtgctagaaaaatcactcgacttctaccgagatccctaa

SEQ ID NO: 38506 - DNA, 198 bp, Zea mays
  Peptide Sequence Number=SeqID_80285
atgaagaatcaatgggagaaaaccaaacgacacgtccagaaactgtcgagagagattcgttctccaccagaacttctttctaatcctctatttaagcaactagcacccaccaaagaacttgggtttttgtttgatgttcaaggatgttcttggcacggcaagagcagcaacaacaggagccggtgtaattatcgctaa

SEQ ID NO: 38507 - DNA, 330 bp, Zea mays
  Peptide Sequence Number=SeqID_80286
atggggaagcctggcccatcactcctcatgctcctcctctgccgagtgaccgcagttgtacccaccataaccggaatgggagaccacatctcaggtcacgtgaggggcaaagtctgcgggcaggtcactcaggatgaagaatcaatgggagaaaccaaacgacacgtccagaaactgtcgagagagattcgttctccaccagaacttctttctaatcctctatttaagcaactagcacccaccaaagaacttgggtttttgtttgatgttcaaggatgttcttggcacggcaagagcagcaacaacaggagccggtgtaattatcgctaa

SEQ ID NO: 38508 - DNA, 1623 bp, Zea mays
  Peptide Sequence Number=SeqID_80287
atgcgcaagggcatcctcacgggggccgcggccggcgtcgaggaggtggacatccaggggctcggcatgcaggagcgcaagaacctcatcgagcgcctcgtgcgcaccgccgaggaggacaacgagcgcttcctgctcaagctccgcgaccgcatggagcgggttgggatcgataatccgacggtagaggtgcgttttgagaacctgaacatcgacgccgaggcctacgtcggcaaccgaggtgtccccgcgatgaccaacttcttctccaacaaagtcatggatgtactaagtgctatgcacatcgtctctagcgggaagaggcatgtctccatccttcacgatatcagtggggtcataagacccggcagaatgtccttgctgcttggacctcctggatccaggaaaacaagtctacttctggctttggcagggaaacttgactccaatctgaaggtctcaggaagagtgacttacaatggtcatgacatggatgaatttgtccctcagaggacatcggcatacattgggcagcacgatgttcacgtcggcgaaatgacagtccgggaaacacttgccttctttgcaagatgtcaaggagtcagaacgcgttatgacatgcttactgagctttcaagaagggagaaagaagccaacattaaaccagatcctgatgtcgatgtttacatgaaggctatctccgtggaaggtcaggagagcgtggttacagattacatcctcaagattctgggtctggagatctgtgcggatacaatggttggagactctatgatcagaggtatctcaggaggacaaaagaagcatgtcacaaccggcgagatgcttgttggtccagctaaggcgctattctattctattactactatcgatggtgcccaaaagctgaacagagctgagcttgaagtcgcttgtgaagattttagcaacatcaacacttttcgtacatgtatcgtgttcaagggcatattatcaggcggggtcgagatcggcattgtctccactgtcatatcgtcgagcaaagactggtccaggagcgcagaaacatgcttcaagaaaaagtgtttattcttgttcgattacttcgattctaggactgtgattttagttcgattacttcgattctgggactaccaaaatacagataggggttacactgtttactttgattctaggactgccaaatgtctctactgtttgaaggcggtgtttattcttgtttattatttaccagatgtctctgtatgcttgattatgcaagtagattattcagcttatgtccataattcttcaagtctgcatatgactgcatcattcttcagccttctagactccttccacttctgccccctcggatacaaggacttcccagacttaggtaacacaacctcttctcttctttcaacatgttgtcatgtggtgcttgagttatggagagttgagctcatgaagcaggacaagagagccaaggtgttgtgccttcatggcttctgcacgagcgagagttttttgaagagtagatcaacaactggcactcttccactcgttatggatatgggtattgcgatgaggcctcatgagctatttgaaaacatttatgtatag

SEQ ID NO: 38509 - DNA, 705 bp, Zea mays
  Peptide Sequence Number=SeqID_80288
atggcgtgggcgtggtcacgggcggtcgcgggcgcgcgggggttcgcgcacgggcgtgctctgagcgcgcccccgggtgtcagcccgcgtcgaacacgtgggagctcgcttctgccatggttcaacggcagatttgagcaccttagcgtgcgtatcttggcaaagtcactgtgtacggtctcttccctgctccatatcctacctttttgctcttatgtccataattcttcaagtctgcatatgactacatcattcttcagccttctagactccttccacttctgccccctcggatacaaggacttcccagacttaggtaacacaacctcttctcttctttcaacatgtgtcatgtggtgctcgagttatgggttaaaccaacagatatctaaatggattttgagtgtttcagccatcgtattttattcatgcctaagacttgagaagatttcagagttattatgtgaggtctctgacaataactgtgtctatcggaacgaggtgcaccacactgctggggagcgaactgaggtcttgcaggatgtagcttctgatccaactcttcccagaaccaagactgtccgctgcaatctctgtgggcatggagaggctgttttcttccaggccgcaacaagaggggaggaggggatgaccctattctttgtgtgctgcagccctgattgtggtcatcggtggagggaatga

SEQ ID NO: 38510 - DNA, 1313 bp, Zea mays
  Peptide Sequence Number=SeqID_80289
caactggcgcgccggttgctcgacgcgtgggcctgggttccaggctggcgtgtcaggagtcggagaagcgcgtccatctggcgcggttgcatgccgcctgcatggctgcccgccccttctgcccgttggtctgggcgaaaatggggggtcgcctgggagggccttggagcgtgttggagaagactcggcccgcggtgcttgggggcgcacgtaggggagttgcttttaaaaggagggaggctcccttcgtaaggcaaccatgccttcttcctcccttaagcgtcgggtcttcccgtcttccaagcccccggatggggggtatccgccgcctttccgcctcctcgttggaggaacgcaactccatgggagttggtacctctcagccatcgttcggcttcaaggattttcatcacgcagcctggccataccccgccaccggcggtcacccaagatggccaagatggaagacgaggcgagtcggggggccgcctccgcgtgggtcggctgcccctttcttccccctgcgcccgggggtgaagggcgtccttgagccccacggagacttcctccagccatgccaggatatgcagggcgctaggggccctgggtccccatctccctgcctgaatggctggttctcgtcctcagcgggggggggggagcccttctgtcgtgacacctcccccaaggctgctgcttacgctgcttcgctgtctggggcaggggaggtggccgtcgcggttggaacgggcggcagcgagccgcccatcgttcttcagctactccgcaggccttccccttcggaggggggttcggggccgacgccaaagtcgatcagtcaaggcctcggatcgggctggcgcccttgggagccggttgaccgaggccccaggggtaaccggttgagccgcctgctcgggccggattcccggaggagcccctggaccgcggcggcgcccgaggctgggtcgggctttgctgaagacgtcgtcgatgccgagggtgctacagctcccttcggcgtgaagacccgagcctgcaggatccgatcatcttgtagcgtgtgcttcctgcggccgccgaggccagaagacaacaccctcgctgcacttgcgaagctgcgccttttttcctcctgtttcgagcatctggacttcgtcggtaacagggatgtttgtgtgagcaagagctgcttttcgcggaagggacgagtgaggtatccgtatcccagaggcgtgggaatccctcggctcggtcggccttgccgcttacgcgtactttcacccgtccatgaggccctgtccccgacttag

SEQ ID NO: 38511 - DNA, 1362 bp, Zea mays
  Peptide Sequence Number=SeqID_80290
atggggggctcggagcccggttccttcgcggagaaggatccctttcgggcaactggcgcgccggttgctcgacgcgtgggcctgggttccaggctggcgtgtcaggagtcggagaagcgcgtccatctggcgcggttgcatgccgcctgcatggctgcccgccccttctgcccgttggtctgggcgaaaatggggggtcgcctgggagggccttggagcgtgttggagaagactcggcccgcggtgcttgggggcgcacgtaggggagttgcttttaaaaggagggaggctcccttcgtaaggcaaccatgccttcttcctcccttaagcgtcgggtcttcccgtcttccaagcccccggatggggggtatccgccgcctttccgcctcctcgttggaggaacgcaactccatgggagttggtacctctcagccatcgttcggcttcaaggattttcatcacgcagcctggccataccccgccaccggcggtcacccaagatggccaagatggaagacgaggcgagtcggggggccgcctccgcgtgggtcggctgcccctttcttccccctgcgcccgggggtgaagggcgtccttgagccccacggagacttcctccagccatgccaggatatgcagggcgctaggggccctgggtccccatctccctgcctgaatggctggttctcgtcctcagcgggggggggggagcccttctgtcgtgacacctcccccaaggctgctgcttacgctgcttcgctgtctggggcaggggaggtggccgtcgcggttggaacgggcggcagcgagccgcccatcgttcttcagctactccgcaggccttccccttcggaggggggttcggggccgacgccaaagtcgatcagtcaaggcctcggatcgggctggcgcccttgggagccggttgaccgaggccccaggggtaaccggttgagccgcctgctcgggccggattcccggaggagcccctggaccgcggcggcgcccgaggctgggtcgggctttgctgaagacgtcgtcgatgccgagggtgctacagctcccttcggcgtgaagacccgagcctgcaggatccgatcatcttgtagcgtgtgcttcctgcggccgccgaggccagaagacaacaccctcgctgcacttgcgaagctgcgccttttttcctcctgtttcgagcatctggacttcgtcggtaacagggatgtttgtgtgagcaagagctgcttttcgcggaagggacgagtgaggtatccgtatcccagaggcgtgggaatccctcggctcggtcggccttgccgcttacgcgtactttcacccgtccatgaggccctgtccccgacttag

SEQ ID NO: 38512 - DNA, 711 bp, Zea mays
  Peptide Sequence Number=SeqID_80291
atgcatcaaagggttccaagcaactcctatgaacctaatgcacatttcactagacttaaagtgtgtgaaaagttggtccatcagcttgaccatgcggagcagtccacgcttggggtcgacttgactcaagctctccgcatctcgtggttaatcaacgaacgagcagcaggcgccgagctgaggaacaacggcgaggtcgcggtcaagccgggcgaggaacacgcgaccagcaccaagggcgattcacctgcgcaggggcgagctgcgcgcgacagtagagctggagcagggaacgtaggaagtggaggcgagctggactgctggccagtgactcacgacacggcgagcacgagcacagagaaagggaaagcgcagggccgagcagtgagccggcgcgggccagggaagaacaacgcttgcgcgggagcctggcaagggcacggcagagagcttcgacggcggccatggaggggctccgagctgtggtcgagaaacgggagcgcgacaccaggaagtttcacggcgccggagctggaggaggaaggagagcgggtgggctgggcgctggctaagggagaaggagctccggccggctggaagttggaggcgggctggggcagagaggagcggccggcgctggagaagatgggcgctgaacagggaacctgcgtgcagcacatggaggaagcagaaggagcagaggccggatga

SEQ ID NO: 38513 - DNA, 312 bp, Zea mays
  Peptide Sequence Number=SeqID_80292
atggggagcagggccgcccgcgcgggagcctggcaagggcacggcagagagcttcgacggcggccatggaggggctccgagctgtggtcgagaaacgggagcgcgacaccagggagtttcacggcgccggagctggaggaggaagaagagcgggtgagctgggcgctggctaagggagaaggagctccggccggctggaagttggaggcgggctggggcagagaggagcggccggcgctggagaagatgggcgctgaacagggaacctgcgtgcaggacatggaagaagcggaaggagcagaggccggatga

SEQ ID NO: 38514 - DNA, 420 bp, Zea mays
  Peptide Sequence Number=SeqID_80293
atgtgcatctgccactacgtcgcgcacctcctctccaccactgttgccgccctcctcaccgccatgaccacccgccgtgtcctggctccacaccgacaactactgcgccttatgcgagctcagccgcccggccccggtgagggcgtgctgcatccggtcctcgagccgaaccttgctggcggcggtggtgaacgacgcgcagtcacattcgtggggcggagctgccaccagctccgaagtccgtcgaagaggagagagcctcgtccgacctcgagacggtgcggtgaggttagacccggagcacagaggtatcgtcggtcgccaccgtcatgggcgagtcgttgctaccatcgcaccaggaacaaggctcatatcgtccaaagcttccaggatcctcaacaaaacaaggatgcagcatga

SEQ ID NO: 38515 - DNA, 180 bp, Zea mays
  Peptide Sequence Number=SeqID_80294
atggtgaacgacgcgcagtcacagtcgtggggcggagctgccaccagctccaaagtccgtcgaagaggagagagcctcgtccgacctcgagacggtgcggtgaggttctggatcctgaaggaggaagcgagtcctaagggaggaagcagagtaattggagctcgaattggagatgcgtag

SEQ ID NO: 38516 - DNA, 282 bp, Zea mays
  Peptide Sequence Number=SeqID_80295
atggaggccaagtcacaccatcaaccaatcatcctaaggagtacctgcaaaaattgtgccacaagcaaggctgagtatactaatactcagctagacttgcccgtgaccgcacttgtacccaccataaccggaatgggagaccacgtctcaggtcgcgtgagggataaagtccactgccagatagtgtttgctggaggaggtactcgcttggcgagcatctactggaccaccaaaaagagtgatccaagactctttggaaagcttagaaaaatccctacataa

SEQ ID NO: 38517 - DNA, 306 bp, Zea mays
  Peptide Sequence Number=SeqID_80296
atggaggccaagtcacaccatcaaccaatcatcctaaggagtacctgcaaaaattgtgccacaagcaaggctgagtatactaatactcagctagacttacccgtgaccgcacttgtacccaccataaccggaatgggagaccacgtctcaggtcgcgtgaggggtaaagtctgcgggcagaccaccatcattatgatatcaaaatggatacaaccaattcctgacctcgtgcgagtgctagaaaaatcactcgacttctaccgagatccctacttaataaagcagctactcgacctagcatactag

SEQ ID NO: 38518 - DNA, 1932 bp, Zea mays
  Peptide Sequence Number=SeqID_80297
atgatgaccgcgtcaaaaaagccaccccagagcactcgggctccgcgcccactactgatcagaggttcgaaggctggcccctcggaagggttcgacagcctcctcagagcactcgggctccgcgcccactactggtcagaggttcgaaggctggcccctcggaagggttcgacagccgcctcagggcactcgggctccgcgcccactactgatcaggggttcgaaggctggccacccgaagggttcgacagccgcctcagaacacgcagagcgagggatgactctgggtacgtccgatacatggacgaggctcgggctacgctcccgaggtaccctaggacatttccgagaccagcaggagggaccataattaggggtaccccaaaactcctaaactcggctggtaaccaccatcaacacaagctgcaaaggcctgatgggcgcaatacaggtcaaagctccgtccactccagggacacgatctcgcctcgcctgagcccagcctcgggcaggaacagtagacccatgtggattcacgcctcgcccgaggacctcctcaagcaacgggcgcaccttcgactcgcccgaggccctgctcgggcaggcttcgcagtgaagcaaccttggccagatcgcctcgccaaccgaccgtatcgcatgagcattcaatgcaaggatcgcccgacaccttatcctgacgcgcgttcctcagtcggcagggccgaaccgagtccagcctcaggcgccataggaagctccgcctcgcacgaccctagggctcggcccccgcctcgacctcggaagacaatctccgcctcgcccgaccccagggctcggactccgcctcgacctcagaagacggtctccacctcgcccgaccccagggctcggacccagcctcgacctcggaagacggtctccgcctcgcccgaccccagggctcggactcagcctcgacctcggaggagtcaccgcctcgcccgatctttggctcggaccgaccacgttacaggggggcacatcattaccctacccctagctagctcaggctacggggaacaagaccggcgtcccatctggctcgccccgggctcaagcgctcctccgacggccacgacatcacatgaacagggcactaacacctctccgacagccatgccggcatggccctcgtacgagagggtggccgcgtgggaggacgggctgacgagcaggctctctccctctctcgcgaacgcttggaggagcaggggcgacgcagcgacacgggacggtacggcggggcaggacggcgacgcgccggccagagctgcgacgagtgtggctgctgcataccggctgtttggttcgtgcacgccggcatgcaactacatgcatggagtattagagcagtccatgtttggttcagatctctgcccatacaggtttgtcacacatgcaaaaagtgttgttcggccagagctaactggccgtcacctgtcggcaagcttcggcggcgccgggtccggtgaggaagcgaatggccacagttcgttccatgccagcttccaccagcagcagcaccctatcatagttcaacatggccataaaaaactgaaacgcttggattataaatggacggaggagccggccgctctagttcatcatctccgcattccactattagcagcacacttctcatcagccatgaagctcgtcctgtgcttctgcatctgtgtcgttctcgtcatcgcctcgtcgccggtcccgctctctgatagccgccctgcgatggggcgacgctggctgcgagacgaagttgtcattgccaagggccctgaagggaacacgacctctgcctcagcctctgcctggtcggaggaggcgccggggataccgtacgacgggtcgaagaggctcagccccggtggtcccaacccgcagcatcactaa

SEQ ID NO: 38519 - DNA, 243 bp, Zea mays
  Peptide Sequence Number=SeqID_80298
atgtctcggctaatgggcttgttggaggctaccaagatcaccctggataacaaggaggaacttgtggtagacctatccagtgagatgatggaaaaggacctccaggagattcaggacatggaggccgacgaagatgttgacatcaagggaggagtggagccggagcctacatccagtctggacactgctggctcagggagacccccttcccccgagtcatgtgttgcctcgtttgctcattag

SEQ ID NO: 38520 - DNA, 510 bp, Zea mays
  Peptide Sequence Number=SeqID_80299
atgtggaaggatcgagtggagcatgccaaggatgtgtgggctctctacccagggcagaccgctcacctgacggtgcgatgcatgaatgccctgtaccgcctgcaagcggtgcgaggagaggcaatgtctcagctaatgggcttgttggaggctaccaagatcaccctagataacagggaggaacttgtggtagacctatccactgagatggtggaaaaggacctccaggtggagcagatggccacccagatccaagagcttgaggagctagtgggagccagggagaacaccatcgaagttctcgaggatcagcttataaacactcagctgcaacttgaggaagctaaccatcacttggatatgcaccatcaggagattcaggacatggaggccgacgaggatgttgacatcgagggaggagtggagccagagcctacatccagcctggacactgctggctcagggagacccccttcccccgagtcaagtgttgcctcgtttgctcattag

SEQ ID NO: 38521 - DNA, 2964 bp, Zea mays
  Peptide Sequence Number=SeqID_80300
atggtgtccagatcctactcgaacctcctggagctcgccgccggcggcagcggcggcgagccgctgccgtcgctggggcgccgccggataccgcgcgtcgtgacggcctccggcattgtgccggacctcgacgtctccgacgccgcctccgccgccgaccagtcctcccacgcgccgcgggagcgcgtcatcatcgtcgccaaccagctccccgtccgcgcctcccgccgcgccgccgccggcgccggcggcggcgggtgggacttcgcgtgggaccaggacagcctcctcctgcaggtcaaggacagcctccgcgcgcaccacggccgcgcggacgtggagttcgtctacgtcggcggcctccgcgacgacgtgcccccagccgagcacgaccaggtcgcgcacgacctcctcgagggcttccgctgcgttcccaccttcctgcccgccgacctccgctcccgcttctaccacggcttctgcaagcagcagctctggccactgttccattacatgctgccactgtcgccggagctaggcggccgcttcgaccgcctcctctggcaggcctacgtgtcggtcaacaagatcttcgccgacaagatcctggaggtgatcagccccgacgaagacttcgtctgggtgcacgattaccatctcatggtgctccccacattcctgcggaagcgcttcaaccgggtcaagctcgggttcttcctccatagccccttcccgtcgtcggagatctacaagaccctgcctgtgcgtgaggagctgctccggtcgctgctgaacgccgatctgattggcttccacacttttgattatgccagacacttcttgtcgtgctgcagcaggatgctcgggctcaagtatgagtcgcagaggggctacattgctctggagtactatggccggacagttactatcaagatcttgcctgtgggagtacacttggagcagctacggtcagtcctcaacctcccggagcttggggtcaaggtggccgagcttctgaaacagttctgtcatcggaaccgtctgctgttgcttggtgttgatgacatggatatcttcaaaggaattagcttgaagcttttggcgtttgagcagctcctaatgcagcatccggagtggcggggaagggtggtgcttgttcagatcgccaatccagcaagggggcggggaaaggatgtgagggaggtacaggaagagagcgatgcaatggtgaggcgcatcaacgacgcgttcgggcagccaggttaccagccggtgatactgatcgaccagcctctgcagttctatgagaggatggcttactatgtcgtcgcggagtgctgtttggtcactgcagtgagggacgggatgaacctgatcccatacgagtacgtaattgctcgacaagggaatgagaggatagatagtattctaggccttggtccggcttcaaggaagaagagcatgcttgtcgtgtcagagttcatcggctgctcgccctccctgagcggcgctatccgtgtgaacccttggaacatcgattcagtagccgacgcaatggactacgcgctggagatgccggaaggggagaaggtgttgagacatgagaaacaccacagatacgtgagcacgcacgacgtcgggtactgggcgaacagcttcctgcaagatcttgagcggatttgcctcgaccataacaggaggcgttgctggggcatagggtttgggctgaagttcagggttgtggccctcgacccaaacttcaagaagcttgcggtggagcacttggtcttggcctaccggaggacgaagaagcgtgtcattctcttagactacgatgggacgctgatgccgcagacttcgctcggtaagagtcctacctcaaggacgatagacatgttgaacagcctttgccgcgacaggaacaacatggtcttccttgtgagcgcaaagagccggatgactctgaacgaatggttcttaccatgtgagagccttggactagcagctgaacacggctgcttcctcaggctgagaagagacgcagaatgggagacatgcgttccggtgatagactgcagctggaagcagatcgcagagcctgtgatgaagacctataccgagactacggacgggtcgactattgaggacaaggagactgccatcgtgtggtgctacgaggacgccgatccagatttcggatcctgccaggccaaggagctccacgaccatctggagagcgtgcttgcaaacgagccggtctcagtgaaagctggacccaacctcgtcgaggtgaagccacagggcgtaagcaagggcctggtggcgaagcggatcctgtcgacgacgcaggagcggggcgacgccgacgacgacctgccggacttcgtgctgtgcgtgggcgacgaccggtccgacgaggacatgttcgaggtgatcgcggcggcggcggccgcgaggggcgtgtcctccctgcaggcggaggcggaggtgttcgcgtgcacggtggggcgcaagcccagcaaggccaagtactacctggacgaccccgcggacatcgtgcgcctcgtccagggcctcgccagcgtctccgacgacgaccagacgcacgccccaccgccgccgcctccctcggcggcgacgacggcggcggacaccgtgccgagggtgagggtgtgctggatccagtcctcgagcgaaaccttgctggcggcggtggtgaacaacgcgcagtcacagtcgtggggcggagatgccaccagctctgaagtccgtcgaagaggagagagcctcatccgacctcgagacggtgcgatgaggttagacccggagcacagagccgctttccccttccgaagcgtggaccaggcactgtctatctcctacccgcgtgcctcagccgcccacctccgcaacgactgggtctccatggccgacttctgcgcgggtggcgcggatagcgcggtg

SEQ ID NO: 38522 - DNA, 243 bp, Zea mays
  Peptide Sequence Number=SeqID_80301
atgggcattgtacataaaacaaaaaatgtgaaatattattgcagagtaaaactgaagccccaagatggtttgtttgaagggttcagaatctcaatcactctcatgttctctgcctccatccatgtaattatggtgatccttccaggtttgtttgaagggttcagaatctcaatcagcttcaccaagtcactggggttcattttgtcgctcacctacattccaccctactccctgccaatttga

SEQ ID NO: 38523 - DNA, 642 bp, Zea mays
  Peptide Sequence Number=SeqID_80302
gtgagcgacaaaatgaaccccagtgacttggtgaagctgattgagattctgaacccttcaaacaaacctggaaggatcaccataattacatggatggaggcagagaacatgagatacagtgatctcagcaataacaatctcaacggcgatcttccatatcagcttccaccaaacgtggttgaattaaatttgggcaagaaccacctaagcgggcagttgacggatatgttttcacagcttccaaagctctcaacattgaatgtggagagcaaccaatttagtggtcatatagatgttctagcgaaacttcctctcgaggatctacgtccacaaccagtggtgcacggttctgccaccatcctccccaccgccgccgctcgacagcggtttcctcgcatcccgcccgcccgcggcgctcctttccatcctcgaatcaagcagtcgcggcttccttctatggcgctcctttccatcctcgaccgcggtttcctcgccactgcgctccgtctctctcgccctttccggatcactgccccccgccctctctctcgcttcctcttctcccaagatcccatccccgatgtctctcgctccgccgcggtggatcccttccccaaagccttctattccccggatccatga

SEQ ID NO: 38524 - DNA, 2196 bp, Zea mays
  Peptide Sequence Number=SeqID_80303
gataaacaagcccttcagaggcttactgaggcagcagagaaagctaagatggaactgtcaacgctgacacaggcaaatattagcctaccattcattactgctactgctgatgggccaaaacacatcgaggcaaccctctcgagagccaaattcgaggaactatgttcagaccttatagacaggcttaaaactcctgttaataatgcactgagagatgccaagttgtctctcagtgatctggatgaagttattcttgtgggtggatccacccgaatccctgcagttcaagaacttgtgaggaagcttactgacaaggatcccaatgttacggtcaaccctgatgaggttgtttctcttggggcagctgtgcagggcggggttttggcaggagatgtgaaagatgtcgttcttctggatgttactccattatctcttggtttggagacattgggtggagtgatgacaaagattatccccaggaataccacactgccaacctcaaaatcggaggtattctcaacagctgcagatggacagacgagcgttgagattaatgttctccagggagaaagagagtttgttagggacaacaagtcccttggaagcttccggttggacggaatccctcctgcacctcgtggtgtcccacaaattgaagtgaagtttgatattgatgcaaatggtatcctctcagttgctgccattgataagggcactggaaagaaacaggacatcaccatcactggtgctagtacgctacctaaggatgaggttgagagaatggtagaagaagccgataagtttgccaaggaggacaaagagaagagagatgcaatcgacaccaaaaaccaggcggactcagtggtctaccagactgagaagcaactgaaggagcttggcgacaaagtccccgctcctgtgaaagagaaggtggatgtgaagctccaggagctcaaagacgccatttctggtggatcaacacagagtatgaaagatgccatggctgctctgaaccaggaggtgatgcagattggccaggcaatgtataaccagcctggtgccagtgctgctgggcctactcctggtgctgaggccggacctacgcctggtatttacctatcggggaccataattaggggtaccctcaagacgcctaattctcagctggtaacccccatcagcataaagctgcaaaggcctgatggggctcggactcgggctaagtcccggaagacggcaaactccgctccgcccgaccccagggctcggactcgggctaagtcccggaagacggcgaactccgctccgcccgaccccagggctcggactcgggctaagtcccggaagacggcgtactccgctccgcccgaccccagggctcggactcgggctaagtcccggaagacggcgaactccgctccacccgaccccagggctcagactcgggctcagccccagaagacgacgaactccgctccgcccgaccccagggctcggactcgggctcagccccagaagacgacgaactccgcttcgctcgaccccagggctcggactccgccccggcctctgccgaacgacctccgcctcgcccgacccaggggctcggactcggcctcagccacggaagacagactcgatctcggcttcggaggagcctccacgtcgcccaacctagggcgcagaccagccacgtcaacaggaagcgccatcatcaccctaccccgagccgactcgggccacagagaacaagatcgctctcttacggaagcaggaggacgtcagcaaggactcaaccgctccgacagctgtccctccgccaggctccgttgctcctccgacggccacgacatcacaccagctgggtgccaagatctctccggctgccacatcggcatggccctcttagagagggttggccgcgcggggacgaggacgggacaggcgctctcctggggccgctcgcttccctcacccgcgtggacgcttgtaaccccctactgcaagcgcacccgacctgggcgcgggacgaacacgaaggccacgggatttccacctctctcacgtccatctccggccgcctcgcttccccccttcgcgctcgcccacgcgctcgacccatctgggctggggcacgcagcgacattcactcgtcggcttagggacccccggtctcgaaacgccgacattacctaa

SEQ ID NO: 38525 - DNA, 330 bp, Zea mays
  Peptide Sequence Number=SeqID_80304
atggggagggctatcaataagactatcatggttgtggaattgatcaagaataccaccactggatctactgatattactgatatgtgggagccattggaagaaggcctacttctgcttgagacaacaagacatgtctctatgatcactataactctttcaaagaaggagctggacacatcatctatcggacaaggcctaggacctctcctccccgatgggatccttcccgggagtgagatccaggcgccgccggcaaactccgcctatcctgcggacgcgtggactatctggctcgtcaggcagggaaccatcccttgcaccacgtcgtag

SEQ ID NO: 38526 - DNA, 639 bp, Zea mays
  Peptide Sequence Number=SeqID_80305
atggcaccaaaaggctttgtctattgtttttgttgcaacttgcaacttctgcaacattataggaaatcgcaagagctttttgatgtgcccatgaaaacccaaatggatgtggcaatactattactgtcaacatgttgccatttttgtcatatggtccatgacaaaggttctgatgaggttgtattcaaggccacggggagggctatcaataagactgtcatggttgtggaattgatcaagaggaggattgttggcctccatcagaataccaccactggatctactgatattactgatatgtgggagccattggaagaaggcctacttccgcttgagacaacaagacatgtctctatgatcactataactctttcaaagaaggagctggacaaatcatctatcggaagcacatgtgtctatggtgatgcacctaagggtccacaaatacgagaccttagaagaggagttgaaattgtcattgcaactcctggccggttgattgatatgatggaagttggtcacacaaacctacgtagagtgacataccttgtgttggatgaggcggaccggatgctagatatggggtttgagccccaaattcggaaaatagtagcacaggtaatcataggctcactgtaa

SEQ ID NO: 38527 - DNA, 774 bp, Zea mays
  Peptide Sequence Number=SeqID_80306
atggcaccaaaaggctttgtctattgtttttgttgcaacttgcaacttctgcaacattataggaaatcgcaagagctttttgatgtgcccatgaaaacccaaatggatgtggcaatactattactgtcaacatgttgccatttttgtcatatggtccatgacaaaggttctgatgaggttgtattcaaggccacggggagggctatcaataagactgtcatggttgtggaattgatcaagaggaggattgttggcctccatcagaataccaccactggatctactgatattactgatatgtgggagccattggaagaaggcctacttccgcttgagacaacaagacatgtctctatgatcactataactctttcaaagaaggagctggacaaatcatctatcggaagcacatgtgtctatggtgatgcacctaagggtccacaaatacgagaccttagaagaggagttgaaattgtcattgcaactcctggccggttgattgatatgatggaagttggtcacacaaacctacgtagagtgacataccttgtgttggatgaggcggaccggatgctagatatggggtttgagccccaaattcggaaaatagtagcacagtctggactgcgcgctaaatcccagaatgtgcaggggctaactcagaagattcaccagactctggggctctttagcaaattggcacggcgaaggggtatctgcgcttcagagccatcggatccaagtcctgcggccatgattagatcctaccgttga

SEQ ID NO: 38528 - DNA, 471 bp, Zea mays
  Peptide Sequence Number=SeqID_80307
atggaggagagcacctcctcggcctggcgcgcgacccagcggctgaggaggcgcgactcccgcctctgcctgcgcaccgccgacgactcgacctcgccgtattcacgcagaggacgccctggatggtggatccgatgcattccatggcctgccctatggcgtcaaggcgacatgttgcgccgaggtgtatttttcgtatttgtatatattatgttagattgtatctcgcagcttctttttcagacaataatagcataccttctgtcaccacaggccccaaaatacaatggcaatgactatctaccaatggacatcgtggagctatcttccgatcatttgatagagaataagcctttgctgctaaaggatgtcaagttccaaaacgtacacggtggatgtggcaatactattactgtcaacatgttgccatttttgtcatatggtccatgtgtgtctcctttcgaaaattag

SEQ ID NO: 38529 - DNA, 716 bp, Zea mays
  Peptide Sequence Number=SeqID_80308
gcgtggcgaactgcgagctcctcgcctctagtgccatagagtgcaccagagtggcggagccaaagatgatgccacagggacaactcctcttgcgcgcaggcgccagacatggtgatgttgtaatcgcggcgtcgagggacactatgcggatctctagcggtcccatggagtggtcaaggctccggcaccgccggcagaggcgggagtcgcgcctcctcagccgctgggtcgcgcgccaggccgaggaggtgctctcctccatggagcgcgaggtcgagcgccacaaccgcgaggccgagctcctcgcgctcgcgcgcctccacccggcgccctccctcaacgcgccctcctcgctcctgcagatgtggcgcgagctcgagcacccccgcaccgacgccgcccaccccttcgaccgcgagccttacccggacaacgccgaccgtgaccgcgagcgcgtgcgccagatcaaggggatgacagagaaggggatgacgggggcgcgggcagtagcacggtgtcgcccatgtgcacgacgagggggtacactggtatcgcggctgtcgtggcggggatggcggcgggcgggcgggcagttcacggagatggagccgcggcgggtgattcgcgggtggaggcgcagcatgcgatttgcgggtggaggcgggttccgcggtgggggaggcacgggattcgtggcgggggaggcgcgggcgtga

SEQ ID NO: 38530 - DNA, 561 bp, Zea mays
  Peptide Sequence Number=SeqID_80309
atgtggagtatttacttttctgggaattcagtaccccatggatgtgtatgggtatacagacatgggaatactgagaagtgtaatgtacttgtaacgacgcacctacgctcaggtgtcccccattctttaggtaacctattaaggtcttatatggtgtttgctcttgtgcttaatgtgtcgatagaagacgtcgtctctattggtggacatttctcgattagcctaaggcaatacatgttatgtccactagagaaacaacatcctgagacactcgccttaagtggaaatgtctcacgattatcgctgctgttgaacccgtcctcacttgctcgtaacttcgtcatcgccagagccctcactagattcgtgtcctcgccagctcgcttcatgtttaatctcgttgtcgtcctacgtgtcatcaagaaattccaagagtcaagtgaagacgaagctaaccgagtaatattcaccgactgcgcgacaaaaagctcggacatcctgcgcgactcaagttcgattcgtcaaaattattcagacgaggaaaagatcttcagcagttga

SEQ ID NO: 38531 - DNA, 186 bp, Zea mays
  Peptide Sequence Number=SeqID_80310
atggcgagagtggcacgtaccctcctggcaaaggatcgcctaaaaggggtggttgcgatgtggagtatttactttttcgggaatttagtaccccatggatgtgtatgggtatacagacgtgggaatactgagaattataatgtacttgtaacgacgcacctacgctcaggtaagaaggtacactaa

SEQ ID NO: 38532 - DNA, 333 bp, Zea mays
  Peptide Sequence Number=SeqID_80311
atggaggaacgcacgcagggcgttggggcctgggcgtccatggctgctggcttcgtgtgtgccggccatggagagaaaggagtggcgctgggcagaggatggagtagagagcgtcagccatgggcgacggcgagctcacagctcgagctagggccggtctggccatggcagggctcctgccggcatccccgcgcacgagtagagaaggccgcgaccaagggaagagcagggggcggcgccatggttggagcagagggagggactcgcgcccatggagcagggagagcgctcggccatggaggtcgctgccctggcgctagcgtgctgcggtag

SEQ ID NO: 38533 - DNA, 489 bp, Zea mays
  Peptide Sequence Number=SeqID_80312
atggacgacggcgagctcgctgcggctgctgcggggaagagaggagcagggggcgtcggcatggagcaggggctcggcatgggagagcacccgcgcgcagccaaggaagatgaggaagcagagaggggcttcggcttccatggggaagaaggggagccggctgggtggaaaacgagtagggcgctgcagggaaggcacgactgctcctcatccaagcaaggcgagcaacagcaggggcgccatgggaggggaggagccgaggtccccattgcagccacttgccagggggaggaagaagggcgccgctggcctttgcgagaaattctgggcgccatggaggaacgcacgcagggcgttggggcgtgggcgtccatggatgttggcttcctgtgtgccggccatggagagaaaggagtggcgctgggcagaggagcgtgggctgcctccatgagggagaaggaggcagggaagaaagaaggtggcggctag

SEQ ID NO: 38534 - DNA, 1158 bp, Zea mays
  Peptide Sequence Number=SeqID_80313
atggcggcagcagacgggcggaaacggcggtcaaatcgtctgtgggctcacgtcccctcctggagcagcaggggagccctctcccacgggaccgggaaaggggacatttcgaaagggatccttctccgcgaaggaagcgagccccgagccctcctactgatcaggggttcaaaggctggcccctcggaagggctggcccctcagaagggttcgacagccgcctcagagcactcgggctccgcacccactaccgatcaggggttcgaaggctggcccctcgaaggcttcgacagccgccccagagcacgcagagtgagggatgactctgggagcgattttgtaacggaatcccaccagagggaggcatcgagccctcggaccctatcgaacgggacctggtccggcaaatcacctgcagagactgatggacatgatttaggtcaaagcttcgtccactcaagggacgcgatctcgcctcgcccgagcccagcctcgggcaggaacagtactcctagacgaagtcacgcctcgcccgaggacctcctcaagcaacaggcgcaccatcgactcgcccgaggcccagctcgggaaggcttcgcagtgaagcaaccttggccagatcgcctcaccaaccgaccgtatcgcaggagcattcaatgcgaggatcgcctgacaccttatcctgacgcgcattcctcagtcgacacggccgaactaagtctagcctcaagcgcaacaggaaactccgcctcacccgacctcagggcttggcccccgcctcgacctcagaaggtggtctccgcctcgcccgaccccaaggctcggcctcaaccttggcctcggaaggtggtctccgcctcgcccgaccctagggcttggcctcaacctcggcctcggaagacggtctctgcctcgtccgaccctagggctcggcctcaacctcgacctcggaaggaatcgcgtcctcgcccgaccccggcctcggcctcaggaggagtctccgcctcgcccgaccttgggctcggaccgaccacgccacagggggctacggggaacaagaccgacgtcccatctggctcgccccgccccgacagctgtgcttctattgggctcaagcgctccttcaacggccacgacaccgcgtgcatagggctctag

SEQ ID NO: 38535 - DNA, 1104 bp, Zea mays
  Peptide Sequence Number=SeqID_80314
atggcggcagcagacgggcggaaacggcggtcaaatcgtctgtgggctcacgtcccctcctggagcagcaggggagccctctcccacgggaccgggaaaggggacatttcgaaagggatccttctccgcgaaggaagcgagccccgagccctcctactgatcaggggttcaaaggctggcccctcggaagggctggcccctcagaagggttcgacagccgcctcagagcactcgggctccgcacccactaccgatcaggggttcgaaggctggcccctcgaaggcttcgacagccgccccagagcacgcagagtgagggatgactctgggagcgattttgtaacggaatcccaccagagggaggcatcgagccctcggaccctatcgaacgggacctggtccggcaaatcacctgcagagactgatggacatgatttaggtcaaagcttcgtccactcaagggacgcgatctcgcctcgcccgagcccagcctcgggcaggaacagtactcctagacgaagtcacgcctcgcccgaggacctcctcaagcaacaggcgcaccatcgactcgcccgaggcccagctcgggaaggcttcgcagtgaagcaaccttggccagatcgcctcaccaaccgaccgtatcgcaggagcattcaatgcgaggatcgcctgacaccttatcctgacgcgcattcctcagtcgacacggccgaactaagtctagcctcaagcgcaacaggaaactccgcctcacccgacctcagggcttggcccccgcctcgacctcagaaggtggtctccgcctcgcccgaccccaaggctcggcctcaaccttggcctcggaaggtggtctccgcctcgcccgaccctagggcttggcctcaacctcggcctcggaagacggtctctgcctcgtccgaccctagggctcggcctcaacctcgacctcggaaggaatcgcgtcctcgcccgaccccggcctcggcctcaggaggagtctccgcctcgcccgaccttgggctcggaccgaccacgccacaggggggacccccccgaggtcgaaacgccgacaaaatgcttttaaattatgtcaacattctttga

SEQ ID NO: 38536 - DNA, 336 bp, Zea mays
  Peptide Sequence Number=SeqID_80315
atggaagctacgagtggccaaaagcctagtgacattgaggtctaccaggagggccacaaaggaccaaaccctaacaaccctgaccagctctgcagccagacatccacggatcgaactggaggaggcggcgggggcgcatccggtcgcggtcgaggcagcagagcgaacgccggcggagggtcagagttagtctcggatccaggatctgcggtagaagctggagctggtactgactcggactggggccgcgctgcaggagctgccggaacagaagtggtcacagatactgccacagcagtagtggtaacagcagatgctggtggcactggcggctga

SEQ ID NO: 38537 - DNA, 2030 bp, Zea mays
  Peptide Sequence Number=SeqID_80316
atgtccggtggttcaccggacagctactgtgcgctgtccggcgatttctccccgtcgtcggcgatctccctcctctccggcgatcctacggcgaccacgtgcttctctccttccctctctgtgaccttgattgcccatgtgccgtctcctgtcctgcctggatcgtcacctctcgttcatcagttcaggatgccgcgcacgaagaatgtgtcggcgctagggggaggcgatgatgaggatcctcgtcgtcccttcaggcaggtcaagggcaagacagtttatttggagcagcaggaaggccgcaagaagcggcgtacggacagagcagcccgtgcactggcatcagctgcagcagccgctgcgcaggccgagcttggagatcagccgcagactccgtcagatcagattgcataccgtgttcgtcgtctcgcctcccggcctcgctcctccactcacaccactgcttccactccaccacccactctgcctgctcccgtcacccctgttgcgccatccaccaccatagccatacccgctacctccactacgccatcttccactgctcctcctcccgctcccgcttcagctcctcctgtccctccacctcgtttccaggagcgcgatgagactaaggtacaaccacttgttgcggatcccagactttttgaccttcagcgtgctatagcggcacgggtacgtaggttcagatatgtaaccgtggagtcttggttaccagctcagagggaccctgcagcagttgacctattcagcacacgtattcaggagtcgtttttcagagctcagatgtctgctcagatagctctgcgagtgcaccggcttttggatcttccagcctttctgcttgcagccggtgctaactctgaggcgcacctcacatatctgcctggccttctgacccttttgactaccagcggcaggtatgttgaggagtgggtacgagtcttctacgcctctgtatggatagacccggatcatcactggatgaggtttcgttttgagcgagaggatgtcaccattactgccagtcagatccgccagctctttggatttcccgagtcgacgactcgtcttcacagcctctgctacggcacttctgaccctcctcgtcgccctcacggcggtgtggctccgggtacagctcacgtcgcggctctgtttcgcccgcccttttcagatgggtcgcgacgttcaccggcagactttactacagcagccaagtacttatttgagcttatcagacggactcttctgccgaggatgggatacagggaggctaccacacatattcagctctggctccttggtgccctggtctcccactctgagtttgacgttgtggatttccttatttgtgagatcgaggacaccgttttggatgggattcttgctcgtagacagttgccatatgctcactacttatgccacatctttgcgcagctgattcagcctcctcggtttcagggcacacttgaggcctcacgcctcgtttttggatcctaccgtcctgcgcctgaggctcctgtgccagcttctgctcctgtttttgactctcaggccgaggacgctgctcttcgtcaattcgacactcaggatacagctgatgatgatgatgatgatgatgattttgggtttcctcctccgcctccgcctcctatgcctccacgctcacatgatcatgaggctgggagttctagtgttgcccctgctgcccctccggctatgaaccctgctcttgcttcgattctccagtctatcactcagcagcaggctcacctggcagccgagcaggcccggttatccgagaggatgctcttgatgtttcagaacatgcaggacaggcaggatgcgcttcagcagcagctactccaggattgggctgagagcagggcattcatggctcttatgctacagcattctgctcctgcagcgtggcctcagtccgagtcagtaccagctccagcttctatcgcagatcctggatccgagactgactctgaccctccgccgac

SEQ ID NO: 38538 - DNA, 1356 bp, Zea mays
  Peptide Sequence Number=SeqID_80317
atgaggctcaacaaggtggaagtgaaccttataaggctgctggaggctgctccctggcagcaaaatcaggctaaactactctattatgtaaccacagcccgggagcttttggagcagctaggagctgagactacaccagaagggatatcaagcatttcaaaagctaagctttctgagtattcagaaaagattgaagcactagcttctaggcttgctgcttcactgcctgaaaatgaaaagccaattactgaaagcagagatgaaatctcttacgacgaagccaaggcagaaagtccaatatctttatcatcaggactacgaaggagatcaacgaagcttcaagaagatttgactgatgaaatggtcgagttagcacggcaactgaaggaaagtagcctaatgatgaaccaatccgtgcaggagacagagaagatccttgattctaccgagagggccgtcgagcacagcctggcaagcgcgggccacgcaacctcgcgagccgcggagagtgggcgcctggcgatgccatgcccccgcgtcgcctcccctacgcgtctgccatgtggacccgcctcggtcttcccctccggcctccgcgcaaccacagcaatggccatggtcttcccctccacgcaaccagcaaccgccatgcccctcggtcttcccctccgtcctctgcgcaaccgccatggtcttcccctccgcgcaaccacagcaaccgccatgcccctacctcgcaccatccgccatgccttcgcctcgcaggatccgccatgccagcgtctcggcttctcctccgttcagccgcccgacccgccgccttcccctccgcaaaacagccatgtccccgcctcggctaaccctatgcgcagatccacagccgcccgacccgccaggacctgcctctccttcccctccgcgctcaaacaaccaagccgagccgaggaaatgcgcccacaaatttggacgctccgcgcagccacacgaactgccatgcaaccacctcgcacgatccgtcatgcccccgcctcgcacgatccgccgtgccagcgcctcggcttccccttcgtgcaaccgcccgacccgccaggaccctgtctctccttcccctccgcgctcggcttggcccacaaatttggaaatgcacccacaaatttggaagccacggcaatggcgcccgatttggctatggcgtcgctgatttggaaatcgcacaatctacgtcgccgatttggaaagcacgatctcgctgacttaggagggtccaagcaggagcctactcctcatttgcccctgttcagagccattggtttagccaaacaaaaacgatataatcaatcacaattgcactcgtga

SEQ ID NO: 38539 - DNA, 696 bp, Zea mays
  Peptide Sequence Number=SeqID_80318
atggccatggtcttcccctccacgcaaccagcaaccgccatgcccctcggtcttcccctccgtcctctgcgcaaccgccatggtcttcccctccgcgcaaccacagcaaccgccatgcccctacctcgcaccatccgccatgccttcgcctcgcaggatccgccatgccagcgtctcggcttctcctccgttcagccgcccgacccgccgccttcccctccgcaaaacagccatgtccccgcctcggctaaccctatgcgcagatccacagccgcccgacccgccaggacctgcctctccttcccctccgcgctcaaacaaccaagccgagccgaggaaatgcgcccacaaatttggacgctccgcgcagccacacgaactgccatgcaaccacctcgcacgatccgtcatgcccccgcctcgcacgatccgccgtgccagcgcctcggcttccccttcgtgcaaccgcccgacccgccaggaccctgtctctccttcccctccgcgctcggcttggcccacaaatttggaaatgcacccacaaatttggaagccacggcaatggcgcccgatttggctatggcgtcgctgatttggaaatcgcacaatctacgtcgccgatttggaaagcacgatctcggtaccgcaatcacaacaactatcccccaaatgtcgcgcccacccacgtccagctga

SEQ ID NO: 38540 - DNA, 657 bp, Zea mays
  Peptide Sequence Number=SeqID_80319
atgcccctcggtcttcccctccgtcctctgcgcaaccgccatggtcttcccctccgcgcaaccacagcaaccgccatgcccctacctcgcacgatccgccatgccttcgcctcgcaggatccgccatgccagcgtctcggcttctcctccgttcagccgcccgacccgccgccttcccctccgcaaaacagccatgtccccgcctcggctaaccctatgcgcagatccacagccgcccgacccgccaggacctgcctctccttcccctccgcgctcaaacaaccaagtcgagccgaggaaatgcgcccacaaatttggacgctccgcgcagccacacgaactgccatgcaaccacctcgcacgatctgtcatgcccccgcctcgcacgatccgtcgtgccagcgcctcggcttccccttcgtgcaaccgcccgacccgccaggaccccgtctctccttcccctccgcgctcggcttggcccacaaatttggaaatgcacccacaaatttggaagccacggcaatggcgcccgatttggctatggcgtcgctgatttggaaatcgcacaatctacgtcgccgatttggaaagcacgatctcggtaccgcaatcacaacaactatcccccaaatgtcgcgcccacccacgtccagctga

SEQ ID NO: 38541 - DNA, 696 bp, Zea mays
  Peptide Sequence Number=SeqID_80320
atggccatggtcttcccctccacgcaaccagcaaccgccatgcccctcggtcttcccctccgtcctctgcgcaaccgccatggttttcccctccgcgcaaccacagcaaccgccatgcccctacctcgcaccatccgccatgccttcgcctcgcaggatccgccatgccagcgtctcggcttctcctccgttcagccgcccgacccgccgccttcccctccgcaaaacagccatgtccccgcctcggctaaccctatgcgcagatccacagccgcccgacccgccaggacctgcctctccttcccctccgcgctcaaacaaccaagccgagccgaggaaatgcgcccacaaatttggacgctccgcgcagccacacgaactgccatgcaaccacctcgcacgatccgtcatgcccccgcctcgcacgatccgccgtgccagcgcctcggcttccccttcgtgcaaccgcccgacccgccaggaccctgtctctccttcccctccgcgctcggcttggcccacaaatttggaaatgcacccacaaatttggaagccacggcaatggcgcccgatttggctatggcgtcgctgatttggaaatcgcacaatctacgtcgccgatttggaaagcacgatctcggtaccgcaatcacaacaactatcccccaaatgtcgcgcccacccacgtccagctga

SEQ ID NO: 38542 - DNA, 708 bp, Zea mays
  Peptide Sequence Number=SeqID_80321
atgcccctcggtcttcccctccgtcctctgcgcaaccgccatggtcttcccctccgcgcaaccacagcaaccgccatgcccctacctcgcaccatccgccatgccttcgcctcgcaggatccgccatgccagcgtctcggcttctcctccgttcagccgcccgacccgccgccttcccctccgcaaaacagccatgtccccgcctcggctaaccctatgcgcagatccacagccgcccgacccgccaggacctgcctctccttcccctccgcgctcaaacaaccaagccgagccgaggaaatgcgcccacaaatttggacgctccgcgcagccacacgaactgccatgcaaccacctcgcacgatccgtcatgcccccgcctcgcacgatccgccgtgccagcgcctcggcttccccttcgtgcaaccgcccgacccgccaggaccctgtctctccttcccctccgcgctcggcttggcccacaaatttggaaatgcacccacaaatttggaagccacggcaatggcgcccgatttggctatggcgtcgctgatttggaaatcgcacaatctacgtcgccgatttggaaagcacgatctcgctgacttaggagggtccaagcaggagcctactcctcatttgcccctgttcagagccattggtttagccaaacaaaaacgatataatcaatcacaattgcactcgtga

SEQ ID NO: 38543 - DNA, 498 bp, Zea mays
  Peptide Sequence Number=SeqID_80322
atgcattttgcaaagataaaggtcgaggaaagtgcaccaggagctgcgacaggagtgattctgtctcttcgtgaaaggaataacatacttctcctttgtagtttacaggactgtaaacaaagccttgcatcctgccaggtggaacttgaagctgcaaaatcagaaattgagaagtggcattcagcatttcagagcattccagctgtaccttctggtaccagtccagatcctgtttcagtggtatcttacctcagtaacctgaagtcatcagaggaatcattgaaggagcagctggagaaagcaaagaaaagggaggcagcttttatagtaacatttgcaaaacgagagcaggagattgcagaactgaagtctgcagttagagatttaaaaacacaattaaggccaccgtcaatgcagacaaggagattgttgcttgatccagcaattcatgaggaatttacacgcttaaaagatccagggcatagctgtgacgcataa

SEQ ID NO: 38544 - DNA, 1284 bp, Zea mays
  Peptide Sequence Number=SeqID_80323
atgccgaacaccaccccggcacatgcccaggaccagcctgccggcgcccccgaaggctggcacgcggaggccgcgaaccccacgcgcaccagaatccagacctccacgcgcggcaccgctccctgccctaggggctgcgacccacggccggccgcaagcccccctgctgcgcggacaccgagccaggacccgcaacggccggaagtgccaaacgaacgctgcgctcactgccaccaggaagccgccgaggccgagccacgccggcgaagggtcgccgtcccactcacgccgctgccaccacctggtaacccaactagatccgggcagacgcgaccaaaccagagaaaaatcgccccgccgccaccttccttggggccgcgcggacatccggcggcgccctctggtgacggcgagggaaagataaaggttgaggaaaatgcaccaggagctgcaacaggagtgattttgtctcttcgtgaaagtattcatgaactggccatgatcagaccccccctgcatccctggcagcagaaccaagccttattggtggaactggaagctgcaaaatcagaaatcgagaagtggcattcagcatttcagagcattccagctgtaccttctggtaccattccagatcctgtttcagtggtgtcttacctcagtaccctgaagtcatcagaggaatcattgaaggagcagctggagaaagcaaagaaaagggaggcagcttttatagtaacatttgcaaaacgagagcaggagattgcagaactgaagtctgcagttagagatttaaaaacacaattaaggccaccatcaatgcagaatcttgtggaggagaaagagaaaaaaataaaggagctacaggacaatgttgctgctgtcaattttactccatccagcaaactggggaaaatgctaatggctaaatgtagaacattgcaagaggaaaatgaagagattgggacgatggcatcagaaggaaaaatccatgagcttggaatgaaaattgcagttctgaagtctcagaacaatgagctcaggaatcaatttgatgttttgtacaaacacatggatggtgtaacaaatgatgtggagagatcaaacgaactggtgtccatcctgcaagaggagttagaagctaaggatctagagctgactagattgaaggaggtgcttgcccagaaaggagctactcaggacgcaccggtggagaccagtgacgacgctggaaacggtcaggaggcagattcagatacactgcaagtgaaggcggaaagctaa

SEQ ID NO: 38545 - DNA, 156 bp, Zea mays
  Peptide Sequence Number=SeqID_80324
atgacgagtccagatctgagatattggacaaccaaggcacgtagcacggcagcagtcggcatatgctacggagttggtggtggtgttgtgtcgcctcggcgggtctatgatgtccatgtcttcgtcgtgtacttctccggcaatgaacaactatga

SEQ ID NO: 38546 - DNA, 699 bp, Zea mays
  Peptide Sequence Number=SeqID_80325
atggcgcagcagaggcttctcgctctcctcctggtggcggccctcctcgtgctctcctgctcgcaaggcaatgccgagccatcgaacgggtatcataggcagcaaatcagggaccctcatctctcgtctcccccacttccaaggttcgtagagcaggaaaagaaagaaagaggcagtcatatctgttcgttgtcggagaaggacacgacgaagacatggacatctagaggcgacatagatagtacaccgctagatacatatagggagagagcacgcaagcggagaaagaagcccagccagagcagctccaaatcgagaggcacccgcaccaggcatcagtccgaaaagggcgagagaatgcgagtgccttccagcctggacccgccgaggcgacacaacaccacccccaacttcgtagcatatgccgactgctaccgcgctacgggccttggttgtccaatatctcagatctggactcgtcatcgccaagataacctaagcatggcaggcgtcatcgtgtcctcctcggcggcacacacgaagaaaagccaggagcaagaccgcccgtactcgcgtcgatcagctcgcggctgtgactgtgggcagggcatcaagttggggaggaagaacagggcgaaggccgggaagacgaacgggacgtccgacgacggcgaaaacgatggtgtgtgcatgctgtga

SEQ ID NO: 38547 - DNA, 255 bp, Zea mays
  Peptide Sequence Number=SeqID_80326
atgggaattttgggagaactagataatgtacaactaaaaccttctaagaatcccataaaacctaaagatgtaattaaagattgtaagttcattcaaaaccccaaaaacgaagactgtaatctcgctgatggggagtacatcctcattccggagcaaggagttgctcaggaggtagcccaggagccagcaccagagcctgccatcgaggatctgcctgcacaagctttggaaggcaagccccagttttatgcataa

SEQ ID NO: 38548 - DNA, 225 bp, Zea mays
  Peptide Sequence Number=SeqID_80327
atgggaattttgggagaactagataatgtacaactaaaaccttctaagaatcccataaaacttaaagatgtaattaaagattactgtaatctcgctgacggggagtacatcctcattccggagcaaggagttgctcaggaggtagcccaggagccagcaccagagcctgccatcgaggatctggctgccccagctttggaaggcaagccccagttttatgcataa

SEQ ID NO: 38549 - DNA, 357 bp, Zea mays
  Peptide Sequence Number=SeqID_80328
atggagcacaaaaaccgcagctctcaagctcactcaaagattcctctccaaagatttgaaatgggagagacaagagatgtgtgtgagagagagggaggtgtttcttgggttagaaatggagttcaaatcgtgctcactactatggggagagaggtaggagactgttggtcagaggtcagaggggtcagagaccagctgaactgcccctcaggaccagttcaactggtcttgaccagagagtttaggagagaaaaccccagctcaactgcccggaggcaagttcagctggtgtatggtcaaagaggttcacagctgaagttgagttcagctgaagttgagaaagctcaactcagctga

SEQ ID NO: 38550 - DNA, 357 bp, Zea mays
  Peptide Sequence Number=SeqID_80329
atggagcacaaaaaccgcagctctcaagctcactcaaagattcctctccaaagatttgaaatgggagaggcaagagatgtgtgtgagggagagggaggtgtttcttgtgttagaaatggagttcaaatcgtgctcactactttggggagagaggtaggagactgttggtcagaggtcagaggggtcagagaccagctgaactgtccctcaggaccagttcaactggtcttgaccagagagtttaggagagaaaaccccaactcaactgcccggaggcaagttcagctggtgtatggtcaaagaggttcacagctgaagttgagttcagctgaagttgagaaagctcaactcagctga

SEQ ID NO: 38551 - DNA, 357 bp, Zea mays
  Peptide Sequence Number=SeqID_80330
atggagcacaaaaaccgcagctctcaagctcactcaaagattcctctccaaagatttgaaatgggagaggcaagagatgtgtgtgagggagagggaggtgtttcttgggttagaaatggagttcaaatcgtgctcactactttggggagagaggtaggagactgttggtcagaggtcagaggggtcagagaccagctgaactgcccctcaggaccagttcaactggtcttgaccagagagtttaggagagaaaaccccagctcaactgcccggaggcaagttcagctggtgtatggtcaaagaggttcacagctgaagttgagttcagctgaagttgagaaagctcaactcagctga

SEQ ID NO: 38552 - DNA, 357 bp, Zea mays
  Peptide Sequence Number=SeqID_80331
atggagcacaaaaaccgcagctctcaagctcactcaaagattcctctccaaagatttgaaatgggagaggcaagagatgtgtgtgagggagagggaggtgtttcttgggttagaaatggagttcaaatcgtgctcactactttggggagagaggtaggagactgttggtcagaggtcagaggggtcagagaccagctgaactgtccctcaggaccagttcaactggtcttgaccagagagtttaggagagaaaaccccaactcaactgcccggaggcaagttcagctggtgtatggtcaaagaggttcacagctgaagttgagttcagctgaagttgagaaagctcaactcagctga

SEQ ID NO: 38553 - DNA, 246 bp, Zea mays
  Peptide Sequence Number=SeqID_80332
atggagcacaaaaaccgcagctctcaagctcactcaaagattcctctccaaagatttgaaatgggagaggcaagagatgtgtgtgagggagagggaggtgtttcttgggttagaaatggagttcaaatcgtgctcactgctttggggagagagctgaagaagctcaactcagctgaagtcaagttcagctggaaagctcagctgcagttgaagaagttcagctgcttttcagcaagaacactctag

SEQ ID NO: 38554 - DNA, 525 bp, Zea mays
  Peptide Sequence Number=SeqID_80333
atgaccaagaatacaagagacacaagatttatcccgaggttcggtcacaccaccaaggtgccctacttcctcgttgaggcgcccacaaagagccgggtctctttcaaccctaatcctccctttgccgaccacaaagctcgaatgaagaagaacaagagagatttagagatgaagcacaaaaaccgcagctctcaagctcactcaaagattcctctccaaagatttgaaatgggagaggcaagagatgtgtgtgagggagagggaggtgtttcttgggttagaaatggagttcaaatcgtgctcactgctttggggagagaggtaggagactgttggtcagaggtcagaggggtcagagaccagctgaactgcccctcaggaccaattcaactggtcttgaccagagagtttaggagagaaaaccccagctcaactgcccggaggcaagttcagctggtgtatggtcaaagaggttcacagctgaagttgagttcagctgaagttgagaaagctcaactcagctga

SEQ ID NO: 38555 - DNA, 414 bp, Zea mays
  Peptide Sequence Number=SeqID_80334
atgaccaagaatacaagagacacaagatttatcccgaggttcggtcacaccaccaaggtgccctacttcctcgttgaggcgcccacaaagagccgggtctctttcaaccctaatcctccctttgccgaccacaaagctcgaatgaagaagaacaagagagatttagagatgaagcacaaaaaccgcagctctcaagctcactcaaagattcctctccaaagatttgaaatgggagaggcaagagatgtgtgtgagggagagggaggtgtttcttgggttagaaatggagttcaaatcgtgctcactgctttggggagagagctgaagaagctcaactcagctgaagtcaagttcagctggaaagctcagctgcagttgaagaagttcagctgcttttcagcaagaacactctag

SEQ ID NO: 38556 - DNA, 525 bp, Zea mays
  Peptide Sequence Number=SeqID_80335
atgaccaagaatacaagagacacaagatttatcccgaggttcggtcacaccaccaaggtgccctacttcctcgttgaggcgcccacaaagagccgggtctctttcaaccctaatcctccctttgccgaccacaaagctcgaatgaagaagaacaagagagatttagagatgaagcacaaaaaccgcagctctcaagctcactcaaagattcctctccaaagatttgaaatgggagaggcaagagatgtgtgtgagggagagggaggtgtttcttgggttagaaatggagttcaaatcgtgctcactgctttggggagagaggtaggagactgttggtcagaggtcagaggggtcagagaccagctgaactgccccttaggaccagttcaactggtcttgaccagagagtttaggagagaaaaccccagctcaactgcccggaggcaagttcagctggtgtatggtcaaagaggttcacagctgaagttgagttcagctgaagttgagaaagctcaactcagctga

SEQ ID NO: 38557 - DNA, 321 bp, Zea mays
  Peptide Sequence Number=SeqID_80336
atgaccaagaatacaagagacacaagatttatcccgaggttcggtcacaccaccaaggtgccctacttcctcgttgaggcgcccacaaagagccgggtctctttcaaccctaatcctccctttgccgaccacaaagctcgaatgaagaagaacaagagagatttagagatgaagcacaaaaaccgcagctctcaagctcactcaaagattcctctccaaagatttgaaatgggagaggcaagagatgtgtgtgagggagagggaggtgtttcttgggttagaaatggagttcaaatcgtgctcactgctttggggagagag

SEQ ID NO: 38558 - DNA, 558 bp, Zea mays
  Peptide Sequence Number=SeqID_80337
atggggagagaaggaagaacacaaataagcacaatgaccaagaatacaagagacacaagatttatcccgaggttcggtcacaccaccaaggtgccctacttcctcgttgaggcgcccacaaagagccgggtctctttcaaccctaatcctccctttgccgaccacaaagctcgaatgaagaagaacaagagagatttagagatgaagcacaaaaaccgcagctctcaagctcactcaaagattcctctccaaagatttgaaatgggagaggcaagagatgtgtgtgagggagagggaggtgtttcttgggttagaaatggagttcaaatcgtgctcactgctttggggagagaggtaggagactgttggtcagaggtcagaggggtcagagaccagctgaactgccccttaggaccagttcaactggtcttgaccagagagtttaggagagaaaaccccagctcaactgcccggaggcaagttcagctggtgtatggtcaaagaggttcacagctgaagttgagttcagctgaagttgagaaagctcaactcagctga

SEQ ID NO: 38559 - DNA, 246 bp, Zea mays
  Peptide Sequence Number=SeqID_80338
atggcggtggatcctctctactcgccgcgccgcgacgcgacgctttgcttgcggcaggagccttcggtcaggcccctctcccacgaggaggagacgtcggcggcaaaatgggaagcgttcagaggagaagagtcggcacgcgtccatgctgaggtcgacggcggccgccagagcgacgaacgcggcggcgtcctcggcgcacccgacgtgcgccacgccgatcctccacggaggactgccgcgccg

SEQ ID NO: 38560 - DNA, 1173 bp, Zea mays
  Peptide Sequence Number=SeqID_80339
atgcagcacggcgagatggtggcaccgttgtcactgtatgacgatgggtggccgggtggaggagaagttgcaatggggatgaccggcgacggagaactgctgggctaccgcttcgagctggtgcccgaccacaacagcaacatcacggactcggccgtgtgcgtggccgagtctagcgtcccggcggtccgcggtgggcagttcgccatcgatcttaccacggccggatcccccgggcggggcagcagcgagttgggccacgcgctctggcccccgggcggcttcgtgatgtcggccgccgtgcaggaggagggccggcgcggcaggccctccgtggggatcagcgtggcgcacttcgggtgcgccgaggacgccgccgcgttcgtcgctctggcagccgccgtcgacctcagcatggacgcgatccgccgtgccgtcatcagggagttcctccgcgcataccgtgaaggaatcctcgacgacaatcggattggctttgccattcacagggtaatggtgaatctggttaacaccggtgccaccggtgtctggattccaaatcgccgcagtcataatcgcagttcatctcgtcgtcgtcgagcaccaccagtggtggttccccctccaccgccggcgacagcaacgtccacacaagtacctgcatcagtgtttcaaatgggagagacttacccgcacggttactgtccattccacggattcggaccatgtgctctgcgcgacgccggcgtgctggaggctactctcaccgctgcccgccagtactacaactctcaagcgcaacctgatgcagttcccatggaggagatgctcgccacggtcgcggctccaaacctttactcaccgacaccggaggtggaacctactgcaccgcgttggagaccaccaacaccggcaccgccaggtttcggtcgtcctccaaccagagcagcaagaacagggtgtccacccttcttcaacgacgacgaggtcataccaccgccaccatccgtggtcccgatgccatcccctgccttgattgaacgcagccgaggtgcacaaatcggactgtgggcgaacctcaactccgtcaaagtcgaatccccaaactctgacggcgccagtgcatctggtttcctcttctctgatgaggagagggaggattctctgtcctaa

SEQ ID NO: 38561 - DNA, 369 bp, Zea mays
  Peptide Sequence Number=SeqID_80340
ctgggctaccgcttcgagctggtgcccgaccacaacagcaacatcacggactcggccgtgtgcgtggccgagtctagcgtcccggcggtccgcggtgggcagttcgccatcgatcttaccacggccggatcccccgggcggggcagcagcgagttgggccacgcgctctggcccccgggcggcttcgtgatgtcggccgccgtgcaggaggagggccggcgcggcaggccctccgtggggatcagcgtggcgcacttcgggtgcgccgaggacgccgccgcgttcgtcgctctggcagccgccgtcgacctcagcatggacgtgtgtcggctcttctcctgcaagctgcgccgagagctgtcggcgtga

SEQ ID NO: 38562 - DNA, 519 bp, Zea mays
  Peptide Sequence Number=SeqID_80341
atggcgtttgaggctgccttcaggatgcatatgtgtgctatgcaccttcccgtcatggagaagagccgacacacgtccatgctgaggtcgacggcggctgccagagcgacgaacgcggcggcgtcctcggcgcacccgaagtgcgccacgctgatccccacggagggcctgccgcgccggccctcctcctgcacggcggccgacatcacgaagccgcccgggggccagagcgcgtggcccaactcgctgctgccccgcccgggggatccgggccgtggtaagatcgatggcgaactgcccaccgcggaccgccgggacgctagactcggccacgcacacggccgagtccgtgatgttgctgttgtggtcgggcaccagctcgaagcggtagcccagctgggcatccccggtgcggagtcggcgtggatgtcgtggaggtttcgtggaggcgggggcaaggagatggtctacagttttgctttaattgatagtagagattattataaaagttatctatga

SEQ ID NO: 38563 - DNA, 582 bp, Zea mays
  Peptide Sequence Number=SeqID_80342
atgaggcgaggggttgtgcggggtactggcagggctctaaaaagggagctgggcgcgtgggcgggcgttgtggccaagaaacccggtgacgtgcgcgaagccgaggatactattgagtccactgctctgcatgtgctgacgaccttctgtggctttcaccccttggagctatcaacccaccccattggcttgttcctcgctgagaaggaggacgacccaatgtggaaggatcgagttgagcacgccaaggatgtgtgggctctctaccctggacagaccgctcacctgatggtggagcagatggccacccaaatccaagagcttgaggatcaggtggaggccagggagaaaaccatcgaggttctggaagatcagctccagaccacaaagcaacagcttgaggaggccaaccagcacttggatctgcaccatcaagaaattcaagacatggaggcagaaggggccgatgaggatgtagtcatcgagggaggagaggagctggagcctgcatccagcttggacactgctggctcaggaagaccaccttcccccgagtctagcgttgcctcgtttgctcattag

SEQ ID NO: 38564 - DNA, 306 bp, Zea mays
  Peptide Sequence Number=SeqID_80343
atgacgcccgcccacgcgcctagctccctttttagagccccgccagtgccccgcgcacacccctcgcctcattttgctcagcttcaccttctctcgtgctctgcccatgccgctagctgccgccggagacccgcgcccgcgttcccggccatccagctcgtcgaagaccgctctaagcctccccgagctccaccccgagacaacgagcagtccgaggttcctgagtgtgttgtcggagacctccctgagcaacaacctggtgaaggcaagtgtcctatgacccaatatgtcctacttactttataa

SEQ ID NO: 38565 - DNA, 435 bp, Zea mays
  Peptide Sequence Number=SeqID_80344
atggccgagctcaacctgccaggacaagccgcgagcccctctgctcctactcgtccatggcgccctggaacttctcgtctagagtcttgcccctctcctacctcaagtagcaggccgggtgtccccatgactgcgccctctccctgctcttgccgaagccgacgtcccctgctcctactgtcttccccacaaaacagcagccgcagcgagctcgccgtcaacctcgcgcagcagccgcgacgccagttcacgcagccacatgggttctcgctgtgtcgcgccctcggcgtgctcgacgaaatgccgcagcagcagcagcgacgcccttcgctacgtcgcactcgccaggacgggcctcacgctatcgatctgcgcagcatttgcgcgtcgtcgtcgaaacccgcggtgagctcctcgctgtcccgtgttctctga

SEQ ID NO: 38566 - DNA, 495 bp, Zea mays
  Peptide Sequence Number=SeqID_80345
atggcgccccactccctgcaggcaagctgcagcccctccaactccttccatggcgcccagttcatatgcacggccgggatccatcggttcctgtgttccccatggctgagctcgccccatggccaggagcttgacgccggccaccttcctgtgtcccttgccgcaggagcagtagctcttgcctgcgccctctccctgctcttgccgaagccgacgtcccctgctcctactctcttccccacaaaacagcagccgcagcgagctcgccgtcaacctcgtgcagcagccgcgacgccagttcacgcagccacatgggttctcgctgtgtcgcgccctcggcgtgctcgacgaaatgccgcagcagcagcagcgacgcccttcgctgcgtcgcactcgccaggacgggcctcacgctatcgatctgcgcagcatttgtgggtcgtcgtcgaaacccgcggtgagctcctcgctgtcccgtgttctctgattttataa

SEQ ID NO: 38567 - DNA, 189 bp, Zea mays
  Peptide Sequence Number=SeqID_80346
atggcgcgcatgctgaggtggttgccaccactggggaggctgcctggcgcagaggtggtcgccgtcgctagtgaggctgcccgttgcagaggtggttgcctctgctggcgagccgctcggagccgagggtttagtctgggaggccaagttgtgcgtccggaccccctagatggtggttctaggtactag

SEQ ID NO: 38568 - DNA, 408 bp, Zea mays
  Peptide Sequence Number=SeqID_80347
atggcgcgcatgctgaggtggttgccaccactggggaggctgcctggcgcagaggtggtcgccgtcgctagtgaggctgcccgttgcagaggtggttgcctctgctggcgagccgctcggagccgaggtagtcgtcgccgctgtcgatctgtcggtgcagaggtggtcgccttcgctggcgagccgctcggagctagctacccacacgaccctagtggtgtggaggcagttcatatctgtagagtagagatggagctagaactccgcttgaaggcggatgtaatacttttgctttttgtaaggctcgatttgtcgaggctgcagaccagcatacctaaggaagagttggcaatggcccccaggaggcagcctcgactgggacctgagcctccacacagctttggctag

SEQ ID NO: 38569 - DNA, 117 bp, Zea mays
  Peptide Sequence Number=SeqID_80348
atggagctaggactccgcttgaaggcgaatgtaatacttttgctttttgtaagaccaacaggccgggcttatgagggcggacctcaccgggttggcgtacacgtatgcgttacctag

SEQ ID NO: 38570 - DNA, 165 bp, Zea mays
  Peptide Sequence Number=SeqID_80349
atggcgcgcatgctgaggtggtcgccaccgctggggaggctgcccggtgcagaggtggtcgccgccgctgaccaacaggccgggcttatgagggcggacctcaccgggttggcgtacacgtatgcgttacctagttacaaaagggagaaaaattcgaccccttag

SEQ ID NO: 38571 - DNA, 546 bp, Zea mays
  Peptide Sequence Number=SeqID_80350
atgaagacgttgaggtggtcgccaccgctggggaggctgcccggcgcagaggtggttgccgccgctggtgaggctacccggtgcagaggtggtcgccttcgctggcgagccgctcggagcagaggtggccaccgccgctgtccattcctgcagagtagagatggagctaggactccgcttgaaggcggatgtaatacttttgctttttgtaagggtctagtctgggaagccaagttgtgcgtccagaccccctggacggtggttctagatactaggacacccgtcacagagtggtggagcgttcaggcccacgaccaacaggccgggtttatgagggcggacctcaccgggctggcgtacacgtatgtgttacctagttacaaaagggagaaaaattcgacccctcagacttgctcctatggtagaacttacagagatgctccagtggtcaggaagaggtactccttcagtcatagcaagatagtcacccccaggtcggtgtattcccgtcaccttggagggtccttcccagttgggggagagtag

SEQ ID NO: 38572 - DNA, 420 bp, Zea mays
  Peptide Sequence Number=SeqID_80351
atgggcgcaccggttagcgtggatcgtctctggcctcgacctcccgccacctcaactctacatgccctggcttgctccgcaaggcatgatatgctgttcggggagcctgggaagagtggtctcgtggctctcaacttggatttcgatcaagtcaagaagtttatcaaggagcggctggggattgaggcacacagaaaaattggcgacttcattaaaggagtatttgctgtcttccaagggagttttccgtaccgccgacatgtgaacgatttatatagggacttccctactactgctttaacacttctggactatctacttgcgattgagataatcttgggaaagagtgacaaattcgatgagttgatggttgctgccgccgccgagaggcgagaagttgaagatgaagagcaggcttga

SEQ ID NO: 38573 - DNA, 789 bp, Zea mays
  Peptide Sequence Number=SeqID_80352
atgacgttgagtgctgagcagttccgtctccctcctgaccttccctccctccacaccctccctctcccgtcacgcccctgcctcctcccccgatctcgctgtcgagcctgcgtcctctgcgtcgttcatggtaggccggctccaccagccttcctccccgcgtcgtccccaagattcaggcctctctgtcctcctctcctcgcttccaccgcccctggtcggactccgctagccgccccctccgcctgtgcacccgacggtggcctccgcgaccgacctctcctcttcaccgtcgcctgcttgcctcctccgccaggagtgtatttacgtcgtggggaggaatatgacgccagcgggctcctttggcggggaggactgcaggaatcaagggttgggggcgggtgcccatgccgctcctgtggccttgccatgtccatttcttgccccctctgtctgcccacccgcctcctcctagggttagggctcgcatcacggggggctgtggcacccggtgcaatgcggaggctgttggggctcgcgctctgtgcatccgccgccacgcgatctaggcctgatatgctgttcgggaagcatgggaagagtggtctcgtggctctcaacttggatttcgatcaagtcaaggagtttatcaaggagcggctggggattgagagaggttgggcaacattatcagcttctcagagtgttggagggattgaaatcgaggagaactgggacaaggttaagactatttttcttcctactgagaagccaacgacgtttgattaa

SEQ ID NO: 38574 - DNA, 1341 bp, Zea mays
  Peptide Sequence Number=SeqID_80353
atgggaggacttggggtttccgatggttttgctagggagttgatgaggacatgtgcggccccggggggaaggatgtcttcacccgagctccgggagtcttcggcgcggatgctgagggttaccgggggttggtggcctaagaatgttcctatccctcgcgcggtcggcgaagacttttttacatctcgcatggttcgtgattggagagtgtttccttacgggcggaatattgctgctgttgtgtcggtagtgatggacaaggatcgtcagggagctgcacagaagcgccaggcggtggtcaggcttcatgaggccaggccgaagaggcagcggggggctgtgaaggctaatgcccccggcggagaccagccgccgctggcggcgaagtcggccgtccctgcatccaatagggcgccggaggctgcgaaggcggctgccgccggtggttccaagtctgcgaaggttgcccctgcgtccagcagggtgccggaggccgcaaaggcggcccgggggttgccgccgccgggcaagcgcgtcgccgacttcgccaccgacattagtgtggacgattatcttgttgggtcggacgaaggccaacttgttgttgttccgcctgccgcggcgaccacggcggccgccgtagtgccaaaggcgaagggcggtgctcttagtgccggcggcgagatgccggcactcactgccatcagggacgaggcgggtgctgtgtcccgccggctgaaggagatgaaggaggcactaagttgggcggctgacttcgcagaccgcgcggcgtcgggggccctcacggtagttgtgtctgccgaagtcgagaggcttcggactcaacatgctgacgccgtccgggaaaagtcggccgccgacagtaaatgccgcaagcttgcggataaggtggccgcgctggagggtgagaagactgacctccggcgccaactggcggaggagaggaaggaggccaatgaggccctcgccaaggtgcagtctatgcaggcagaggccaatttggcgcgggcggagggcagtcttgccaagcagcgcgccgagcagttggaggagcggctcagcgctctgcaggctcgtgtggagagggccgaggcctcgacgcgctcagaggctgagcggacacgcaaacagcttatggattcataccatgagctgggcgcgcggaccgctgacttcgaagtgccggaccgagagcccggacttcgctgcctcgagtggatacaggaggagttggtggcgcttcccgccatcgtggaggggtttatgtcctatgcctccctggtcactgttggggacttgttctcaaatgctatgagttaa

SEQ ID NO: 38575 - DNA, 1425 bp, Zea mays
  Peptide Sequence Number=SeqID_80354
atgccttcccatggtgggaagctggtgcgaagtcccgccttcgcgctggatctgcatagccgcgatccggccacctttgtgcgtgaggcggaggatggggcggtgcggatcgttggtcgggagttgatgaggacatgtgcggccccggggggaaggatgtcttcacccgagctccgggagtcttcggcgcggatgctgagggttaccgggggttggtggcctaagaatgttcctatccctcgcgcggtcggcgaagacttttttacatctcgcatggttcgtgattggagagtgtttccttacgggcggaatattgctgctgttgtgtcggtagtgatggacaaggatcgtcagggagctgcacagaagcgccaggcggtggtcaggcttcatgaggccaggccgaagaggcagcggggggctgtgaaggctaatgcccccggcggagaccagccgccgctggcggcgaagtcggccgtccctgcatccaatagggcgccggaggctgcgaaggcggctgccgccggtggttccaagtctgcgaaggttgcccctgcgtccagcagggtgccggaggccgcaaaggcggcccgggggttgccgccgccgggcaagcgcgtcgccgacttcgccaccgacattagtgtggacgattatcttgttgggtcggacgaaggccaacttgttgttgttccgcctgccgcggcgaccacggcggccgccgtagtgccaaaggcgaagggcggtgctcttagtgccggcggcgagatgccggcactcactgccatcagggacgaggcgggtgctgtgtcccgccggctgaaggagatgaaggaggcactaagttgggcggctgacttcgcagaccgcgcggcgtcgggggccctcacggtagttgtgtctgccgaagtcgagaggcttcggactcaacatgctgacgccgtccgggaaaagtcggccgccgacagtaaatgccgcaagcttgcggataaggtggccgcgctggagggtgagaagactgacctccggcgccaactggcggaggagaggaaggaggccaatgaggccctcgccaaggtgcagtctatgcaggcagaggccaatttggcgcgggcggagggcagtcttgccaagcagcgcgccgagcagttggaggagcggctcagcgctctgcaggctcgtgtggagagggccgaggcctcgacgcgctcagaggctgagcggacacgcaaacagcttatggattcataccatgagctgggcgcgcggaccgctgacttcgaagtgccggaccgagagcccggacttcgctgcctcgagtggatacaggaggagttggtggcgcttcccgccatcgtggaggggtttatgtcctatgcctccctggtcactgttggggacttgttctcaaatgctatgagttaa

SEQ ID NO: 38576 - DNA, 990 bp, Zea mays
  Peptide Sequence Number=SeqID_80355
atgggggataggagggttctgcttgttgcgtctcctgaggtagcagtctttggttatgatggggtcgtctcattggcaagcgttcaggacgctgtggatactgttccgttgaacaaccaaacgcgcaccgtcatcaggatcggtcctggtgtgcaccagcagcaggtgcgcattcctaggaccaagaacttcatcaccttgtgtggatcttcgataaaggacaccgtgatctgttgggacaacaggactacgacttgcatcaaacacactcagccatcaggagcgattggcacagggacactgagcagtgcaacagttatcgtggaaggggacgatttcatcgcagagaatgttatttttaagaactcagctccccagtctggacaagcagcagcagtccgtgtgacggctgacaggtgtgccttttacgactgcagattcctcgggtggcaggaaaccttacatttgcatggtggaaagcagctcctgaagaactgttacgttgaaggtagttatgacttcatctttggagattccgctgcccttctggagcattgccatatccactgcaaatcagcggggtatattactgctcatggccggaaatcatcttcagaaccaactggattcgtgttcttcaagtgtgttattactggcaatggagaagctgcctacatgtacctaggccggccctgggagcccttcgggagggttgtttttgcagaaactttcatggatcgctgcatagagcctgctgggtggcataattgggacaagcctgacaatgagcaaaccgcctgcttctacgagtacaggtgctccggtccaggatcaagctcatcaggacgggaacgttggtgcaaagaactgttcggtgatgaagctatgccgttccttgcacagactttcattgatccagatatcgagaatccatggttggtccacaggttgggaactccagtcccagtttcagcgtcttcacttgagtga

SEQ ID NO: 38577 - DNA, 222 bp, Zea mays
  Peptide Sequence Number=SeqID_80356
atgatcttcgtccacagtgccgtcggggatttagagccacgggagcagcactgccaaagccgcgcgctgccacctccgtgttcaagtaacacccgtgttcaggaacaacgagaaacagaaagacacaaggctgagacctgcactcgtagaagcaagcggtttgctcattctcaggcttgtcccaattatgccacccagcaggctctatgcatagatccatga

SEQ ID NO: 38578 - DNA, 516 bp, Zea mays
  Peptide Sequence Number=SeqID_80357
atgaagcttgttgagttcagttactctaaaatttatggtgctgaggctatgaaatatgttaaggttgtcaatgactctctgcatgagttgtataaggagtatgtggcacaaccactccccttgactcctgcttatgttgaagctaataatgtggctgctaacgcaagtgtgaaccagggaaatccttcttccactggtgatggtcttcttgactttgatatgtacctttctgaaaatagaaacaagtgcaaactaatccaagctacacactacggcatgtgctttagcttcgagatgatcttcgtccacagtgccgtcggggatttagagccacgggagcagcactgccaaagccgcgcgctgccacctccgtgttcaagtaacacccgtgttcaggaacaacgagaaacagaaagacacaaggctgagacctgtactcgtagaagcaagcggtttgctcattctcaggcttgtcccaattatgccacccagcaggctctatgcatagatccataa

SEQ ID NO: 38579 - DNA, 519 bp, Zea mays
  Peptide Sequence Number=SeqID_80358
atggagcccgacgacgaggccgagatgaacgaggacgaggacaagctggccctggcagtggccggcgggcgcgcggcgacctcatcgcgcgcgacctcgccctgcagccgcgtcaggtcgtcgtctggcggaggatcctcgcgaggaggagaacacggaggcggtgcccgtgctgtaggggaaccggtcaagagcactggcaaggggaagaagcagaagaaacactatgcttcctttgagtaccacggcaatagcttcgagatgagagaggccggctcctcccacccccaggcagccatggacgcccccgaggcgaggagtagcgcatcctcctccccggagttcgagttctggccgctctaccccaaccccgccgcctcgccctcctgcgccgacgagctcttcgctggcggggtgctcctcccgcttcccatcctcccaccgaagccggagtccaggaagaaaggcagcggcatcagccaattcgtgcccgtcgcggagccggagctggagccgtag

SEQ ID NO: 38580 - DNA, 3453 bp, Zea mays
  Peptide Sequence Number=SeqID_80359
atggcggaggtggcagcacgcgactttgacagtgctgctcccgtggctctaaatccccgacggcactgtggacgaagatctggaagtgagaaacagaggagaaggaggcttaccatctcgaagctgttgtcatgtgctcttgaccggttcccctacagctacgggcaccgcctccgtgttctcctcctcgcgaggatcctccgcctgcggctccacctcatcaggctcctcatccttgctcctcggatcgtggcagcgtctgggccatccccagcggcggtgggtcttcgtttcggccacatgttcgcactgctccacctcctcgcggcgtggccgggaccaatgcacggaggcagggctcgcggtggccggggggaaatagagggaggtggaggagaggggctggcagcggaaggggcagtggcgaaaggagcgggcgaaggcggaggaggcctagagcgtgctcatgaggagaaggaggcttaccatctcgaagctgttgtcgtggtactcaaaggaagcatagtgcttcttctgcttcttccccttgccagtgctcttgaccggttcccctacagctacgggcaccgcctccgtgttctcctcctcgcgaggatcctccgcctgcggctccacctcatcgggctcctcatccttgctcctcggatcgtggcggcgtctgggccatccccagcggcggtgggtcttcgtttcggccacatgttcgcactgctccacctcctcgcggcgtggccgggaccaatgcacggaggcagggctcgcggtggccggggggaaatagagggaggtggaggagaggggctggcagcggaaggggcagtggcgaaaggagcgggcgaaggcggaggaggcctagagcgtgctcatgaggagaaggaggcttaccatctcgaagctgttgtcgtggtactcaaaggaagcatagtgcttcttctgcttcttccccttgccagtgctcttgaccggttcccctacagctacgggcaccgcctccgtgttctcctcctcgcgaggatcctccgcctgcggctccacctcatcgggctcctcatccttgctcctcggatcgtggcggcgtctgggccatccccagcggcggtgggtcttcgtttcggccacatgttcgcactgctccacctcctcgcggcgtggccgggaccaatgcacggaggcagggctcgcggtggccggggggaaatagagggaggtggaggagaggggctgacagtggaaggggcagtggcgaaaggagcgggcgaaggcggaggaggcctagagcgtgctcatgaaaccgaacattattcacagaatagaaaacaatccgtccttagctgcgtgcatctcctcgccggtggccctcgcggcaaggctggcggcggctccgacggcgtcacgaagcgggcagcagctccggcaccacggtggactaccgataaccggcgtcggcaactggctgacgttgggtgttttccggccgtcgcatccatgcaaccgctccaaaagcttctagaagccgctgccgccacctctacccctctcgccgccgcgcatctccacgctaacattctccgctcgggcctcctccactcttcgcaccacctgaccgcgcacgtcctcgcgtgctaccctccgggcctcgcccgcgacctgttcgacgaaatccgcagcccgacgccgcgcctcgccaacgcgctcctccgcgcccacatccgcgcgcggcagtggcgcgccgctatcctccttggtcagcggctccgagtgcgccgggacggcttcactctctcgctcctgctgagggcctgcaccgcgctcccctcgctcacccatggccgcgccgtgcacgcggccgccgtacgctcttgcaccgcgtctgaagacgcctttgtcgccacagcgatcgtgcagatgtactccaggtgtggagacatggctggggccatcaacgcgtatggcatgcttgagaagccggacattgtgctcaggacgtctgtggtaaccggctacgagcagaacggaatggccgaggaagcactggagttctttgcaaggaacgttgttggtcagggcgttttggtgacaccagtcacacttgtgagtgtgatgtcggcagcagcacagttggggcatgtccggaagggacaggcgtgccacgcttatgttgtcagaaacagcttgagctatgatctagctttagtaaatgctgttctcggcttttatgtgaaaattggtgatttacaggcatctatgaggttatttgagggcatgacagatagggatgtgatcacttggagctgcatgatcaaagggtatgtgcaacacggagacgcacacacagggttcagaatgtacagggagatggttaaggcacgtgtccagcccaattcagtgactttagtgagtgttctgcaggcttgtgcgctagttgtcgatgctgaggaaggtaagcgacttcaccgtgttgctgtcagcataggttgtgagcttgagctgggtgtagcgacggctttggttgatatgtacatgaagtgctcatgtcatgaggaggcaatgcgcttatttcatcggatgccaaagaaagatgtggttgcttgggctgctgtcattggtggcctcacacaaaatgaactccctggtgaatccctccattcgttcaaatgcatgttgttgaatgatcatgttcctgatgccgtcacgatggtgaaggtacttgctgcatgctcagaatttggaggtaatcgcctagccatttgtctccatggctatttagttagaaatggtttcaataataatgcatttgtagctgctgcccttcttgatttgtattcaaaatgtggagacttagatagcgctgttagggtatttgaaggtactacagaaaaagatattgtggtgtggggctcaatgattgctggttatggagcccacggccttggtcaagaagctgttgcgttgtaccaaaggatgattgcctcatcaattcaacccaacaatgtgacgtttctgtcagtgttatcagcatgcagccactctggcctggttcaggaaggaatacaaatttttgatagcatgactcaagtttttggagtcgtgccaaatgccgagcatcaaagtgctatggttgatctccttggccgggctggtgaactgcaagaggctataagagtcattcgtgatatggatggaagagctgttgcccatacttggtgtgccttacttgctgcatgcagaaaacacaacaacactaagatgagcgaagtagcagcaaagaatctgctcaagctggatcctgaccatgttggctactacaatctcttgacaaatttatatgcatttgatgagaagtgggagaatgtaaaggacacaagggacatggtgaagggtagagatctgcgtaaagtggcaggttacagttcagttgaggtcactaactaa

SEQ ID NO: 38581 - DNA, 1419 bp, Zea mays
  Peptide Sequence Number=SeqID_80360
atggatcaagatcagaatgtatcaggccagcaaggcgctcatgctgtccgtcgctctccccgtgttgaaaacaagagaaagcaattagataaaaatgaattaaaggaaaggaagaagagattaaggttgaaagtccctcctatacaagacgccgaaagtgatgatgaaaaagacacagagtttgttcctggtggtgatgggtctggtgatgacaatgttggtattgttggtggagatgaaaataagggtataactaagacacgagctattcgatgctcacctggaaagtttataaagcttgtgaattctctatctgatgaattgaaaagtgaagtggttgctaaggggtttggcggcctgcttagattcaagccacatttattgtcgagaaagttgcttagctggctgatgcggaagcttaacccagaaacaatgaaattagagattggtggtgggaaagagattcaaatcaccgaacacagtgtttggtgtgttttgcagttaccaaacgttggcagtgatccgccccccatgtctgatgcagatgctcgtgccttgcgggacgagctgggggagcaaatttgtgggaaatcttatagacgcatatctggcatcaatatatctgttatcactgatagattgcagaagaggactctcaatggggagctgggcctgagagcctttttcatggcagcatttcagtgtcttctattctccaatactgacactcgcatcaggattgatgatgtgaagtacactcaggacatccagaacatgggcaacaagaactggtgcagagctgtagaagacaagctgagcatagctgctcgtctatatagaaaggattttgcggagaaaggcattaacgcacccatcagtggatgcgggatctttgtagctatgctttatgtcgacaacctgcaacatggattagacacaagtcctttttcaatccctcgatgtgctttcttggactccaagatgattgatgctatagcaaatatggatctcaggggagatgttcctcctgggaccactgagtttggacacctcaggttgagaagtatcactgacacgtgctacggcgtccccattggtgctctagcaatattacatgctccagtaccagcacctgccccagtagcagtccctaatccaacagcagcacctaacccagtagcagcagcatctgtcccagtagcaacagcagcacctactgggacatctgctgatgtgcttggcacatcccatgatctcgtcggtcatgcttccttcaatatccaacccccagtcttttaccagtaccctagctttagatcttcttttggtcagagtattactgatttagttggaaggagtaggaagtcagatgcgctgaacatcttgaaggcgtttgatgaaagcactagtgaagcctag

SEQ ID NO: 38582 - DNA, 501 bp, Zea mays
  Peptide Sequence Number=SeqID_80361
atgcagatgctttatgtcgacaacctgcaacatggattagacacaagtcctttttcaatccctcgatgtgctttcttggactccaagatgattgatgctatagcaaatatggatctcaggggagatgttcctcctgggaccactgagtttggacacctcaggttgagaagtatcactgacacgtgctacggcgtccccattggtgctctagcaatattacatgctccagtaccagcacctgccccagtagcagtccctaatccaacagcagcacctaacccagtagcagcagcatctgtcccagtagcaacagcagcacctactgggacatctgctgatgtgcttggcacatcccatgatcccgtcggtcatgcttccttcaatatccaacccccagtcttttaccagtaccctagctttagatcttctttaggtcagagtattactgatttagttggaaggagtaggtgtcgatgcgctgaacatcttgaaggcgtttga

SEQ ID NO: 38583 - DNA, 933 bp, Zea mays
  Peptide Sequence Number=SeqID_80362
atggtccgcagcggggagatctaccgcctgcggcgccagaatggggtggccgagcattgggtctacttctcctgcaacgttcttgaatgggatgcctatgacccatatcgagagcgctggatccaagtgcctaagatgccgcctgatgaatgcttcatgtgctctgacaaggaatcacttgcagtgggcactgaactgcttgtgtttgggatggcacgtattgtcttcagatacagcatcctaaccaattcatggaccagggctcatccaatgaactctccgcggtgcctgtttggttcaacaagtgttggggaaaaggccttcgttgctggaggcactgattctattggcaacatactgagctctgcagagatgtatgactctgagacacatacctggacgcccctcccaagcatgaatagggcaaggaagatgtgttctggggttttcatggatggcaagttctatgtgataggtggtgtggctaacaacaacaaattgctgacttgtggggaggagtatgacttgaagaggcgttcctggaggataatcgagaacatgtctgaaggcctcaatggagtgactggtgctcctccccttattgcagttgtcagcaacgagctatacgccgctgattacagcgagaatgacctcaagaagtatgacaagaagaacaacaggtggatcacccttggaaaactgcctgaacggtctgtgtcaatgaatggttggggccttgctttccgagcctgcggtgactgcctgattgtcatcggaggtccgaggacctacactggccgtactattgagctcaactcatggaccccaaacgagcggccgcctgtgtggaatttgattgccaggcggccatctgggaacttcgtcggtttctgccgtctggcccagttccggaattatgtggacatcagctga

SEQ ID NO: 38584 - DNA, 297 bp, Zea mays
  Peptide Sequence Number=SeqID_80363
atggcggctggagccgcgaccctcggagatgtccggcgtgtgcggctgcggagacggcggcttgctgcgcttgccgccgccgtcagcttcgtcgaggtcttcgacctcgacgtcttccggcgccgggcgcttgccgccgaggacctcgtgagcgaggtacgcccactgcgtctccgtctcgcaggagctcagcagggagcgcggaacaaggagccaaaatcgaacagaaagaaagtaagcggagatgaaatcaacgggaacaaagggatcaagaacacgggaagccttgagatctga

SEQ ID NO: 38585 - DNA, 252 bp, Zea mays
  Peptide Sequence Number=SeqID_80364
atgtgtgcacaaggttcccagaaaacgggcacaggaaaatggcagcagaggaaactcaagacgagagaacatgcagcacgcattcgcgaaattcaggtgtcagtggtcttcgacctcgacgtcttctggcgtcgggcgctcgccgccgaggacctcgtgggcgaggcgccaaaatcgaatagaaagaaagtgagcggagatgaaatcaacgggaacaaagggatcaagaacacgggaagacttgagatctga

SEQ ID NO: 38586 - DNA, 201 bp, Zea mays
  Peptide Sequence Number=SeqID_80365
atggctataaaaagaacggtacaattctgggtcagatttgtggatgacttagcatatgtaccagtacaggtccaggaaaccaacaccaacatcacaaaaggattttctgagaaggcgtcaaaatcaaacagaaagaaagtgagcggagatgaaatcaaatggaacaaagggatcaagaacacgggaagacttgagatctga

SEQ ID NO: 38587 - DNA, 1086 bp, Zea mays
  Peptide Sequence Number=SeqID_80366
atggatcctggcacacatatggtatgcgctcggttctaccccctggaaccgggtgtgacagaagtggtatcaaagatggttcgcaccctccaaactacccgcgtcaacaccagctacgcccctcagccccggcaggtcccggtctacccagtggtagtcgaggaagttccggcgaatctccctctcgtccgagtggagaacgtgatcatcctggaggacagctcggaggagcagctgccgacccccaccccgttggccgagtccctggccttcgcagctgggtcatcgacgtcaacatcgtcggcaccagcctttcaagcacctgcacctggaggcgacgaccctgacgactccggagacggcgatgacgaggacgacgacgacgaagacgatggagaagacggacacatcaacgaggaagctgactacgcccagcaggaccacttcatggggattggtccagttgtcgaacattacacatcaatgttcgagacaggacacttccccaacctgctgcaagcagtgctgcacgagctaggagcccacgtccgccccctgtacgagacgaggcgagtgagcgagcctccccgggcttgctattacatcactcgcatccatgtcagggtaatggatgcaggtgacaggggattcaggactctgtctgctcacgagtccctgataccgctgtccacctacgctgcctcggtcagcgatgctgcccgtcggaccctgtggtcgctcagccacacctaccggcagcagctgcagaacacgaggttcaggcaccttcctcagcgcctgcgtggagaaagccagaccaacattgtcccaggtgaacctggtgaggatcgcctcaacaccctagctggtgtagtggccggtctcaacaccgacctggacagtgccactctggacctctacagtgtgcacttggagctggagaatgcccacgccaggattgcagccctggaagcccaactgcaaggactggatccgccagaagctcaggtccccgccgtggcgttgtctcctccccgcaagaggatgcgctatggagagcccggatcagtcactaggctgctttag

SEQ ID NO: 38588 - DNA, 468 bp, Zea mays
  Peptide Sequence Number=SeqID_80367
atggtgacctccagcttgatggtgggggaaagcgagccgggctgcggcctctacccctccctcagcctcaaggagtttgggcatgggcgggggcctcctggcagcggcatccgccctgaggtcagtgctgccgctgttcggccccccggcgcagaagttgtcgtcgtcgccgctgctggagcgggtgacggcgcgccgttcgtcggtcttctgttgctccgcaagcccacccctatcgagtggggttgttcgtacctgcggagggggaaccggagttccatttgtaatggcactttgaatgccagtgtttttgttcattatggctgtcgaggcctgaacatggatgtttgtgcgagcgagagtttcttctcgcggaaggtgatgagtgaggtatccgtatcccggaggcgtgggagtccctcggctcggtcggccttgccgcttacgcacacttttacccgtccatga

SEQ ID NO: 38589 - DNA, 642 bp, Zea mays
  Peptide Sequence Number=SeqID_80368
atgaacaaagacgctggcatccaaggtgccatcacaaatggaactccggttccccctccgcaggcacgaacaaccccacaagactggggaacctgcggggcgatcgcgggccgacgggcggcccgccgtcacccggtccggcaacagcggcaaccaccctcgcctcgggcggcgaagcagcttcggcagcggcttcggggtgggggttatgacagaggggctctcacccgcagaggacgagaaccagccattcaggccgggagacggagacccagggctactggcggagtcggcaatctcgtcggtagagaagccacctccagctgccgacgcctcgaagagcgccggcaggctcccgccctagtcagagccgcccagagtatgggcgccgccctcgcgaccaacgggcggaaggagtgggcagccatgcaggcggcatgcaaccgcgccaagtggacacgcttctccgactcccaacgcgccagcatggaggccccggcccacgcgtcacgcaaccggcgcgccggatgctgcatgcagacaactgcaccgccacttgcgccaccgtcgcgcctcttcggttgcggaaccaatgccgcgactcgaggcgacccagcgcacgacccagcggcgccagcctag

SEQ ID NO: 38590 - DNA, 573 bp, Zea mays
  Peptide Sequence Number=SeqID_80369
atgcacaacctgctggcccgttattatgaggatgagaatgctccaacggacacatgtgctgtctgtgctgttggtggagaaaggcggccccccatcgccgccaagatgcagatctttgtgaagactctgacggggaagaccatcactttggaggtggagtcctccgacaccattgacaatgtgaaggccaagatccaggacaaggagggcatccccccggaccagcagcggctcatcttcgccggcaagcagctcgaggacggtcgcaccctcgccgactacaacattcagaaggagtccaccctccacctggtgctccgcctccgcggtggcgccaagaagcgtaagaagaagacgtacaccaagcccaagaagatcaagcacaagcacaagaaggtgaagctctccgtgctgcagttctataaggtggacgacgccactggcaaggtgacccgcctccgcaaggagtgccccaacacagagtgcggcgcgggcgtcttcatggccaaccacttcgaccgccactactgcggcaagtgcggcctcacctatgtctacaaccagaaggcgtaa

SEQ ID NO: 38591 - DNA, 138 bp, Zea mays
  Peptide Sequence Number=SeqID_80370
atggccttatcgaatgggatcgacaccagggacgcccgggatagctcgtcgaactttgttggtcatcaccaagccgcatggcgacgtggtcgagctccctgcgttgatgtctgctcaaggtggaagaaggatttctag

SEQ ID NO: 38592 - DNA, 246 bp, Zea mays
  Peptide Sequence Number=SeqID_80371
atgccttatcgaatgggatcgacaccagggacgcccgggatagctcgtcgaactttgttggtcatcaccaagccgcatggcgacgtggtcgagctccctgcgttgatgtctgctcaaggtggaagaaggatttctagtcgtgggattgtctgtgaatggctacgatgtgtcttcactgaatctagaccgtgtgatcgtaatggacggaccagattagatctcactcatatcacttcagccttataa

SEQ ID NO: 38593 - DNA, 285 bp, Zea mays
  Peptide Sequence Number=SeqID_80372
atggcgacgagtgccgagacaacgtcggagctggacgcgtccatctccaccacctctttctcgcccgacgtgacgacgaacgccgacctcacgctagatccgggcgtgctcacctccgcctcctcttctgcgtcggcgtcgcaccaaccatctccagccatagagacaacttgctcgctgcagaatggttggtgctacgccggtcagcaagatcctcccgatcagcaagatcactatagttcgtggagcgttgtcccggtcagcaagatcctccctgcgctctaa

SEQ ID NO: 38594 - DNA, 378 bp, Zea mays
  Peptide Sequence Number=SeqID_80373
atggttaaaaattttggcagcaaaacagtgcaaatagcaatgaatgctgtggtaacttcacacctactcgtctgtttatatagtgctgcaggtaagaaggcgaagcgccagaatttttacaccaggcggacacccgctcgcactcgctgcatggtggaccgcagagaccgaacagtaactctgcaaggtggggccgctatacgctgggagattgaatcgtttctcgacaacgagctcagggaagggatgaaggccaagtcacagcatcaaccaatcaacctaagaagtacctgcaaaaattatgccacaagcaaggctgagtatactaatactcagctagacttacccggtgtgagaagtctactcctctacctctag

SEQ ID NO: 38595 - DNA, 348 bp, Zea mays
  Peptide Sequence Number=SeqID_80374
atgaaggccaagtcacaccatcaaccaatcatcctaaggagttcctgcaaaaattgtgccacaagcaaggctgagtatactaatactcagctagacttacccgtgaccgcacttgtacccaccataacagaaatgggagaccacgtctcaggtcgcgtgaggggtaaagtctgcgggcaggttcactcagcagatctgtccagatttggacagattcagatttgcaacttcaaaaattcagaactaaagattcagacatccaaacaaattgatcctagactttctggaaagatcaccaaaaagagtgatccaagactttttggaaagctcagaaaaagcactacataa

SEQ ID NO: 38596 - DNA, 321 bp, Zea mays
  Peptide Sequence Number=SeqID_80375
atggggaaacagaggggctgcgcgttgacggacaaggggcagcgacaacaagtgtgcagccacccgaggtcaacgaacggggaggcatttttgtcgagcaaggagctcggcctggaggaaggagccgagggggagaagggaggccggccatgggaggaaaagctcctgctccctgctgttggcgtgagggagaagctgctgccgtgtgggagaagagaggctgctggaaaatggctggtggcgagaggagtggaagctagggtggctgacttgaggaaaggggaggagacgccatgggaggccctccactggtgtgcgtga

SEQ ID NO: 38597 - DNA, 840 bp, Zea mays
  Peptide Sequence Number=SeqID_80376
atggggctgcgcaaaaacagcaaacacccggcgagcgtcgacgacgtgctgtccactggcttcacaaaacagcgagccgacagagcgctgagacgtcggggctgctgcgccaatggggaaacagaggggctgcgcgttgacggacaaggggcagcgacaacaagtgtgcagccacccgaggtcgacgaacggggaggcatttttgttgagcaaggtagcacacgacttctgccgcagatcctgaccatggggaaggcacgacaagagagggaaggcgcaggcatggggatgcccggcctgctgcagtggagaagctggaaggggcaccagcttcgtccacggaagggcggcactgccatgttgcgcttcggtcagcagctttgcgcgcgggcagagaatgtcgcggacaaggggagagcagggggcgagggaaaaatggagcagcgatcaagtggagcagccgttcctgacataggagctcggcctagaggaaggagccgagggggagaagggaggccggccatgggaggggaaggagccgtgctccctgctgcagccgtgggaagcagggctccctgccctggcgtgcgtgcaggaggaagaggagcaggggcgctgcgtttggaacctgtgccaaggggagaaaggctggaaaaatctgggcgccatgggtggaggaagctccctgcgctggctgctgctgccatgagcagcgaggaagaaggcagggagtatggctggtggcggttagggaaaaatggagggtgggagtgcaaaattgccaatttgcaagggagagaggtgctatttatagaaggggcactagggttagggttttaa

SEQ ID NO: 38598 - DNA, 1553 bp, Zea mays
  Peptide Sequence Number=SeqID_80377
atgatgatcgcgtcaaaaaaggctggcccctcggaagggttgacagccgccctagagcactcgggcttcaagctcattactgatcaggggttcgaaggctggcccctcggaagggttcgacagccgccccagagcactcgggctccacgcccactactgatcaggggttcgaaggctggcccctcggaagggttcgatagccgccccagagcacgcaaggcgagggatgactctaggtacgttcgttacatggccgaggctcgggctatgctcccgaggccggccaaggcacaacgaaaggcattaagacctcagaggagtcaaaccactcctccgaggcctcgggggctacacctggcggagactgatgggcacgattcaggtcaaggcttcgtctacccaagggacgcgatctcgcctcgcccgagcccggcctcgggcgggaacagtagtcccggacgaattcacgcctcgcccgagggcctcctcaagcgacgggcgcaccctcaactcgcccgaagcccagctcgggcaggcttcattgtgaagcaaccttggccaaattgcctcaccaaccgaccgtatcgcaggcgcattcaatgcgaggatcgcttgacaacttatcctgacacacatgcctcagtcggcaaggtcgaagaagctccgcctcgcccgaccttaggcctcggcctcggaaggaggtctccgcctcgcccgaccccagggctcggcctcaacctcggcctcggaaggaggtctccgcctcgcccgaccccagggctcgccctcaacctcggcctcgggaggaatcgcgtcctcgcccgaccccggcctcggcctcaggggaagtctccgcctcgcccgaccttgggctcggaccgaccgcgccatgggggatacatcattaccctacccctagctagctcaggctacgggggaacaaagaccgacgtcccatctggctcgccccgcaccgacagctgtgcttctacagggctcaagcacttctccgacggccacgttatcgcctacgcagggctcaagcacttctccgacagccacgttggcatcgccggggatgatcttgctgctgcagatgcagtcgttcttgaggacgcagtcgacaaagcaggtctggacagcatcagccgactcaaggatgcacttaccggcacaggcgcagttcttggagcagatgcactcgttgttgggaacacgaggatcaatcaccgtttcggtgcagatgttgctgggattgggatgttctacggccattccgacgatgatttggccgacgacggccagcagcatcaagcaaacaattgtcatcttcctctgtgcacgggaagccatggcgacggccgacgggtgctgttggcgaacgtcgccgcctctgtggacacgcagaccattcggccaccgggcgcggactatccgattcggcacagagaggactcagctcccgccacatgtcgtgaactgttcggccctaggtcacgagccatccacgctgtcgcagagagcaccgccaccgatacacctcgctatgatag

SEQ ID NO: 38599 - DNA, 393 bp, Zea mays
  Peptide Sequence Number=SeqID_80378
atgggggatgtgcggccattgatcatcgaccagaggcttgtacacctcaccccacatatgtttccttgccttagatcatgttcttggatttctggtggtgaccatttcttgggcaaaaatccgaatctgttagccttcggtattattgaaaatggtcgttcatggctattttcgacaaaaataggggttgtgtggccattgatcttcgaccagaggcttgtacccctctccccatatatgtttccttgccatagatcacattcttggatttctggtggagaccatttcttggtcaaacatccgtacatgttagccttcggtattatcgaaaatggtcgttcatggctattttcgacaaaaatgggggttgtgtggccattgatcatcgactag

SEQ ID NO: 38600 - DNA, 222 bp, Zea mays
  Peptide Sequence Number=SeqID_80379
atggctattattgacaaaaatgggggttgtgtggccattgatcatcgtccagaggctcattcacgtcaccccacatatgtttccttgccatatgtcacattcttggattttggctggagaccatttcttggacaaaaatccctgttagccttcggtattgttcaaaatggtcgtttatgtctatttttgacaaaaatgggggttatagccattgatcattga

SEQ ID NO: 38601 - DNA, 228 bp, Zea mays
  Peptide Sequence Number=SeqID_80380
atgaataataaaaatccagtggacttacaaccaccagagccccactacaaaaatacagagcacctcagcccaacttttttaaattgtaatcttgccaacggagagtacgtgctcatccccgagcaaggacctgtccaagaggaggaccaggagcaggcttcagaggctgctattgaggatctccccgcagccccagcaattgaaggcaagccccggttttatgcataa

SEQ ID NO: 38602 - DNA, 1089 bp, Zea mays
  Peptide Sequence Number=SeqID_80381
atgaccaggccggtctcctcgccgccgacgagcatccccgcctgcgcgcgtggaccgaccgactccggccatctccgacggcgtcccgcacaccgttgtgatccccgagacctccccttcgtcctcgaccacttcactggagcaatctcgccgccgtggacttataaccatcagagccccactacaaaaatacagagcacctcagcccaactttttaaagagtacatgctcatccccgagcaaggacctgtccaagaggaggaccaggagcaggcttcagaggctgctattgaggatctccccgcagccccagcaattgaaggcaagccccgctatggtgggtacaagtgcggtcactgcacggcggcagccggggtcagtggagcattgtatgccaaggcggtaccattcaggaaatggttgatggtcaaggctgtggagaggctacaaaagtggcaacaagagctcgagggcaacgctagcgacgccgccctcaccgaggagaaccttaatgcgaaggagcagtccttggacaggcgggagacggacctcgccaggggagagacggatctcgtctttagggaagaaatgctcacccggtggggcgagttgctggccgagcatgagctcgaggcagaggagaaagagaagaagctggaggaacagatccgccagttcaatgtggcgcaggcggcgccgggcccccaggcggtggaggccaccagaaaagctcttgaagatctccaagcgaagcaccgcgctggggtccaacgcattgccgcgtgggccggcgaggcaagcacgacactgatcttcgatgcgctcccggtgctggactccaccgtcgatcgcctccgacgcttggatcagatcctcggggcccgcctggaggcagagggcggcaagctccgccgggcggtggttgaatatgtcctgacgtgcttccgaagtcacgaccccgccatatccttagcgccggtgatcgttggtccagtagtcgccacagaagacgccgcccgggagagtgtacaagacaccgtggagctggtggccgagcacttccagcacgatcctactgacgacctgtag

SEQ ID NO: 38603 - DNA, 396 bp, Zea mays
  Peptide Sequence Number=SeqID_80382
atggattcggagaacgaaaagctccgtaaagcactggctactctgctcagagttgttcaaaagcgtagttgtgacatcgttgatgtcgtcaaatcagccttccagcctttcaactcacctttggtcgacgaattgaaccgagcactagttgagattgacgacctcgccaaggatcttgaagacgtagcagtgcaaactcagtgggaggtagaaaatatggctaacagtcaagtgaaagaacatccacaacaagaggaagcagtagaggaccttctcatacaagatggttcagaagacgacctactgatagacgaagagtcaccaattaactatgaagaccttgtgggctacgacgatggtcgtgactactcaaccgacgacacatatccgtactag

SEQ ID NO: 38604 - DNA, 1821 bp, Zea mays
  Peptide Sequence Number=SeqID_80383
atggcgcttcctgtcgacgtggctggcctgtgccctaggttgggcgacgtggaggctcctccgaagccggggtcgagtctgtcttccatggctgtggccgagtccgagcccctgggtcgggcgaggcggaggtcgtcagcagaggccgagtccgagcccctgggtcgggcgaggcggaggtcgtcagcagaggccgagtccgagcccctgggtcgggcgaggcggaggtcgtcagcagaggccgagtccgagcccctgggtcgggcgaggcggaggtcgtcagcagaggccgagtccgagcccctgggtcgggcgaggcggagttcgtcagcagaggccggcccgagtccgagccctgggtcgggcggagcggagttcgccgtcttccggggcttagcccgagtccgagccctgggtcgggcggagcggaggttgcttctcagcgaaggcaaggcctcaggcaagccggagatgtgtccaccgttgaaggggggcctcgggcgagacggaaaccccttcgggctttatgctgatgggggttaccagctgagaattaggcgtcttgagggcactctaaatgtggagggctccgggagtgcgctatccgcgctgttcgtccaccagccgccgccaggaaacttccgcgcattcctaccccgcgctggcgactgcatcttccggggccgagccctcgatccggcgcgcttcgccgccggcatcgaggcaggagggcgagaagcggccgtgcggaggcgggtctgtcggcgtagagctcgcaccccttggaaccgaggccgcgcgacccatcgtaaccgaagatccaagccagcttccccctgttcgtcgccggagagtcgccatcggcaaaaggcttcgtcgtccgccgacttcgtcgaaggcagccggcaaaaggaagagaagctccttgccgccatcgtcttcgtcttcgatttggtccaccgagccagatccgtgaagagcgagatgcaatttataacagccatggattcggagaacgaaaagctccgtaaagcactggctactctgctcagagttgttcaaaagcgtagttgtgacatcgttgatgtcgtcaaatcagccttccagcctttcaactcacctttggtcgacgaattgaaccgagcactagttgagattgacgacctcgccaaggatcttgaagacgtagcagtgcaaactcagtgggaggtagaaaatatggctaagagtcaagtgaaagaacatccacaacaagaggaagcagtagaggagcttctcatacaagatggttcagaagacgagctactgatagacgaagagtcaccaattaactatgaagaccttgtgggctacgacgatggtcttgatgggcaacccgagggctcaagaacactagctgttactaaaaagccaactcaaagaactaagctagcaaacttcactgctgaagaggacacaagggaaaaggcaaagaggactaaatctgtggacacatcttcatcagattctgagtttatgacacgcatgggtgatctttctttggagcgcctgtcagtgtacaaaacagctgttacaactgaggaaaagaagttggattcaatgaatagaaatgagaggcagaaattgctccttgaaaagaagaagttgaacctagagaaattaaggcttgaaaggcagaaactaaaggaggacaaggaagaggagataatgatcttaagcatggatttgagcaaatgtaaccctctactccgccagtactatgaagccaagcaacaagagatactggcaagggttactgggtctacttcatctggccagtga

SEQ ID NO: 38605 - DNA, 1398 bp, Zea mays
  Peptide Sequence Number=SeqID_80384
atggcgcttcctgtcgacgtggctggcctgtgccctaggttgggcgacgtggaggctcctccgaagccggggtcgagtctgtcttccatggctgtggccgagtccgagcccctgggtcgggcgaggcggaggtcgtcagcagaggccgagtccgagcccctgggtcgggcgaggcggaggtcgtcagcagaggccgagtccgagcccctgggtcgggcgaggcggaggtcgtcagcagaggccgagtccgagcccctgggtcgggcgaggcggaggtcgtcagcagaggccgagtccgagcccctgggtcgggcgaggcggagttcgtcagcagaggccggcccgagtccgagccctgggtcgggcggagcggagttcgccgtcttccggggcttagcccgagtccgagccctgggtcgggcggagcggaggttgcttctcagcgaaggcaaggcctcaggcaagccggagatgtgtccaccgttgaaggggggcctcgggcgagacggaaaccccttcgggctttatgctgatgggggttaccagctgagaattaggcgtcttgagggcactctaaatgtggagggctccgggagtgcgctatccgcgctgttcgtccaccagccgccgccaggaaacttccgcgcattcctaccccgcgctggcgactgcatcttccggggccgagccctcgatccggcgcgcttcgccgccggcatcgaggcaggagggcgagaagcggccgtgcggaggcgggtctgtcggcgtagagctcgcaccccttggaaccgaggccgcgcgacccaccgcaaccgaagatccaagccagcttccccctgttcgtcgccggagagtcgccatcggcaaaaggcttcgtcgtccgccgacttcgtcgaaggcagccggcaaaaggaagagaagctccttgccgccatcgtcttcgtcttcgatttggtccaccgagccagatccgtgaagagcgagatgcaatttataacagccatggattcggagaacgaaaagctccgtaaagcactggctactctgctcagagttgttcaaaagcgtagttgtgacatcgttgatgtcgtcaaatcagccttccagcctttcaactcacctttggtcgacgaattgaaccgagcactagttgagattgacgacctcgccaaggatcttgaagacgtagcagtgcaaactcagtgggaggtagaaaatatggctaagagtcaagtgaaagaacatccacaacaagaggaagcagtagaggagcttctcatacaagatggttcagaagacgagctactgatagacgaagagtcaccaattaactatgaagaccttgtgggctacgacgatggtcgtgactactcaaccgacgacacatatccatactag

SEQ ID NO: 38606 - DNA, 456 bp, Zea mays
  Peptide Sequence Number=SeqID_80385
atggcgcttcctgtcgacgtggctggcctgtgccctaggttgggcgacgtggaggctcctccgaagccggggtcgagtctgtcttccatggccgaggccgagtccgagcccctgggtcgggcgaggcggaggtcgtcagcagaggccgagtccgagcccctgggtcaggcgaggcggaggtcgtcagcagaggccgagtccgagcccctgggtcgggcgaggcggaggtcgtcagcagaggccgagtccgagcccctggggcctgtcttcctttacgttaaacgctcctgcgacttggccggtcagtgcggcgattcagtcagggttgcttctaacgaaggcaaggcctcgggcaagccggagatgtgtccgccgttgaaggggggcctcgggcgagacggaaaccccttcggggttggctgcccttgcccgaggctaggctcgggcgaggcgtga

SEQ ID NO: 38607 - DNA, 1251 bp, Zea mays
  Peptide Sequence Number=SeqID_80386
atggttaaaaattttggcagcaaaacagtgcaaatagcagtaaatgctgtggtaacttcacacctactcgtctgtttatatagtgctgcaggtaagaaggcgaagcggcagggtttttacaccaggcgggcagtaacttgtactcgctgcgcagtggaccgcaaagaccaaacagtgactctgcaaggtgggaccgacacgatctcgggaaatggatcgtttctcggcaacgagctcagggaaggtgttttttggaccttcggcttcccgaagcttgagaggattttttcacggttcaagctcgttacgaaaaacgatctagcgccgcgaaaggggctactgttgggcccatgcttcgttgcgccgaaggtcttgcgtgaagaagcagcttcggctgaaatcgtccccaggaaatggccgaaggaccgaaggtattggcggcgtttagcggcggcggaagttagaggtacggccggcggcgagaaaatgtcgagcaccggagctggcgacgacatgccacctgtagcatctgtaaatacgccagcagcattgagggcacctggacatatcgatgagcaaacaaaaacgacagatgtggtcggcacagagaagcacatctccatgagacatattgggccgcatgaacaggacacacctcatattcttcaaagccatcccagatgggtcgagcgcgtgggcgagcgcgaaggggggaaaggagcgaggaggccggagtccggcgagagagaggtgggaatcccgcggccttcgtgttcgtcccgcgcccaggtcgggtgcgcttgcagtagggggttacaagcgtccacgcgggtgagggaagcgagcggccccaagagagcgcctgtccccgtcctcgtccccgcgcggccaaccttctctaagaaggccctggtccttccttttataggcgtaaggagaggatccagggtgatgatggcgcttcctgtcgacgtggctggcctgtgccctaggttgggcaacgtggaggctcctccgaagccggggtcgagtctgtcttccatggccgaggccgagtccgagcccctgggtcgggcgaggcggaggtcgtcagcagaggccgagtccgagcccctgggtcaggcgaggcggaggtcgtcagcagaggccgagtccgagcccctgggtcgggcgaggcggaggtcgtcagcagaggccgagtccgagcccctgggtcgggtggagcggagttcgccatcttccagggcttag

SEQ ID NO: 38608 - DNA, 468 bp, Zea mays
  Peptide Sequence Number=SeqID_80387
atgctccgggcttcttcctccgccgctcccaaggtcacgcctcctctgccagataccaggcccactagcgggtccggctctcagcagcaggaatctggtgagagtggtgatggcggtccgcctctggatgctgttaagacagcgccagtggcttcccatgccccatccggggattcggcggtagcagcgccagcgccgagcgacgtcgtagaggcagaggagatcccacctgggggatccgcgcccactcccgacactaggggtgacgcaggaggcgcgtccagctccaaccccctgcctgcgtcggaggagatggaggtggtgtttgtgcggcggctccggtcgggcgccgagcaagaagcggcgccagtcccactcccccgcgtgttgtcccgtgcccaccaggtccttagtgacactagggcagcaatcttgcgggactgggaggcgcttgaggctgagccctag

SEQ ID NO: 38609 - DNA, 558 bp, Zea mays
  Peptide Sequence Number=SeqID_80388
atggcgggcggaattaagctcgccggagctaaggaaaagtggctggccggtgagggtgagtgcggggcgaagagagtcactgaggcgctagggctcagcctcaagcgcctcccagtcccgcaagattgctgccctagtgtcactaaggacctggtgggcacgggacaacacgcgggggagtgggactggcgccgcttcttgctcggcgcccgaccggagccgccgcacaaacaccacctccatctcctccgacgcaggcagggggttggagctggacgcgcctcctgcgtcacccctagtgtcgggagtgggcgcggatcccccaggtgggatctcctctgcctctacgacgtcgctcggcgctggcgctgctaccgccgaatccccggatggggcatgggaagccactggcgctgtcttaacagcatccagaggcggaccgccatcaccactctcaccagattcctgctgctgagagccggacccgctagtgggcctggtatctggcagaggaggcgtgaccttgggagcggcggaggaagaagccctagcgaatag

SEQ ID NO: 38610 - DNA, 450 bp, Zea mays
  Peptide Sequence Number=SeqID_80389
atgtcgcagcaccgccatcgcgcagtccgcaggcgtcgctccgtctgtcttcaccgtgtgcaggcagctgcgcagcgctcatcgtcatgtggaggagccccgccgagcctcgccatgttcgcctgctcggagccgcccctgcatcttgtcgtcgcgtgcctgctttgccaaggccctggctcaccgaggcctccgctcactggccatggtggacgtaaggtgtcgctgtcggccatggtggccagccctgcgcggccaggccccagcacggcggtgctcgtgtttggcatggctctcgcgctcgcgtctagcagagcctgcgtgtgtgcccccgacgcggcctacgaagcccccactcgaattttgcacggccccgacgcagcagcagcctcgcgcgttctcatgcctcgccgcgagctcgtctggccgtcattgcgagatacctggtaa

SEQ ID NO: 38611 - DNA, 537 bp, Zea mays
  Peptide Sequence Number=SeqID_80390
atgtcgcagcaccgccatcgcgcagtccgcaggcgtcgctccgtctgtcttcaccgtgtgcaggcagctgcgcagcgctcatcgtcatgtggaggagccccgccgagcctcgccatgttcgcctgctcggagccgcccctgcatcttgtcgtcgcgtgcctgctttgccaaggccctggctcaccgaggcctccgctcactggccatggtggacgtaaggtgtcgctgtcggccatggtggccagccctgcgcggccaggccccagcacggcggtgctcgtgtttggcatggctctcgcgctcgcgtctagcagagcctgcgtgtgtgcccccgacgcggcctacgaagcccccactcgaattttgcacggccccgacgcagcagcagcctcgcgcgttctcatgcctcgccgcgagctcgtctggccgtcattgcgagatgatgatgatgatggttataactatggtaatggtaaagaagaaggcgtcgaggcgaatctccaggagttccaggacttcgacgagttcgaggattag

SEQ ID NO: 38612 - DNA, 735 bp, Zea mays
  Peptide Sequence Number=SeqID_80391
atgggcgacggaccatcgatagagaaggagacccccaacagtgtgaacccagtggcccagctcagggttgtcctcagactccaaatcacccaggggagttcggcgaccgttggcgtaggtagtcgttgctccgcttggcacaccagacagtccggtgctacatcggacagcccggtgaattatagcggagtggctcccagaattcccgaaagtggcaagttcggagttgatctccctggtgcaccggacactatccggtggcacaccggacagtccgggaaatgtgcccttgggccatttctaagtattttggtgattgagtgccaacgcaagtgcttttgtgttgatctatgcaatgtggtggacaaagtgcaaatcatgtcaaaagggctggaaataggaaagattgaattggaaatgagatggctctgttcagccaaagtcagctcggtctgggtgcaccggactgtccggtggtgcaccggacagtgtctggtgcgccagactggctctggtgaacttgctgttctcgggagttcgacggcggtgtacggctataattcacccggactgtccggtggtacaccggactgtccggaaggatattcgcaccagacagtgtccggtggtgcaccggactgtccggtgcgccaggcgacagatggcaagatcaaccttcctggaatgctctcaatggctcctagctgccttggggctataaaaggggacccctag

SEQ ID NO: 38613 - DNA, 228 bp, Zea mays
  Peptide Sequence Number=SeqID_80392
atgtccttgagaatatttttccttagtcgggtaagacttgcgaaagtatacttcatactgaaagggaaatgtgcccttgggctatttctaagtattttggtgattgagtgccaacgcaagtgcttttgtgttgatctatgcaatgtggtggacaaagtgcaaatcatgtcaaaagtgctggaaacaggaaagattgaattgggattgagatggctctgttctgtctaa

SEQ ID NO: 38614 - DNA, 327 bp, Zea mays
  Peptide Sequence Number=SeqID_80393
atggcgggcggaaaaacgctcgccggagctaaggaacggtggctgctcggtgaggggacagggagttgtagcgtcaccaaggtgccagtgtcagaatgcctggtcccgaggttgagctgcgccaaaaccgtgtcaaatggatttggtttgagttcaaattttcccagaatgtgttcaagagaaaccctaggtgacactggggtgtcacagccttccccccttaaaggaatctcgtcccgagattcgggccagagtcctcccggggtgaagcgaaggattcgaaaggtaggaggaggggttgggggtgattacataccagcttcctaa

SEQ ID NO: 38615 - DNA, 222 bp, Zea mays
  Peptide Sequence Number=SeqID_80394
atggcgggcggaaatacgctcgccggagctaaggaacggtggctggccgatgaggggacagggagttgtagcgtcaccaaggtgccagtgtcagaatgcctggtcccgaggttgagctgcgccaaaaccgtgtcaaatggatttggtttgagttcaaattttcccagaatgtgttcaagagaaaccctaggtgacactggggtgtcacaacaacaaggcaag

SEQ ID NO: 38616 - DNA, 384 bp, Zea mays
  Peptide Sequence Number=SeqID_80395
atggcagggagatttggccgcggtgcagagcgggttggtggcaaggaggtcgctccgacgagcaattcaggcggtccggagcacggcatcgcccaggaaaagacgctgtcgtgtccaacgcgacatggcgaagctccccggacaggttgcagagggcgtaatgacaccgaatcggggtctcccccgcgcggcggattccacaattcttccttgccacggaggacggcgcaggaaaagctcggtgttgacgtagtggaatctgagagcggaatcgtggaggagatggcgacccggcgatgtgttctcggcttcccacaccaacggcatgacggcgctggccgcaagtatgggtggcggcgctcttccttccatcgtcgtcgctga

SEQ ID NO: 38617 - DNA, 1287 bp, Zea mays
  Peptide Sequence Number=SeqID_80396
atgccgagcttccctccgccgggcgccgtcaccatctgcgagatcaaccgcgacctcgttgcggtggatgccctctccgacgaccgcgccaaggacgcatatggggatgtcctcgggatggtgttcgccccgattccgttccagccggaggctcttcttctcgccagccgcgagcctgctgctcctgccgcggaccaagtcgagcctgctgacactgtgcccaccgctggtttggcagccaccatatccgacttcttcaggcggatggtcttccctccactagacgagtcgtactcaaattcgatcattcttgtttaccagccaaatctgctagaagaatttgacacgcagaaagtaagttggaatccatacaagcattgcttagcattcgtgtctgggaagaaccaggttactgtccaagactttgaggactcagatgctaaagaaccatgcattttaacaaatgatcatcaaacggatgttaaggctgttgagtggagaccaaatagtgggaagatgattgcagttgcctgcaaaggagggatatgcctctggtcggcatcatatcctggcaatgtcccattcatgaaatctggggtcacttcttcttcctttagtgccttccctagaggttctggtggtcagtggatacttgtggatgttcttcgtggctcttctgctgagctcggagcaaattgggacccagaaggtcgagttgcattattatccttttctaactcgacgacgcttggttcaattcacttctcatcgaagccaccatctttagatgctcacctcctaccagttgaacttccagaaatttcctccctgattgttagccgaggcatagagaaattagcatgggacgcatcgggggaacgtctggcactgtcgttcagagatggaaacgaaatgtaccgtggcctgatcgcgatatatgacgtgcggagatctccactcgtctcactatcactagttgggttcatccggggacctggagaaggagcaaagccgctcgcctttgcttttcatagcaagtttaagcaggggccattgctttccgtgtggcatcctttgcttttcctacctttttgttcacatgtggttctgaccgtttacgcagtgttggagcagtggctggtgctgtacgtatccgctgatacttcgtcctcgttgactccagttatgtttacgtgggtctcctgtgtctgggattgtgctgtcaaagactgcatctcttctcctgcgtcaggcaaccctccgctgaccggcaccgcctgcatataa

SEQ ID NO: 38618 - DNA, 816 bp, Zea mays
  Peptide Sequence Number=SeqID_80397
atgtccttcgagaaattgggtccatttgttttccttaattacttcacgagagggttgggaactcctatacggcgtggattaagcaatatatcattagtgcggtggtcacccagtggagattaccttctagttgctaaatttgatggtacttttcacttctgggagacaaacacatggacttcagaaccctggtcttcgtctaatggatatgtgtctggagcaaattgggacccagaaggtcgagttgcattattatccttttctaactcgacgacgcttggttcaattcacttctcatcgaagccaccatctttagatgctcacctcctaccagttgaacttccagaaatttcctccctgattgttagccgaggcatagagaaattagcatgggacgcatcgggggaacgtctggcactgtcgttcagagatggaaacgaaatgtaccgtggcctgatcgcgatatatgacgtgcggagatctccactcgtctcactatcactagttgggttcatccggggacctggagaaggagcaaagccgctcgcctttgcttttcatagcaagtttaagcaggggccattgctttccgtgtggcatcctttgcttttcctacctttttgttcacatgtggttctgaccgtttacgcagtgttggagcagtggctggtgctgtacgtatccgctgatacttcgtcctcgttgactccagttatgttcacgtgggtctcctgtgtctgggattgtgctgtcaaagactgcatctcttctcctgcgtcaggcaaccctccgctgaccggcaccgcctgcatataa

SEQ ID NO: 38619 - DNA, 432 bp, Zea mays
  Peptide Sequence Number=SeqID_80398
atggcgagcaaccccctgcagccgagtttcccatggcgccattcctccctctctctgctgtacatggcgccaagcagcaactccactttccctggccgcgcccaaggtcggcgaccagcctccccttccctgttcttgccgtggccgagccaccacttccccagccgtagccctctcccctccattgtttcatcgcctgaaacaaacccctggccgccatccacacttgtgctcgaccctccccgtgcggcatctaccgatctgcgcagcagtgccagttcgcatcagggagccccctcctcgctgtcctccgtggtgcccgccgactgttcgacaaaatgcgcagcaagccgcgcgatgcagcagcccatccgcgacgccgtcaaaacccttggtgagaaacccccgccgttctcgatgtttattttctga

SEQ ID NO: 38620 - DNA, 543 bp, Zea mays
  Peptide Sequence Number=SeqID_80399
atggaggggagagggctacggctggggaagtggtggctcggccacggcaagaacagggaaggggaggctggtcgccgaccttgggcgcggccagggaaagtggagttgctgcttggcgccatgtacagcagagagagggaggaatggcgccatgggaaactcggctgcagggggttgctcgccatggagagagggcgcaggggaaggtggagtcggctggagcagagggagtatggcgttcaaggagctaggcgccatggggagagggaagagatccctgcggctggcgccattggggaagcttgcctgggcgcctgccatgggggagcttctgcgcggcgtccaaatcaggggaggtggagctcgctcccatgggcgaagaagggcaggggagggagcaggcttgggcgccggattgaggaagaagggcttgggcgccatggagaggaagggagtcgagctccctgcgctctgcctgctgcaaccgtgaggaagaaagggacagggaaaaagaaaatggcggccaggggggtagatgaataa

SEQ ID NO: 38621 - DNA, 333 bp, Zea mays
  Peptide Sequence Number=SeqID_80400
atggcgtgtacgactgatcaatgcgatcttcctcatgggttgatggagctcttcccgcgatgcagcctgacggtgtttggtgcagcggagaggcagcttgacgttggtttcggctacatgagccaacagggtagcagttctggcaacaatttggcacttttctcatttgattttcttttggaccgatatcagaaccacgtcgccacgacttatgacatgcagaacgtggagaatttgaatgccgtacagaacgtggagaatttgaatgccgtacgcgcgatggttggctttggccagttacgcatgacttcgtcaacatatctttttatttga

SEQ ID NO: 38622 - DNA, 495 bp, Zea mays
  Peptide Sequence Number=SeqID_80401
atgcataaatacgaagaacagagtgtacccagcggagggaccgatgctcaaggcaccagtggctccattcacacgagacatctcgtgtgtttgttcgatgtagccgtacgaaagctgtggacgatcacgcgagcagtcgcgaagacgctccccaaaaatctgatcgcccgcacacccgtgcaaggaatattcggaccaaggttgatggagctcttcccgcgatgcagcctggcggtgtttggtgcagcggagaggcagcttgacgttggtttcggctatacgagccaacagggtagcagttctggcaacaatttggcgcttttctcatttgattttcttttggaccgatatcagaaccacgtcgccacggcttatgacatgcagaacgtggagaatttgaatgccgtacagaacgtggagaatttgaatgccgtacgcgcgatggttggctttggccagttacgcatgacttcgtcaacatatctttttatttga

SEQ ID NO: 38623 - DNA, 1182 bp, Zea mays
  Peptide Sequence Number=SeqID_80402
atgaggcgaaaagacggcaggtatcccccattcgggggcttggaaggggctgagtcttctcctacacgctccaaggccctcccctgcggcgcgggggctgggtcccgcatgtcataccaacgggcgaaaggggcgggcagccatgcaggcggcatgcaaccgcgccaagtgggcgcgcttcttcaactcccaacacgcccagcctggaggcccaggcccacgcgtcatgcaaccggcgcgccgactgcttcgtgcatgcaacagcaccgccacttgcgccaccaccgcgcctcctcgattgcggaaccaataccgcgactcgaggcgacccagcgcacgacccagcagcgccagcatggcgcggcgatcaatgcggccaaaaatgggccggcagtaatgacggtggcaggcgggcgggagcagcggtcacgtcgtcggccaagctcacgtcccatccgggggcagcaagagaaccccctctcacggcgtgaagacaacgcgcccgagaagcgggcgatgcttcgccttcgccataatgaccgcgtcagtaaagggaccgggaaagggggataccccgaaaaggatccttccccaggaaggaaccaggctccgagcctccctactgatcagaggttcgaaggctggccccccgatgggttcggcagccgcctcagatcgcgtgggccctacacccactactggtcagaggttcgaaggccggccccccgaagggttccacggccgcctcaggctactcgggctccgcgcccattactgatcaggggttcgaaggctggcccccgaagggttcacagccgcctcagacgccgagcgagggatgaccatgggtacgttcgatacataaccaaggctcgggctgcgctcccgagctcaccggagacaccatgttcggcgcccatcgagggcaacatggcgctttcccccctcctccttgcggaaaggcgatgcaggggcgtatataaaaaagccgagtatgtccctgatcgccctctcgccctgtgcggaggctcgggggctgctgtcgcaaacccggctccggccgaaccgttgacagcgtcaacataccagcccgagaacttgggacccgaccgtacacccgggctacggccagctcgcatgagggaacaaccagaccggccgaagcattacgcgaggcattaa

SEQ ID NO: 38624 - DNA, 303 bp, Zea mays
  Peptide Sequence Number=SeqID_80403
atgaccaccaatccgggaccaaagaacgacgtgcgacgaggtcgaggacgagctcggacagggggaacagggagcagcaatcgagcagggcgcgagctgcacgcgacctcggcgcgcagggacgagctcggcaaggaagcagagcgcgcacaagggagcaggccgggcgcggtagtaggcacggctgtggcagcaaggagagcgtggccgtttaacgggccggcccggcacaactaccaggccgtcgtgccgtgcctgggccgcgggccggccggacacggcccgattatccatcgtgcctaa

SEQ ID NO: 38625 - DNA, 471 bp, Zea mays
  Peptide Sequence Number=SeqID_80404
atggaactctctgcgtcgcgcgtggtcctgctcttctcgccgcgctcggatcatgtctccctgcgcgcactcccggattccgtctccctcgcgtgccccttgccgaactcatggtcgcggtctcaccttgctgccacagccgtgcctactaccgcgcccggcctgctcccttgtgcgcgctctgcttccttgccgagctcgtccctgcgcgccgaggtcgcgtgcagctcgcgccctgctcgattgctgctccctgttccccctgtccgagctcgtcctcgacctcgtcgcacgtcgttctttggtcccggattggtggtcatgcggctgaaggtcgtcgtcgttccgtgcgtcatcaagaaatccctagcgtcggatgaagacgaagctagcagcgtgatgttcaccaagtgcgcaacaaaaagctcgaacaagtcgttgatcgtcatcctcgtctacgccaagatctga

SEQ ID NO: 38626 - DNA, 1290 bp, Zea mays
  Peptide Sequence Number=SeqID_80405
atggaaagtgaaattgttcggatgtttcatcctccaattcgtcagagtgaggaagcaatagcaaccattgtgccaaggtacacatattctatgcgtgtcttggatgagaggttcattaggatcctgaagatattcaagtggggccctgatgctgagaaggcgctggaggttctcatgcttagagttgatcactggttggtacgagaggttatgaaaactgacgttggggtcaatgtgaagatgcagttcttcagatgggctacaaagcggaggaattatgagcatgacacatccacttacatggcattgatacattgtttggaagtagtggagcagtatggtgagatgtggaagatgatacaagaaatgaacttttcagatgtagttcggaagctggggaatgctaagatggtcagcaaggcaattgcaatctcctaccatatcaaaacacggaagtgccagccaactgcacaggcatataacagcatgataataatgttgatgcatgagggccaatatgagaaagtccatcaactatacaatgagatgagcactgagggtcattgcttcccagacaccatgacatatagtgcattgatttttgccttttgcaaattaggtcgacgtgattcagcaattcagttgttgaatgagatgaaggagatcgacaagtgggccagatgttacactgccgcagacccacctcgccatgaccatgatcgtctcgttggtggctttgtccagcgccttgtacaccaccccgagcagtgggtgatattccgtggaaaagacggaaggcctgggtgtgttcagaacacatgtgctcacagggcttgcccgctgcatcttggttcagtgaacgagggtaggatccagtgcccttaccatggttgggagtactctactgatgggaaatgtgaaaaaatgccatcaacaaagatgctcaacgtgcgcatccagtcattgccatgctttgagcaggaaggaatgatctggatttggcctggggatgacccaccaaaggctacaatcccttctcttctgcctccttcaggatttatagttcatgcagagcggtgtgttcttctgatcatccaacagatagtgatggaactgccagttgaacatgtactactcttggataacctcttggaccttgctcatgctccttttacacacacatccacctttgccaaagggctggagtgttccaagtttggtgaagttcttaacacctgcatctgggctccaagggtcttgaacgaggaccttcggcttgttcttggttag

SEQ ID NO: 38627 - DNA, 255 bp, Zea mays
  Peptide Sequence Number=SeqID_80406
atggtctggatttggcctggggatgacccaccaaaggctacaatcccttctcttctgcctccttcaggatttacagttcatgcagagttgtttgaagcccctcttgacgaaaaagaaatattgttacgatatagctctgctcttgttcaaggtttgatttgttcttggtttcatgtaggaatcaaggaactagctgaggtctccttccctcgagatgacaaacaaacagaaaaaactaccctcaaggtgacctaa

SEQ ID NO: 38628 - DNA, 426 bp, Zea mays
  Peptide Sequence Number=SeqID_80407
atgtcgacgggcatccgtgggttggtcttgaagaggcccttcatcttggccccgtcgtccgccgccaccgcagtggctgtcaggcgcgacggggatggtaggagaggttcacgggatgccagagaagatatgggtgcaaggaattggacggagactcaccggttagctctgtccacgcgcggcggcgaaggaccgaagtccggtgaggtcgatctcgggcctccggtgaagtccggcttggtccgagggctcggaaagcttcacgggccactggcggagcaagccgaagcacttgctcaacttggcagtggctggagtgtgctggccacggtggccgaagctctggcggcaatggcgggcggaattgagctcgccggagctaaggagaggtggctggccggtgaaggtgagcgcgaggtgaagtga

SEQ ID NO: 38629 - DNA, 141 bp, Zea mays
  Peptide Sequence Number=SeqID_80408
atgtcgacgggcatccgtgggttggtcttgaagaggcccttcatcttggccccgtcgtccgccgccaccgcagtggctgtcaggcgcgacggggatggtaggtacaaggggtcaagcagtctcattagctgcgagaagtag

SEQ ID NO: 38630 - DNA, 423 bp, Zea mays
  Peptide Sequence Number=SeqID_80409
atgggcgaagcttctctcggcaaagcttgggaggcccctcacgacgaccgaaccctgattttcccatgggcggctagcccttcctctcccctatcgacgaggtgctcacggcccacagttccctgcggttcgctcggccccagatggggttatgtgatcgggaggccgacgcgtgcggctgaggaagatgacccatggggcccgccagtcagtggtaccgtgcggactccgggtgaagcggcagacgtgcgggtcccccggatcggtgtcacggacgagcacacgaccgaacctgtgaggctggcacatgggcccaccggtcagcggagtcgagccaagcgcgcggacgaggcagtgttgggccgtggtgacgggactgctgggctgagaggcttggggtatggcccagcgcagataccttag

SEQ ID NO: 38631 - DNA, 363 bp, Zea mays
  Peptide Sequence Number=SeqID_80410
atgtgccagcctcacaggtttggtcgtgtgctcgtccgtgacaccgatccgggggacccgcacgtctgccgcttcacctggagtccgcacggtaccactgactggcgggccccatgggtcatcttcctcagccgcacgcgtcagcttcaacggaccgcggaaagcgcgggcgcttcaccgcctcgtctgcgttctgttccggcggctccggggaagacgtccctatataacccgacgaccttaccctcccgatcgcataacccatctggggccgagcgaaccgcaggaactgtgggccgtgagcacctcgccgatagggagagaaggctagccgccatgggaaatcaggttcggtcgtcgtga

SEQ ID NO: 38632 - DNA, 603 bp, Zea mays
  Peptide Sequence Number=SeqID_80411
atggatcggcaaggtcgaagtgaccgcagtcacttcgcccttccactgaccgacctgacaggaaaacagcgccgtccgcccctctccgactgctgtgccacccaccaaggtgaggctgacaacagccaagttcagcctcacgcacaacaggaagctccgcctcgtccgaccttgggcctcggcctcaggaggaggtctccgcctcgcccgaccccagggctcaacctcagcctcggcctcggaaggaggactccgcctcgcccgaccccagggctcggcctcaacctcggcctcggaaggtggtctccgcctcgcccgaccccagggctcggcctcaacctcggcctcgggaggaatcgcgtcctcgcccgaccccagcctcggcctcaggaggagtctccgcctcgcccgaccttgggctcggaccgaccgcgccacgagggatacatcattaccctacccctagctagctcaggctacgggggaacaagaccggcgtccccatccaggctcgccccggtaacaagtaatgatggctccccgcgtgcgcccatgacgatggtggttctcagcccccctacggaagcaaggagacgtcagtaa

SEQ ID NO: 38633 - DNA, 474 bp, Zea mays
  Peptide Sequence Number=SeqID_80412
atgaaggccaagtcacaccaacaaccaatcatcctaaggagcacctgcaaaaattatgccacaagcaaggcagagtatactaatactcaactagacttacccgtgaccacacttgtacccaccataaccggaatgggagactacgtctcaggtcgcgtgagggataaagtctgcggcaaactaggactttctggaaatcttaaaagagaggagccagagccctatgtacatgccaacgtgactatcggagaggtgctagagccctatgcacgcggtgtcgtggccgtcggaggagcgcttgggccctgtagaagcacacctatcagggctgctgggaccttgctgacatctccttgcttccgtagggggctgagaaccgccgtcgtcatgggcgcacgcggggagccatcattacttgttaccggggcgagcctagatgggacgccggtcttgttcccccgtagcctgagctag

SEQ ID NO: 38634 - DNA, 663 bp, Zea mays
  Peptide Sequence Number=SeqID_80413
atgcagggcgtcactgtgcagtccccctccacttcttcgcgcggaagaatccgcccgcggcaccgactggaagcttcgcggtcgtcttctctcctgttcgaggcgcctgcgtttcggcgattcgcgacgaggcgacggcgattcgggcgcgctagcgtgccggtccccgtcggagctgtggacgacgaagtggaggtggtcagcaaggtgctccgttcaagaccgaagacgaagcgggcgcaaatccggctccgtccagcacagttccgaatggcatcctcgaaagaagacaccatgaagtctttggttaaagtacttgtcgactgtgccgaggatgccacaaaatcccttcgtggattagtagatcatgcattagaccacatgcatgacgaagagatattagctagaaccctctttgccatgaaagaaaaacttgatttgcttcaccaagatgccttagaggcaaaagtccaagcttttcctgaaattgctaagtacgagggggatgacataagtgttgaaccgacatctctttcgacccctccaacagttactgaaccatctgtcgacgaagaggagttctactgcccggatgtgagtgacgagtggtacttcagcgactcagataggtcaactcgtaatagctattggaatatttattag

SEQ ID NO: 38635 - DNA, 663 bp, Zea mays
  Peptide Sequence Number=SeqID_80414
atgcagggcgtcactgtgcagtccccctccacttcttcgcgcggaagaatccgcccgcggcaccgaccggaagcttcgcggtcgtcttctctcctgttcgaggcgcctgcgtttcggcgattcgcgacgaggcgacggcgattcgggcgcgctagcgtgccggtccccgtcggagctgtggacgacgaagtggaggtggtcagcaaggtgctccggtcaagaccgaagacgaagcgggcgcaaatccggctccgtccagcacagttccgaatggcatcctcgaaagaagataccatgaagtctttggttaaagtacttgtcgactgtgacgaggatgccacaaaatcccttcgtggattagtagatcatgcattagaccacatgcatgacgaagagatattagctagaaccctctttgccatgaaagaaaaacttgatttgcttcaccaagatgccttagaggcaaaagtccaagcttttcctgaaattgctaagtacgagggggatgacataagtgttgaaccgacatctccgtcgacccctccaacagttactgaaccatctgtcgacgaagaggagttctactgcccggatgtgagtgacgagtggtacttcagcgactcagataggtcaactcgtaatagctattggaatatttattag

SEQ ID NO: 38636 - DNA, 222 bp, Zea mays
  Peptide Sequence Number=SeqID_80415
atgtccgaacttcaagctcgtgactttcattttgcgattattggttcagcctcgattgcatttatcaatgacccgataagagagcttaaagcactcatgcctaggactttgttttggatccgtttgcaatctagagagcacaatgatattgcgcgcattgctaggaacttcatcattaagatgaacctcttcgtgaggcaaatcaccatcagggtgaattaa

SEQ ID NO: 38637 - DNA, 261 bp, Zea mays
  Peptide Sequence Number=SeqID_80416
atgtccgaacttcaagctcatgactttcattttgcgattattggttcagcctcgattgcatttatcaatgacccgataagagagcttaaagcactcatgcctaggactttgttttggatccatttgcaatctagagggcacaatgatattgcgcgcattgctaggaacttcatcatgaagatgaacctcttcgtgaggcaaatcaccagcagggcgtccccgagaatagatcaaataccgataagtcaaatgtggatatga

SEQ ID NO: 38638 - DNA, 1686 bp, Zea mays
  Peptide Sequence Number=SeqID_80417
atgaacaaggatcgccaggatgctgcgcagaagcgtcgggcggtcatcaggctccccgatcctaggcgtgaggcgaagagagcgcgaaggctgccgcccccggcggtagccagccgacgctggctgcgaaaccggctgcgcccggatccagcaaggtgtcggagagcacgaaggcagtcatcgccggcggaaccaagtctaccccgggcgaagctgcgaaggtccgggagctgccttcgccggggaaacgtgttaccgacttcggcacgaatattagcgtggacgactatttcgttggtaagtagtttttttgaccggtggtacgttgcaaggtcgggcgaggggcaaatggttgttgtcccgcatgcggtggcaaccacggcgtcaactgcggtggttgaggtgaagcgtggcgctttctgcgcgagcggcgagatttcgttggccgctgccgtcaaggacgaggcgggcaccatgtcccgtcggctgagggaggcgtcgcagcagctgtcgcagcagctgtcgcagcagctaagtcaagcggccgacttcgccgaccgcgtggcgtcgggtgcccttactgtagatgtgtctgccgaagtcgagagacttcgggcgcagcacgtggacgccgtccgggagaagtcggctgcggagagcaaaaaccacaggctggcggagaaggtggccgccctggaggccgagaagacggacctccggcgccagctggtggaggaaaggagggaggccaaccaggccatcgccgaggtgcaggctgcgcaggtggaggccaaattggcgcgggcggagggaagtctcgccagccaacgcgccgaggaatgggaggttgagcggacgcgtgcacaactcgtggactcgtaccgcgagctgggtgcgcggactgctgacttcgaggtgcccgaccgagaggcgggccttcgcttcctcgagtggttgcaagaggaattgctgatggagcgtgccgaggacgtcaaggacttcggaggtttggtcgacgcgccgcccgaggctgcggagggcaaaccggtgctaccctcggatgctggtgaaggcccatcgaacgcgcccgtgcctactgtggccggcgaagaccctgtgtcggcccctgtgccaacggtcgaaggcgcccaggaggtggtggcggagccggcagtcaaaggccctacggccgcggccgcggccgcgccctcgcagggttttgggcctgcgcacgcaaccgctactgacagtgctaattttgtggcggcttcgatcgtagttgcggaaaatgattcagatgattctgtgtctaagttttttgagtctgatgattctgggagttcagtggtgtggacggaagagtcttcggatgaggatttggattattttgcggcattggatgtggctgcggcggaggcttctccgcgtgtgatggatgctgaagttcttcctggtccgagtgctgggcgtaggcggcgaagggtggtggcgaagcgtagagtgagtgaggtggagggtggtcgtcttcgtgtggacagggctggcaagcgggaattgttgtccttgccagttggggcgagtgtaggtgagggggagttgcgaagtctctttgagggtgaggagctgaggataatgctgtttaactacagggagatgggtatcatcccgaaggttgaaccaatgtaa

SEQ ID NO: 38639 - DNA, 1682 bp, Zea mays
  Peptide Sequence Number=SeqID_80418
atgaacaaggatcgccaggatgctgcgcagaagcgtcgggcggtcatcaggctccccgatcctaggcgtgaggcgaagagagcgcgaaggctgccgcccccggcggtagccagccgacgctggctgcgaaaccggctgcgcccggatccagcaaggtgtcggagagcacgaaggcagtcatcgccggcggaaccaagtctaccccgggcgaagctgcgaaggtccgggagctgccttcgccggggaaacgtgttaccgacttcggcacgaatattagcgtggacgactatttcgttggtaagtagtttttttgaccggtggtacgttgcaaggtcgggcgaggggcaaatggttgttgtcccgcatgcggtggcaaccacggcgtcaactgcggtggttgaggtgaagcgtggcgctttctgcgcgagcggcgagatttcgttggccgctgccgtcaaggacgaggcgggcaccatgtcccgtcggctgagggaggcgtcgcagcagctgtcgcagcagctgtcgcagcagctaagtcaagcggccgacttcgccgaccgcgtggcgtcgggtgcccttactgtagatgtgtctgccgaagtcgagagacttcgggcgcagcacgtggacgccgtccgggagaagtcggctgcggagagcaaaaaccacaggctggcggagaaggtggccgccctggaggccgagaagacggacctccggcgccagctggtggaggaaaggagggaggccaaccaggccatcgccgaggtgcaggctgcgcaggtggaggccaaattggcgcgggcggagggaagtctcgccagccaacgcgccgaggaatgggaggttgagcggacgcgtgcacaactcgtggactcgtaccgcgagctgggtgcgcggactgctgacttcgaggtgcccgaccgagaggcgggccttcgcttcctcgagtggttgcaagaggaattgctgatggagcgtgccgaggacgtcaaggacttcggaggtttggtcgacgcgccgcccgaggctgcggagggcaaaccggtgctaccctcggatgctggtgaaggcccatcgaacgcgcccgtgcctactgtggccggcgaagaccctgtgtcggcccctgtgccaacggtcgaaggcgcccaggaggtggtggcggagccggcagtcaaaggccctacggccgcggccgcggccgcgccctcgcagggttttgggcctgcgcacgcaaccgctactgacagtgctaattttgtggcggcttcgatcgtagttgcggaaaatgattcagatgattctgtgtctaagttttttgagtctgatgattctgggagttcagtggtgtggacggaagagtcttcggatgaggatttggattattttgcggcattggatgtggctgcggcggaggcttctccgcgtgtgatggatgctgaagttcttcctggtccgagtgctgggcgtaggcggcgaagggtggtggcgaagcgtagagtgagtgaggtggagggtggtcgtcttcgtgtggacagggctggcaagcgggaattgttgtccttgccagttggggcgagtgtaggtgagggggagttgcgaagtctctttgagggtgaggagctgaggataatgctgtttaactacagggagatgggtatcatcccgaaggttgaaccaat

SEQ ID NO: 38640 - DNA, 420 bp, Zea mays
  Peptide Sequence Number=SeqID_80419
atgccttttgctaattgtaatcttgccgacggagagtacgtgctcatccccgagcaaggacctatccaagaggaggaccaggagcaggcttcagaggctgctattgaggatctccccgcacccccagcaattgaaggcaagccccgctatggtgggtacaagtgcggccactgcacgacggcagtcggggtcagtggagcattgtatgccaaggcggtgaggcctggacgcgaacggggaatcgatggggacggttgtcatgtgtggggtcggagtaccctgacatgccgtgtgtttaggttcaccttgcaaggtaccatgcaggatgtagttgatggtgtgacttggcctaccaccctgccaccgggttggacggtcgagtgggatgttgctccggcaggagaggagcatgaggagtag

SEQ ID NO: 38641 - DNA, 177 bp, Zea mays
  Peptide Sequence Number=SeqID_80420
atggggacggttgtcatgtgtggggtcgggagtaccctgacatgccgtgtgtttaggtttaccttgcaaggtaccatgcaggatgtagttgatggtgtgacttggcctaccaccctgccaccgggttggacggtcgagtgggatgttgctccggcaggagaggagcctgaggagtag

SEQ ID NO: 38642 - DNA, 513 bp, Zea mays
  Peptide Sequence Number=SeqID_80421
atggggaagcctgtcccatcactcctcatgctcctcctcagccgaggcagggtcccactcgacagtccaacccggtggcaagatggacggccaagtcactccagcaaccatttcctccagagaacctgtaaaaattatgccacaagcaaggctgagtatactaatactcagctagacttacccggtcagcatggatcaagcagtctcattagctgcgagaagcagacgattcgaatcgagtttttaaaccttgcaaggttatgcataaaaccggggcttgccttccaaagcagtggcagacaggtcctctggtgcaggctcgggtgctggatccggggctacctcctgagcatctccttgctccggcacgaggatgtactctccgtcagcaaggttacagtctatcgagatgcaatgaacatggtttctagtgtggttttgaactacgacagtgttttaataatttccaaaaattctgtaaaaattacagtgggttgtcaattgctattctag

SEQ ID NO: 38643 - DNA, 501 bp, Zea mays
  Peptide Sequence Number=SeqID_80422
atggggaagcctgtcccatcactcctcatgctcctcctcagccgaggcagggtcccactcgacagtccaacccggtggcaagatggacggccaagtcactccagcaaccatttcctccagagaacctgtaaaaattatgccacaagcaaggctgagtatactaatactcagctagacttacccggtcagcatggatcaagcagtctcattagctgcgagaagcagacgattcgaatcgagtttttaaaccttgcaaggttatgcataaaaccggggcttgccttccaaagcagtggcagacaggtcctctggtgcaggctcgggtgctggatccggggctacctcctgagcagctccttgctccggcacgaggatgtactctccgtcagcaaggttacagtctatcgagatgcaatgaacatggtttctagtgtggttttgaactacgacagtgttttaataatttccaaaaattctgtaaaaattacagtgggttgttaa

SEQ ID NO: 38644 - DNA, 474 bp, Zea mays
  Peptide Sequence Number=SeqID_80423
atgcccctgcaccacctcagggcatcccagctgctggaggagaccccgacggagacggggacgatgacgacgccggtggcagttcgagccatggcacgcagcggtcagaggagccagagccggagggatggatccggggtagctgatggccttgacctaaagcactaccctcgccgttcgaccagcagtgctagaggtgtgattgtctcgccagtcggtgagggcaatcccaggctgagcagcatggtcaacttggccgccgtgctcaacatagagttggaccacgccctcgacgagttgggcaaggttagagcggaggttgtggaattgtgtgttgaatgcgcggcatgccactatcttgatggtggttctcccgcccttgtagggattcagcacccttaccgttcaccgccccgtggtcgcttcgactatggtaccccagactgcaggacccagatagatttggatccctag

SEQ ID NO: 38645 - DNA, 192 bp, Zea mays
  Peptide Sequence Number=SeqID_80424
atgcccctgcaccacctcagggcatcccagctgctggaggagaccccgacggagacggggacgatgacgacgccggtggcagttcgagccatggcacgcagcgggattcagcacccttaccgttcaccgccccgtggtcgcttcgactatggtaccccagactgcaggacccagatagatttggatccctag

SEQ ID NO: 38646 - DNA, 654 bp, Zea mays
  Peptide Sequence Number=SeqID_80425
atggcgcacaccaggctggaggccgttctcgagacatccgagaggtggcagatcgccgacgctgccttgctgcgctggcgctcgaagctgaagcgcgtcgcgcgatatggcttcgcccagacccgttgtgctgcaagcggcatgatcagcacgagctcgatcggccacggtagcgagtcaggcatcttggggttaggaggaggagaggctccccagcagcaagatcctcctagtctgaaaagctggaatcgtcttctcgccccaagggtagaagagatcatgctgcccatggcaattgattacttttgcaagaacgagaaggcgacgatctaccagatgctctggaagggtctaagcatggcactgcgcggatcaatcaaggaccggattcgtcacagagatagttataaatcagacgacgacgacgacgagcccagcaaccggctactgctggacatgcatgagctaagcaagaggggtggtcacctgccacagcagccggcgtccagctccgcgttggtcgcccgccgccgccgccgccgccgctgtctgcgtggccatcaccatgagcagttgcgccgccaccaccaggagcagcatgcaggaaaccacggcgccgctgcgagccatcgcttcgttccacaaaatcagtag

SEQ ID NO: 38647 - DNA, 711 bp, Zea mays
  Peptide Sequence Number=SeqID_80426
atgccgccgaggcgaagggcttgggcgcatcggcaagcgcgccgaagaagggcgccacgtggaggcgctcgtgggcggcgcgcgagcgggttcgccgagtggatgtcggcgtcgcaggaggcgcagagcgcggcagcgtccgcgcggcacgtgaccaccgtcggcgtgtgctcgcaaacctcgcagagccagacccgcgcgtggcgcgacccggcgccgtgcgcctgcgcgtcgcacccggcgcataggaacgcccgcgtccgtgcggcagtagaggcgcgccgcctcgacgccgcacgcgtcatgagagcagcgaagaggaggagccgagtggtgcgcgacgcgttaggattacgaccgctgaacagtatcctcagcacgggcactcagtggcttcttcgcccagacccgttgtgctgcaagcggcatgatcagcatgcgagctcgatcggccacggtagcgagtcaggcatcttggggttaggaggaggaggtgcgtgtctagagccagttgtttcagtaaaccttcagagtgccgcgtctcggtgtgggggtgccacaagcataggccgggccttgctgtctgaattcagagactcccagccgcaagatcctcctagtagtgtaaaagctggaatcgtcttctcgccccatgggtattcatcagaagactacctgccgcgtgtggatacaggcatacagctccggtga

SEQ ID NO: 38648 - DNA, 780 bp, Zea mays
  Peptide Sequence Number=SeqID_80427
atgacgcgtgcgggcgtcgaggcggcgcgcctctactgccgcacggacgcggcgttcctatgcgccgggtgcgacgcgcaggcgcacggcgccgggtcgcgccacgcgcgggtctggctctgcgaggtttgcgagcacacgccgacggtggtcacgtgccgcgcggacgctgccgcgctctgcgcctcatgcgacgccgacatccactcggcgaacccgctcgcgcgccgccacgagcgcctccacgtggcgcccttcttcggcgcgcttgccgatgcgcccaagcccttcgcctcggcggcatcgcccaaagcaactgacgacgacgggagcaacgaggacgaggcggcgtcgtggctcctccccgagcccgaccacgggcagaaagaaggcgccacgacagaggtgttcttcgcagactccgacccgtacctcgacctcgacttcgcgcgttccatggacgacatcaagaccatcggcttccagcagagcaggccaccagagctcgacctcgccggcaccaagctcttctactccgctggctggcaggacgcgctgcgggaggagcttcttgccggcgagaaggtgccggttgagagggtgaaagggcatgggcatgcggcgacgtcgtcgtggcgtcccgccgccaagctcagccagcctcacgaactcgccagcgccatctcggcatgggcatgctggcaggagaactggcagaatggcgtgagctcggccagtacacagaacatggtcacatgcaagtttaacgggtccccgtag

SEQ ID NO: 38649 - DNA, 888 bp, Zea mays
  Peptide Sequence Number=SeqID_80428
atgccgcttgcagcacaacgggtctgggcgaagaagccactgagtgcccgtgctgaggatactgttcagctgttgtttgctgtgcgtgtcagcaactcagcatttggcacccacgaccacgagaagtcttcacttaggcgcacggcgccgggtcgcgccacgcgcgggtctggctctgcgaggtttgcgagcacacgccgacggtggtcacgtgccgcgcggacgctgccgcgctctgcgcctcctgcgacgccgacatccactcggcgaacccgctcgcgcgccgcccacgagcgcctccacgtggcgcccttcttcggcgcgcttgccgatgcgcccaagcccttcgcctcggcggcatcgcccaaagcaactgacgacgacgggagcaacgaggacgaggcggcgtcgtggctcctccccgagcccgaccacgggcagaaagaaggcgccacgacagaggtgttcttcgcagactccgacccgtacctcgacctcgacttcgcgcgttccatggacgacatcaagaccatcggcttccagcagagcaggccaccagagctcgacctcgccggcaccaagctcttctactccgctggctggcaggacgcgctgcgggaggagcttcttgccggcgagaaggtgccggttgagagggtgaaagggcatgggcatgcggcgacgtcgtcgtggcgtcccgccgccaagctcagccagcctcacgaactcgccagcgccatctcggcatgggcatgctggcaggagaactggcagaatggcgtgagctcggccaggagtttcccgtgggtaatcggggatcgggtcaccattgctatctctagtgaaggtcgccctatgggctcaacgtgtgtgagccaaggtgactag

SEQ ID NO: 38650 - DNA, 444 bp, Zea mays
  Peptide Sequence Number=SeqID_80429
atgcccggcgattctgttgaggacgaagctgacgctctgggtccacccgccagagaaacaggcgtaaggcgcgagagggatggctggcccatggggcccatgtggcagaaggcgaatggtgcggagcacacgcggttggcaattgggtctcgatgcgcagtgagcacggcggtgcgcacgcaggcagtgaatgaccggtgggccccagggatgggcttcgctccgataccagctgtgacggaacctccccagtcattaggcccacctacagttatccttgtccatcggacctcagataaccctgcaggtgcacctgatcacttgacaagttcggtatctgtattctttaccttgcccaagagcgtttcacctgtcacgcagatattacaacacatcggaggaacgagaatgcggaagcagttacaacaacttattttagattaa

SEQ ID NO: 38651 - DNA, 333 bp, Zea mays
  Peptide Sequence Number=SeqID_80430
atgggcttcgctccgataccagctgtgatggaacctcccaagtcattaggcccacctacagttatccttgtccatcggacttcggacaaccctgcaggtgcacctgatcacttgacaagttcagacgagcaagctactgaggatcctggtgcccagcagatagaagttgctgagcaggagctcattgaagatgctctgatagagatcgctatggtacaatacctgcaaaagatcgctggtgcactgaacctcaccgctggtgactcccgcgcttggattcgtgccagcgctgcaatttgtgcccggtggcacgctgataactttgcggggtga

SEQ ID NO: 38652 - DNA, 1221 bp, Zea mays
  Peptide Sequence Number=SeqID_80431
atggccgccgccgccctgctgcgccgctcgccggcggcgcgcgcgctcctctctccggcgctctcgtcccgcctcgtcgcgtccaagccccactcctcctcccccacgcagccgccccccgaggcaaagggcgcctccagcacgaagaccttctcgatctaccggtgggacccggactcgccgtcgaccaagccgcacctcagggactaccaggtggacctgtccgactgcgggccgatggtgctggacgcgctgctcaagatcaagaacgagcaggacccgtcgctcaccttccgccgcagctgccgcgagggcatctgcgggagctgcgccatgaacatcgacggggacaacggcctcgcctgcctcaccaagatctcctccgcctcctcggcgtccaccgtctcgccgctgccccacatgttcgtcatcaaggacctggtggtcgacatgaccaacttctacaaccagtacaagagcgtcgagccgtggctcaagcgcaaggacccgccgccgcagctaggcaaggaggtcccgcagaccaaggccgaccgcgccaagctcgacggcatgtacgagtgcatcctctgcgcctgctgctccacctcctgcccatcctactggtggaaccccgaggagtacctcggcccagccgcgctgctccacgccaataggcttccgctgtgggggacacttatgaaaccaaaacccaacatgttcatgcaccttcaagctcgaggatatcacggggtgtcagagaagagaaacctgcgggaccacaaacgtagattgcttgcagaaaagtttgagctgagaggaaagctgtataaggctgtctgtagggaccctgatcttccattggatatgcgggagaagttccgctataaattgtccaagttgccaagaaatagctccatgacacgccttagaaaccgctgcattttcacgggacggtctcgtgctgtctacaagaaattccgcatgtctcgtattgtgttccggacattggcaaacaagggtgaactgatgggcgtaaagaaagcatcgtggtggatacaggacagccgtgaccagttcaccaaggagcgcctggacgccatcaacgacgagttcaagctgtaccgctgccacaccatcaagaactgcacgcatgcctgccccaagggcctgaacccggcgaagcagatcgacacgatcaagaagctccagttggacgcctga

SEQ ID NO: 38653 - DNA, 366 bp, Zea mays
  Peptide Sequence Number=SeqID_80432
atgactgccccgcgaaccactcgtcctgtcgcattaactctgcggcgggacaggcggcacctttggcaggagaagcgggcgacgcttcgccttcgccataatgaccgcgtcaaaaaaggttcgaaggctggcccctcggaggggttcaacagccgcctcagagcgctcgggctccgcgcccactactggtcagaggctggcccccgaagggttcacaaccgcctcagacgcagagcgagggatgacccgggaatcccatcagagggaggcatcgagccctcggaccccgtcaaaaggggacccggtccggcaaatcacccgcaggtacttttggagcgcgcctccgggcctctagccgacccctaa

SEQ ID NO: 38654 - DNA, 156 bp, Zea mays
  Peptide Sequence Number=SeqID_80433
atggcctttccgttcggagggctcctcaccgctggaatcgtgctcttctctggaacgtgctacaccgtggcttatcttgaagacatgaagttttcttcaccggcaccattggggggctttgcgtttattgctgcttgggctagcctcctcttctaa

SEQ ID NO: 38655 - DNA, 624 bp, Zea mays
  Peptide Sequence Number=SeqID_80434
atgtggagccccatagacttggacctggcggagctgctcctagagggcttcgtcaagaggacgagcgacagggagctggtgcggccaccggcagcgacgccacagaaggaggtcctcgtgcacatggccatgggtggtttcgtcatgcactacggggtagcagaggcgcagttgggtttgctaatcgctattttgatgctgattccaggactgccaaagatggacagtcttgtgaatgctctgaagttgatccagcccatcaccaagcgccccaacgttgtttggcacacagcatccctgtaccatctcgtccacaccgcggtgctgctcgggacgcccatcaccaagcgccccgacgttgtaccagtgctgcatgcttcaatatttttgctgtttggagggctcctcactgctggaatcgtgctcttctctggaacgtgctacaccgtggcttatcttgaagacaggaagttttcttcaccggcaccattggggggctttgcgtttattgctgcttgggctagcctcctgtatgatattttggttgagaacctcatgcgcacaaggggatcatgcatgtcatccggaagaaggaagatcatagaagatatgtctctaatctaa

SEQ ID NO: 38656 - DNA, 624 bp, Zea mays
  Peptide Sequence Number=SeqID_80435
atgtggagccccatagacttggacctggcggagctgctcctagagggcttcgtcaagaggacgagcgacagggagctggtgcggccaccggcagcgacgccacagaaggaggtcctcgtgcacatggccatgggtggtttcgtcatgcactacggggtagcagaggcgcagttgggtttgctaatcgctattttgatgctgattccaggactgccaaagatggacagtcttgtgaatgctctgaagttgatccagcccatcaccaagcgccccaacgttgtttggcacacagcatccctgtaccatctcgtccacaccgcggtgctgctcgggacgcccatcaccaagcgccccgacattgtaccagtgctgcatgcttcaatatttttgctgtttggagggctcctcactgctggaatcgtgctcttctctggaacgtgctacaccgtggcttatcttgaagacaggaagttttcttcaccggcaccattggggggctttgcgtttattgctgcttgggctagcctcctgtatgatattttggttgagaacctcatgcgcacaaggggatcatgcatgtcatccggaagaaggaagatcctagaagatatgtctctaatctaa

SEQ ID NO: 38657 - DNA, 624 bp, Zea mays
  Peptide Sequence Number=SeqID_80436
atgtggagccccatagacttggacctggcggagctgctcctagagggcttcgtcaagaggacgagcgacagggagctggtgcggccaccggcagcgacgccacagaaggaggtcctcgtgcacatggccatgggtggtttcgtcatgcactacggggtagcagaggcgcagttgggtttgctaatcgctattttgatgctgattccaggactgccaaagatggacagtcttgtgaatgctctgaagttgatccagcccatcaccaagcgccccaacgttgtttggcacacagcatccctgtaccatctcgtccacaccgcggtgctgctcgggacgcccatcaccaagcgccccgacgttgtaccagtgctgcatgcttcaatatttttgctgtttggagggctcctcactgctggaatcgtgctcttctctggaacgtgctacaccgtggcttatcttgaagacaggaagttttcttcaccggcaccattggggggctttgcgtttattgctgcttgggctagcctcctgtatgatattttggttgagaacctcatgcgcacaaggggatcatgcatgtcatccggaagaaggaagatcctagaagatatgtctctaatctaa

SEQ ID NO: 38658 - DNA, 286 bp, Zea mays
  Peptide Sequence Number=SeqID_80437
atgatgttttggatggtcgagaaaatcccccccgaggatcgagccacctgtccttccactgccaccccaactatggaatccaagttgaaggcttcaaggatgcacatttatgtccgccgaggtggtccaaattaccaatctggactggctaaaatgcgtaagcttggtgcagaactcggcgttccaattgaggccggcaactacgctcggctgactcatctggctaccgacctgccttggtgcgacgaccccataaacatcgttgtccttgccatcgattcctatg

SEQ ID NO: 38659 - DNA, 639 bp, Zea mays
  Peptide Sequence Number=SeqID_80438
atggaccaaatcttcgacgagaatcacgtgcggctgcggagccgcgtgcgcgggacgtacctctacgccgacgaggacggggtcggcgtctctctgagccgtcgccgcgcctccctgaacgcggcgtggcaggtgcacctggtccagaacttcgtcctcttccgcagcgccgcctacggacgctacctcgcggtctcgcgggaaatggcgcctccaggccaccgcggcctccgcgttgtccagcgcgactacgacgagctggtactgtacgccgtcgcgtggaggcccattggggcgccgctcaccgtagacgacgaagccgaagccgacgtcgtcctgcgctacgggtccacccgctacctccgcgccaacggcaggcaccgccgctggcacaccggggtcaccgtcgatgacaacggcggtgtaaggaccacgatgatgctggcgtaccagctaggcgaaaccatctccgtcggcggcgaacggggcgtcataggcatcgcgctgtgcgtgcaggccggcaactgcgctcggctgactcctctggtcaccgacctgccttggtgcgacgaccccatgaacatcgttgtccttgccaccgattcctatggtgagagctgcttctcagttgccagttga

SEQ ID NO: 38660 - DNA, 300 bp, Zea mays
  Peptide Sequence Number=SeqID_80439
atggcgcagtcgactgttggcagcctgagagccattggcgcaccggacatgtccggtgcacaccggacagtccggtgcccccttctagccattggcttggccacgtgtcccgcgcagatcgcgcggccttggcccggccgaccgttggctcaccggacagtccggtgcacaccggacagtccggtgaattatagccctgagaaggaggctcatgtcaaagagggtgttctcgacaaagaaagcttgtaccttaaaacaggaggatacaagaagctggagtggttgtctgaaggcttttga

SEQ ID NO: 38661 - DNA, 1137 bp, Zea mays
  Peptide Sequence Number=SeqID_80440
atggacacgagcggcgccggccatcgagtcgtaagcccctgcgcgctagatcctaaccttccatctctgatccagcggtccagatctctggataatgtttcgcgcgagcgcacactgcccctgggccccatcgcgagcgtctatgcgtttcgggttactaggacatgggacctctatgatcctggggatgataaaaaaaaacttctgcattctgatcttgtactgatcgatgaggaggtcacaaatgattggatgatccttaggtaccggattaagcacaagaaggtagacattagagctttaaagaaatggtcaaggcaaatcttaagtggtcttgtctacctgcacaaccatgatccaccagtgatccatagagacttaaaatgtgacaatatattcgtgaatggaaaccagggtgaagtaaagattggagaccttggtttagcgactatcctggataatgcatgttcagctcatagtatcattggtacaccggaattcatggcaccagaactctatgacgaggaatataatgagcttgtagacatctatgcttttgggatgtgtttactggagcttgttacatttgagtacccatattgtgaatgttcaaatgcagcacagatatatagaaaaggtgaaaagccaggttcactggctaagattggtgatcctgaagtaaaattatttatagagaaatgcattgctaaagtcactaaaagactttcggcaaatgaactcttaatggatccttttctcctagatgttagtgatgaaaaaatattctatccagtgcatccgaatattaatacaacagatactggtagtccaaaaccaagctctagtttcagatatgacggagtagcatcatctgccggtcgccatgatcgctcaggtcatgcccaaaacatccacttcccctttgatagtgaagcggacacttcaatcagtgttgcaactgagatggttgtgcagctcgatctcacagatcaagatcagaggagtcaattgacaaccaaggggatgaagctgctcactctgagacccatagttcagaagggtgttctcgacaaagaaagcttgtaccttaaaacaggaggatacaagaagctggagtggttgtctgaaggcttttga

SEQ ID NO: 38662 - DNA, 1299 bp, Zea mays
  Peptide Sequence Number=SeqID_80441
atggcggacgagaagcttgccaagctgcgcgaagccaccgccggcctcacgcagatcagcgagaacgagaagtccggcttcctcagcctcgtcggccgctacctcagcggcgacgaggagcacatcgagtgggccaagatccacacgcccaccgacgaggtggtggtgccgtacgacaccctggagtccccgccagaaggcactgaggcgaccaagaagctgctcgacaagctcgccgtgctcaagctcaacggcggcctggggaccaccatgggatgcaccggacccaaatcggtcatcgaagtgcgcaacggatttactttcctcgacctgattgtcatccagatcgagtcactcaacaagaagtacggcagcaatgtgccgctgcttctgatgaactccttcaacacccatgacgacaccttgaaaattgttgagaaatacacgaattcgagcattgaaatccacacattcaaccagagccagtaccctcgtgtggtagctgacgagttcttgccatggccgtccaagggaaagactgataaggatggctggtaccctcctggccatggtgatatcttcccatcattgatgaacagtggaaagctcgatttactactctcacaggtcaccccaaaaactttggctgatgtaaaaggtggcacactgatctcctacgaaggaagggttcagcttctggagattgcacaagtgcctgatgcacatgtgaatgagttcaaatcaattgagaaattcaagatattcaacaccaacaatctgtgggtgaacttgaaggccatcaaacgccttgttgaagctgatgcactcaagatggagatcattccgaatcctaaggaagtcgatggtgtgaaagttcttcagctggaaacagcagctggtgcagcaattaggttctttgaccatgccattggtatcaacgttccaaggtcccgcttcctaccagttaaggcgacatcagatttgcagctagtacagtctgatctatataccttggttgatggcttcgttacacgtaattcagccagaacaaatccatcaaatccatcaattgaacttggtcctgagttcaagaaggttgggagcttccttggtcgcttcaagtcgatacctagcattgttgagcttgacagcttgaaggtttccggtgatgtttggttcggttctggaattgtactgaaggggaaagtgaccatcactgcaaaacctggcgtcaagctagaaatcccagacggagcagtgattgggaataaggatatcagtggccctgaggacctttag

SEQ ID NO: 38663 - DNA, 153 bp, Zea mays
  Peptide Sequence Number=SeqID_80442
atggacacggccctgcctccagagccccatctctctcgcaccacgtcgcaactgcccccacccgcactgtccaggaggcaggggaaagtgaccatcactgcaaaacctggcgtcaagctagaaatcccagatggagcagtgattgggaataag

SEQ ID NO: 38664 - DNA, 962 bp, Zea mays
  Peptide Sequence Number=SeqID_80443
atggccggctcggccgccccgcccccctgcctcgcccggctcggccgccccacggccggctcggccgccccctgcgccgccccctgccccgccggttcggccgcccctgcgctccgccggttcggccgccccgccctcgccagcccggccgcccgcagccccgcccgcgccccgcctagggccggttcaaccgccctagggccgatggctcgacttagacacactgcacgaaagtcagtcatccccttcttaccctcccgccttgctgagcgtccgcttcgccgtcccgtggccggacagtccagccacttggagagactacaccaccgcctgcgtgaggagcaggaacgtcgacgacaggagcagcagagctcttccctctcgctccaccaggagatagagtctgtgaggagctgctcccctgtgcttcctctggagccgccccctgcaccaccactgggcgccccagcttctggagtagctgctggaggagacccagacgacggagatggcgacgacagctcgagccacgacaccgacttctctgctaaccctgagccggaaggatgggttgctcgacctatcactcgcgacgccgctcgcgggtgtcacttccacgatgcgctcgacaccctgctacgtcgggcatttgaccggcatacttggtccgtcgagtatcgctgtgtggtctaccagcatagtcgcggggtctacccggaccgctgggaggcgacttgcttggtgcgctgcccggaggacagtctccagggtgcagaggcctgttcagagcactattctatctctgagcgggactcagctgaggcagccatgcaagatgctgcacggcgtgcgctttcgcactactgctcggttttcggtggggcagctgacggtcttgacctgaagtattacccccgccgttcatctggcagcaacaggaggcgtgattgtctcacctgtcg

SEQ ID NO: 38665 - DNA, 285 bp, Zea mays
  Peptide Sequence Number=SeqID_80444
atggcggtcgtcggtacggcgcgcgggaaggggttgttgaggcgcgcgtggtgcttcttggcagtcttcggcgacggcggtgatggcgcgcacgggtttgacagagaggtcgtgcagtgctctctgctcggtccgaggccatcattggctgaaatagattctggaatgacagggtggggtcaaatggatgcaaagattcttcggaggaactttattatcgaactgttaagttacgaggacaatttgtgcagatatgccatcccggcaaatatacaacagagttaa

SEQ ID NO: 38666 - DNA, 1119 bp, Zea mays
  Peptide Sequence Number=SeqID_80445
atggaggtcatcggccgtttcctaggcatgcccgcgagcgccgtcgccattggctctatctccgtcggggtcacggccagatctaggggcagcttcgcatctcttgccacgacggcttgcccagccgttgtcgtcctcgtcctcgaccaaatactgcttagcgggtggggcggcacgagtcaggcgtgcgggggaatcggggtgggggcatcagcgggcccattgacgctcagttgcggagtcaagggcgagctagcgggggaatcgaagggcggaggcatcgacgttcggttgcagagaatcaaggcgggggattggggcgggacgcgagcggttgttggggggcatggctgcgcgagatggaggcgggtgcgggggtggcggcgcgcatggccgagggctgctgcgcgcatggcgacgggggttggggcgggatgcaggggcggctgcgcgcatggccgggtgcccgtggcggcggccaatgatggcctcggaccgagcagagagcactgcacgacctctctgtcaaacccgtgcgcgccatcaccgccgtcgccgaagactgccaagaagcaccacgcgcgcctcaacaaccccttcccgcgcgccgtaccgacgaccgccatccgcgacgactgcgacgtggccctgcacctgtcgttcacgtcgacctccaagctcgcccacacgcacgacttccccgtggacgctgcgagtaggagcctgcgactacgtcggtcactgctgagtgctgaactgctgaccgccgttgaagtgatggaggacgagcaccagaagcaggaagtctacaaccaacatgtgagaaatgaagaagaggaagagattttgatcgatatgaatgatgagatatatgatgatgctgatgcgggggaggaggagggggatgatgatgatgatgatgcggaggaggaggagggggaggaatcggagggcaatcatgtgtcaaaggctcagaagacaaatcgaggcataaaaagattgaagggtggtagtcagtcgtctccttccaaagataaggcaaagagaggaaagtgtgctggttgctggaaatattttaaggagatccatgttcagtccaagaaggagtttggggttatg

SEQ ID NO: 38667 - DNA, 981 bp, Zea mays
  Peptide Sequence Number=SeqID_80446
atggccactatcaagttagacttttctttgcgttactggacaaccctaatcttgacaggtactctgttcagctctttgcttctgggctggagcagcgacgatgagaagacatttgcagaagctttggtttttgtccaggactcaagcttatcagtttgcttccatagtacagggcatggtgatccatcgattctttctattgaagttctacaaatagatgacgatgcctataactttggtccaccacgggaaaaggggacagtgcttagagcagtcaaaaggctgaaatgtggctcaggaaagcctgcttttgatgaagatctaaatgggattcactggggtggggacagattctggttaggattgcaaactttatcatccagttctgatgatcaatcaatatcatccgagaatgttatagcagagacattgcttgcaccaaatttttaccctcaaggcatataccaatcagctatcgtgggcactgataggcaaccgagtttgtctttcgaaatggatgttaccccaaacaagaactattcagtatggcttcactttgcagagattgataatggggtaactgcagaagaacaaagagtatttgatgtactcatcaatggagacactgcttttaaagatattgatataattcgcatgacaggagagcgttttactgcacttgtcctgaataaaactgttgctgtcagtggaataacactaaaaatcatcttgcaacctgtgaaaggaacccgtgccattattaatgccattgaggtgtttgagataatcccagctgaaaagaagactttgcctcaggaagtgagtgcattgcgaacgttgaagggttcacttggtcttcctcttcgatttggctggaatggtgacccctgtgttcctcagcagcatccatggagtggagttgattgccagtttgacagcaccaaagggaactggatcattgatggattgtatgttctctag

SEQ ID NO: 38668 - DNA, 2166 bp, Zea mays
  Peptide Sequence Number=SeqID_80447
atgcggtggagatctcccgccgtgctgcggctgcagctgtggctgctcgccgtctccgcgtcgttggctgccctcggtgttctcgcggctgatcttagcaaagaaccatttactatccgtataagctgtggaagctttgacgatgtccggacggagcctacgaacacattgtggtacagagactttggttatactggaggcaggttcgctaatgccacccggccaagctttatcgttcctcctcttaaaacgcttcgatatttcccgctatctgatggccctgaaaattgctacaacatcaacaatgttcccaatggccactatcaagttagacttttctttgcgttactggacaaccctaatcttgacagtgagccgattttcgatgtttctgttgagggtactctgttcagctctttgcttctgggctggagcagcgacgatgagaagacatttgcagaagctttggtttttgtccaggactcaagcttatcagtttgcttccatagtacagggcatggtgatccatcgattctttctattgaagttctacaaatagatgacgatgcctataactttggtccaccacgggaaaaggggacagtgcttagagcagtcaaaaggctgaaatgtggctcaggaaagcctgcttttgatgaagatctaaatgggattcactggggtggggacagattctggttaggattgcaaactttatcatccagttctgatgatcaatcaatatcatccgagaatgttatagcagagacattgcttgcaccaaatttttaccctcaaggcatataccaatcagctatcgtgggcactgataggcaaccgagtttgtctttcgaaatggatgttaccccaaacaagaactattcagtatggcttcactttgcagagattgataatggggtaactgcagaagaacaaagagtatttgatgtactcatcaatggagacactgcttttaaagatattgatataattcgcatgacaggagagcgttttactgcacttgtcctgaataaaactgttgctgtcagtggaataacactaaaaatcatcttgcaacctgtgaaaggaacccgtgccattattaatgccattgaggtgtttgagataatcccagctgaaaagaagactttgcctcaggaagaggcccccgggccggtgttcctgcccatcgatacccctctccaatccctcaccgatctagcgaccattacatctggtatcggctaccttgggtttcgatctgatcccatggcttctgctgccaatttcgcggcgacatcttggcaaccggcgtccccatctccatggacagcgccacatgtcaccttcgtcacgccgtcctggcaaccaacgtccccatctccatgggctgcgccgcatgccaccttcgtcacgccatcctggcaaccagcgtccctatctccatgggcagcatcgcctgccaattttgtcaccacatcctggacgccggcgtgcccatccccagggataacgccaaatttcatcacatcatcttcgttgacggcgtctccgtccccatgggcgacgccactaggggcagccacggctcagcaatcatcagctccatcgatgggagacttgtggaccaacataagggctgatctcgcaaagatgcaagccacgctccagaaggttgagcaagggctactgcaaatcaaggtagcagtgcaacatgagcagcaccagctggcgttgtctacacggctccagacgttggcggctgtgggcatacaagctgctgctcgtggcttccttgcacgacagagagtgcgggagatgcgccgacagatgctcgaggcagccttggtgacggtagacctcggcacacgggggcgcgacctcgccttgtcggacggccatcagcagcggctccgggccgctatttccaagtgcgggcatggtacgtttcctgcgggcgacgaacttcaattctacggcagcagcggtaaggaaggcactcccctcgtcatcggcaagggcgcactatttagcgccaccacattccgctaccggccgccacgagggcgcctccgctggttattgttgcgacctattccagcatccgtcatgctgcagctcgaggacgagctgcttgtccaggaggggtgtagtgccagggcctaa

SEQ ID NO: 38669 - DNA, 513 bp, Zea mays
  Peptide Sequence Number=SeqID_80448
atggcgcgtacaaggaaaaccgcacgcaaatctactagaccttttggcgtgcctcgccatcagctagcccccagacatgaagggagtagtagtggcagcaatgacccaattggagacctggaagccagggtggagcaactccggtcagaactacgccacagaaatagggcacgggagaaggacaaccagcgtatagctgaattatcagctgatgtcagctgcttgcaatatgaaatttcagaacgggattcggccattgattgggccgtcaactcgcgttcgatcactttggatcgcgaagcaaaagctcgagctcatgtggcagagcttagtgcggccctcgacagcctgcaagtgtactgtaatactttacatgaagaagtacatgtattgtatgctcgactgcacccgaacgtgccttccgatgttgctgcaatgggagccggaccatcgggaacaacaaatgaaggacctgatggggagttggacctttttaggcccctccttccatga

SEQ ID NO: 38670 - DNA, 5907 bp, Zea mays
  Peptide Sequence Number=SeqID_80449
atggatcaactcttggtgaaaggacaagacatcaaacagaggtggcagaggtattttgacattcttttcaatggtgagaatgagactatggacacccaattggatgactcctttgatgatttaaatagatgctttgtacgtaggatccaagaatcagaggtcaaagaagctttaaagaggatgaaagggggtagggcccggatggtcatggagcgatataaggagcagaaggacttgcacatggtttttactaccctagagtcaaaaggtttttattgcacatggttttcttgtcgcatgagatgtgactttggtactacaattagtgaggatggagatttccttattattttattccctaagctgtcgtctacttatgtagaaatcagacgtttttatggaatggactatggaggagggtatgacatttggaggaaaacagcagctcttgctgcaccatttaattttgatgaagtagattctctatggccaaagggccattgtgtagcagttagaattactagtgaggacccagatgatggtttcaaacctactggcgggaaagtgaaggagataagttttaaaagcaagcctaatgtttgggcctacttctcagtaaagtctggtggaggcattcatgaatttgctgattctcagtttggacatgtttttgcatatggactctctagaccagcagctataacaaacatgtctcttgcattaaaagagattcagattcgtggagaaattcattcaaatgttgattacacagttgacctcttaaacgcttcagacttcagagaaaacaagatccacactggttggctggatacaagaatagctatgcgtgttcaagctgagaggcccccatggtatatctcagtggttggaggtgctttatataaaacagtaaccaccaatgcagccactgtttctgaatatgttagttatctcaccaaaggccagattccaccaaagcatatatcccttgtcaattcaacagttaatttgaatatagaagggagcaaatacacaattgaaactgtcaggactgggcatggtaggtacaagttgcgaatgaatgattcaacagttgaggcgaatgtacaatctttatgtgatggtggcctcttaatgcagttggatggaaacagccatgtgatttatgcagaagaagaagctggcggtacacggcttcagattaatggaaagacatgcttgttgcagaatgaccatgatccatcaaagttattagctgagactccctgcaaacttcttcgctttttggttgctgatggtgctcatgttggtgcggatgtgccatatgcggaagttgaggttatgaagatgtgcatgcctctcttgtcacctgcttctggtgtcattcattgtatgatgtctgagggccaggcgttgcaggctggtgatcttatagcaaggctggatcttgatgacccttctgctgtgaaaagagctgaaccatttgatggaatgtttccactaatggacctccctgttgctgcctctagtcaagtacacaaaagatatgctgcaagtttgaatgctgctcgaatggtccttgcaggatatgagcacaatatcaatgaagtcgttcaagatttggtatgctgcctggacaatcctgagcttccttttctacagtgggatgaactaatgtctgttctagcaacgaggcttccaagaaatctcaagagtgagttagaggataaatacaaggaatacaagttgaatttttaccatgggaaaaacaaggacttcccatccaagttgctaagagacatcgtcgaggaaaatcttgcatatggttcagagaaggaaaaggctacaaatgagcgacttgttgagcctcttatgaacctactgaagtcatatgagggtgggagagaaagccatgcacattttgttgtcaagtctctttttgaggagtatcttaccgtggaagaacttttcagtgatggcattcagtctgacgtgattgaaaccttgcgtcatcagcacagtaaagacctgcagaaggttgtagacatcgtgctgtctcaccagggtgtgaggaacaaagctaagcttgtaacagcacttatggaaaagctggtttatccaaatcctggtgcgtacagggatctgttggttcgcttttcgtccctcaatcataaaagatattataagttggcccttaaagcaagtgaacttcttgaacaaaccaaactaagtgaactctgttccagcattgcaagaagcctttcagatctggggatgcataagggagaaatgactattaaggatagcatggaagatttagtctctgccccattgcctgttgaagatgctcttatttctttgtttgattacagtgatccaactgttcagcagaaagtgattgtgacatacatatcacgattgtaccagcctcatcttgtgaaggatagcatccaaatgaaattcaaagaatctggtgctattgttttttgggaattttctgaagggcatgttgatactagaaatggacaaggggctattcttggtgggaagagatggggtgccatggtcgttctcagatcacttgaatctgcatcaacagccattatggctgcattaaaagattctgtacagtacaacaactctgaggtcaacacaatgcacattgtgttattgaatgctgaaactgaaagtaatataagtgggacaagtgatgaccaagctcaacataggatggaaaagcttaccaagatactgaaggatagtagtgttgcaagtgatctccaagctgctggtttgaaggttataagttgcattgttcaaagagatgcaggtcgcatgccaatgcgccacacattcctctggtttgatgaaaagaactgttatgaagaagagcatattctccggcatgtggagcctcccctctctgcacttcttgaattgggtaagttgaaagtgaaaggatacaacgaaatgaagtatactccatcacgtgatcgtcaatggcatatctacacactaagaaatactgaaaaccccaaaatgttgcatagggtatttttccgaactattgtcaggcaacccaatgcaggcaacaagtttacgtcggcacaggtcagcgacactggattaggatgtcctgaagaatctctgtcatttacatcgaatagcatcttaagatcactgatgactgctatagaagaattagagcttcatgcgattaggacaggtcattctcacatgtttttgtgcatactgaaagaacaaaagcttcttgatctcgtcccattttcagggagtacaattgttgacgttggccaagatgaagctactgcttgttcacttttaagatcaatggctttgaagatacatgaacttgttggtgcaaggatgcatcatctttctgtatgccagtgggaggtgaaactcaagttggactgtgatggacctgcaagtggtacctggagagtcgtaactacaaatgtcactagtcacacctgcaccattgatatctaccgagaagtggaagatacagaatcgcagaagttactataccattcagctacttcgtcagctggtccaatgcatggtgttgcactgaataatccttatcaacctttgagtgtgattgatctaaagcgctgctctgctaggaacaacagaacaacatattgctacgattttccgctggcatttgaaactgcactgcagaagtcatggcaatccaactgttctagtgttcctgaaggcagtgaaaatagtaaatcctacgtgaaatcaactgagctggtgtttgctgaaaaacatgggtcctggggcactcctataattcccatggaacgtcctgctgggctcaatgacattggtatggtcgcttggatcttggaaatgtcaacacctgaatttcccaatggcaggcagattattgttgtagcaaatgatattactttcagagctggatcattcggcccaagggaagatgcattttttgaagctgtcaccaacctggcttgcgaaaggaagcttccccttatatacttggcagcaaactctggtgctaggattggcatagctgatgaagtgaaatcttgcttccgtgttgggtggtctgatgaacgcagccctgaacgagggtttcagtacatctatctgactgaagaagactatgctcgtattagctcttctgttatagcacataagctgcagctagataatggtgaaattaggtggattattgactctgttgtgggcaaggaggatgggcttggtgttgagaacatacatggaagtgctgctattgccagtgcttattctagggcatatgaggagacatttacacttacatttgtgactgggcggactgtaggaataggagcctatcttgctcgacttggtatacggtgcatacagcgccttgaccagcctattattttaacagggttttctgccctgaacaagctccttgggcgagaagtgtacagctcccacatgcagctgggtggtcctaagatcatggcgaccaatggtgttgtccacttgaccgtttcagatgatcttgaaggtgtttccaatatattgaggtggctcagctatgttcctgcaaacattggtggacctcttcctattaccaaacctttggaccctccagatagacctgtcgcatacatccctgagaacacatgcgatccgcgtgcagccatccgtggtgtagatgacagccaagggaaatggttgggtggtatgtttgacaaagacagctttgtggagacatttgaaggatgggcaaaaacagtggttactggcagagcaaagcttggaggaattcctgtgggtgttatagctgtggagacacagaccatgatgcagctcatccctgctgatccaggtcaacttgattcccatgagcgatctgttcctcgggctggacaagtgtggttcccagattctgcaaccaagacagctcaggcattattagacttcaaccgtgaaggattgcctctgttcatcctggctaactggagaggcttttctgggggacagagagatctctttgaaggtattcttcaggctgggtcagcaattgttgagaaccttaggacatataatcagcctgcgtttgtctacattcctatggctggagagcttcgtggaggagcttgggttgtgatcgatagcaaaataaatccagaccgcattgagtgttatgctgagaggactgccaaaggtaatgtgctcgaacctcaagggttaattgaaattaagttcaggtcagaggaactccaagactgtatgggcaggcttgacccagagttgataaatctgaaagcaaaacttcaagatgcaaagcatggaaatggaagtctaccagacatagaatcgcttcagaagagtatagaagcgcgtacaaaacagttgttacctttatatacccagattgcagtacgctttgctgaattgcatgatacttccctgagaatggcagctaaaggcgtgattaagaaagttgtagactgggaagaatcacgctctttcttctataaaaggctacggaggaggatctctgaagatcttcttgcaaaagaaataagacgaataattggtgacaacttcacgcaccaatcggcgatggagcttatcaatgaatggtacctggcttctcaggccacaacaggaagcactgctggatgggatgatgatgatgcttttgttgcctggaaggacagtcctgaaaactacaagggatatatccaagagctaagggctcaaaaagtatctcagtcgctctctgatcttgctgactccagttcagatctacaagcattctcgcagggtctttctacactattagataagatggatccttctcagagagtgaagtttgttcaggaagtcaagaaggttcttggatga

SEQ ID NO: 38671 - DNA, 1340 bp, Zea mays
  Peptide Sequence Number=SeqID_80450
atggtgtactgctacactcataccaaactcaaaccaaagcttgatcagggacagggatcacgaggagtcgcgggagtttgtcaaagaggactggaggagccggcgttcttgatcagggaagcgtcagcaccacaggagttggtcagggaggaggaggaatggaggaagcgccagaagccggcgtttttctcagggaagagaggaggaatggaggagacgccaggaagcaaaagaaagagcagccggccggcggccaggaaggataagagacacagagatgaaattaggaaaggaaattgggattcggaaagcctagccaatcagcatatgttggttcaacatagcctggtcccaagtccaggtacaaggaggagggttgcgttagacgtggttggtctcagtgagagcgaaaagaggaagttctgggaagacttagatgacatggtcagaacggtacccaccaatgagaaccttttcatagatctcaacggtcatgtaggttcaaaaaatgtaggttatgagctggctcatggaggtttcgggtatggtagtaggaatcaagaagaggatattttggactttgctgtagcctacaacctagtgatagccaacactttcttcagaaacagagattctcatttggtgacttttagcagtggccatcgttcgagccagatcgacttcgtgctcacaaggagaaaagataaccaagcttgtttggattgtaaggtgatacttcgagagagtgttgtgccccaacataatcttgtggtggctaacttccgttttcggatcagtacccatagggttaaacaagtcaaaattgcgaggacaaagtggtgggaactcaaaggggagagatccaaagtttttagggaaagagtttttgtggagggcgcttggtccgaagaagaagatgcaaacatcatgtgggtgaagatggcaacttgtattaggaaggtggcgtcagaggtgtttagagtgaccaaagtgagcggcggtgaatctaaggatacttggtggtggaccgaggatgttcaaaaggccataaaggagaagaaagaatgttacaggagcttgttccatgacaggagcgcgttcaacatagagaggtataaggtggcaaagaagactacaaagcgagctgtgagtgaggcaaagggtcgagcctatgatgatctttaccaaagactaagtacaaaaaaaggggagaaagatgtctataagatagctaggattcaggaaagggagacgagggacctcaaccaagttaaatgcattaaggatgagatggatcaactcttggtgaaaggacaagacatcaaacagaggtggcagag

SEQ ID NO: 38672 - DNA, 258 bp, Zea mays
  Peptide Sequence Number=SeqID_80451
atgggctgcgccgcatgccaccttcgtcacgccatcctggcaaccggcgtccccatctccatgggcagcatcgcctgccaattttgtcaccacatcctggacgccgacatgcccatctttagggacaacgccaaattccgtaacatcatcttcgttgacagcgtctccgtccccatgggcgacgccactaggggcaaccacggctcaacaatcactagctccatcgatgggggccttgtggaccaacataaaggctga

SEQ ID NO: 38673 - DNA, 294 bp, Zea mays
  Peptide Sequence Number=SeqID_80452
atgggcttgacacaactaaaagggaaatgcattgcccaaccttctcaagataaccgtgatcacatggtgaagaagcttgagacgggaataaccgtggcatgcactacatcccttgaagaaaatgtcaaggatttaaggattgccatgaggagggaacaaaatatgaaattcaacacctcctccaaaagcctcaaccacgcctccacaaaaggtaacatccaaggaattaaagaattatcatgtgcggaatatcaaagcctacaacatggaggaaagtcaaaggatgtcacatag

SEQ ID NO: 38674 - DNA, 645 bp, Zea mays
  Peptide Sequence Number=SeqID_80453
atggatgaaaaagtagatcttgttgaagtgttaactcgtcaagttgaaaatctgcagcgagatactttgtttgtagagcgtgatgagctcagaaaagatattgagcaattatgtatgcaacaagctgggcctggttatgtttctgttgcaactcgaatgcttactcagaggacagcagctttggaacaggatattgagaacctccagaaaaagttaggtggttgcttaagagagaatcaaaatttgcaagaggagcttgctgaagcttatcgaattaagagccagcttgctgagttacatggtgctgcactatcaaagcttttgaagggagtgaagtgcaaccaatcatgctcgaccacaacgccgggcaggcttggaatccaggacaacaacattggcagtggtggtgtttggggcgacgatgcattgaagatcggagctcgggtcatggaggtgggtgggggctggggcattgttactcagggcagcagagttcaagttgatggtgtgtgttggagtggagcaccagtcaggaggctgggagcaaggtggcagtgtcctccaaacagccactgcccatggcaaaggccaaagggcatctctctgtgtggtagtattgcagtgctgaccttggcggggacttga

SEQ ID NO: 38675 - DNA, 423 bp, Zea mays
  Peptide Sequence Number=SeqID_80454
atggatgaaaaagtaaatcttgttgaagtgttaactcgtcaagttgaaaatctgcagcgagttatttctggaagcagtagttctttaagagcctttttgtttaatgattttatcattgtatatgttcttgtgcgtgatgagctcagaaaagatattgagcaattatgtatgcaacaagctgggcctggttatgtttctgttgcaactcgaatgcttactcagaggacagcagctttggaacaggatattgagaacctccagaaaaagttaggtggttgcttaagagagaatcaaaatttgcaagaggagcttgctgaagcttatcgaattaagagccagcttgctgagttacatggtgctgcactatcaaaggtttctcactttgacttaaaatatgtggctattttatttaataaactgtag

SEQ ID NO: 38676 - DNA, 372 bp, Zea mays
  Peptide Sequence Number=SeqID_80455
atggccggagcagaagggctcgcgtggtcgagctcggccagggggaaaaaggggtgcccgcgcccatggaagaagaaggcacagggagcttggaacgactgcgcaggggagggacgctgtccatgggagggagctgctgcttggaggaatggagctcggcggccatggagtttctgcccctgcgcacgtacaggaaacagagagaagaggctgctgtgcaaaggaggccgaccagggggtgaagaagggcgccgagcacatgggctctggacgccatggccgtggctgctggccaagcagggagaaacagggggagggctgggcgtccatggcaggagcgtcggcaaggggaggaagaagactgctggctga

SEQ ID NO: 38677 - DNA, 369 bp, Zea mays
  Peptide Sequence Number=SeqID_80456
atggccgaagcagaagggctcgcgtggtcgagctcggccagggggaaaaaggggtgcccgcgcccatggaagaagaaggcacagggagcttggaacgactgcgcaggggagggacgctgtccatgggagggagctgctgcttggaggaatggagctcggcggccatggagttttctgcccctgcgcacgtacaggaaacagagagaagaggctgctgtgcaaaggaggcccgaccagggggtgaagaagggcgccgagcacatgggctctggacgccatggccgtgctgctggccaagcagggagaaaacaggggagggctgggcgtccatggcaggagcgtcggcaagggaggagagactgctgctga

SEQ ID NO: 38678 - DNA, 123 bp, Zea mays
  Peptide Sequence Number=SeqID_80457
atggcgcagggcccttccctggttcgagctcgagctggtgagccgccgtcgcccatggccaacgccctgctcaggttaaagtgggttaaaaatataattatgccacttgtgattggtgtttga

SEQ ID NO: 38679 - DNA, 489 bp, Zea mays
  Peptide Sequence Number=SeqID_80458
atggaggaggggtgctgcacgctagcggaagaagtggctggagatgtggcacagggagcgcgggatccatcacctgagcagggcgttggccatgggcgacggcggctcaccagctcgagctcgaaccagggaagggccctgcgccatggccggagcagaagggctcgcgtggtcgagctcggccagggggaaaaaggggtgcccgcgcccatggaagaagaaggcacagggagcttggaacgactgcgcaggggagggacgctgtccatgggagggagctgctgcttggaggaatggagctcggcggccatggagtttctgcccctgcgcacgtacaggaaacagagagaagaggctgctgtgcaaaggaggccgacctgggggagaaagaagggcgccgagcacatgggctctggacgccatggccgtggctgctggccaagcggggagaaacattgggagggctgggcgtccatggctggagcgtcg

SEQ ID NO: 38680 - DNA, 213 bp, Zea mays
  Peptide Sequence Number=SeqID_80459
atggctgttcctgtttgcctgacaaaaatgagcgggtctgttcactggcagatgaagcattatttgaggttggtattgtatctgaaggcagatgaagtattatttgagggaagtgttatacaacctatcgtggttgttcgaggaaatgagatggtgaatgttactcatcaaggggagtgggaagtagcagcacatccaccttcactctcataa

SEQ ID NO: 38681 - DNA, 183 bp, Zea mays
  Peptide Sequence Number=SeqID_80460
atgagcgggtctgttcactggcagatgaagcattatttgaggttggtattgtatctaaaggcagatgaagtattatttaagggaagtgttatacaacctatcgtggttgttcgaggaaatgagatggtgtttgttactcatcaaggggagtgggaagtagcagcacatccaccttcactctga

SEQ ID NO: 38682 - DNA, 348 bp, Zea mays
  Peptide Sequence Number=SeqID_80461
atgtcggggtcccgcgcgcgattgcgtcgatctggtgcagaggagacaaccgttgtggcggcaccacggaggtggcacaaaattgagaaggcgagattcgtggccgcgggcgtggtcggcgaggatgaaagaggcaaggatggaagagtgcggcatgcgcggcggcgaaaatggtggaggtgcggcgcggaaatcttgggaggcggaggcgcaagcggagcggaggatgtcagggtgggaggcagaaccgtgggtgtggacgcctacactcctttcttaaggagtagtagagattccgagggccagcagagaccgtcggacataagcttatgtccgacggtctcgtag

SEQ ID NO: 38683 - DNA, 1242 bp, Zea mays
  Peptide Sequence Number=SeqID_80462
atgccggtagtaattctaggcttagattttgggattctggcaacctgggggtcgaatgccggtgcagtcatgccctggggcgggtgcagcgacgctgcctggcgtccacacctttttggttctgccgctccgctcccgcgcccgcagtccgctcccgctcccgcgtacgcagtccgctcctgctcccgcagtccgctcccgctcccgcgcccgcagtccgctccggctaccgcgcccccagtcccccaccaattccgcgcccgtcaatccgccgctgccatcgcccgctgtccgctccctgccatcgcccgctgtccgctcccgcggccgcgccccgatccccaattccccgcccgtcaatccgctgctcacgaaatccgcttccccgcgcgggtagatggaaggtcggggagccgcagtccgcatgaatggaaggtcgagccgcgccccgatcccgcgactcgcccgtcgatggaaggtcggggatttggggaatcgcaggccgtggatggaaggtggcgcattcatcccgtcaatggaaggtggcgcattcatcccgcgtctcgcccgtcgatggaagtccgcgccaggcaaagctccgtggaggcgttcatcctgcgccaccaaatgcccaaaatcagccgcgccagctacgcctacatcccgtcgatggaaggttgcgtgcacacccacggttctgcctcccaccctgacatcctccgctccgcttgcgcctccgcctcccaagatttccgcgccgcacctccaccattttcgccgccgcgcatgccgcacccttccatccttgcctctgtcgtcctcgccaaccacgcccgcggccacgaatctcgcctacgacaaagcaaggatcgagcccccgccttccaacctcggcggctccttccatcctcacgtatacatcgacgtcgccttccatccacggcaaaagagtcgaccttcaatcccgtgaccactgcccctgctcccgccctccatctcgtgctgctccttcggacttcggttcccatcgccccgctcgcctcctccctccctcctcccgtcgctacagcacaaatctctgccggctgccgtgacatcctatcgtcggctcccagcgcaccttctcaattttgtgccgcctccgtggtgccgccacaacggttgtctcctctgcaccagatcgacacaatcgcgcgcgggaccccaacatcgccccagatcgacgagaatctgggagcctaa

SEQ ID NO: 38684 - DNA, 354 bp, Zea mays
  Peptide Sequence Number=SeqID_80463
atgacctcgcatggcgatccgttgctggtgaataataggacaacaagcgccagtgaaatagttgcttcagcacttcatgacaattgcaaagctgttcttgttggcgaaaggacttttggcaagggcttaatccaatctgtatttgaacttcatgatggttctggtattgtcgtcacagttggcaaatacgtgacaccaaaccacaaggatatcaatgggaatggaatagagccggattacaatcgtcttcctggtactctaagaaaacgccagatttcttttgtggcaattgaattctgcaatatttcaatgaagccagagattacctttcatgatgcggaattaaagaattaa

SEQ ID NO: 38685 - DNA, 309 bp, Zea mays
  Peptide Sequence Number=SeqID_80464
atgacctcgcatggcgatccgttgctggtgaataataggacagccagcgccagtgaaatagttgcttcatcacttcatgacaattgcaaagctgttcttgttggcgaaaggacttttggcaagggcttaatccaatctgtatttgaacttcatgatggttctggtattgtcgtcacagttggcaaatacgtgacaccaaaccacaaggatatcaatgggaatggaatagagccggattacaatcgtcttcctgatttcaatgaagccagagattacctttcatgttgcggaattaaagaattaagctga

SEQ ID NO: 38686 - DNA, 279 bp, Zea mays
  Peptide Sequence Number=SeqID_80465
atggccacggccgcgccggcgtctgtcgaggggttcaactgcaccaccaaccgcacgtacctgtgccaggcgtacgcgctctaccgcgccggcttcgcgggcgtgctgctcgatctcgcggccatcggtgacctcttcgccgtcagccgcttcatggtcgcgcacgccaacaacctctccaccacggccatgccggccaacgggcagccgctgctcgtgtcactccagtgcggctgcccctcccggtcccccagctcgtacgcgccgatacagtactag

SEQ ID NO: 38687 - DNA, 375 bp, Zea mays
  Peptide Sequence Number=SeqID_80466
atggccacggccgcgccggcgtctgtcgaggggttcaactgcaccaccaaccgcacgtacctgtgccaggcgtacgcgctctaccgcgccggcttcgcgggcgtgctgctcgatctcgcggccatcggtgacctcttcgccgtcagccgcttcatggtcgcgcacgccaacaacctctccaccacggccatgccggccaacgggcagccgctgctcgtgtcactccagtgcggctgcccctcccggtcccccagctcgctgagcacgctgctgttgctcctctgcctgtgcgtgttccccgtcccagagcgggttgtagaacacgacaacggccacgaccaaatatattcaactagatggagccgaaggctgaag

SEQ ID NO: 38688 - DNA, 1089 bp, Zea mays
  Peptide Sequence Number=SeqID_80467
atggcctggctcctgctctcttctgcgctgggacagacgaatggagagagctggttggagccgtacatggaaaatgagaggccgctccgctataattcaccggactgtccggtgaagcaccggacagtgtcagctgtcacaccggactgtccggtgtgccagcggagcaacggctacttcgcgtcaacggtcgactgcaaccgcattcaatgcgctacagtacgcgccagagtcagagcacgcgcagttggcgcgccggacagtctacaggacctgtctgaggaccctttaggggtccttactggagctagccttagcgccttggctaggggtggatccgcgccaggtgcctccacaggcaggagctcaggactcagctacggctactcggcccccaccaggaggagctcgctgtgctgcgcctatttggcttccataggggaagagctcggctgctcggcacctacggggaggagcttggttgctcgggtcggcgtgtggcagcgcctcagcctaagtgtagagccatggataggtccagtcgtcggttggaacaggaggcttgaaggaggatgggagcacgcccctcaacgtcggtggcctgggggtgacacaactcgagtagagatggcaacggacgtgagaagcacgggttctcctacacaattgaacccacaacaatcacccactggaaagaaaacaataggcgcctctcgaaaccccaaaaatcccaagagagcaaaaatctggaagcgagaaacagaggagaaggaggcttaccagctcgaagctgttgccgtggtactcaaaggaagcatagtgcttcttttgcttcttccccttgccagtgctcttgaccggttcccctacagctacgggcaccacctctgtgttctcctcctcgcgaggatcctccgcctacggctccacctcctcgggctcctcatcctcgctccccggatcgtggcggcgtctgggccatcctcggcggcttcgtttcggccacatgttcgcagtgctccacctcttcgcggcgtggctgggaccaatgcatggaggcggggctcacggtggccgtgggggaaatag

SEQ ID NO: 38689 - DNA, 465 bp, Zea mays
  Peptide Sequence Number=SeqID_80468
atggcaccggacagtgtccggtgcaccagggaactcgaagttgaactttccaccttcaggaaaatgagaggccgctccggtataattcaccgagactgtccggtgaagcaccggacagtgtcagctgtcacaccggactgtccggtgtgccagcggagcaacgggttttcgcgtcaacggtcgactgcaaccgcattcaatgcgctacagtacgcgccagagtcagagcacgcgcagttggcgcgccggacagtctacaggacctgtctggtgcaccactggtcagcccagaggccccagcagtcagagctccaacggttgaacactatcggctgggtgacaatgagactgatggttcttggttttgactctggtaatggttgtccgcattgcaaccactgctcaggagaagacgaagctgtggaaggagactttcaggagttccaagactacaacgagttctag

SEQ ID NO: 38690 - DNA, 220 bp, Zea mays
  Peptide Sequence Number=SeqID_80469
atgggtgagcagagaagattcagcgagctggagcaaggcgcacgacatagggagctcgagacagagaggtccgagcaggggaagatggagcagaaaaggagcgctccaggggagatgggcgcgagcagggaaagcgccgggctagacgacggcgacgacctgggcgagtgccagggagaaagatccgagcagagaggggcacggtccaagctgggaggag

SEQ ID NO: 38691 - DNA, 657 bp, Zea mays
  Peptide Sequence Number=SeqID_80470
atgggtgagcagagaagattcagcgagctggagcaaggcgcacgacatagggagctcgagacagagaggtccgagcaggggaagatggagcagaaaaggagcgctccaggggagatgggcgcgagcagggaaagcgccgggctagacgacggcgacgacctgggcgagtgccagggagaaagatccgagcagagaggggcacggtccaagctgggaggaggtgagcgccagagatgcgtggtggcattcgcagagctggccagcggggaagaagacgacgagggagaccacggatctggtgtggccagggcaccacgggagagagagctcggccatgggaagagagaggaaggaagccgagcgagcaagaagcctgcgcgcgcgagaagaagcgagcaggggaggatatgggaggagcttggctacatgcaggggagggcacgacggtcatggatgcgaggaagagcatgcgtgggtgctgaagcttgtcggggagggcgcgaccagagagatggcggagggagctccacggagatggctgagcaaatttttggatcggtgcgagaagcaattggaacaaatcagaatgatgttaacaacagtatttcggactgtgttccatttgattcaaaatcaaataatttcatccgcgtctga

SEQ ID NO: 38692 - DNA, 468 bp, Zea mays
  Peptide Sequence Number=SeqID_80471
atggcgacgagctcgagggagggagaaacagcagccaagaagcaggcgcgcgcaggggagcaggttgggcgcggcagcaagaagggcgcgcggccaggatcccagcgaggccagggcaccacgggagagagagctcggccatgggaagagagaggaaggaagccgagcgagcaagaagcctgcgcgcgtgagaagaagcgagcaggggcaagtgcgcagcggccatggaagcagggcgcggccaggcgagcagggaaggagctcggtgaccgcacttgtacccaccataaccggaataggaaaccacgtctcaggtcgcgtgaggagggcaatctgcgggtaggttcactcaggttatgcataaaaccggggcttgccttccaaagcagtggcagggagatcctctggtgtaggctctggtgcgggatctggggctacctcctgagcagctccttgctccggatttaa

SEQ ID NO: 38693 - DNA, 468 bp, Zea mays
  Peptide Sequence Number=SeqID_80472
atggcgacgagctcgagggagggagaaacagcagccaagaagcaggcgcgcgcaggggagcaggttgggcgcggcagcaagaagggcgcgcggccaggatcccagcgaggccagggcaccacgggagagagagctcggccatgggaagagagaggaaggaagccgagcgagcaagaagcctgcgcgcgtgagaagaagcgagcaggggcaagtgcgcagcggccatggaagcagggcgcggccaggcgaacagggaaggagctcggtgaccgcacttgtacccaccataaccggaataggaaaccacgtctcaggtcgcgtgaggagggcaatctgcgggtaggttcactcaggttatgcataaaaccggggcttgccttccaaagcagtggcagggagatcctctggtgtaggctctggtgcgggatctggggctacctcctgagcagctccttgctccggatttaa

SEQ ID NO: 38694 - DNA, 378 bp, Zea mays
  Peptide Sequence Number=SeqID_80473
atggcagcgacattatcttcattgactgtcgtcggagggaggcagggagctaggtgggacaacagaacgtcagtagtcataccagatgaggaaattttctacctagtggggttcctttcttcagcgccgtctctctcaggttacggcagcattgcacattcaatgaacctgaacaaagagatagtggagttctgtgaagaggctggtattgggatgatacaatatctggcaccctacaccacacagcaacagtggaaagcccactttggagcaaggtgggagacatttgaacggaggaaacacagatatgatcccctagccatcctagcgccaggacagagaatattcccaaaggcgtcactgccattgcctttgtga

SEQ ID NO: 38695 - DNA, 1251 bp, Zea mays
  Peptide Sequence Number=SeqID_80474
atgaagccgccatcatcactggtgcactacttcaagctgctggtcctgctggcgctcgccaggctgaccatgcacgtccccgacgaggacgtgctcttgtccctcggcgcgctgcgcctcgacggccatttcagtttccacgacgtctccgccatggcgcgggacttcggcaaccagtgcagcttcctgccggccgccgtgctccaccctggctcggtctccgacatcgccgccaccgttaggcacgtcttctccctgggcgagggctcgccgctcacggtcgcggcgcgcgggcacgggcactccctcatgggccagtcccaggccgctcaggggatcgtggatcaggatggagtcgctccggggtctaggcttcaggtcaacgacgccgggcgtgtcgccaccgtctgtcgatgctcccggaggagagctctggatcaacgaagaggagatgtcgttacctgctcacccgatgataacgctgatctcttctatgctgctctcggtggtcttggtcagttcgggatcatcaccagagcaaggattgcacttgagcctgctccaaagatggtgaggtggataagagttctttactcggattttgaaagcttcaccgaggaccaggagatgctgataatggcagagaactcctttgactacgttgaagttactgtactgctatctcgacttagattcatacagtctactctattccacaccgatgtcacgtacctggagttcttggacagggtgcacacctctgagttgaaactgagggcacaaggcctctgggaagttccacatccttggctgaatcttctaataccgaggagctccatccgcagatttgctaaggaagtctttggcaagatcctgaaagatagcaacaatggtcccatattgctttatccagtgaacaaatcaaagtgggacaacagaacgtcagtagtcataccagatgaggaaattttctacctagtggggttcctttcttcagcaccgtctctctcaggttacggcagcattgcacattcaatgaacctgaacaaacagatagtggagttctgtgaagaggctggtattgggatgaaacagtatctggcaccctacaccacacagcagcagtggaaagcccactttggagcaaggtgggagacatttgaacggaggaaacacagatatgatcccctagccatcctagcgccaggacagagaatattcccaaaggcgtcactgccattgcctttgtga

SEQ ID NO: 38696 - DNA, 258 bp, Zea mays
  Peptide Sequence Number=SeqID_80475
atgtctacgagcaaatcactggggttcggcgaagttctctgcccaagagcccgagcgatgacattgcagaccacgccgcaaagaagtcctacggccaacatcagagtcgacatcctgcggctgcaggtttcgtccaagcacgacgcgcatgcaatggctgagaagctactttcgtcaagcggtatcagcgaaggggatggagctgactccatggtcccacgtatcactgagacaagcaacgtttggctggcagaataa

SEQ ID NO: 38697 - DNA, 318 bp, Zea mays
  Peptide Sequence Number=SeqID_80476
atggccggccacatgcgccgcatgcacggcaacaggtgctacgcgcggccagcgactatacaccacggcgaccacggcggcgcagttcccacccgtggcggcgacacgccggagcagagcagtgctagagccacgacacacagaagtcctacggccaacatcagagtcgacatcctgcggctgcaggtttcgtccaagcacggcgctcatgcaacggctgagaagctaccttcgtcaagcggtatcagcgaaggggatggagctgactccatggtcccacgtatcactgagacaggcaacgtttggctggcagaataa

SEQ ID NO: 38698 - DNA, 335 bp, Zea mays
  Peptide Sequence Number=SeqID_80477
gcgattatgtctacttgaaagtttcaccaatgaagggtgtatcgcgtttcggggttaaagggaagcttgcacccagtgtctgcaccggatcagaccgccagcgcggctgtcttcaccgccgacgaccggtcttcgccgtgattcgcgccactgccgttgtgattcacgtcgacgatgacccgataaggccgccaagtaaaagccatgcacctggggataactccggtgactcaccgccgtacccctcgtgctccgcggctgtggcagataagttcaccgacgagagccgccttccggccttgtgccacgtgcctgagtatctccaccgcatcgtc

SEQ ID NO: 38699 - DNA, 366 bp, Zea mays
  Peptide Sequence Number=SeqID_80478
atgcgcctaggggtcccttttatagccccaaggcagctagaagccgttgagagcattccaggaaggcaattcttgccttctgccgcctggcgcaccggacagtccgtgtctgcaccggatcagaccgccagcgcggctgtcttcaccgccgacgacccggtcttcgccgtgattcgcgccaccgccgttgtgattcacgtcgacgatgacccgataaggccgccaagtaaaagccatgcacctggggataactccggtgactcaccgccgtacccctcgtgctccgcggctgtggcagataagttcaccgacgagagccgccttccggccttgtgccacgtgcctgagtatctccaccacatcgta

SEQ ID NO: 38700 - DNA, 360 bp, Zea mays
  Peptide Sequence Number=SeqID_80479
atggagctgtcactggtggagctcgtgcttatccagaccactcgacgcagagagctagccgttgtcgatgcaggggagcacatgctttgcgtggctaaatgtgaattgtctatcaagaaggacagcaagtgtggagtaatctatagtttattttctggtatactggttccattgaagaaagatcctcatgctccatttcaccatatccagatgccatcttccaacaatagcaatatggttatgcagcagaggcaactgttggactgcagcagttctcgcttcacccttctccgcttaacagagacagttgcttcgggcttcggagtgtcaaaaggaacactggattcaccaacagcatga

SEQ ID NO: 38701 - DNA, 588 bp, Zea mays
  Peptide Sequence Number=SeqID_80480
atggcatctggatatggtgaaatggagcatgaggatctttcttcaatggaaccagtggccaaggagaagacgaagaccacaatcgtgcactacaaatcatctggacgccgactcgtccttcgcctctctgggatccggcgcgaggaaatgctccagatctacgtcgtcttggtacgacacgacgaaggaggacaagtggtcgttggggatggtggggatctgaaccgggagcggaccggtacggcgcctcggcctggtggaaccctcccctgctcccgtgctcgaggaacccgaggagggcagagggtcgagatggggttggaggaagcggtcttcggtgggtggggaaggggggaccacagtggggaattggggaagggagaggtctccggtggggaagggcttggacggggaggaaatggcgtcgcgctggtgaagaggctgacggacgtggtggggaagaggctgacggacgcggtggaatggcttcgacgcggtggggaagaggctgacggacgcgacctctgcggggatggggtgggcgccgatgcgagattggcgggggagggcacaactcgtcacggctga

SEQ ID NO: 38702 - DNA, 486 bp, Zea mays
  Peptide Sequence Number=SeqID_80481
atggctaacgacggggcggttcaatcctctttatactctgctgtgaggggattccggccgggttgttggaacggccagcgacatccacgcggattcctgggttcagttcatgcgaacgcgaggggggaagggacgagtccatgccaaggaaatcggcagcagtttgacgcggaatctagggcacgagctcgttccgggttcaccgcgccgcggggtgggagagaatcccgcgatttgttagcgcccgcggcattcgcgctgctgttgctagcgattggggaagaaggtaacactgtcagccgggacccaccagacagacgaaagatgggttggttagggcaagaatatcgtggtgtaagaaggtttatggtgagaaataactccttgttgggtgatgaaattgtggacattactccacaactcatcacactcaatcaaatatccaaatcagacaaatatcagaagaacaaacattcaagcatataa

SEQ ID NO: 38703 - DNA, 162 bp, Zea mays
  Peptide Sequence Number=SeqID_80482
atgggttggttagggcaagaatatcgtggtgtaagaaggtttatggtgagaaataactccttgttgggtgatgaaattgtggacattactccacaactcatcacactcaatcaaatatccaaatcagacaaatatcagaagaacaaacattcaagcatataa

SEQ ID NO: 38704 - DNA, 225 bp, Zea mays
  Peptide Sequence Number=SeqID_80483
atggacgagtctgaaaaaggagatcggcctcctgggactagtaattgtatcacatttgagtcacagaggattggggacgcttcagcccccgaagggttcgacagccgcctcagagcacgcagagcgagggattactctgcgtacgtccgatacatggccgaggctcgggctacgctcccgaggtaccctaggacatttccgagaccagcaggagcgattctgtaa

SEQ ID NO: 38705 - DNA, 183 bp, Zea mays
  Peptide Sequence Number=SeqID_80484
atggacgagtctgaaaaagaagatcggcctcctgggactagtaattgtatcacatttgagtcccagaggattggggacgcttcagttcgactctgcgaggtgaacagtggcggtggtctacgacaggtcgccgagtcgcctggcagtgctcgctgcgggggcgcggacggtccgcggatctag

SEQ ID NO: 38706 - DNA, 252 bp, Zea mays
  Peptide Sequence Number=SeqID_80485
atggacgagtctgaaaaaggagatcggcctcctgggactagtaattgtatcacatttgagtcccagaggattggggacgcttcagccaacggctccaaggctgccaatggtcggcttcgccaaataaggaaggaaatccgcaccggacagtgtccggtggtgcaccggactgtccggtgcgccaggcgacagaaggcaagaattgccttcccggattgctctcaacggctcctagctgccttggggctataa

SEQ ID NO: 38707 - DNA, 927 bp, Zea mays
  Peptide Sequence Number=SeqID_80486
atggacgagtctgaaaaaggagatcggcctcctgggactagtaattgtatcacatttgagtcccagaggattggggacgcttcaggtggtatcagagctgttaggagccagccagagtatgatggtcatgaattcgtcgagcatggcacagagaaatgtgtcgtggctgtgtacattggatccagtctgcaccatgtggaatggagtgtcactgctgctgggcacagattcagagacacctgccaagtcgtcgctcgcaaggcattgagggccctgtgtcagatctatgaagaagaagtggccgacaccccgctcagattctttccgccctttcagagaaaccgtccagtttggatggccaggatgcgtgcattgaaagggaagcagctgcttgaggatgaccccacagtcgtgtacctcactgcatacctgctcaccctagatgcacagtatgatttcttggctcggcaccaccgtcagatgattgcccgagcagaagaagcagagaagcgcaacagtaagctccatgtggatctcaccacagcccaagcccgtgcaagtgccttggaaagtcgtgaaagccctacggatccaagagcccgctccatccaaccctgttcaaccccattaaagctgaagacccccagattctttgaaggtcacccggtctctatcagaggagagaaaaaggcttgggaactaccggaaggagccatagtctttggaaggaattcccgcctctcccctaaggctatggataagcaagagtacctcgagtcctccccaagatcccccgccagagttgttttgagccccctcaccatgaagaagattccagcaccatcccttgaagttcaagggaagaagctacaagcaccccgccagcactgccgcactctgaggaatacaagagccagtccaacttga

SEQ ID NO: 38708 - DNA, 171 bp, Zea mays
  Peptide Sequence Number=SeqID_80487
atgtccaaaccggacaaaacattctccctcctcatcctcctggtgctccccagccttcataaccctggggttggaccgctgagggttgtggttgaaaaacataggagagttgtaggcagaatatgggacaagagtattttgggagttttctggaatatgcaccatgcataa

SEQ ID NO: 38709 - DNA, 408 bp, Zea mays
  Peptide Sequence Number=SeqID_80488
atgagcatagttcatattccagaaaactcccaaaatactcttgtcccatattctgcctataactctcctgttcatactaagtcagacgattcattcgtcactattctcaccaacagtgaacttcactgtgccacaccacatacacccagctatcctctccctctccacacacactcaacaccctcagccaaggcaaacaccccacctaatcagttactccgctctgccggctacacgcatagtgtcgcttcgcctccagtccaccctcttgttatcggagcgttcgtgtcgtctcgtggaggccagatctgcaaagtctacgccaggcagtggagctacaagccagttccgcgagctcctcttcccccttcgccgaataagcacggcaagcttactggatccctttga

SEQ ID NO: 38710 - DNA, 603 bp, Zea mays
  Peptide Sequence Number=SeqID_80489
atgcccccggtctcgcgttgccccctcctccagcccccgcccgctgggtggccccccgtcctccccgcgacgccgcgccacgtgctcctgcagctcgcgctcctgtgctcccacgtcgcgctctgctcctccaccgaaccggggaaacccaagcccaagccctccggcagccgcaaggcgctgcttgcggacgacgacagcgacgaggtgcccgccgctaagccgggcaagtcgaccatggcggggaagaccaaaaagaagctgctcgccagcgacgccacttccaagaaccagaccaaggttgccaaagctaagaagccagagtcagctgccgtggcgagaagggccgccaagaagcccgatggcaaagcggctgcgggtgcgggtagtgacgccgccattgccacggtctccaaggcccccaagccccccaaggcggacaaggccaaggtgccgaagctggacaaggcggcgactgtggcggcggctagtgccaagaccaagggcaccgattcagctaagcctgccaaggtttccaagattggttgcagtggtgccgtgctccccagatctaccccgtgcgcgtgcccagatctagcctga

SEQ ID NO: 38711 - DNA, 284 bp, Zea mays
  Peptide Sequence Number=SeqID_80490
atggacggtggcgctcggctgctctctaatgacaaaataaaagccgcagcagctgcagtcgaattaaagccacaccaactcgcgctcctgtgctcccacgtcgcgctctgctcctccaccgaaccggggaaacccaagcccaagccctccggcagccgcaaggcgctgcttgcggacgacgacagcgacgaggtgcccgccgctaagccgggcaagtcgaccgtggcggggaagaccaaaaagaagctgctcgccgtccacccacttccaagaaccagaccaag

SEQ ID NO: 38712 - DNA, 390 bp, Zea mays
  Peptide Sequence Number=SeqID_80491
atggcaatgggtacccgctacccgaaacccgtgggtatgagaaacccgttggtacccgaaacccgcatgggtatgggtttgggcaaaattttatacccgtcacggccgcaacccaagtcgattcggaacctgaagaagctgacaatgctggacctgagcaacaacagcttctccggccccataccgccggagatcggcgcgctgtcgaacctgggcatcagcctggacctgagctcgaacaggtccgtcggcgagctgcctgacgagatgtccggtctgacgcagctgcagtcactcagcctcgcgagcaatggcctctgcggcagcatctcgatcctcggtgagctcaccagcctggcatccctcaacatctcgtacaacaactcttga

SEQ ID NO: 38713 - DNA, 228 bp, Zea mays
  Peptide Sequence Number=SeqID_80492
atggcaatgggtacccgctacccgaaacccgtgggtatgggaaacccgttgggtacccgaaacccgcatgggtatgggtttgggcaaaattttatacccgtcatgggtatgggttttttggcgggcatattttttcttcgcgaatataggtctgggcaagtaatacccagcgggtttttatccgttgccatctctaagtcgaagtacccttcgcatttgcattcctaa

SEQ ID NO: 38714 - DNA, 630 bp, Zea mays
  Peptide Sequence Number=SeqID_80493
atggacagaaggtccatgacacctggtatcagctccaggttatcctcaccaccaccagccgcccatccctcaccaccaccagacgccgcgccatcagccgccgcaacgccctcccacccgccctctccaactccaaatgcattcactcgactcgaagagagttttggccgtctcgcagagaagtgggatcagttcgttgtgatgttccaccgctacaaggagaagacagagaaggaactccaagcagcggtgcggcttcaggcggcagcgcgagggttcctggcacgccgccaggtacatttccttcgtggggagaagcaccttgctgtggcctccagggccactccatggccgtcatcacatgagcaggccgtggtgcgcctgcaagccacagtgtgcggcttccttgttaggcgggcggtgcggaagctgcacttgctgatcagctcatcgctgcaccaactcgcagcctgcgcgcccaaccaccaggtctcgtctatactttttgaaccccctgcagaagtcgagatctggctcgaggacgagctggtcctcaagggagggggagatgtcatgggcatcatagggagcgagaggcaacagccaggctgggataaggctagagaataa

SEQ ID NO: 38715 - DNA, 504 bp, Zea mays
  Peptide Sequence Number=SeqID_80494
atggacagaaggtccatgacacctggtatcagctccaggttatcctcaccaccaccagccgcccatccctcaccaccaccagacgccgcgccatcagccgccgcaacgccctcccacccgccctctccaactccaaatgcattcactcgactcgaagagagttttggccgtctcgcagagaagtgggatcagttcgttgtgatgttccaccgctacaaggagaagacagagaaggaacttcaagcagcggtgcggcttcaggcggcagcgcgagggttcctggcacgccgcccagccccctgcacgacccaagagggtcgtctccttcattcggacaactaccttggtgttggacagacccaacataagaacgggctggttcctccttcacctttcatccaacgtgaactcgaggacgagctggtcctcaagggagggggagatgtcatgggcatcatagggagcgagaggcaacagccaggctgggataaggctagagaataa

SEQ ID NO: 38716 - DNA, 402 bp, Zea mays
  Peptide Sequence Number=SeqID_80495
atgaagagagcgtctctatgcgaaggaacaaaacggtgccaaaggttcatctacaactatactaaatcgactgtccggaataccgtagattattccggacaggagaagctttttggaaaaacagactatgcgcggaccgtccgggcccttgcggcggacagtccgcgacaccgagttgacttcgaccaggaactacaaatcagggacagtccgactaaaccgcggaccgtccagctacaacgcgcggaccgtccggctataattcgcggacagtccgcaggtgaagacctggttcagcccggaggtgacaagttgatcaaaaggaattatatagctggcgcggaccgtccgggaccaagggcggaccgtccgcgtggtgtcaccgaggcagatagccgttga

SEQ ID NO: 38717 - DNA, 492 bp, Zea mays
  Peptide Sequence Number=SeqID_80496
atggaaactagtgcttgtattactaacaaagcatctcttgagcttacttttgaatatctacaaaagaatgtgcacaagcctcatgggttgctcttcacccaaaggaagaaaggtaaaaagcaaaggtgccaaaggttcatctacaactatactaaatcgactgtccggaataccgtagattattccggacaggagaagctttttggaaaaacagactatgcgcggaccgtccgggcccttgcggcggacagttcacgacaccgagttgacttcgaccaggaactacaaatcagggacagtccgactaaaccgcggaccgtccagctacaacgcgcggaccgtccggctataattcgcggacagtccgcaggtgaagacctggttcaacccgaaggtgacaagttgatcaaaaggaattatatagctggcgcggaccgtccgggaccaagggcggaccgtccgcgtggtgtcaccgaggcagatagccgttga

SEQ ID NO: 38718 - DNA, 402 bp, Zea mays
  Peptide Sequence Number=SeqID_80497
atgaagagagtgtctctatgcgaaggaacaaaacggtgccaaaggttcatctacaactatactaaatcgactgtccggaataccgtagattattctggacaggagaagctttttggaaaaatagactatgcgcggaccgtccgggcccttgcggcggacagtccgcgacaccgagttgacttcgaccaggaactacaaatcagggacagtccgactaaaccgcggaccgtccagctacaacgcgcggaccgtccggctataattcgcggacagtccgcaggtgaagacctggttcagcccgaaggtgacaagttgatcaaaaggaattatatagctggcgcggaccgtccgggaccaagggcggaccgtccgcgtggtgtcaccgaggcagatagccgttga

SEQ ID NO: 38719 - DNA, 477 bp, Zea mays
  Peptide Sequence Number=SeqID_80498
atgacgaacacggtagctgcccaccacataatgtcagctatactggatcaaagccagcatcatcatcaaaactcagatggacagttcggatacccattttcatctggtcggtgccaaaggttcatctacaactatactaaatcgactgtccggaataccgtagattattccggacaggagaagctttttggaaaaacagactatgcgcggaccgtccgggcccttgcggcggacagtccgcgacaccgagttgacttcgaccaggaactacaaatcagggacagtccgactaaaccacggaccgtccagctacaacgcgtggaccgtccggctataattcgcggacagtccgcaggtgaagacctggttcagcccgaaggtgacaagttgatcaaaaggaattatatagctggcgcggaccgtccgggaccaagggcggaccgtccgcgtggtgtcaccgaggcagatagccgttga

SEQ ID NO: 38720 - DNA, 306 bp, Zea mays
  Peptide Sequence Number=SeqID_80499
atggccggagcaggagcgatgcccaacgaacgagaaggactgaactcaccgaagggtggcggcggcagggcactagggcggctctcagactctcagtttccggcgcgcgcgggtatgcgggtgcatacccagcataccctgtgcatccgccactggcgctcgcgctggggcaccgggacgctgcgccgcgcctgcacgctggccgcaccggttggccgcgggccgccacgccgacaggccgcgctggccgcgggcgagcagagagggcagttgcgaggctcctggtgcagtagccgcgaggagtga

SEQ ID NO: 38721 - DNA, 786 bp, Zea mays
  Peptide Sequence Number=SeqID_80500
atggtggcccgcggccaaccggtgcggccagcgtgcaggcgcggcgcagcgtcccggtgcccaggcgcgagcgcggcagatcggccccagcgcggtggcccagcgcggccagcgcagcctgcgcaacatcattggagccgcctcgctgcacatctgcctctccaccgttcgttgggcatcgctcctgctccggccattttcgtcaccaccggcgagcccctatgctgtcctgtccgtccctcgccgtcgttgggcacgtgcctcgctgcgaactcgtctagccatccgtcgtcgctgcgagcgtgttatgtcgcgcgcgtccgcgcgtcgtttgcacgctatcgtattgggttcgccgtcgtcacgttatctgcgcttgccgcgcgtggtgcgcgcgctaggtcacgtgtgtccgcgcgtagttctgcacacggttgtgttgtttcatgcatcgtggcaattagattgatggttcttggtattggctctggtaatgctagtccactacagtcaaacaggatacttgctgagtatgttgatgtgtactcacccttgctctacacaccaaccccccccccccatccccaggttgtcagcattgcaaccactgctcaggagaagatgaagctgtggaaggagaccaccaggagttccaagattatgacgagttctaggcgtgggttagcggcaacccccagtcggcaacctgtgaaggccgcgtttatctacgtttcgttttcgcactttgattattgtaaagactatgtggatgtctcagacatatga

SEQ ID NO: 38722 - DNA, 504 bp, Zea mays
  Peptide Sequence Number=SeqID_80501
atgaagaccttcgagtggattatcctctcaaatccactggaaggtcgggggctacaccccttgggttttctggacgctcttattgattgcaacacaccaactattcagggagatggagcttcggagccttgtgaccccaaagataatgaattaaagctttcagagaggcttatgcaacttcttgatactcttcaacctgcaaagttccattggcaatgggttgagatgaggcttcttttagatgaacaagctcttatggaaaaagttgcagcaggcaagacagcacttgaatcacttcggtcgttatcccctaaagctgaggggtttaccctttctgatagtgaaaaagggtttactgaagtcattctgtcaaggctacttgctagacctgatgctgctcctctctattcagaagctgtccgccttcttggcaagcttcaggagtccccttgttatggatgtgaaatggattttacaagggatagatgctattcttggccgcag

SEQ ID NO: 38723 - DNA, 6012 bp, Zea mays
  Peptide Sequence Number=SeqID_80502
atgcataggtactccagcaacagcgctgggttcagcggtggcagggacggcgcgaggttggaagcctcgcccttctcgtcctcctcctctgggtaccctgtcagctccaggcggcagcagcagctagttccatacaagctaaagtgtgacaaagatccacttaataacaagcttgggccacctgacttctatccacaaacaccaaactgtcccgaagagacattaaccaaagagtatgcacaagctgggtacaaggagactgttgaaggaattgaggaagcaagagagattgtactcagccagatcccgtacttctgtaagccagatgctgtcataaagtgcaaggaggcactaaagaagcgtttaagagcgatcaatgaatctcgtgctcaaaagagaaaggctggccaagtttatggagttcctctttctggatctctactgatcaagcctggagtttacccagagcaaagaccatgtaatgaggacgcccgcagaaaatggattgaggcccttgctcagccaaacaagcgactgcgttcattgtctgagcacgttcctcatggttaccgtaggaaatcactttttgaaggtctaattcgatataatgttccgttgctaagagcaacatggtttattaaagtcacatacctgaaccagctacagacccgacagacacctaacagtatttcagtagcgggttctgataaccaacgctctaatcagtggacaaaggatgttgttgaatatttacaacatattttggacgaattttgttctaaagagggtgcattcgtgcatccatcttttagagagcagtcatcaccaggacctactgctggaaccaatcagataaaaatgaaaactgaagcatctccagctgctggagacattgaagaacccttggtgcacttcaaatggcggtatatggttcgtctcatccaatggcatctcacagaagaattgcttgttccctcagtacttatcgaatggctatctaaccaactccaggagagagattcagttgacgttttagaacttctcttgcctattatgcttggtctggttgacaccattactctctcacaaacatatgtgcgcatgtttgtggagctactagtgagacgtctcaatgatgcttctgttgttgatagtccaaaaggaccttcagtttcttctgttatagcagagttactgcgttctaaaaggtgtgatgcttatcggtatttgtcctgtggttatgctgtttgttcaattcaaaaacgtgcatatgatctcgcaacagttgctaaccctaaccttcaagcacgtggtgcagccaaagtggtacaggctttggacatagctcttgtcacaggaaatttgtcagtggcatattcttcactctttaatgatttatctgatacgttaatggaagagagatggattaaagaagtcagccccagtctgcagtcttctctgatgtggattgggactgttgagctatcccttatctgttctatatttttcctttgtgaatgggcgacatgtgattatcgtgattgtcgagcatctccctctcggaatgtgaaatttacaggaagaagagatttgtctcagatacatatggcagtgtctatcttgaagaataaaatggatgagatgaataatttgtctcgttctaagagtagcactcgcgttaccctgaataatatcaccaaaggttcttcactgaccgatgcttgtttgacagcagctgctgtggatgacacttctggattgcaaagtaatgcaaagaatgtggatgagaagaaggatacgaatgatatctttgaaagccctggtccactgcatgatatcattgtgtgttggttggatcagcatgaagttagcagtgttgcaggttttacccgggtggatgttctcatcgtagaacttatccgcaatggtatattttttcctcaggcttatgtcaggcagctaattattagtggaattactgacaagaacgacacaatgttggatgttgaaagaaaaaggaggcatcacagaactttgaagcagcttcctgggtcttctttatttgatattcttgaggaaactaggaccgtggaagagcaacagttatatgagatgatgtcgacatactccagcgagcggcgccttgttctctctgaactttcatgtgatcactcattttatgcaagtggcagaggcgagtatactgcaagttcctgcattcggaagcagagtgatcttccacttgcatcaggaggtgataagcatggaagagtgccagaacaagtagaagatgttaaagccctattgtcaagtctgttgggttttacatatccttccccagtggaatccgaacctcgccaaatcaaaacaagctttcaagaatcagcaacttcaacactctcacaagttgagactggagaagcaaaaagtggatgtgaggtttgtatgaggtccaaagggcagaaattggatgatactgccactcctttccaagggttttcattgattcaatcggacgaggaagatatttggtgggtgaggaaaggcacaaagttacaagaatctttcaacattgaacctgttcagaagtctgttaagcaaacttctaggggtagggcaaaagtggttccttgtatggttactagcgaaaattcgtggtggaatgggctcttcgggccaacctgggaggagttctatgcatacgaggaacagagatcaccaagtttgtcagattctgaattgagttcattggggagagcagtgtacgagaacatacttcttgcggctgacatcctgcctgatgttctaagtgctttagtgaacagaaattctgtgtcagcaattgtcaggcatcctggttcaacagcttttgcttacgtacgatactttttgaagaaatatagagatgtggctggtgtggccaagtgggaaaaaagctttcggaccacttgtgatcagcgcctgttagctgagcttgataacgggcggtccattgatggcgaattgatttcttcttcgggggtttcagcaggcgaggagattgatgagcaggtccgccaaaagttgaatggaaggagttcaagacttgtgcagaatatgaaagaaatagtgcaacggcaagctgatgaaattcagcgcagtttgaaggaaaagaaagttctagcaactcccaggaatccacccacttttgagaaagaagatagctatcaaattgcacatgacattgtttcgggcttagtagaatgcatcaggcaaaatgggggtgcaaatccagatggagacctttcaacagttgcttctgctgtttctgcaattgttgcgaatgctgggcatgtgatagcaaaacatttggattttgcaggagaaactcttggggaccgcttcagccgtgcatttgaaatagctctggctgttgaaacttctggagctgttacagcagcttttgcttctccaaagatgcaccgcaatcagtttcaaccatctcctgaggcccatgatgcatatggaaatcatacaagtgatctcagcaactcagggaaaggttttgttgggagaactgctaaagtatctgctgctgtttctgctcttgtcgtgggggctgttgttcatggagctgttagtcttgagcggatggttgctgctttaaaaataaaagatggtttggatattctgcagctcctgagaggtttgaaatcaagttcgaatggtgtatcccgtcctactggaacttttaggattgaacattccacagatgttttggtacattggtttagggttctattggggaactgcagaactgtctatgatgggcttattgcagatattcttggagattcgtacattcttgcactctcaaggttgcagcagatgcttcctcttagtgtaatctttcctccggcctactcaatttttgccatggttctttggagacgatatatttttaaccgcgaagatccacagctttatcagtctctgtcaaacgcaataagcgatattaccagacatcaaccttttcgggagatttgcttccgcaatacacatcggctgtataatcttctggcttcagatgttggtgattcagagtttgcagcaatgcttgaaactcatagtcctgacaggaattcaaaaatactgccatttatacctctccgtgcccggctttttctggacgctcttattgattgcaacacaccaactattcagggagatggagcttcggagccttgtgaccccaaagataatgaattaaagctttcagagaggcttatgcaacttcttgatactcttcaacctgcaaagttccattggcaatgggttgagatgaggcttcttttagatgaacaagctcttatggaaaaagttgcagcaggcaagacagcacttgaatcacttcggtcgttatcccctaaagctgaggggtttaccctttctgatagtgaaaaagggtttactgaagtcattctgtcaaggctacttgctagacctgatgctgctcctctctattcagaagctgtccgccttcttggcaagcttcaggagtcccttgttatggatgtgaaatggattttacaagggcaagatgctattcttggccgcaggtcaacaagacagcagcttgttcatattgcccaacgaaaagggctttcaacaaaggcacaggtttggaaaccatggggttggtccagcttgcttagcgatgttattcctaataaaactgcaaaaaggaagttggaagtcacatcaattgaggaaggtgaagttgtggatgatactgttgatgctaaaaggcctagcaagactccccctcatagtgttgatagaagctttgaagcgattagatccataaataaatatttaactgagaaagcccttgctgaattagtattgccatgcatcgacagaagttctgctgatatccgtggtatactttctgttgatctgatcaaacagatggggactatcagtgaacatatcaaagcaatagcacggaatggtgctaaacaagctggttcagtcccttcaggtaatgaagtgccatcaagcaaatcaagtggtcgtaaaggaattcgaggtggaagcccaaacattggcagaagagctccggttggtaatgacccaagccctccgtcggcttctgctctgagggcagcattgtggttacgcctccaattcatcattaggttgcttccagtaatcatggcagatagcaaatgtaagctcctattcttacacatactgactatgaaaattcttaggagcatgagacaaacacttgcttctgcaatcctaggcctgcttgcaacgcgcatgatttatgaagatgcagatctgccccttccacctaccaatgcaactgctttaaggcgggaggtggattccctgctggagcctcccctggacgtcctgcttgatcggcctggtgaaagtctttttgagaggcttttatgtgttctccatgcacttcttggcagctacaaaccaagttggctgaagtcaaggtcagcctctaggtcgacaattagaatccaacgagatttttccgcatttgataacgaagcagccgagggtttacagtctgcgttggatcacatggaattgcctgaaacaatcaggcggaggatccaagcagccatgcctcttcttccaccatcccggcacccttctttgcaatgtcaacctccgcagttgtcgttggctgcattaacaccactccagagcagtacatctggtgtaggtccgcaacagaaaagttgttctgcgagctgggtgcccactaacgtctcaggcagaagcaaggcggcgttgccttcgcatgatcctgaaatggaggtagatccatggaatctgctcgaagatggcacaagctgcccctcaacagcatctggaagccatggcgcgagtggagtgacgggtgaccatgctaatctgaaagcgtgcagctggcttaagggtgctgtgagggtgaggaggacagaactgacctacattggctctttagacgatgacacctga

SEQ ID NO: 38724 - DNA, 168 bp, Zea mays
  Peptide Sequence Number=SeqID_80503
atggggaggctagaaccccgggcagaatgggaatcacagcttgtgggtaaagtgtgcgacctctgcagagtgttagaaactggttgtccccactgttctcagtgctcagaaggtgaagctggcaacatggatgacttcgaggagttccaggaatatgatgagttctag

SEQ ID NO: 38725 - DNA, 180 bp, Zea mays
  Peptide Sequence Number=SeqID_80504
atggctgatataccagtttctaacactctgcagaagtcgcacactttacccacaagctgtgattcccattttgcccggggttctagcctccccattgatcactaccaaggtccttacgaagaggcactcaggaaagagcctgagccccctaaagtaatcacaaggaccccatcgggataa

SEQ ID NO: 38726 - DNA, 1212 bp, Zea mays
  Peptide Sequence Number=SeqID_80505
atgcgggacccagcccccgagtcgcaggggagggccttggagcgtgttggagaagactcagcccgcggcgcctgggggcgcacgaacgcaactccatgggagttggtacctctcagccatcgttcggcttcaaggattttcatcacgcagcccggtcgcaccccttcaccggcggtcacccgagatggcgacctccagcttgatggtgggggaaagcgagccgggctgcggcctctgccccttcctcagcctcaaggattttcatcaccaaggctggggaggggagagtgccgagttggggtcggcccctgcgtgggcggtggcccgctccttcactcagtgatggggggagaagcgggcattgcccgtggcgtccggcagctgcagcgtgcctggtcttcagccgcgagtggcttcggggccacttgcggcgccggcgtctgccacggcagctggaagaggttcttccgccggcgcggcggccgggaccggccacgggctgacctccaacttctacggccttctgcccgtccttgcctcacgagttttggcatgggcgggggcctcctggcagcggcatccaccccgaggtcagcgttgccgctgttcggccccccggagcagaagtcgtcgtcgtcgccgctgctggagcaggaatccctcggcccgttcggccttgttgtctggggctcctctagcttagttgaagagaccccttggccgcccttcggtggaccgaggccagggccgacgccaaagtcgatcagtcgatgcctcgggttggactggcgcccttggaagccggttgaccgaggccccaggggtaaccggttgagccgcctgctcgggccggattcccggaggagtccctggaccgcggcgccgcccgaggctgggtcgggctttgctgaagacgtcgtcgatgccgagggtgctacggctcccttcagcgtgaagacccgagccagcaggatcagatcatcttgtagcgtgtgctttctgcggccgccgaggccagaagaacacaccctcgccgcgcttgcgaagctgcgtcttttttcctcttgtttcgagcgtctggactttgtcggtaacagggataaggtgatgagtgaggtatccgtatcccggaggcgtaggagtccctcggctcggtcagccttggctgcttatgtgtacctcgtcgtttccaggatccgctttccgaagtag

SEQ ID NO: 38727 - DNA, 1434 bp, Zea mays
  Peptide Sequence Number=SeqID_80506
atggggggctcggagcccggttccttcgcggagaaggatccctttcgggcaactggcgcgccggttgctcgacgcgtgggcctgggttcccaagctggcgtgtcagaagtcggagaagcgcgtccatctggcgcggttgcatgccgcctgcatggttgcccgccccttctgcccattggtctgggcggaaatggggggtcgcctgcgtcgtgtcttcccatcttccaagcccccggatggggggtatccgccgcctttccgcctcctcgttggaggaacgcaactccatgggagttggtacctctcagccatcgttcggcttcaaggattttcatcacgcagcccggtcgcaccccttcaccggcggtcacccgagatggcgacctccagcttgatggtgggggaaagcgagccgggctgcggcctctgccccttcctcagcctcaaggattttcatcaccaaggctggggaggggagagtgccgagttggggtcggcccctgcgtgggcggtggcccgctccttcactcagtgatggggggagaagcgggcattgcccgtggcgtccggcagctgcagcgtgcctggtcttcagccgcgagtggcttcggggccacttgcggcgccggcgtctgccacggcagctggaagaggttcttccgccggcgcggcggccgggaccggccacgggctgacctccaacttctacggccttctgcccgtccttgcctcacgagttttggcatgggcgggggcctcctggcagcggcatccaccctgaggtcagcgttgccgctgttcggccccccggagcagaagtcgtcgtcgccgccgctgctggagcaggaatccctcggcccgttcggccttgttgtctggggctcctctagcttagttgaagagacccctcggccgcccttcggtggaccgaggccagggccgacgccaaagtcgatcagtcgatgcctcgggttggactggcgcccttggaagccggttgaccgaggccccaggggtaaccggttgagccgcctgctcgggccggattcctggaggagtccctggaccgcggcgccgcctgaggctgggtcgggctttgctgaagacgtcgtcgatgccgagggtgctacggctcccttcagcgtgaagacccgagcctgcaggatcagatcatcttgtagcgtgtgctttctgcggccgccgaggccagaagaacacaccctcgccgcgcttgcgaagctgcgtcttttttcctcttgtttcgagcgtctggactttgtcggtaacagggatgtttgtgtgagcgagagctgcttttcgcggaagggacgagtgaggtatccgtatcccggaggcgtgggaatccctcggctcggtcggccttgcggcttacgcgtactttcactcgtccatgaggccctgtccccgacttag

SEQ ID NO: 38728 - DNA, 426 bp, Zea mays
  Peptide Sequence Number=SeqID_80507
atggggtgcaaccgtgtatctacacctggtttggtcagatctgtcaccagcaaggcagcaataaagctcaaactggtgtggtctaacagaacgacacaacttcagactattgatacagttaaaataaaacttcagagcaattatcttgacttggttcatattctggtttcctcattcaaagatgagcaaagagggaagagtcgacaagtggcatctttaacactaacagatcacattctgcaacgaatgttcgaggtgatcaggatgctagaaggagacaggctcacagagagatgggaggtgtcgcagaacgtggacacgccagagttcatctcatcggagctcctacttcaaaagtacatggattttgcagcggacgaatgctcgcttggtgtagaagccatggagctctctggactaaggtga

SEQ ID NO: 38729 - DNA, 213 bp, Zea mays
  Peptide Sequence Number=SeqID_80508
atgttcgaggtgatcaggatgctagaaggagacaggctcacagagagatgggaggtgtcgcagaacgtggacacgccagagttcgtctcatcggagctcctacttcaaaagtacatggattttgcagcggacgaatgctcgcttggtgtagaagccatggagctctctggactaagaatagcccttgttgatgaagaacttcacggcgcataa

SEQ ID NO: 38730 - DNA, 351 bp, Zea mays
  Peptide Sequence Number=SeqID_80509
atggcgtcccccttcccaagcttccttgccgagcagcgccgcccttccgtggatgaaacccggtgcccttccagcttctccactgcactccatttcccccatggccgtgagctccccatctggccgccatccacccgtgtgctcggccctcccagtgtggcgtctaccgatctgcgcagcagtgccggtccgcagcagggagccccctcctcgctgtcctcagtggtgcccgccggctgttcgacaaaatgcgcagcaagccgcgtgatgcaacaacccatccgcaacgccatcaaaacccttggtgagaaacccctgctgttcttgatgtttattttccgatgtgtgtga

SEQ ID NO: 38731 - DNA, 234 bp, Zea mays
  Peptide Sequence Number=SeqID_80510
atggagagacttcttgcagtcgtgagctcggccacggcaagagtagggaagggcaaaggcatggggacgcctagcctgctgcttgagagggagggcgtcggcgtgcctactgcagtggagaagctggaaggggcaccgggtttcatccacggaagggcggcgctgctcggcaaggaagcttgggaagggggacgccatggctgctggtttccatgggagggcgagtgttggtga

SEQ ID NO: 38732 - DNA, 294 bp, Zea mays
  Peptide Sequence Number=SeqID_80511
atgggggaaatggagctgcgcagggagaaaacagggcgtccattacagggggatccggccatggagagacttcttgcagtggtgagctcggccacggcaagagtagggaagggcaaaggcatggggacgcctagcctgctgcttgagtggagaagctggaaggggcaccgggtttcatccacggaagggcggcgctgctcggcaaggaagcttgggaagggggacgccatggctgctggtttccatgggagggcgagtgttggtgaagacagcaacggggaaggaggaagatag

SEQ ID NO: 38733 - DNA, 294 bp, Zea mays
  Peptide Sequence Number=SeqID_80512
atgggggaaatggagctgcgcagggagaaaacagggcgtccattacagggggatccggccatggagagacttcttgcagtcgtgagctcggccacggcaagagtagggaagggcaaaggcatggggacgcctagcctgctgcttgagtggagaagctggaaggggcaccgggtttcatccacggaagggcggcgctgctcggcaaggaagcttgggaagggggacgccatggctgctggtttccatgggagggcgagtgttggtgaagacagcaacggggaaggaggaagatag

SEQ ID NO: 38734 - DNA, 465 bp, Zea mays
  Peptide Sequence Number=SeqID_80513
atgggcatgagcaagaaaggcggaagttcgtcgcaccacttcggcgacaagcggaagcgcgagccgagccctccctcggaggacttcgacaattccgagtactcggatgaggagttttcctctgagtccgaggggtcgtcggtctacacctatcccccggcatcgtccgatgactcggacgatttccaggggatcgccgccgaggtgtggacatatatccgggctgtcgagcgctccgggctcgagggctcggatgagtcggaggtctcctcggacgaggagaactcctctgactcgtccgaggaggagagcggcggtgacggagacgacgagggcgtcggcgacgacggaggcgacggtgatggtgacggcgacggcggcaagggcgacgacaagggcgacgatggcgacggcaagagcggcagcggcagcagcaaggccaatggaaaagcgccactagcttaa

SEQ ID NO: 38735 - DNA, 468 bp, Zea mays
  Peptide Sequence Number=SeqID_80514
atgggcatgagcaagaaaggcggaagttcgtcgcaccacttcggcgacaagcggaagcgcgagccgagccctccctcggaggacttcgacaattccgagtactcggatgaggagttttcctctgagtccgaggggtcgtcggtctacacctatcccccggcatcgtccgatgactcggacgatttccaggggatcgccgccgaggtgtggacatatatccggggctgtcgagcgctccggggctcgagggctcggatgagtcgggaggtctcctcggacgaggagaactcctctgactcgtccgaggaggagagcggcggtgacggagacgacgagggcgtcggcgacgacggaggcgacggtgatggtgacggcgacggcggcaagggcgacgacaagggcgacgatggcgacggcaagagcggcagcggcagcagcaaggccaatggaaaagcgccactagcttaa

SEQ ID NO: 38736 - DNA, 462 bp, Zea mays
  Peptide Sequence Number=SeqID_80515
atggagttgtatggtcctgcacttgtgacaacaaaagatgctggggatgcagtaacccttttgcagtctttagctggttccacttttgacagtagccagcttgatttaacagcttgcatgggatatcaagctgtagaagaacagtcaaatgacttgacagatggcgataagaaccaagaagccaattgtagtaatgtggatgatatgtatcatggcctcactgtcaactctgagattgattctctgcctgatcctaaagaccaggtgcaccacccgatagaaggaaactttggccttccttattggcctccaacggctcctagctgccttggggctataaaagggacccctaggcgcatagaggagtcacccaagcacactctaagcatttcaagacttctagtcctcactttcacgcaatcgttcatcgttcttgagattggagcacttttcgagttgtaa

SEQ ID NO: 38737 - DNA, 522 bp, Zea mays
  Peptide Sequence Number=SeqID_80516
atgaacgattgcgtgaaagtgaggactagaagtcttggaatgcttagagtgtgcttgggtgactcctccatgcgcctaggggtcccttttatagccccaaggcagctaggagccgttggaggccaacaaggaaggccaaagtttccttctatcgggcggtgcaccggacagtccggtgcaccaccggacagtcactgtagcatgtccggtatggatctccttcctaatctggcgcagatgaccgttgcagcgccgcacaccggacagtccggtgcacaccggacagtccggtgccccctgccgaccgttggcgcgggccactcgtcgcccgcggattgcgcggccgaccgttgcgctggcggccgttggctcaccagacagtccggtgcaccaccggacagtccgatgaattatagtcgtacgccgccaaacattcccgagagtggccagtttgccggaagccagcctggcgcaccggacactgtccggtgcaccaccggacagtccagtgtgccagactga

SEQ ID NO: 38738 - DNA, 633 bp, Zea mays
  Peptide Sequence Number=SeqID_80517
atgcaggaggcgtgcaaccgcaccacggttgtgcaccctttcggcttcatcgcatccggtggggaccgaggaaggggatatttcgaaagggatccttctccgcaaaggaagcgggccctgagccctcctactgatcaggggttcgaaggctggcccctcggaaggaagggttcaacagtcgccccagagcgcccgggctccgtgcccactactgatcaggggttcgaaggctggccctcagaagggttcaacagccgccccagagcacgtaaagcgagggatgactctgggtacgtccgttacatggccgaggctctggctacgctcccgaggcgcattcaatgcgaggattgcttgacaccttatcctgacacacatgcctcagtcggcaaggtcgaacctcaggtgcaacaggaagctccgccttgcccgaccctaggcctcggcctcgggaggaggtctccgcctcgcccgacccgagggctcggcctcaacctcagcctcggaaggtggtcttcgcctcgcccgacccaagggctcggcctcaacctcggcctcgggaggaatcgcgtcctcgcccaaccccggcctctgtggcagaaccgcccgaattattccagcttaagtgcctaa

SEQ ID NO: 38739 - DNA, 3243 bp, Zea mays
  Peptide Sequence Number=SeqID_80518
atgtcacaggcccagcaaggcgctcatgctgtccgtcgctctccccgtgttgaaaacaagagaaagcaattagataaaaatgaattgaaggaaaggaagaagagattaaggttgaaagtccctcctatacaagatgccgaaagtgatgatgaaaaagacacagagtttgttcctggtggcgatgggtctggtgatgacaatgttggtattgttggtggagatgaaaataagggtataactaagacacgagctattcgatgctcacctgggaagtttataaagcttgtgaattctctatctgatgaattgaaaagtgaagtggttgctaaggggtttggcaacttgctgagattcaagccgcacttattgtcgagaaagttgctcagctggctgatgcggaagcttaacccagaaacgatgaaattagagattggtggtggaaaagagattcaaatcaccgaacacagtgtttggtgtgttttgcagttaccaaacgttggcagtgatccgccccccatgtctgatgcagatgctcgtgccttgcaggacgagctgggggagcaaatttgtggcaaatcttatagacgcatatctggtatcaatatatctattatcactgatagattgcagaagaggactctcaatggggagctgggcctgagagcctttttcatggcagcatttcagtgtctgctattctccaatactgacactcgcatcaggattgatgatgtgaagtacactcaggacatccagaacatgggcaacaagaactggtgcaaagctgtagtagacaggctgagcatagctgctcgtctttatagaaaggattttgcggagaaaggcattaatgcacccatcagtggatgcgggatctttgtagctatgctttatgtcgacaacctgcaacatggattagacacaagtcctttttcaatccctcgatgtgctttcttggactccaagatgattgatgctatagcaaatatggatctcaggggagatgttcctcctgggaccactgagtttggacacctcaggttgagaagtatcactgacacgtgctacggcgtccccattggtgctctagcaatattacatgctccagtaccagcacctgccccagtagcagtccctaatccaacagcagcacctaacccagtagcagcagcatctgtcccagtagcaacagcagcacctactgggacatttgctgatgtgcttggcacatcccatgatctcgtcggtcatgcttccttcaatatccaacccccattcttttaccagtaccctagctttagatcttcttttggtcagagtattactgatttagttggaaggagtaggaagtcagatgcgctgaacatcttgaaggcgtttgatgaaagcactagtgaagcccagtcgtacgcacagaaggctgtgaagtattcaacaatatcccgcgaccttatggcaaaagctcaccacgagtgctacactggcattcagaagcttatcgctgacgctatcgttgagaagcgagctgccaaagagcgcaggaggaaggtgaagaacgaccctagagtaggagcaggagcaggaactagttcaattgcaccggaggaccaatctagaggaggtgatggtgaagaaattatacggagtcccgttgcaattgacactagagcaggagcaggatcgggaactacttcaaatgtaccggaagaccaatctggaggaggtgatagtgaagaaatacagttggattgcagtggtggagatcttgatgacagcttagattttacgagaaccccattgtgtggtgatgacattgatctggaagagggaaatttgaatagaacacctcctgatttacgtgggtcaatccgaagtattgatgatatattgcaaatgatgtattccccagagcactttgcaagcattgatggcgattcccctcccaatagccagccgactcgtgcaccacgaattactgttcgcaagaggaaggcttcctcaaacccccctggcaatgatcaacggcctgtgggagcacctgagacagaagaggagcctctgagcagggacactgggatgcagcatcctactgcccaggatcatataacttactcaaggaggagcgataggtccattcaagttgccaacacacagaaggcagaggctgagaagaagaaggctgagatcgagatgaagaatgctgaagctgaggaggctgagaagagaaaggctgaagccgaacaagctgataagaagaaggcagaagaagctgagaataagagaaaggctgaggccgaagtagttgagatcaagagaaaggctgtagctgaagaagctgagaagaagaaggaagaagaagctgaggataagagaaaggctgaggccgaagaagctgagattaagagaaaggctgaggccgaagacgctgagattaagagaaaggctgaggctgaagaagctgagattaagagaatggctgcaactgaagaagttgtgaagaagaaggctgataccgagaagaaggttgaagcgaaggagaaaaggatacaggttgcaatccagaaacagctaaaggacaacatcaaagctttgaaaaagccggtgcccgctgccaagttaaagaagatgttccagttacaaatgtcaaaagaatatgctgagcagcgccaacagtacgaggataggttgaacatgcttcgtcaggaggccaaagctgagattgatagtttggagaagagcattgatggccaggcaggacccagctcatcatttgatgatatccagttcccggcggagtatgatgatgatatcaacaatttgacccaaccaatccgactttctcaagacgaagtctcagtaggccaggctgatttcagtgagtttcaaaggatgatattcaagcgcctaggtgatagagtgctgaagaagcctagggagtacatatccccgttcaagatccctcgtaatcgacctgagatacccctggccaaggctgttgcacttaggcggaagatcgcatatgatcctgagctgaaaaggagaattttgttggagtttggccttcttgttggactaactggcgaggaaattttaacatctttttctaatgacacccttggtgagtcaggaatcatagactttttcgtgcactgcatgcgacatgatgatattgtgcacaaggttgattcttgtggatacagagtgtttctgaccactggtttttatgtttcatttagagaatag

SEQ ID NO: 38740 - DNA, 577 bp, Zea mays
  Peptide Sequence Number=SeqID_80519
gagaattttgttggagtttggccttcttgttggactaactggcgaggaaattttaacatctttttctaatgacacccttggtgagtcaggaatcatagactttttcgtgcactgcatgcgacatgatgatattgtgcacaaggttgattcttgtggatacagagtgtttctgaccactggtttttatgtttttgtccctatcaaagatggtgctaactattttgtatattgcttcaattttatccataaacgtattgatgtgctggactcaaacgactacttcctgaattgttctaatcaggaagaacgacacaagtctttgccaaaatcccaatcattgatgcagccttccagaaagtttccaacctcaagttacccagagttagcaagtggaggcggccttttattgatgtgccaaagcaagcagttcaagggcccgatatacagatgtgagctgttgcattacgagatcttccaccctttgaaccaagctgaaattcctggttcgcttgataagtttagaattggtggtcgtccgttgccaattgaatgggatagtagtcagtcgaacaattag

SEQ ID NO: 38741 - DNA, 447 bp, Zea mays
  Peptide Sequence Number=SeqID_80520
atgcagcccggctgcagtcccccgctagtggccatccagaaggatgaccaccagcctcgtggtggggagaagcaagtcgtgctgcggcttccccctagcctcagcttcaaggatgttcatcgtccttgctggggcggggggcgagccaagtcggggccctgccctccgcatgggctggtgacccgcttcttcctccagcattcgggggagaagggtgttcaccagccttgcggaggaggcgaacctcggctacgcggggccgacttgctgcaggccgtcagctgcagcgtgtccgaccctttgggctggacagcttcggcgccgcctccgacgctgcctcctgccgctttggccggggcgtggctgtccgtccaccgcacgggcgacggtcgcgccgtgcgcgggttcagcacatccaccctttctcctgcccaccggccatactag

SEQ ID NO: 38742 - DNA, 921 bp, Zea mays
  Peptide Sequence Number=SeqID_80521
atggcggtccaccacggtcgagcaccggtgaaggtgaaattggctgagcacagggaacaattgggacattgggcacgaggacgggtgtctcacctcgggacagagctcggggaggcttggtgcagtctccggcggcggctggcagcgtgggtagagcgcgagagagggcggcgcatcctttcagcaataaatgcagaggccgcttggcttggtgggctttatgccaggcttggcccgttggtttatgtgtcgggccacgagccacgcggcagcagtgggcagtgcaggacaaggtctgggcacgtgccagcaccggaccccttcctacaccggggtcctcctcgtcccgggaccttgccaacgctggggccttccaagggatccgacataccttcttggggccctggacttaggagcgtaacctcatgggggtcggtgctcttctgtcatcactcggcttcaaggattttcatcatgcagcccggctgcagtcccccgctagtggccatccagaaggatgaccaccagcctcgtggtggggagaagcaagtcgtgctgcggcttccccctagcctcagcttcaaggatgttcatcgtccttgctggggcggggggcgagccaagtcggggccctgccctccgcatgggctggtgacccgcttcttcctccagcattcgggggagaagggtgttcaccagccttgcggaggaggcgaacctcggctacgcggggccgacttgctgcaggccgtcagctgcagcgtgtccgaccctttgggctggacagcttcggcgccgcctccgacgctgcctcctgccgctttggccggggcgtggctgtccgtccaccgcacgggcgacggtcgcgccgtgcgcgggttcagcacatccaccctttctcctgcccaccggccatactag

SEQ ID NO: 38743 - DNA, 1662 bp, Zea mays
  Peptide Sequence Number=SeqID_80522
atgtcttcgcccgagctccgggagtcttcggcgcggatgctggaggttacggggggtcgatggcccaagaacgttcctatccctcgcgcagctagcgaagacttctttacgtctcgcatggctcgtgacttgagagtgtttccttacggacggaatactgctgctgttgtgtcggtagtgatgaacaaggaccgccaggatgctgcgcagaagcgccgggcggtcatcaggctccccgatgctaggccgaagagggcgcgggggactgcgaaggctaccgtccccggcggtagccagtcgacgctggcggcgaagccggccgcccctgggtccagcaaggtgccggagagcgtgaaggcggtcggcgccggcggaaccaagtctgccccggacggagctgcgaaggcccgagaactgccttcgccggggaaacgcgttgccgattttagcacaaatactagcatggacgactatctcgttgggtcgggcgaggggcaacttgatgttgtcccgcctgcggtggcaaccacggcgtctaccgcggtgcttggggtgaagggtggcgctttcagcgctggcggcgagattttggcggccactgccgtcaagaacgaagcgggcactgtgtcccgccggctgagggaggcggccgacttcgctgaccgcgtggcgtcgggtgccctcactgcggacgtggctgtcgaagtcgagagacttcaggcgcagcacgtggacgccgtccgggagaagtcggctacggagagcaaaagcagcaggctggcggagaaggaggccgccctggaggccgagaggacggacctccggcgccagctggtagaggaaaggagggaggccaaccaggccatcgccaaggcgcaggcggcgcaggcggaggccaaattggcgcgggcggaggggagtctcgccagccagcgcgccgaggaatgggaggtgcggttcaacgctctacaggcccgcatggagagggccgaggcctctacgcgctcggaagttgagcggacgcgcaaacagctcgtggactcatacacgagctgggtgcgcggactgctgacttcgaggtgcccgaccgagaggcgggcctttcgcttcctcgagtggctgcaagaggaattgctggcactcccgaccatcgtggagggcttcatgtcctttgcctcccttgtcaccttcgaaggggccatgaatgcgctgtcccacgaggggtgcagtcactatgagggcttcgaccgatccgatgaagattttgggtgcgaggtttttaaggtcaaagaccctgtggtgaaggactatgccggggccctcttcgaccggatgtggggcccacacggtcgggaggcggttagggagcggtctgaccgggcgagggatcagatggcgcgtgccgaggacgtggaggacttcggacatctaaacagcgcgcagcccgaggcggaggtcaacccggtggtggccgaggctgaggttgacccgacaccgcccccggaaaccgatgaaggctcccttgctgcccctgcgcctactatgtctggtggaggctcgtcgccggccactgtgccgatggtggaggatcccccaaaggcggcgacggagctggcagcagaggatcccatggcggcggctgggtcttcgcaggtggcttag

SEQ ID NO: 38744 - DNA, 1395 bp, Zea mays
  Peptide Sequence Number=SeqID_80523
atggtgattgtggtctcatgtgtgtctgttaggcggccgacttcgctgaccgcgtggcgtcgggtgccctcactgcggacgtggctgtcgaagtcgagagacttcaggcgcagcacgtggacgccgtcccgggagaagtcggctacggagagcaaaagcagcaggctggcggagaaggaggccgccctggaggccgagaggacggacctccggcgccagctggtagaggaaaggagggaggccaaccaggccatcgccaaggcgcaggcggcgcaggcggaggccaaattggcgcgggcggaggggagtctcgccagccagcgcgccgaggaatgggaggtgcggttcaacgctctacaggcccgcatggagagggccgaggcctctacgcgctcggaagttgagcggacgcgcaaacagctcgtggactcataccacgagctgggtgcgcggactgctgacttcgaggtgcccgaccgagaggcgggccttcgcttcctcgagtggctgcaagaggaattgctggcactcccgaccatcgtggagggcttcatgtcctttgcctcccttgtcaccttcgaaggggccatgaatgcgctgtcccacgaggggtgcagtcactatgagggcttcgaccgatccgatgaagattttgggtgcgaggtttttaaggtcaaagaccctgtggtgaaggactatgccggggccctcttcgaccggatgtggggcccacacggtcgggaggcggttagggagcggtctgaccgggcgagggatcagatggcgcgtgccgaggacgtggaggacttcggacatctaaacagcgcgcagcccgaggcggaggtcaacccggtggtggccgaggctgaggttgacccgacaccgcccccggaaaccgatgaaggctcccttgctgcccctgcgcctactatgtctggtggaggctcgtcgccggccactgtgccgatggtggaggatcccccaaaggcggcgacggagctggcagcagaggatcccatggcggcggctgggtcttcgcaggttcaggattttgggcctgcgcacgcaaccgctactgctaattttgtggcggcttcgaccgtggtcgctagaaatgaattggatgagtctacgtctaagttttctgagtttgatgactctgggagttcggatgtgtggacagaagagtcttcggatgaggacttggattattttgcggccttggatgtggttgtggcgaaggcttctccgcgtgttacggatgctgaagttttgcctggtccgagtgccgggcgtaggcggcgaagggcggtggcgaagcatagagtgagtgaagtggatggtggtcggcttcgtgtgggcagggccggtaagcaggaattgttgtcctcgccg

SEQ ID NO: 38745 - DNA, 411 bp, Zea mays
  Peptide Sequence Number=SeqID_80524
atggtggccaagggactagggcgacagggatttatactcctgatgaagaaaatcccgcggacatctcgcgatttgaacgaacaaaactcgacgcagggaggggatttcgcccgccagaatcaagggctggcgagcgggacccacaccgcagcggcatacggtgcgcgggtgaggccgcctgccagggtcccccagtcggcgccttccttggctggagtgggccacagcggaaagacatttggcccagggctttacaaatcctacccccttaacagaaatctcgtcctcaagatttttaaggaaaggcttggtggtggtggtggaggtagtggaagaatgggaggacataggtatcccgctactatttatgcggggtataaactgaacaggttgaggttgaatggggtctag

SEQ ID NO: 38746 - DNA, 456 bp, Zea mays
  Peptide Sequence Number=SeqID_80525
atggcggcgccattgacgcggaccgcgatcctcccagcccgcacgccaagccctgacccaaaccgaactacgcagagagaagcgttccgaggccaccagcacctcacccgcgccccggcgaaaccactagccacggcgcagaggaagcggcggcgacgagtgcccaattccacaactctgagccgcggcggcagtcttctccactctgcgcatcgctcatctccctctcggttcggcgatggtggccaagggactagggcgacaaggatttatactcctgatgaagaaaatcccgcggacatctcgcgatttgaacgaacaaaactcgacgcagggaggggatttcgcccgccaggtggtgatgacgatgatggttttggttatgactatggtaatggtgaagatgaagtcgtggaggaggacttccaggagttccaagggtacgacgagttctag

SEQ ID NO: 38747 - DNA, 492 bp, Zea mays
  Peptide Sequence Number=SeqID_80526
tcatcctggaagacagctcagaggaacttctaccgatgcccaccccgttggcagagtcactggccttcgcagctaggtcatcgacctcagcaccgcctgcacccggaggcgatgacacagacgactctagggatgatgatgaggatgacgaagatgatgaggaacacatcaacgaggaggccaaatatgcccagcagaattacttcatgggggatagagggttctggactctatcagctcatgattccctgacactgctatccacctaccctgcttcggtcagcgatgctaccagatggactttgtggaagccagacccagcatcgttccaggtggagctggtgaggatcgcctcaacacccctaactggtgtagtggacggtctcaacaccgacctagatagtgccaccctggatctctctagggtgcacttggagctagaggatgcccatggccaggattgcagctctggagccctatgtaacacccctg

SEQ ID NO: 38748 - DNA, 354 bp, Zea mays
  Peptide Sequence Number=SeqID_80527
atgacaagagaagctagacaaggatctagatcctcggagcgcatggcaggatggttcatactctccacccgagttaacaccaactacgcctctccgccacggcaagctcctatctacccagtggtagtggaggaagttccggtggatctcccttgcattcgagtggagcatggagtcatcctggaggacagctcggaggaacttctgccgacgcccaccccgttggcagagtcactggccttcacagctaggtcatcgaccacaacacctgtcacactcggttttagaaggcaaactacatgcgaaccatgtacgtgccaggatcagcaattcacgtacacaacagttacataa

SEQ ID NO: 38749 - DNA, 843 bp, Zea mays
  Peptide Sequence Number=SeqID_80528
aacgagctcgcccgggtcggcaaggccgacttcggccaccacaacgacgccgccgccttctccttcctctgccaggcgctgctggggcgcgaccccgccgagtccgcgctccatggcgacgggcccaagctgatcaccaagtgggtgctgttccagctcagcccgctgctcagcctcggcctgcccaagcacctcgaggactccctgctccactcgttccgcctcccgccggcgctggtcaggaaggactacggccggctcgccgacttcttccgcgacgcggccaggaccgtggtcgacgagggcgagcgcctcggcattgcgcgggaggaggcggtgcacaacatcctcttcgccacgtgcttcaactccttcggcggcatgaaaatcctgttcccgtcgctcgtcaagtggctgggccgcgccggcgcgcgcgcgcacggccggatgtcacggagtacggccgcgcccagcgggacatggtggtggagagccacgactacggcttcgaggtgcgcgagggcgagatgctcttcggctaccagccccatggccaccaaggacccgcgcgtcttcgcgcgcgccgaggagtacgtgcccgacaggttcctcggggaggacggcgcgcagctgctccgccacgtcgtctggtccaacgggcccgagacggcgtcgcccacgctgcaggacaagcagtgcgccggcaaggacttcgtcgtgctcatcgcgcgccttctcgtcgccgagctcttcctccgctacgactccttcgacgtccaggtcggcgcctccgcgctggggtcgtcggtcaccatcacctcgctcaagaaagccaccttctga

SEQ ID NO: 38750 - DNA, 627 bp, Zea mays
  Peptide Sequence Number=SeqID_80529
atgtcccgctgggcgcggccgtactgcatggccacggggggctcgatgcgcagcgcctcgtacacggccgactccaccagccgtcatctcgccagcgccttcatggtgaactcgccggcgtgggcgcgcacggcgtcgcgcacctccgtgacatccggccgagttgaagcacgtggcgaagaggatgttgtgcaccgcctcctcccgcgcaatgccgaggcgctcgccctcgtcgaccacggtcctggccgcgtcgcggaagaagtcggcgagccggccgtagtccttcctgaccagcgccggcgggaggcggaacgagtggagcagggagtcctcgaggtgcttgggcaggccgaggctgagcagcgggctgagctggaacagcacccacttggtgatcagcttgggcccgtcgccatggagcgcggactcggcggggtcgcgccccagcagcgcctggcagaggaaggagaaggcggcggcgtcgttgtggtggccgaagtcggccttgccgacccgggcgagctcgttctccacgaccccgaagaggtcgccgtacacctcgcggaacttgggggatcacgtgctgccgacggtgcgagaggaggtagaagaggagcgccttga

SEQ ID NO: 38751 - DNA, 354 bp, Zea mays
  Peptide Sequence Number=SeqID_80530
atggggaagcctgtcccatcactcctcatgctcctcctcagccgaggcagggtcccactcgacagtccaacccggtggcaagatggacggccaagtcactccagcaaccatttcctccagagaacctgtaaaaattatgccacaagcaaggctgagtatactaatactcagctagacttacccgtgaccgcacttgtacccaccataaccggaatgggagacctcgtctcaggtcgcgtgaggggatatgtccactgccaggttcactcaggatttaataacattatgctaaagagaactaagttaagaagtaacttagggtttcttagtcatgcggggcttccagtgggttag

SEQ ID NO: 38752 - DNA, 357 bp, Zea mays
  Peptide Sequence Number=SeqID_80531
atggggaagcctgtcccatcactcctcatgctcctcctcagccgagacggggtcccacttgacagtccaacccggtggcaagatggacggccaagtcactccagcaaccatgtcctccagagaacctataaaaaatatgccacaagcaaggctgagtatactaatactcagctagacttacccggttacaatggatcaagcagtctcattagctgcgagaagcagacgattcgaatcgagtttttatccttgcaaggatttaataacattatgctaaagaagaaaactaagttaaggagtaacttagggtttcttggtcatgcggggcttttagtgggttatgcttatcacttttag

SEQ ID NO: 38753 - DNA, 198 bp, Zea mays
  Peptide Sequence Number=SeqID_80532
atgacccatgagattaattcacacccttggagacagatgaagtcttatttgaggtttgcattgtatctaaaggcagacgaagtattatttgagggaagtgttatacaacctattgtggttgttcgagaaaatgagatggtgcttgttgctcatcaaggggagtggaaagtagcagcacatccaccttcactctcataa

SEQ ID NO: 38754 - DNA, 156 bp, Zea mays
  Peptide Sequence Number=SeqID_80533
atgacccatgagattaattcacccctgaaggcagacaaagtattatttgagggaagtgttatacaacctattgtggttgttcgaggaaatgagatggtgcttgttgctcatcaaggggagtgggaagtagaagcacatccaccttcactctcataa

SEQ ID NO: 38755 - DNA, 231 bp, Zea mays
  Peptide Sequence Number=SeqID_80534
atgcagcttcatacccttagaggtatgaaggcagaggacatatgcatttacattcatatgcatccattgaaagtgatatttgcagatgatgggggttttataccctcaaaggtattgttgatgcagggaagtgttatacaacatattgtggttgttcgaggaaatgagatggtgcttgttgcttatcaaggggagtgggaagtagcagcacatacaccttcactctcataa

SEQ ID NO: 38756 - DNA, 258 bp, Zea mays
  Peptide Sequence Number=SeqID_80535
atggcactggcttggctccggcgcggcgctgggcgtgcgagggcacgcgtgagcgtgctctggcgcgggcagaaggcgtcgaacacgtggaggcatacgaagtattatttgaggattgcattgtatctgaaggcagataaagtgttatttgagggaagtgttatacaacatattgtggttgttcgaggaaatgagatggtgcttgttgctcatcaaggggagtggaaagtagcagcacatacaccttcactctcataa

SEQ ID NO: 38757 - DNA, 252 bp, Zea mays
  Peptide Sequence Number=SeqID_80536
atgacggtggcttttctttgccgagtacttcctggctatcacacccggtttttggaagaggatcccaaggtgctcataaccgcgagcacggctgatataccagtttctaacactctgcagaggttgcacactttacccataagctgtgattcccattctgctcagggttctagcctccccattgatcactaccaaggtgacctagcagggtctcactacgttgcctttacaaagatttcccagaggacatag

SEQ ID NO: 38758 - DNA, 471 bp, Zea mays
  Peptide Sequence Number=SeqID_80537
atgatgctggtagactacacaacggtactcgatagaccaagtgtgtcggtcgaaggcctgacgcaacagggtatcgagagcatcgtggaagtgacacccgtgagcggtgtcacgagtgatgggtctagcgatccatccctccggctcctccgagagctccgtgtcgtggctcgaactgccaccgacgtcgtcatcgtcttcgtctctgtcagggtctcctccagcagccgggatgccctgaggtggtgcagggggcatctctggctaaggtgcaggaggatcccaaggctgctcataaccgcgagcacggctgatataccagtttctaacactttgcagaggttgcacactttacccacaagccgtgattcccattcagctcagggttctagcctccccattgatcactaccaaggtgacctagcagggtctcactacgtagcctttacaaagatttcccagaggacatag

SEQ ID NO: 38759 - DNA, 714 bp, Zea mays
  Peptide Sequence Number=SeqID_80538
atggcgacctccagcttgatggtgggggaaagcgagccgggctgcggcctctgctcctccctcagcctcaaggattttcatcaccagggctggggaggagaggaagggcggccgtcgtccgtggcgccggcagctgcaccgtgcctggctctcggacgcgagtggcttcggagccgctcgcagtgccggcgtctgccacggcagctggaagaggttcttccgccgacgctgatagccaaggccggccacgggctgacctccaactctacggccttctgcccgtccttgcctcacgagtttgggcatgggcgggggcctcctggcagcagcatccgccctgaggtcagtgctgccgctgttcggccccccggagcagaagtcatcgtcgtcgctgctgctggagcgggtaacgacaagccgttcgtcggtcttctgttgctccgcaggcccaccccagtcgagtggggttgttcgtacctgcggaggggacggaaccgaagatccgtttgtaatggcacttcgaatgccgactcgtctgttgattatctgaaccgcttcaccaagcatgagtcgccccgtgtcaaggtgacgagtgaggtcgggctggcgcccttgggagatggtcggctgaggccccaggggcaaccggccgagccgcctgctcgggccggattcccggagaagtccctggcagcgattgcccgggcgtggtga

SEQ ID NO: 38760 - DNA, 1290 bp, Zea mays
  Peptide Sequence Number=SeqID_80539
atgagcttggctgacgacgtgaccgctgctcccgcgcgcctgcccaccgtcattactgccagcccacttttggcccgcgttgaccgccgcgtcaggctggcgctgctgggtcgcgcgctgggatcgcctcgagtcgcggtattggttccgcaatcgaggaggcgcggtggtggcgcaagtggcggtgcagttgcttgcatgcagcatctggcgcgccggttgtgcgacgcgtgggcctgggcctccgtgctggcgtgtcgggagtcggagaagcgcgtccacttggcgcggtggcatgccgcctgcatggctgcccgcctctttcgcacgttggtctgggcaaaagtgggagggtcacttgtagccgccgggcggttgcgtgcaccacatgcggcggtttggcttcttctgctcggagctggtctgtatgacacgcgggacccagcccccgcaccgcaggggagggctttggagcgtgttggagaggactcagcccgtgacggttgggggtgcaagcagggagagttgcctttaaaaggaggcccggccgcatccctccaccgacggtcacccaagatggcgacctccagcttgatggtgggggaaagcgagccgggctgcggcctctgctcctccctcagcctcaaggattttcatcaccagggctggggaggagaggaagggcggccgtcgtccgtggcgccggcagctgcaccgtgcctggctctcggacgcgagtggcttcggagccgctcgcagtgccggcgtctgccacggcagctggaagaggttcttccgccgacgctgatagccaaggccggccacgggctgacctccaactctacggccttctgcccgtccttgcctcacgagtttgggcatgggcgggggcctcctggcagcagcatccgccctgaggtcagtgctgccgctgttcggccccccggagcagaagtcatcgtcgtcgctgctgctggagcgggtaacgacaagccgttcgtcggtcttctgttgctccgcaggcccacccctgtcgagtggggttgttcgtacctgcggaggggacggaaccgaagttccgtttgtaatggcacttcgaatgccgactcgtctgttgattatctgaaccgcttcaccaagcatgagtcgccccgtgtcaaggtgacgagtgaggtcgggctggcgcccttgggagatggtcggctgaggccccaggggcaaccggccgagccgcctgctcgggccggattcccggagaagtccctggcagcgattgcccgggcgtggtga

SEQ ID NO: 38761 - DNA, 225 bp, Zea mays
  Peptide Sequence Number=SeqID_80540
atgggctggatcacacgcgggcctccattctggatgaggtcgcaggatgagacgacctcgtcacaggtcttcgtccggcggcgtatgagacgaagggtaaatgaagtattatttgaggttggtattgtatctgaaggtgcttgttgctcatcaagggaagtgggaagtagcagcacatccaccttcactctcataataacgctgcttaggcgcagtcatgattaa

SEQ ID NO: 38762 - DNA, 153 bp, Zea mays
  Peptide Sequence Number=SeqID_80541
atgcggcttcatacccttagaggtatgaagaggtatgaagacagagtacctacactttgtgttcctatgcatatattgaagggatatttgcaggtgcttgttgctcatcaagggaactgggaagtagcagcacatccaccttcactctcataa

SEQ ID NO: 38763 - DNA, 468 bp, Zea mays
  Peptide Sequence Number=SeqID_80542
atgcccgtgtgctatggaggtcggttggtttccatgggaggtggagcgcagagctgctgcgtagtagagcgaagaggagcaggggcgtcggcatggagcagggaagtggaggccgatcgtcgaggttgctgcccctgcgcaagggaggcaagggaggagggtgcgcgcccatggagatttgttgtcacgccatgggagaaaggagctgagctccccgctgtagccgctcgccaggggcaggaagatgaacggcgctggctgtttgggaagaggagggagtcggacattgtgccgggcgccggccagaggtggaagaaggtgaggacgccatggctgctgggagcgcctgctccatgggagcccggccagcgtccattgcagggggtggaggcctgcgcgcttgaggaagaagaagaggttgcgcgtcggctgaaagagaagagagagagaaatggttgtggaggctag

SEQ ID NO: 38764 - DNA, 534 bp, Zea mays
  Peptide Sequence Number=SeqID_80543
atgacgacgtggagcaatgcgagcaacacacgaaggcgaggtcacggcgactgtgacatcgctgttgttcatgacatagagcttcactcgggcatttcatcgaacgcccgtgaagcgccaacgatgcggggctgcgggggaaactcggctgcgaggagctgcgctgtagggggttggacatgcttcagccaaagtggagggggtggtgctgtccattggactgtgcaaaacagtgagccgaaagagcacggagttgccgtggctgctgctgggggaatgcccgtgtgctatggaggtcggctggtttccatgggaggtggagcgcagagcttctgcgtcgcagagcgaagaggagcagggtgtcggcagagggctcgcggccgggagaggagcacagagacgccctgctctgtggagatgaagggcgcaacttcctgcaacccaacgacatggagaacagggagctcgacatggctcccatggcagcagcggccacccagaccaggcatccaactagaggagccgagcgtctag

SEQ ID NO: 38765 - DNA, 576 bp, Zea mays
  Peptide Sequence Number=SeqID_80544
atggggaggcaggggaatagaatacgaggcagtgggtgggagaaggtgggcggagcgaggctggtaacccccatcagcacaaagctgcaaaggcctgatgggcgcgattccggtcaaggctccatccactcaagggacacgatctcgcctcgcccgagcccagcctcgggcaggaacagccgacccaggaggattcacgtctcgcccgagggtcccctcagcaacgggcacaccttcgactcgcccgaggcccagctcgggcaggcttcacggagaagcaaccttggtcagatcgtcacgccaaccgaccggctcggactcaccctcgacctcggacgacggactccgcctcgcccgaccccagggctcggactcaacctcgacctcggacgacggacgctgcctcgcccgaccctagggctcggactcaacctcgacctcggacgaaggtctccgcctcgcccgaccccagggctcggactcaacctcgacctcggaggagtcaccgcctcgcccgacctcgggctcggaccgaccacgtcacaggggggccatcattaccctacccctagctag

SEQ ID NO: 38766 - DNA, 1209 bp, Zea mays
  Peptide Sequence Number=SeqID_80545
atgcaagccggctcagagcagaagaagccaaaccgccacgcgcggtgcgtgcaaccgcccagcggttgcaagcggctctccacttttgcccagaccaacgggcgggagggcgagcagccatgcaggcggcatgcaaccgcgccaaatgggcgcacttctccgactcccaacacgctcggcatggaggcccaggcccacgcgtcatgcgaccggcgcgccgaatgcttcgtgcatacagctgcaccgccacttgtgccaccaccgcgcctcctcgactgcagaaccaataccgcgactcgaggcgacccagcgcacaacccaacagcgccagcctggcgcgacggtcaatacggccaaaagcaggccggcagtaatggcggtggcaggcgggcaggagcagcggagaagcgggcgacgcttcgccttcgccataatgaccgcgtcaaaaaagggaccgggaaagggggtaccccgaaaaggatccttccccgtgaaggaaccaggctccgggcctccctactgatcagaggttcgaaggctggcccctcggaagggttcgacagccgcctcagatcgcgtgggctctacacccactactggtcagaggttcgaaggccgacccctcggaagggtcccacgaccgcatcaggcttctcgggctctgcgcccactactgatcaaggggttcgaaggctggcccccgaagggttcacaaccgcctcagacacagagcgagggatgaccatggctcaccggagacaccatgttcggcgcccatcgagggcaacatggcgctttccccccctcctccttgcggaaaggcgacgcaggggtgtatgtaaaaaagttgagtctgtccctgatcgccctcttgccctgtgcagaggctcgggggctgctctcgcaaacccggctccggccgaaccgttgacagcatcaacataccagcccgagaacttgggacccgaccgtacacccgggctacggccagctcgcatgagggtcgaccagaccagccgaagcattacgcgaggcattaagacctcggaggagtcaaaccactcctccgaggcctcgggggctacacccggcgggtgcgctcgcgcgcacccaccggaacaaagcgcaaccgagaaaggctggtccccttgcaaaaaactggtaacccccatcagcataaagctgcaaaggcctgatgggtgcgattag

SEQ ID NO: 38767 - DNA, 978 bp, Zea mays
  Peptide Sequence Number=SeqID_80546
atgggagaaatctacgagagaatggattgcatggttggtgaaataaaagatataatgacaaaagatgataactcgcataaagatgattttgttgaggttgaaagtattgttatgcgccgctgggagaagatgaatcttccccttcattgcttagcatatgccttatgcccaaaattttatcatcaacaatacctcaacaccccagctcctggtggcaccataaggcaagctcctaatacagataaggaggttatgactaatgtgtttgaagcttttagtaaaattgcagattctccaagggaacaacaagttttgagggagcaatttaatgcttttattatgaagaagggaatgtttgcgatgccacccgttgaatcggatgcatttaccatggagccgattgaatggtgggtcgggttcgcttgcagtagggggttacaagcgtccgcgcgggagggagcgagaggcctgcacgcgccgtctcgtcctctccgcgcggccaacccttcgtacgagtgccctgggccttccttttataggcgtaaggagagggcccagggtaatgatggcccctcctgtgacgtggtcggtccgagccctgggtcgggcgaggcggaggctcctccgaggtcgaggtcgagtctgtcttctgaggtcaaggtcgagtccgagcccctgggtcgggcgaggcggagaccgtcggccgaggccagggctgagtccgagccgtggggtcgggcgaggcggtgttcgtcgtctttcggggccgaggccgagtccgagccctggggtcgggcgaggcggagcttcctatggcgcccgaggccggacttggctgctgtcagcctcactctgtcgagcggcacagcagtcagagcgacacaggcggcgctgtcctcttgtcaggccggtcagtggagcggcgaagtgactgcggtcacttcggctctgtcgactgaggggcgcgcgtcaggataa

SEQ ID NO: 38768 - DNA, 765 bp, Zea mays
  Peptide Sequence Number=SeqID_80547
atgatgctaattgcaaagcagctggaaaggaaattgaaaaaagaagcacttgccaccacagtagtcacaaggcagtggaaagattgggtaaatacttgcactaatgacgtgaagcaccaagcaagggtcattgtcctaacaataaatgatgacagcttttggatggaggctgaaaatataattgctatcacagagccaatatactccgtattaaggtttagtgatggagaaggtccaaagatgggagaaatctacgagagaatggattgcatggttggtgaaataaaagatataatgacaaaagatgataactcgcataaagatgattttgttgaggttgaaagtattgttatgcgccgctgggagaagatgaatcttccccttcattgcttagcatatgccttatgcccaaaattttatcatcaacaatacctcaacaccccagctcctggtggcaccataaggcaagctcctaatacagataaggaggttatgactaatgtgtttgaagcttttagtaaaattgcagattctccaagggaacaacaagttttgagggagcaatttaatgcttttattatgaagaagggaatgtttgcgatgccacccgttgaatcggatgcatttaccatggagccgattgaatggtgggtcattggaattgttagattgttattgtatctggagaacatgacaaggaatcgagtgtgcccatcgttgaggttttctttagggctaggcaagggaatgggctacatggactag

SEQ ID NO: 38769 - DNA, 345 bp, Zea mays
  Peptide Sequence Number=SeqID_80548
atggacaaagtgaaaatcaacatcaaggagaaatcaatttggaaaagagatggctttgttcagccaaagacagttcagtctgggagcaccggactgtccggtggtgcaccggacagtgtccggtgtgacataagtggtgttgaagtcgtgctgactatagctcgtactaagcaaacccctcgaggcacccctacactgacatcggatgctactgctggaggagaccctagagatggggatgatgatgtcgatgtcaacaaggatgaccctcttcccaacaactataccgaggaccacgagtacgaggagtggatcattgcccatctcttgggatgcaaccactag

SEQ ID NO: 38770 - DNA, 594 bp, Zea mays
  Peptide Sequence Number=SeqID_80549
atggcctttcgatcttatcaaaggatgagcttgctgatagcttggcgtataatagtgaaagagaaatgtgcctttgggccatttctaagtattttggtggttgagtgccaacacaagtggtcatgtgttaatctatgccaaatgatggacaaagtgaaaatcaacataaaggagaaatcaatttggaaaagagatggctttgttcagccaaagacagttcagtctgttagcaccggactgtccggtggtgcaccggacagtgtccagtgcgccaggctggctctggtgaaaaggccgctctcgggaattcgtcggcggcgtatggctaaaattcaccggactgtccggtgtgcaccggactgtccggaaagaaatccgcaccggacagtgtccggtggtgcaccggactgtccggtgcgccagtcgacagaaggcaagaattgccttcctggaatgctctcaacggctcctagctgccttggggctataaaagggacccctaggcgcatggaggaagacaccaagcattctctaagcattcctaagcaccaagactccaattccgagcatttgattctttgtgatagcaactag

SEQ ID NO: 38771 - DNA, 632 bp, Zea mays
  Peptide Sequence Number=SeqID_80550
atggtccacatcgtcgagcaccaagacttcatgctcgaggacttcatgctggaggaggaggctgcctcttccattccgcgggccaccaacctcccggtgcctggtgcagcagctgcagtgcattctgcacggccgcacaccccaacgcaaacatccagggcacctagggctatgcctggggcgctgtcagcagccagggaattgctgtgccaccctcctagccccatggcctctccaggggccatgaagcagtggcgggacgacgtcgaccgtctgctcggtatggcgcactctggcacaaccaggcccagaccccggtcatcccggcgtcaacatgaggcgttggcatctgtgcgctcaccctcggtaagggcagcaccgactgaggacctgagggcggagctcagctgccggcgcgcggtggaggacgctccagtctcttgggagaggtctaatgacctgcgggtagaactcaaccgcagacgtgcaggcgaggatgcccgcgtctccctggagagggcgctcgcccggacttggctcatgaaccttgccccaggatcgatctactcctgggaagagctctgcgcgtggttcacagcgaacttcgccagtgcttaccaacaacacggcgt

SEQ ID NO: 38772 - DNA, 525 bp, Zea mays
  Peptide Sequence Number=SeqID_80551
atggtccacatcgtcgagcaccaagacttcatgctcgaggacttcatgctggaggaggaggctgcctcttccattccgcgggccaccaacctcccggtgcctggtgcagcagctgcagtgcattctgcacggccgcacaccccaacgcaaacatccagggcacctagggctatgcctggggcgctgtcagcagccagggaattgctgtgccaccctcctagccccatggcctctccaggggccatgaagcagtggcgggacgacgtcgaccgtctgctcggtatggcgcactctggcacaaccaggcccagaccccggtcatcccggcgtcaacatgaggcgttggcatctgtgcgctcaccctcggtaagggcagcaccgactgaggacctgagggcggagctcagctgccggcgcgcggtggaggacgctccagtctcttgggagaggtctaatgacctgcgggtagaactcaaccgcagacgtgcaggcgaggatgcccgcgtctccctggagagggcgtga

SEQ ID NO: 38773 - DNA, 601 bp, Zea mays
  Peptide Sequence Number=SeqID_80552
cccacgcgacgctcccccgcagccgccaagccatcgcgccgccgccgcgaacccatcgcgccgccggcgttccgtctcctccccgcatcgtgggttcgcgctccgaggacgcagcctcatccccgtcgcgaaagaagctctccccccgtcgtcgtcgtcgcaggtacgacctctctcctcggtccgtgtaccatctcattcaccaccgccgccaccgtcgttcattgacactgactccatagccgacaaggcaattggaaggatgcaagagatttcggacaagatattttccgtagcgagggaaacaatccgtcctgggcgcggattgacctcatttgatgctaccaaactacgtgtagctttggaggagatagcttgcatgctggagcaagactctctggtgttgcaagagcatttggacatcgtgaacaactttaacatcccggttgacagcagctatgaaccttctaccttgtcgtcaccacccccctctgacgacgacctgactccacattgggactttgctgagcatttccaaaacttctggggagttgaatatgactccgatcagatgccttcgtttagtgacaacgatgtttaa

SEQ ID NO: 38774 - DNA, 396 bp, Zea mays
  Peptide Sequence Number=SeqID_80553
atgaggctgggtcctcggagcgcggaacctacggaagatggaaatgagacgcgtcgtaggataaccggcgcggcggaggttcgccgtacgtaccacgatgcggggaggagacggaacgccggcggcgcgatgggttcgcggcggcggcgcgatggcttggcggctgcgggggacggtcgcgtgggctacaaccctagggaagtgggcgccgcttcgaaccgaagccaagtgacgggcgcttcaggcgttaagtgcgcggacggcttccagcggaagcgcgtggtggagaagcggcgcgagaagcggcgcgtttggctccagcttctgcttctggcggccagaagccgcccggaagctgaaccaaacagccgcagagggatggagacggagacatag

SEQ ID NO: 38775 - DNA, 729 bp, Zea mays
  Peptide Sequence Number=SeqID_80554
atggtttggcgggaacgtgtgctcccaagctcggtgtccgccgtaacccaccctcaccgtcgacctgctcttcggctcgtattctgcccaaaccaaaaaaacgaagaagagattgaagtgaccaaggagaagacaccaccaccttcggattctcaggccgggaattgtttctacttcgatatctgcgggtccgagcctgactcacctactaacgaaggcaagccccgagtgtttgattttgaaaagccttaccttgactcccttataaccagcatacccttgagagtcttttctttagtcggacatgaagaaagtagcagtggtagcaacgatcctatcggggatctggaagcacaagtcgaacttcttcaatcagaactccgttacaggaatgatctatgggtcgcggatgcagccatctgctacttgcaagaccaactcgcgaaacgagatctagcgctcaattgggcaattaactctcgtccactcgcctgggctaaggaagccaaagctcgagcccgcatggaggagcttagctcagccatggataacttgcagatctattataatactctacatgaagaagttcatgtattgtattcacaactgcacccgaacgtctctgcggatcctgtcgggatggaagccggaccttctcatgtagcaggagaaacacttgatggtgagctggaccttttcagggccccctccctctatgaagttggttga

SEQ ID NO: 38776 - DNA, 315 bp, Zea mays
  Peptide Sequence Number=SeqID_80555
atggtcaccgcggcggaattggataagaacgccggtgatcaccgtcgcacggccttgtgccgcatgtccgagcctttccaccgcgtcgccgtgactccctatagttgtcccatcgtcgccggggaggttgccacgacggtggacacgaattcacagcgcccagaaaacgaagaagagattgaagtgaccgaagagaagacaccaccacctttggattctcaggccggcaattgtttctacttcgatatctgcgggtccgagcatgactcacctactaacgaaggcaagccccggtgcatttgtcaccctccttga

SEQ ID NO: 38777 - DNA, 1032 bp, Zea mays
  Peptide Sequence Number=SeqID_80556
atggatcctggcacacatatggtatgcgctcggttctaccccctggaaacgggtgtgacagaagtggtatcaaagccccggcagatcccggtctacccagtggtagtcgaggaagttccgacggatctccctcccatccgagtggagaatgtagtcatcctggaggatagctcggaggaacagctgccgacccccaccccgttggtagagtccctggccttcgcagctgggtcatcgacgtcagcaccgtctgcactagccttccaagcacctgcacccggaggagacgacctcgacaactccggagacgacgatgacgaggatgaagacgacgaagaaggtggagacgaacacgtccacgaggaagctgactacacccagcagggacaacttcatggggtttggtcctgttgtcgaacattacacatcaatgttcgagacggggcacttccccacctgctacaagaagtgctgcacgcgctaggcacctacgtccgccccctgtacgaaacaaggcgagtgagcgagcctcctcgggcttgctattacatcactcgcatccacgtcagggtgatggatgcaggggacaggggattcaggactctgtctgctcacgagtccctgacaccactatccacctacgctgcctcggtcagcgatgctgcccgtcggaccctatggtcgctcagccacacctaccggcagcagctgcagaacacgaggttcagacatcttcctcagcgtctgagtggaggaagccagaccaacatcgtcacaggagaagccggtgaggatcgcctcaacaccctagctggtgtagtggccggtctcaacaccgacctggacagtgccaccctggatctctacagggtgcacttggagctggagaatgcccacgccaggattgcagccctggaagcccaactgcaaggactggaaccgctcgaagcccaggtccccgccatggcgttgtctcctccccgcaagaggctgcgctatggagagcccggatccgtcactaggctgctttag

SEQ ID NO: 38778 - DNA, 1032 bp, Zea mays
  Peptide Sequence Number=SeqID_80557
atggatcctggcacacatatggtatgcgctcggttctaccccctggaaacgggtgtgacagaagtggtatcaaagccccggcagatcccggtctacccagtggtagtcgaggaagttccgacggatctccctcccatccgagtggagaatgtagtcatcctggaggatagctcggaggaacagctgccgacccccaccccgttggtagagtccctggccttcgcagctgggtcatcgacgtcagcaccgtctgcactagccttccaagcacctgcacccggaggagacgacctcgacaactccggagacgacgatgacgaggatgaagacgacgaagaaggtggagacgaacacgtccacgaggaagctgactacacccagcaggacaacttcatggggtttggtcctgttgtcgaacattacacatcaatgttcgagacggggcacttccccaacctgctacaagaagtgctgcacgcgctaggcacctacgtccgccccctgtacgaaacaaggcgagtgagcgagcctcctcgggcttgctattacatcactcgcatccacgtcagggtgatggatgcaggggacaggggattcaggactctgtctgctcacgagtccctgacaccactatccacctacgctgcctcggtcagcgatgctgcccgtcggaccctatggtcgctcagccacacctaccggcagcagctgcagaacacgaggttcagacatcttcctcagcgtctgagtggaggaagccagaccaacatcgtcacaggagaagccggtgaggatcgcctcaacaccctagctggtgtagtggccggtctcaacaccgacctggacagtgccaccctggatctctacagggtgcacttggagctggagaatgcccacgccaggattgcagccctggaagcccaactgcaaggactggaaccgctcgaagcccaggtccccgccatggcgttgtctcctccccgcaagaggctgcgctatggagagcccggatccgtcactaggctgctttag

SEQ ID NO: 38779 - DNA, 495 bp, Zea mays
  Peptide Sequence Number=SeqID_80558
atggcgcttgataccgtgtcgtgctgtttctctgcgcacgtcctcctgttcgctgtcgcgactgccgtcaaatcatcggagtcgctcaactcaccaatcgtatcttggtcggtcatcgatttcatattcgtcatggtcctcactcgagtcgtcgaacccgtcatcccctgctcaatccccacttcaccagctcgctccagacttcaattgaaggtcgtcgttgatccgtgcgtcatcaagaaattccaagagtcaagtgaagacggagccagcaacgtgatattcaccaagtgcacgacaaaaagctcgaacatcctgcgcgactcaagttcgcgtagattatttatctcgtactatgtatacttgttaatcattacatgttgcatcgtgccatttcatgaaggtacgataattaatcgcgtgatggggaagaagacccaagtcgaaccccaggcgcagactaatttgcaagatgatgctggtggattaacctga

SEQ ID NO: 38780 - DNA, 1900 bp, Zea mays
  Peptide Sequence Number=SeqID_80559
gctgcgcaagccgaggccaaggtggcgcgggcggagggtagtctcgcccgccaacgcgccgaggagctagaggcgaggctcaacgccctgcgcaaccgcgtggacatggccgaggcctcgacgcgcgcggaggtcgagcggatgcatgcgcagttcgtggacgcgtatcgagagctgggtgcgtggaccgctgccttcgaagcgcacgaccaagaagcgggccttcgcttccttgaatggttgcaagaggagcttggggtgctcctgaccattgtgactggtctcatatcctttgcctccctcatcacctgcgagggggccgtgaatgccttgtcccgcgaggggtgcaggcattacgaggtcttcgaccagtttgacgaaaactttgaacgtgaaattttcaaggtcgaggaccctgtgttgaagttgttggcgggggcgctcttcgacaggatgtggggcccacacggccgagagatggtccaagagcggtccaaccgggcgatagatcagatggcgcatgccgaaggcgtcgaggaccttggtggtctagacggtgcgctactcgaggccgcggaggtggatccggtgccgccatctgatgccggcaagggcccctcgtcgactgcagccggcgaaggccctgcaccagcccctgcgcggacgtgtgaggacgcctcgaaggcggtggtcaaaccagctaccaaagaccccgcggcggcggccgagccttcgcagatgttcttcaagcggcgcctgagctcatcttcttccttatccccgccgctcctctgctcaggatttttctctcgtgatcgcgcggggacatttgcttaccgcgcgtcgtgcttccccttccagccgaccgaagctcccagctccagtcatggcgcgtccgattccctctcccatggctccctgtacgaccgaccgagatccctccatggccacgagctcagcccctgctctgctctcgctgccgagttcctctgcgcgtcttctctccctgctggcgcgctcaaattcctgtgctcgccggagctctccctgtcgtgcgaccctgctccattccctcgccggccggtcgcacgccctggtcggattccctgcgcgccgcgtgagctcgccggcgtgctccccatccggccatggcttcaattgaaggtcgttgtcgatccatatgtcatcaagaaattccaagagtcaagtgaagacggagccagcaacgtgatattcaccaagaccctttatctggccacatacctcgtcatgggtaagcctgaacccgactattccatacatgaaaagacaatcgcgcactgggagtggagagatggcgagagtggcacacaccctcctggcaaaggaccgcctaaaaggggtgatccccagctgggtattaatcgatttggatcgtcgaacttctcggatatgaagactggatcttcgaccctcatcccgtctgaggtctttgagacaaggacaagtgcatgtggacccaataacttgggaggttctgccacagcgcccatcgatgatagtgtgcctggctctatgtctgaatgttttgagtccgacggtgagtctgggagttcgtttccttggacggaggagtcctcgaatgaaggcttagattattttgttgcgttggatgtggctgcggcggagacttcgccgcgtgtggagggtgctgaggatcttcctggtacgagtactgggtgtaggcggcgaagggtggtgggaaaacagtgtgtgggtgaattttctcggagtggcaggcaccgtcgcacggggatggagcgtggccgacttcaagtagacggggttggtaagcgagaattgttgtcttcgccgaatggggcgggcataggcgaaggggatctccgggagctttttgagg

SEQ ID NO: 38781 - DNA, 243 bp, Zea mays
  Peptide Sequence Number=SeqID_80560
atggacgcccaagccaggagcgccttgagctcgcccctgctcctctctctctctaccaagcgccccctgcaatcttccccaagttgtcttcctcctctccccaacggcgccctccttttttcctctctgttccagaccggcatcaggacattcgaccatctacacgtctcacttcgccggatctgcgcagccccaacatcgacgacgttcaccccggcgaggaaccccgtgttttgcgtgtag

SEQ ID NO: 38782 - DNA, 465 bp, Zea mays
  Peptide Sequence Number=SeqID_80561
atggctgccggcagaataggggttccttgctgtcgcactaggggaaaaggagagaggaaaaaaggagggcgccgttggggagaggaggaagacaacttggggaagattgcaggggggcgcttggtagagagaggagcaggggcgagctcaaggcgctcctggcttgggcgtccatggcggctggaggatgaagacaacgggaaaaactgctcgcagggggaaagaccgactggaaaaatggaggctagggcgagctcggctgctgcggtgcgaggaagaaggagcaggggcgccatggacgacggtgaggaggatgtcgccggggaatgggagctgctgctccacgccatggacatggagttcggcggccctggaaaaaatggagcccacgcctgggctggtgagcatctgctccaagggagctcgaccatggagcagaaggggcgctgctgccctgcgtgctag

SEQ ID NO: 38783 - DNA, 558 bp, Zea mays
  Peptide Sequence Number=SeqID_80562
atgatgagcggtgtggtgccttcctccctccatgtcctcctccgcgccgagcgcgccctccgcgaccgcgacgtcggcgaggtccacatcccgctgtccgagctcctctccggcgcccccgacggccccgtccccgccaagttcgtcgcctaccaggtgcgcaagatctcctcccgcaagccccagggagtcctcaacctctcgtacaagctcggcgaggtcgccaacggctacgcccccgccccgccgcccagtccgcctacgcccagcctccaccgaccgccgcgtacccgcctccttcaggcaaggttgatgcctacccgcctcccgccgcgtacccgcctccttcaggcaaggccgacgcccaaggccgacgcgtacccacctccatacggcgcctacccgcccgccggcggcaaggccgacgctgcttacccgccctcatccggctacccacccacggcaggcaagccaggcaaggggggcgaaccggtgacggcttacccttcggccggtcccagcacggcggcgccctacgctgctcgtctaccgcagtaa

SEQ ID NO: 38784 - DNA, 1257 bp, Zea mays
  Peptide Sequence Number=SeqID_80563
atgatgagcggcgtggtgccttcctccctccatgtcctcctccgcgccgagcgcgccctctgcgaccgcgacgtcggcgaggtccacatcccgctgtccgagctcctctccggcgcccccgacggccccgtccccgccaagttcgtcgcctaccaggtgcgcaagatctcctccggcaagccccagggagtcctcaacctctcgtacaagctcggcgaggtcgccaacggctacgcccccgccccgccgcccagtccgcctacgcccagcctccaccgaccgccgcgtacccgcctccttcaggcaaggctgatgcctacccgcctcccgccgcgtacccgcctccttcaggcaaggccgacgcccaaggccgacgcgtacccacctccatacggcgcctacccgcccgccggcggcaaggccgacgctgcttacccgccctcatccggctacccacccgcggcaggcaagccaggcaaggggggcgaaccggtgacggcttacccttcggccggtcccagcacggcggcgccctacgctgctcgtctgccgcagtacagctcgactggtgggggcagcgatcatgatgagcggcgtggtgctcccgctgacgaacaagggactcatctgagcgagtgggtggatcgatcgcctccccctgatgctctgattgttttggcatggcgagatcctgcaactgctcctcgagactgggcacagcgctgggcaagtggagcactcgatcctgaaggcgctgctgctcacagtagcttgacatcaatcaagaggggtgtctgggctatgattgcatccttccttgcctactgcacgcttcaggcaccttcaacaatacttattaggccccaccctgctgtctggcgcctggtacatggactggctgtcgtttacctcgttgctcttaccttcctccttttccagaatcgtgacgatgctcgccagttcatgaaactcctccaccctgatcttggagttgaattgccagagagatcttatggagctgattgccgtttgtatgttccagaaaaccctaaaaacaagttcataaatatttatgagacattgtttgatgaatttgttgttgcccatatccttgggtggtttggcaaagctgtgatgatacgaaatcaacttctactttgggtcttgtcgatcggctttgagctaatggaggtatttgggcaggaatgcacacagtccgttactttgatggcaaaacgtatgaatgggtcggactga

SEQ ID NO: 38785 - DNA, 906 bp, Zea mays
  Peptide Sequence Number=SeqID_80564
atgacggagtccgcgaacgcacgacggcggtccactgaccaagagggcccaatcatcagtgtagctgggcgcgcgcgaaggttgtatcttctaatgaaaatgattgacaatctttattgttgctatgatggtgtttcgaggtgtgctggttgtcaaggttctggcttcaaggtccaaatccggcagttgggacctggaatgattcagcaaatgcaacatctttgcaatgagtgcaagggttctggagagaccatcagcgataaggatagatgcccacaatgcaaaggtgataaagttgtgccggagaagaaagttcttgaagtggtagttgagaaaggtatgcagaacgggcagaagatcacattccctggcgaagctgatgaagcgcctgatactgccactggagatatcatctttgttctccagcagaaggagcatcccaagttcaagagaaagggcgatgacctcttccacaagcacacactgaccttgactgaatctctgtgtggcttccagtttgttctggctcacttggataacaggcagctgctgatcaaatcgaaccctggcgaagttgtgaagcctggttctttcaagacaatcaacgatgaaggcatgcccatgtatcagtggcccttcatgaagggcaagctgtacatccacttctcggtggagttcccgaactcgttgagcccggagcagtgcaaggccctggaggttgttctcccgcccaagccagtatcacagtacactgacatggagctggacgagtgcgaggagacgatgccctacgacgtgaacatcgaagaggagatgcggaggcggcagcagcagcaccaggaggcctacgacgaggatgatgatgtgccaagtggtgggcaaagggtgcagtgcgcccaacagtag

SEQ ID NO: 38786 - DNA, 1035 bp, Zea mays
  Peptide Sequence Number=SeqID_80565
atgttcggccgcacgccgaagaagagcgacaacacccggtactacgagatcctgggggtctccaaggacgcgtcacaagatgacctcaagaaggcctaccgcaaggccgccatcaagaaccaccccgacaagggcggcgaccccgagaaggttgtatcttctaatgaaaatgattgccaatctttatgtgaggaacagaggggcatgcttggttcagtttacctaacgttgtatagtgatctatcgtgttgctatgatggtgtttcgagttgtgctggttgtcaaggttctggcttcaaggtccaaatctggcagttgggacctggaatgattcagcaaatgcaacatctttgcaatgagtgcaagggttctggagagaccatcagcgataaggatagatgcccacaatgcaaaggtgataaagttgtgccggagaagaaagttcttgaagtggtagttgagaaaggtatgcagaacgggcagaagatcacattccctggcgaagctgatgaagcgcctgatactgccactggagatatcatctttgttctccagcagaaggagcatcccaagttcaagagaaagggcgatgacctcttccacaagcacacactgaccttgactgaatctttgtgtggcttccagtttgttctggctcacttggataacaggcagctgctgatcaaatcgaaccctggcgaagttgtgaagcctggttctttcaagacaatcaacgatgaaggcatgcccatgtatcagtggcccttcatgaagggcaagctgtacatccacttctcggtggagttcccggactcgttgagcccggagcagtgcaaggcactggaggttgttctcccgcccaagccagtatcacagtacactgacatggagctggacgagtgcgaggagacgatgccctacgacgtgaacatcaaagaggagatgcggaggcggcagcagcagcaccaggaggcctacgacgaggatgatgatgtgccaagtggtgggcaaagggtgcagtgcgcccaacagtag

SEQ ID NO: 38787 - DNA, 372 bp, Zea mays
  Peptide Sequence Number=SeqID_80566
atgaagaagaagagcaagagagatttagagatgaagcacaaaaccgcagctctcaagctcactcaaagatttctctccaaagatttgaaatgggagaggcaagagatgtgtgagagagagagggaggtgtttcttgggttagaaatggagttcaaatcgtgctcactgctgtggggtgagagatcagaggtcagaggggtcagagaccagctaaactgcccctcaggaccagttcaaccggtcttgaccagtgagtttaggagagaaaaccccagctcaactgcccagaggcaagttcagctggtgtatggtcaaagaggttcacagctgaagttgagttcagctgaagttgagaaagctcaactcagctga

SEQ ID NO: 38788 - DNA, 372 bp, Zea mays
  Peptide Sequence Number=SeqID_80567
atgaagaagaagagcaagagagatttagagatgaagcacaaaaccgcagctctcaagctcactcaaagatttctctccaaagatttgaaatgggagaggcaagagatgtgtgagagagagagggaggtgtttcttgggttagaaatggagttcaaatcgtgctcactgctgtggggagagagatcagaggtcagaggggtcagagaccagctgaactgcccctcaggaccagttcaaccggtcttgaccagtgagtttaggagagaaaaccccagctcaactgctcggaggcaagttcagctggtgtatggtcaaagaggttcacaactgaagttgagttcagctgaagttgagaaagctcaactcagctga

SEQ ID NO: 38789 - DNA, 363 bp, Zea mays
  Peptide Sequence Number=SeqID_80568
atgaagaagaagagcaagagagatttagagatgaagcacaaaaccgcagctctcaagctcactcaaagatttctctccaaagatttgaaatgggagaggcaagagatgtgtgagagagagagggaggtgtttcttgggttagaaatggagttcaaatcgtgctcactgctatggggagagaggaccggttcaaccggtattgaccagagaggtccggaaaaaataccccggctgaacttttcttggaccccggttgaacctctctggaccccggttgaacttgcccggaccccagttgaagttgaagttcagctggagttgagaaagttcaacacagctgaagttcagctcagctgtagctga

SEQ ID NO: 38790 - DNA, 348 bp, Zea mays
  Peptide Sequence Number=SeqID_80569
atgaagaagaagagcaagagagatttagagatgaagcacaaaaccgcagctctcaagctcactcaaagatttctctccaaagatttgaaatgggagaggcaagagatgtgtgtgagagagagggaggtgtttcttgggttagaaatggagttcaaatcgtgctcactgctgtggggagagaggaccggttcaaccggtattgaccagagaggtccggaaaaaataccccagctgaacttttcttggaccccggttgaacctctctggaccccggttgaacttgcccggaccccagttgaagttgaagttcagctggagttgagaaagttcaacacagctgaagtttag

SEQ ID NO: 38791 - DNA, 884 bp, Zea mays
  Peptide Sequence Number=SeqID_80570
acctggccaaccgcgtcgtcggcgctggtgctggcagcattgttgtgacctgtgttaagcacgagtatcagcccgccgaggtcaccaagatggatggtgccatccagagagtgtatacgcgcaagaactggtcctccatggtgctctacaactacagccaccccaataatgtggtcccggtcacctcggagatcgtcagcgcccagaccggcacgttcctccacctcctgcctggctcaacgatgacgagatcagggaactgtccttcgcctgaaacttcctcatcggtcacaactagattgactcggctgatctggccacacgccccagggccatccactatacctccgacggtggccgtgtgcgtctgggttgtgctctgtcggcctggcacccatgcgagtagcggtgcaagcagcggtagtagccctgctgagcccaactcctgcctctctgatcgcgggcctctggagacttttgcgcagcgaggaggtcggcgctgggacttagattcatgggcgacggtgggcatgctgctcggcggcgaggacatgcacaggttcccggtgcgctccccgcggatggaccgcgacgacctcatccgtagtcccgccgcgcggcagatcgacgtgcgcatcccgtaccagcagaagcgcatgttcgacttcgtcaccttcgtgtacgccgagacggtgaaggccatcctgagcaagggcaacccgcacttcgtgtgcgacgcgcgctcgtcaagccctacaaggagaagggtaaggaagctgcagcacgcgcaccatggcggagccgagttcgctggttgcgcgtcgcccaccggattgctggattccagggacccctacgccctcctgcttctttcaagtgcccag

SEQ ID NO: 38792 - DNA, 726 bp, Zea mays
  Peptide Sequence Number=SeqID_80571
atgaagctgtggaaggagacttccaggagttccaagattacgacgagttctaggtgtgggttagcggcaacccccagtcggctgcctgtgaaggccgcgttatctacgtttcttttccgcactttgatttatttcgtagagcaccatggaggaccagttcttgcgcgtatacactctctggatggcaccatccatcttggtgacctcggcgggctgatactcgtgcttgacacaggtcacaacaatgctgccagcaccagcgccgacgacgcggttggccaggtctgcaagttagaggaagtcgcagttgacgaagaacgcccagctgcggttgcccagatctgcacaacacacattgtggtagctttgaatgcggcggcgctggcatggctagacgtgtggggctgtggtggatctggtcagtgggatggaacggaggagcgctggcgtgcacgtctgttggggagggggcgcacgctgcctcagcggcgggcgcggcgggagttgcggtgcaggggtgggcgcggtgggcgggggctggcaatgcgagggtggcggcggcggggcttgtcctcctccttccaggcggcggcggggcttgtcctccttattccaggcggcggcggcggggcttgcgcttggcggggtggttgttcggcacgtggttggcctgcacggatggggcgaaatcgacgggcgggatggttggggatgaaagttgggtga

SEQ ID NO: 38793 - DNA, 207 bp, Zea mays
  Peptide Sequence Number=SeqID_80572
atggagaagctcttggcgtctctggaggcgtcgttggaggaccacgcgggcctcctcgccgccgtggcgcaggccgacgtggtgcgcacatctgtcacgttttctagggagccagctcctcgaaattctagggtgcccggtgccgctggaaaccgagtgaagccggcagccatcgccgaggagggtgccgctgccactgcgtcgtag

SEQ ID NO: 38794 - DNA, 447 bp, Zea mays
  Peptide Sequence Number=SeqID_80573
atggagaatagccgggtgctggtggtgggcggcactgcgtacatcgggcagcggctcgtgcgggcgagcctggcgcaagggcacccgatgctggtgttgctgcgggcggagatcggcctggacatcgacaagctccagatgttgctctccttcaaggcccaaggcgcgtggctggtggaggcgtcactggaagaccacgcgggcctcctcgccgccgtggcgcagggcgacgtggtggtctcggccatgtccggggcgcacatccgcagccacaactcaccaaaaggcgacatgggaagggtcagaactctgggtggcatggggggttcgacgcaattaagagggcagcaaggcggatggggtagatcaacgacgccgaggtatagccgtgtcccccctgatctgccaccgattcgatccgaggaagcgattcattgtagacagtga

SEQ ID NO: 38795 - DNA, 384 bp, Zea mays
  Peptide Sequence Number=SeqID_80574
atgactggccgcctctgtgcgattgcggagatcgtgctgtcttatctcattgattcctacattaaagatcgtagacatgagatgcgtaggttcgcggaatcaatatgttatgacaacccgatgcatgttgagcggaggagattgaaggcagcaaatgagaagagagcacaggatgcaagggaatgggaggcggttagagccaagaaacagatattggggaatcttcctggtcgtctgagtgcaagaaaaacggcgacgatggagctgatggaggaggaggacacatcaaggttgagtgagcttatcacgctcgctgaggcaggaatacatgggaaagaggaggacgatacattaaggttgactatgcttatcctcgaagaatga

SEQ ID NO: 38796 - DNA, 264 bp, Zea mays
  Peptide Sequence Number=SeqID_80575
atgcatgttgagcggaggagattgaaggcagcaaatgagaagagagcacaggatgcaagggaatgggaggcggttagagccaagaaacagatattggggaatcttcctggtcgtctgagtgcaagaaaaacggcgacgatggagctgatggaggaggaggacacatcaaggttgagtgagcttatcacgctcgctgaggcaggaatacatgggaaagaggaggacgatacattaaggttgactatgcttatcctcgaagaatga

SEQ ID NO: 38797 - DNA, 597 bp, Zea mays
  Peptide Sequence Number=SeqID_80576
atgtcagcagattggcatgaaatgctatcgagaagggagaaggccacaaacttcaaaccagactatgatattgatatccatatgaaggtcttagctatgagtgggcaagtatccagtattcttacaggctacaaactgaagatgatacatggattcacttgttctcatttcttgttaatggtttgtgccttcgtagtcttctccgatatattgaagcgggtgccagataagctacatgtaactaagaaggcagtacttcatgtcttccctgctgctctcccgcaatcgctccgactctcatgcctgtgcccgcgccgtcaactctccgggctcgatgtgcctttccacgcagcacccacctccactcacactcccaccgtggtgaccccctgttcgtcgacgcgtcgatccatggtcagccaaccagtgaaaaccttcttcgcaatcactatgtatggtactgccaattcacattttacaagtgttgtttggaaggcatctaccaactccaatgctctcttcttgatagcggctgcacataacctattgtgtttgaagttaggaaaggagattggtgttagtatcggaaacccatga

SEQ ID NO: 38798 - DNA, 171 bp, Zea mays
  Peptide Sequence Number=SeqID_80577
atgccgtgccccgagaattcaattgataagttcattgttaataaaatgctgtcgagaagggagaaggccacaaacttcaaaccagactatgatattgatatccatatgaaggtcttagctatgagtgggcaagaatccagtattcttacaggctacaaactgaagtgctga

SEQ ID NO: 38799 - DNA, 315 bp, Zea mays
  Peptide Sequence Number=SeqID_80578
atggagacctttggattgcataaccccatggccgatgggtccttggagtggttgagcccgagatcatcgacgagcacaaacaccacatccctcgggaacagatccttgggtcacaagtccctctcggcgccggtgggggaggagcggctatcggccaacagcaacatcagcctgctgtggtgctccagcccgtctagcatctcattcgactgctccacatctgcggcactgcccatggtggctactgaaagggaaatgagcctttgggccatttctaagtattttggtgatctagtgtccaacacaagtgcttaa

SEQ ID NO: 38800 - DNA, 429 bp, Zea mays
  Peptide Sequence Number=SeqID_80579
atgggcagtgccgcagatgtggagcagtcgaatgagatgctagacgggctggagcaccacagcaggctgatgttgctgttggccgatagccgctcctcccccaccggcgccgagagggacttaaggaaattcctgcttgagccaattacagaaggccctgatatttgccaaattgatggttgtagtgttaaattggaatacaagaggaggcaagtcaaatatggtttgtgtgacaatatatggccttggaagtacttggttccatgtacgagggaagatctgtttgccacgattactaggttaacgaacaactcatactttgatggagcacatgaggttcgacattatgtcaggaagcattcggatcttggtcgtattgtgcttgaagttgctaaggactcgcaaatcccccgccaagcaaactgctag

SEQ ID NO: 38801 - DNA, 843 bp, Zea mays
  Peptide Sequence Number=SeqID_80580
atggagcacatgaggttcgacattatgtcaggaagcattcagatcttggtcgtattgtgcttgaagttgctaaggactcgcaaattccccgccaagcaaactgctagcaaacttttcagaggtggacatgatgaagatgatagtgctgatgccgacacaaatgatgttgatgtacctagaaatgttggtgttgttgtgcttcttttgctaaagcgctaccttttacgggatgccatagttacttgggtaagaaagaagactggcgtgccaatcattaggcttcagtctaaggattcagctgaggagttcctcaaaaaggacatgacctttgttattggtctattcaagatttttgagggagcagaccatgaagaatttgtgaaggcagcaaccacagacaacgagatcttcacctttgcagaggcttatgattttgaagatctggaatctatggttgaagaaataggcagacattcaagacaaagtaatgtaaaggtccacaatgtgacgattgagacctcgctggacgctccactcactgatggcatagttccagattcatattcaaacttatgtatcaaggacaacaccataattgtcagccatgaagttatctcgctgaaaaacagatgggacagacctcaccggccatgggggttacatagaggacgtggtatcaacagatgcttggaaagttttctgtcgccaaatgggaaacaagatattgtaggcctggaggcgcgaaacaacgacaccgcaagaccgtacaacagcttcaggaccaatgatgttcccacatgtggctcaactggtggtgaatcagatgcagacacatacggctga

SEQ ID NO: 38802 - DNA, 450 bp, Zea mays
  Peptide Sequence Number=SeqID_80581
atggagttattgatggccatagcttgtaatgtaaaggtccacaatgtgacgattgagacctcgttggacgctccactcactgatggcatagttctagatcatatatacacgggaatagaggaatatgtttactctagaactaagaaaagtaggaagtcaccatctagaaacgacaagcacatgaacaaaattgtgctatcagaacatgatgaccacaagtatggagatctagaaccaaaaacctttcgtatgtgcagtcatcatgtgggtttagtgggacttggactactccagagcgcgctgcttccggagctggccgcttgcgctgagccctctgccggaggcaatgaggagcggtcatgcctgcttcgctctcgcgtcgctcctgctgctgtggctgggcatcgccgccgcacagaaggcctcgtcctggaagacattgaacggtga

SEQ ID NO: 38803 - DNA, 651 bp, Zea mays
  Peptide Sequence Number=SeqID_80582
atgggctgcgacctcgcactgggctcataccacatcacgccgaaccagaatctcacgccctacaacacaggctaccccagcctccctggactacatccaagtcggcagccacgtaaacgtctattttcccctgcagctgcgagctgccttgtcctcccgttcgcgcccttctccacttacctcgccggatccttccactacagggtctccggaggcgaaagctacgccagcatcgcgggacgtgtactaccactaccacaacctcagcatggcgaccttgctgcagaccgccccaacgagcagcgtcagcggcgtcctggacgccggcacggtggtgaccccaacgtgtcgccggaatacaggctgctgctgttatattctaacatttggtatcagagccagttctccgccatcaccatgtcacacaagtcgccatcaatgaagaggccgacggacgacagcgatggtgagaacaaggtcaggccctcacgatcgccgccacaacgccgcggccgctcttacagctgccgccgctccagctcgcgcatcgtcgagcgtgtcatcgagcgcccgtccgcgaacgttgcatggccaatgctcacgcggacgaactactccgagtgggcgcccgtgatgcaggttaatttctag

SEQ ID NO: 38804 - DNA, 498 bp, Zea mays
  Peptide Sequence Number=SeqID_80583
atgggctgcgacctcgcactgggctcataccacatcacgccgaaccagaatctcacgccctacaacacaggctaccccagcctccctggactacatccaagtcggcagccacggtctccggaggcgaaagctacgccagcatcgcgggacgtgtactaccactaccacaacctcagcatggcgaccttgctgcagaccgccccaacgagcagcgtcagcggcgtcctggacgccggcacggtgagccagttctccgccatcaccatgtcacacaagtcgccatcaatgaagaggccgacggacgacagcgatggtgagaacaaggtcaggccctcacgatcgccgccacaacgccgcggccgctcttacagctgccgccgctccagctcgcgcatcgtcgagcgtgtcatcgagcgcccgtccgcgaacgttgcatggccaatgctcacgcggacgaactactccgagtgggcgcccgtgatgcaggttaatttctag

SEQ ID NO: 38805 - DNA, 1122 bp, Zea mays
  Peptide Sequence Number=SeqID_80584
atggggctcggtgtatgcggctcgctctgccaaggtggtgacgaggatgatggttttgataatgcttatggtactggtaagtggtattctttccgtttggaaatggttgtcagcgttgcaaccactgctcaggtgaagatgaagtcgtggaggaggacttccaggagttcaaagagtacgatgagttctaggcgtgggttagcggcaaacccccagtcagctgccactatggctcatcttagatgcacggcacggaagtctgtcatccccttcttaccctctcgtctcgcggagcaggagatagagtctgtgaggagctgttcccctgtgctcccgctggaggcgccccctgcaccaccactgagcgccccagccactggagtagctgttggaggagacctagacgacggaggtggcgacagtagctcgagccacgaccccgacctttctgagaagcaggagttggaaggatgggttgcccgacccatcacccgtgacgccgctcgcgggtgtcacttccacggtgcgctcgacatcctgctatgccaggcactcgatcggcgtacttggtctatcgagtatcgttgtgtggtcttccagcacagtcatgggatttacccggaccgctgggaggcaacctgcttggtgcgctgtccggagaacagtctctggggtgcggaggtctgctcagagcactattctatctctgagcgggactcagctgaggcggccatgcaagatgccgcacggcgtgcgctttcgcactactgctcagtgctcggcggggtagccgacggtctcaacctgaagtattacccatgccgcccatctggcagcacaagaggcgtggttgtctcacctattggtgaggacaatcctaggttgagcagcacagtcaacctagccgccgtgctaaacacagagctagaccatgcattagacgagctgagtagggctcgtggtgagatcgcccggctgcgggctgagcgcgcggagcatcgtcacctggaggatggctcccccgctcacgtcgggactcagcacccgtaccgctcacctcggcgtggacaccagacttatggcaaccccgactgcaggaccaggataaatttagaaccatag

SEQ ID NO: 38806 - DNA, 1050 bp, Zea mays
  Peptide Sequence Number=SeqID_80585
atgaatgctgtggtaacttcacacccacctgtttgtttatatagtactgcaggtaggaaggcgaagcggtggaactgttacaccaggcgcgcagtaactcatacccgctgcgcagtggaccgcaaggataaaacagtaactctgcaaggtgggaccgacacgcgctcggaagtcggatcgtttctccgcaacgagctcagggaaggtgttttttggaccttcggcttcccgaagctgaagaggcttttttcacgggtcaagctcgttacgaagaacgatctagcaccgcgaaaggggctactgttggggtcgtgcttcggtgcgccgaaggtctcacacgaagaagcagcttcggctgaagtcgtctccaagagatggccgaagtacaatggatcaagcagtctcattagctgcgagaagcagacgattcaaatcgagtttttatccttgcaagtgaccgcacttgtacccaccataaccggaatgggagaccacgtctcaggtcgcgtgaggatggcaatctgcgggcaggttcactcaggggcgccatggaggttgctgccgctgcttggtgttttggagggtgggctgttgttcttccctgtgcgtgaggggtttcctgcgcacgagcagagagggagggtggtgccatggctgccacagagggcgtcggccaagggaactgctccctgcgctctgctcttaacgccatggagaagagggggcgttgggcagaggaagaagaagggcttgggcgccatggatgaggagcttcagcgtgccgaggaaggaggggcagagagcacgcagggtgatggaggctcgcgccatggaaggaggaggcgagcagagctactggcttcttgtgcaccgaccatggaggaaggagtagggatgcccgcggccatggagcagggaaacagggagccgagggaaggggcgccaagcacagggggcagagggaggcgctcgacatctgctggacagccgacaccggagggaagctgggcggccatgggaggggaggaagctccctacacgcagccgtga

SEQ ID NO: 38807 - DNA, 300 bp, Zea mays
  Peptide Sequence Number=SeqID_80586
atggcgaggctgagctgggagaggggagtcgctgtcctctgttggccgaagttgctgctcgcctgcaggggaagtggggctcgcttccatgggaggagaagggcaggggacgccatggttgtggaggtgctcggctgctgcagagatggagctcgtccatgcaggaaggagccgagggggggagcgccaagcacagggggcagagggaggcgctcgacatctgctggacagccgacaccggagggaagctgggcggccatgggaggggaggaagctccctgctggctgttgctgccgtga

SEQ ID NO: 38808 - DNA, 240 bp, Zea mays
  Peptide Sequence Number=SeqID_80587
atggagcgtaggggtatgagcataataaaggatggagctaaagcaatgattgtaaccgacaagggagagaatgcaaccaaggtcaggataggtaaaacacccttctcaaatcgagatgggaaagatgataattcaaaaggtgattatgagattgatggttttggttatgactatggtgctggcgaagatgaagctgtggaaggagacttccgggagttccaagaatacgacgagttctag

SEQ ID NO: 38809 - DNA, 225 bp, Zea mays
  Peptide Sequence Number=SeqID_80588
atggaggctaggggcatgagcataataaaggatggagctaaagcaatgattgtaaccgacaagggagagaatgcaaccaaggtcaggataggtaaaacaccattctcaattcgagatgggaaagatgataattcaaaagagttaagacaggacttgttgagggacgaagtgaagaaaacaatcaaggataagataagtgaggttccgacagaagagttgaaataa

SEQ ID NO: 38810 - DNA, 384 bp, Zea mays
  Peptide Sequence Number=SeqID_80589
atgcaggataggggcatgagcatagtaaaggatggagctaaaacaatgattgtaaccgataagggagagaatgcaaccaaggtcagaataggtaaaacaccattctcaaatcgagatgggaaagatgatatttcaaaagacaaggatgtaggagaggaggtaaatgggcataggaacaaaggatacaagtacctaaaggatggagttaagacaagacctgcaagtggaaaagaagaggatacgtccaagggccacataggaataaagatgagtatcaaggcaagatcgatagatgaccagggaatggtgatagcgaataaaaacacatcaaaggatggaattaagacaaaacttgtaaggcgacaaggagggaaaagaaattaa

SEQ ID NO: 38811 - DNA, 354 bp, Zea mays
  Peptide Sequence Number=SeqID_80590
atggagcgtaggggtatgagcataataaaggatggagctaaagcaatgattgtaaccgacaagggagagaatgcaaccaaggtcaggataggtaaaacacccttctcaaatcgagatgggaaagatgataattcaaaaggtaggcataagataagcatcatggaaagatccagtgattacaaaggtgacaacagacaaacacaaccaaggaggtattttagacaaaacgtgcgaggtatcaaagaatgggaagcaatcaatggtgaagtaggtgaggcattatcctcaaacagcaatgaaaaagaggtggctttgaagggtaggttcaaagtaagcatgagggcaagggcatag

SEQ ID NO: 38812 - DNA, 267 bp, Zea mays
  Peptide Sequence Number=SeqID_80591
atggaggctaggggcatgagcataataaaggatggagctaaagcaatgattgtaaccgacaagggagagaatgcaaccaaggtcaggataggtaaaacaccattctcaaatcgagatggaaaagatgatatttcaaaaggtaggcataggataagcatcatggaaagatccagtgatgacaaagatggagttaagataagacctgcagatgaaaaagaaggaggtacgtccaatggccagataggtaaacaaccactctccaattga

SEQ ID NO: 38813 - DNA, 270 bp, Zea mays
  Peptide Sequence Number=SeqID_80592
atggaggctaggggcatgagcataataaaggatggagctaaagcaatgattgtaaccgacaagggagagaatgcaaccaaggtcaggataggtaaaacaccattctcaaatcgagatggaaaagatgatatttcaaaaggtaggcataggataagcatcatggaaagatccagtgatgacaaagagtcaaggcaagactcaccaaatggcaaggtggagaaaacaatcaaggataagataagtgaggttccgacagaagagttgaagtaa

SEQ ID NO: 38814 - DNA, 255 bp, Zea mays
  Peptide Sequence Number=SeqID_80593
atgagcataataaaggatggagctaaagcaatgattgtaaccgacaagggagagaatgcaaccaaggtcaggataggtaaaacaccattctcaaatcgagatggaaaagatgatatttcaaaaggtaggcataggataagcatcatggaaagatcaagtgatgacaaagagtcaaggcaagactcaccaaatggcaaggtggagaaaacaatcaaggataagataagtgaggttccgacagaagagttgaagtaa

SEQ ID NO: 38815 - DNA, 111 bp, Zea mays
  Peptide Sequence Number=SeqID_80594
atggaaagatccagtgatgacaaagagtcaaggcaagactcaccaaatggcaaggtggagaaaacaatcaaggataagataagtgaggttccgacagaagagttgaagtaa

SEQ ID NO: 38816 - DNA, 207 bp, Zea mays
  Peptide Sequence Number=SeqID_80595
atggaagagaaggcttttaaagggaggttcaaagtaagcatgaaggaagggagattgaagatcttagagaacggacatagtttgatctccaaggtaagattaaaagatgagaaaggtaaagagtcaaggcaagactcaccaaatggcaaggtggagaaaacaatcaaggataagataagtgaggttccgacagaagagttgaagtaa

SEQ ID NO: 38817 - DNA, 210 bp, Zea mays
  Peptide Sequence Number=SeqID_80596
atggctgatatatcagtttcaaacactggccgtgccaagtcaggaggatggctggttgaagtagatttcctcgccggagttactgggcaccgctatggaccaccttgtgtcgttggcggtcctcctgtgctggcgaatctcggtgaggaccccgcagctagtctctcccttatctctatatcgtgtagtagttcctacttgaaagcttga

SEQ ID NO: 38818 - DNA, 453 bp, Zea mays
  Peptide Sequence Number=SeqID_80597
atggccggatgctcgacgcccctgtccttcgagctcgagttatcctctgctcggttctcctatcacaccgaccatggtggccgccatatttgctcccatccggattcacgccagcaacgggctctcaggtgtcggttcggaacctcaccaggtcaccagggaggcgctcagggccgtgccaagtcaggaggatggctggttgaagtagatttcctcgccggagttactgggcaccgctatggaccaccttgtgtcattggcagccctcctgtgctggcgaatctcggtgaggaccccgctgctagtctctcccttatctctatatcgtgtagcagttcctacttgaagcttgattactgcgtggatcgggccgaatcgcggcaatggcgctccgccgtggggagtttgaaccctgaacttctccagattcgtgtgcgcagtcctgaggtatga

SEQ ID NO: 38819 - DNA, 240 bp, Zea mays
  Peptide Sequence Number=SeqID_80598
atggagcagaggattacccggtctacgctcaccggcggtcgggcgaagtccggcgaccgtggactggcttctccggcgaagcaaactccgattccttgctcggggagcttcaccgagagcgcgtcgaacacgtggctctttgcttgtgcccctgttcttccctctgctgagcggccaaaacgtacgaatcttgccctagggcctgtgagagatctcttccctgcacctagagctacctag

SEQ ID NO: 38820 - DNA, 405 bp, Zea mays
  Peptide Sequence Number=SeqID_80599
atggagcagaggattacccggtctacgctcgccggcggtcgggtggagtccggcgaccgtggactggcctgtccaacgaagcaaacttcgattcctcgctcggggagcttcaccgaggtgtgcacagtcttctccgagggctggacggggctgggaagggttctgctggcccggtctacggtggcagggggatcgggtggccgcagacacgccgtgcacgggcaaacgtcggtgggtttgggctccggtgaggtcaagcgcgtgcggaggggtacggtcaagagcgcgtcgaacacatggctctttgcttctgcccgtgttcttccctctgctgagcggccaaaacgtacgaatcttgccctagagcctgtgagagatctcttccctgcacctagagctacctag

SEQ ID NO: 38821 - DNA, 565 bp, Zea mays
  Peptide Sequence Number=SeqID_80600
ccacttggagaggttgcaccaccgcctgcacaaggtgcaggagcgtcggcgccaggagttggagcagcagggctcttcttcctcgcctcagcagaaggtagagtctgccaggcgttgctcccctgtggccccgctggaggcgccccctgcaccaccactgggcgtcccggccgctagagtagctgctagaggagaccctgacgacggatatgatgacgatggtctccggggtgcggtggtctgctcggagcattattctatctctaagtgggactcagccaaagtggccatgcaggatgtcgcacggcgtgtgctttcgcactactgctcattgctcggtggggtggtcggtggtcttgacttgaggtattacccccgccgtccatctggcagcacaggaggcatgattgtctcacctgttggtgaggacaatcctaggttgagcagcacattcaacctagccgccatgctaaacacggagttagaccacgctttagacgagctgggtagggctcgcactgagatcgcccatgttggggacttgttctcaaatgctatgagttaa

SEQ ID NO: 38822 - DNA, 122 bp, Zea mays
  Peptide Sequence Number=SeqID_80601
atggtgaggctgccttacacaacggcgctgaccacgctgttcagctacgggctgctcttcgccttcggccagctcagggatttcttccgcagcggcctttctgctctagaggggccgtcaag

SEQ ID NO: 38823 - DNA, 235 bp, Zea mays
  Peptide Sequence Number=SeqID_80602
atggagattgggggcggcgcgtacctcaacctgaaacccggacgagcgacgactaatgaaacccttgcagtagagcagattaggaaggaggaacgaggaatgcctgcccttgcgcccttcccatttgggaacgttgcctggatgaagaaaggtgtaattgttgtgaataatgctcgaggagcaatcatggatgctcaagcagtcgcagatgcatgttctagcggtcacattgatg

SEQ ID NO: 38824 - DNA, 1345 bp, Zea mays
  Peptide Sequence Number=SeqID_80603
atgtggacgtcggtggtgtcatcgtggctcgtgcaggagctcaggctgtatgtcgctagcgccgcgctcagctgcctcgtcctcttcgcaggcctctgccacctcgaccccacaagaaatggcaatggtgggtatgggaaacctgttggtacccaaaacccgcatgggtatgggtttgggcaaaattttatacccatcatggggcgcaacagcagaagaaggaaaccgccgcagttcccatggctgccgtgtgactacatctctgcgccggcgccgggcctagaggccgcctacacgccgccttctctcgatgccaccaccgcggcagccgatgttgccaccgcgaaatcctcctccgacgcggtcacttgggctggcgtctgggcgttgccctcgcgacagagggcctgcatagcggtctgcatcgccactttcatcgcctgcaccaccttcacgcttaccatgccgccgccgtgctcaatcggatggggaaggaagatggacttgatgcagcagcttggtcacgatttggaccaagaagagccaagaacctacagacattctcatgttggttcacctattgctaactctcctccaggggcatgggctcaatacagtagtccaacagatagcaatatgctgcaagctttcaccagatctccaactggaaatggaatgagtcctatcagaattccttccctgatttcaaatgctccaaagattgctcctattggcaaggatagcaaccggtctaagtatgatcaagtgttttcaaatggaatcgtgggaggtctcctgctgggcatggctaatcgtgcttctgtgaatcctggttcttctctaattggaagtcggcctggagagtggagccgaacgacggacggtgaacagagattgggggacggagctcggagattaggaatggagattgggggcggcgcgtacctcaacctgaaacccggacgagcgacgactaatgaaacccttgcagtagagcagattaggaaggaggaacgaggaatgcctgcccttgcgcccttcccatttgggaacgttgcctggatgaagaaaggtgtaattgttgtgaataatgctcgaggagcaatcatggatgctcaagcagtcgcagatgcatgttctagcggtcacattgatgccagcaccaaaggatcggatcacccctggcgctacatgcctaacaatgccatgacccctcacatctctgggactacaattgatgtgcagctgcggtatgcggatggtgtgagggacatgctggataggtatttcaagggcgaggacttcccggtgcagaactacatcgtcaaggaaggccagctcgcca

SEQ ID NO: 38825 - DNA, 1071 bp, Zea mays
  Peptide Sequence Number=SeqID_80604
atgtcttcgcgctcccttatgcatcgtgtctttccaccttccaagcccccggatgggggatacccgccgtcttttcgcctcatcgttggaggaacgcaactccgtgggagttggtacctttcagccatcgttcggcttcaaggattttcatcatgcagcccggctgcacccctccgccggtggtcacccaagatggtgacctccagcttgatggtgggggagagcgagccgggttgcggcctctgcccctccctcagcctcaaggattttcatcaccagggctggggaggggagagtgccgagttgggctgcaccgtgcctggctctcggacgcgagtggcttcggagccgctcgcggcgccggcgtctgccacgacagctggaagaggttcttccgccggcgagatagccagggccggccacggaccgacctccaactctacggccttctgcccgtccttgcctcacgagtttgggcatgggcgggggcctcctggcagcagcatccgccctgaggtcagtgctgccgctgttcggccccccggagcagaagtcgtcgtcgtcgctgctgctggagcgggcgacggcgtgccgttcgtcggtcttctgttgctctgcaggccctcccctatcgagtggggttgttcatacctgcggagggggaaccggagttccgtttgtaatggcactttgaatgccaactcgcctgttgattatctgaaccgcttcaccaagcatgagtcgccccgtgtcaaggtgacgagtgagagtggagatcctcggaccgcgtcgccgtccgaggctaggtcggacctcgctgaaggtgtcgtcgatgctgagggtgctactgccccctttcagcgtccagacccgagcctggatgtttgtgcgagcgagagttgcttctcgcggaaggtgatgagtgagaaggtgacgagtgagaaagcacgaaagatattctggcagaagagatcttttttcgaggaaaatttcaacgcagagggggttcccccccttttagcccccaagggagggtcgggctttgccgaggcgaggccgacccttccttga

SEQ ID NO: 38826 - DNA, 1071 bp, Zea mays
  Peptide Sequence Number=SeqID_80605
atgtcttcgcgctcccttatgcatcgtgtcctttccaccttccaagcccccggatgggggatacccgccgtctttcgcctcatcgttggaggaacgcaactccgtgggagttggtacctttcagccatcgttcggcttcaaggattttcatcatgcagcccggctgcacccctccgccggtggtcacccaagatggtgacctccagcttgatggtgggggagagcgagccgggttgcggcctctgcccctccctcagcctcaaggattttcatcaccagggctggggaggggagagtgccgagttgggctgcaccgtgcctggctctcggacgcgagtggcttcggagccgctcgcggcgccggcgtctgccacgacagctggaagaggttcttccgccggcgagatagccagggccggccacggaccgacctccaactctacggccttctgcccgtccttgcctcacgagtttgggcatgggcgggggcctcctggcagcagcatccgccctgaggtcagtgctgccgctgttcggccccccggagcagaagtcgtcgtcgtcgctgctgctggagcgggcgacggcgtgccgttcgtcggtcttctgttgctctgcaggccctcccctatcgagtggggttgttcatacctgcggagggggaaccggagttccgtttgtaatggcactttgaatgccaactcgcctgttgattatctgaaccgcttcaccaagcatgagtcgccccgtgtcaaggtgacgagtgagagtggagatcctcggaccgcgtcgccgtccgaggctaggtcggacctcgctgaaggtgtcgtcgatgctgagggtgctactgccccctttcagcgtccagacccgagcctggatgtttgtgcgagcgagagttgcttctcgcggaaggtgatgagtgagaaggtgacgagtgagaaagcacgaaagatattctggcagaagagatcttttttcgaggaaaatttcaacgcagagggggttcccccccttttagcccccaagggagggtcgggctttgccgaggcgaggccgacccttccttga

SEQ ID NO: 38827 - DNA, 394 bp, Zea mays
  Peptide Sequence Number=SeqID_80606
atggcggattcaccccatctcctgtcgcctcagcctgcgccgccatctctcctgctctcctccgcctctccgactcggagctcttcttcggaattgtcggagaccataattaggggtaccctcaagactcctaattctcagctgagccgaagtgaccgcagtcacttcgccgctccactgaccggcctgacaaaaggacagcgccgcctgcgccgcttcgactgctgcgccgctcgacagagtgaggctgacaggcagtcaggcccggcctcaggcaccataggaaactccgctccgcccgacccagggctcggactcgggctcagtcccggaagacggcgaactccgctccgcccgacccagggctcggactcgggctcagtcccggaagacg

SEQ ID NO: 38828 - DNA, 675 bp, Zea mays
  Peptide Sequence Number=SeqID_80607
atggcggcgcgggctgaggcgacaggagatggggtgaatccgccatggcaggggcgtagctattgcaagggcgagaaccctgggctctgtataactattggaagccccgaccacccaccgaccagatttcgtcccgcatattacgtgcatagggcccacgatcccacccacgcgctcgcagttatccaatcccacgccgccactataaaaacacccccacgccgccagggattaggttttagcggcggcggtggttccctcaagcgtgcgagcgtcagtgatcctaggggccagcagcggtgccgccccgaggcaggcgacctacggcggcgctccaccaggaacgagcgacagcgacgctcccgaggtgggcgcgcaagcggcgacggcgttctcgaagcggacggacggcggcagcgcaccctaggcccgatggcaacgacgtttgtcccgttcgtctctgcgatggccaccaccgctgccgctccaacgtctgtggcgtcgtcccctgcgccaaaggccaacaacagcaggaaggcggtggtgcctaggatgactgggtacaagctgcccaagcgcgtcaaggagtcggcggtgctcagggatatcctcgtcgtcatcatgtcatcggagaacgtgcccacccgcatcatcccgctgcctggaggagtttga

SEQ ID NO: 38829 - DNA, 675 bp, Zea mays
  Peptide Sequence Number=SeqID_80608
atggcggcgcgggctgaggcgacaggagatggggtgaatccgccatggcaggggcgtagctattgcaagggcgagaaccctgggctctgtataactattggaagccccgaccacccaccgaccagatttcgtcccgcatattacgtgcatagggcccacgatcccacccacgcgctcgcagttatccagtcccacgccgccactataaaaacacccccacgccgccagggattaggttttagcggcggcggtggttccctcaagcgtgcgagcgtcagtgatcctaggggccagcagcggtgccgccccgaggcaggcgacctacggcggcgctccaccaggaacgagcgacagcgacgctcccgaggtgggcgcgcaagcagcgacggcgttctcgaagcggacggacggcggcagcgcaccctaggcccgatggcaacgacgtttgtcccgttcgtctctgcgatggccaccaccgctgccgctccaacgtctgtggcgtcgtcccctgcgccaaaggccaacaacagcaggaaggcggtggtgcctaggatgactgggtacaagctgcccaagcgcgtcaaggagtcggcggtgctcagggatatcctcgtcgtcatcatgtcatcggagaacgtgcccacccgcatcatcccgctgcctggaggagtttga

SEQ ID NO: 38830 - DNA, 523 bp, Zea mays
  Peptide Sequence Number=SeqID_80609
ggcccacgatcccacccacgcgctcgcagttatccagtcccacgccgccactataaaaacacccccacgccgccagggattaggttttagcggcggcggtggttccctcaagcgtgcgagcgtcagtgatcctaggggccagcagcggtgccgccccgaggcaggcgacctacggcggcgctccaccaggaacgagcgacagcgacgctcccgaggtgggcgcgcaagcagcgacggcgttctcgaagcggacggacggcggcagcgcaccctaggcccgatggcaacgacgtttgtcccgttcgtctctgcgatggccaccaccgctgccgctccaacgtctgtggcgtcgtcccctgcgccaaaggccaacaacagcaggaaggcggtggtgcctaggatgactgggtacaagctgcccaagcgcgtcaaggagtcggcggtgctcagggatatcctcgtcgtcatcatgtcatcggagaacgtgcccacccgcatcatcccgctgcctggaggagtttga

SEQ ID NO: 38831 - DNA, 393 bp, Zea mays
  Peptide Sequence Number=SeqID_80610
atggtgtaccgcctacttggatgggatgcacctgtgttcggtggaaggatttgcgccggtgccatcctcctcggtgaacttgccgcagagagctcatgcgttttgtcctccctagcaggtgcgtggccttgtgggagcgacgctcctcaaccagtgcttggcttcaaggatgttcatcggcctcgcggtggtggagagcgagctgagccgcggctccgccttccacatgggctggtgacccgcctcttcctccagcattcggaggaagaggatgatcaccagccttgtgaaggaggcaaacttcggctacgtggtcccggccagaccgcaagcaccgccttccaccgtgcttccagctccatggcttggatggtcttgtcctcacccccgtag

SEQ ID NO: 38832 - DNA, 240 bp, Zea mays
  Peptide Sequence Number=SeqID_80611
atgactacctcagcttcgagcggctcgccagtagaggcaaccacctctgcaacaggctgcctcaccagcggcgacgaccacctctgcgccgggcagcctccccagcggtggcgaccacctcagcatgcgctccatggcaaagaggtcctcgcctccgtccccctacgggggagaggacaagaccatccaagccatggagctgggagcatggcggaaggcggtgcttgcggtctggcctag

SEQ ID NO: 38833 - DNA, 1878 bp, Zea mays
  Peptide Sequence Number=SeqID_80612
atggatgaaaatctccagatgatcggaaagatagctgcggtttgcaatgatgcaagcattgcccactctgagcatcagtacgttgctactgggatgcccacagaagctgctctgaaggttttggttgagaaaatggggcttcctggtggttatactccatctcttgattcatctgatttgctaaggtgttgtcagtggtggaataatgctgccaagagagtagcaactctggaatttgatcgcaccagaaagtcaatgggagttattgtgaaagcaaactctgggaagaacttgctgcttgttaagggagcagtagaaaatctgctagagagatgtacccacattcagttgctcgatggatctgttgtgctattggatgatggtgccaaggcgctcatattatctacactccgtgacatgtctgccagtgctttgcgctgcttgggttttgcttacaaggatgaattgtcagaatttgcaacatatgatggtgaagaacatgcagctcacaagtatctgcttgatccttcatattactcatccatagagagtaatatgatcttttgtggttttgttggtctaagggatcctccacgagaagaagtccacaaagcaattgaagattgcagagctgctgggatacgtgttatggtgataacaggagataacaaggaaacagcagaggccatttgtcgtgagattggggtttttggccctcatgaagatatcagttcaaaaagcttcacagggaaggaattcatgggtctttctgataaaaaggagctcttaagacaacagggtggccttctcttctccagggcagagccaaaacacaagcaggagatagttagactgctcaaagaagatggtgaagtggttgcaatgactggtgatggggtgaatgatgcaccagctcttaaactggctgatattggagttgcaatgggcattactggaactgaggttgccaaagaagcttcagatatggtacttgcagatgataactttagtactatagtcgcagcagttggtgaagggagatctatttacaacaacatgaaggcttttattagatatatgatctcctcaaacatcggagaggtcgcgtccatattcctgacatcggctttgggtattccagaaggtctcatcccagtgcaactcctatgggtcaatctagttacagatggccctccagcgactgctttggggttcaacccgccagataaagatatcatgaagaaacctcctcgaagaagtgatgactcgttgatcactccttggatcctgtttcgctatatggttattggcctttatgttggggttgcaacagtgggaatcttcatcatctggtacacgcatgacagtttcctgggaattgacctggctagtgatggtcatacacttgtatcgtactcccagctctcaaactgggacaagtgctcctcatgggagggcttcaaggtgtcaccattcaccgcaggagcgaggacattcagcttcgatgcaaatccatgcgattacttccagggtggcaagattaaagcaacgaccctctccctgtcagtcttggtggccattgagatgttcaactcactgaatgccctgtcagaggacggcagccttgtgagcatgccaccatgggttaatccgtggcttcttctggccatgtcggtttctttcgggctgcatttcttgatcctctacgtgcctttcctcgctcaagtgtttgggatcgtgcccctcagtttgaacgaatggctcttggtggtggcagtggccttccccgttgtgctgatcgacgaggttctcaaatttgtggggcggtgcctgacagcgcgtgcccggaaacaatcagggaagaggaaggcagagtag

SEQ ID NO: 38834 - DNA, 3189 bp, Zea mays
  Peptide Sequence Number=SeqID_80613
atgggtaagggcgggcaggacgaaggcaaccgccggcgggacggatccgccgcctcggggccggaccgccccgcgccggtcttcccggcgtgggcgcgcaccccgagcgagtgcctcgcggagctgggcgtctcggcggaccgcggcctcagctccgaggaggcggcggcgcggctgcagcgacacgggcccaacgagctcgagcggcacgcgccgccgtcggtctggaagctcgtcctcgagcagtttaacgacacgctcgtgcgcatcctgctcctggcggccgtcgtctccttcgtgctcgcgctctacgacggcgcagagggcggcgaggtggggctcaccgccttcgtcgagccgctcgtcatcttccttatcctcatcgtcaacgccgtcgtcggcgtctggcaggagagcaacgccgagaaggcgctcgaggctctcaaggagattcagtcggagcacgcaaccgtcaggcgtgatgggcgctggtcgcatggcctccccgcgcgcgacctcgtccccggggacatcgttgagctccgggtcggggacaaggttcccgcggacatgcgcgtgctccagctcatcagctccaccctccgcgtcgagcaggggtctctcaccggcgagaccgcctctgttaacaagaccagccacaagatcgagctggaggacactgacatccagggaaaggagtgcatggtttttgccggtaccactgttgtcaacggcagtgctgtctgtgttgtgacgggcactggcatggctaccgaaattggcaagatccatgcgcagatccaggaggcatctcaggaggaggacgacacgccactgaagaagaagctcaatgagtttggtgaggcgctaactgccataatcggggtgatctgtgccttggtctggctcatcaacttgaagtatttcctttcctgggagtatgtggacgggtggcctacgaatttcaagttctcatttgagaagtgcacgtattactttgagattgcggtggcactggccgttgcagcaattccagagggtttgcctgctgtgatcaccacgtgcttggcactcggtacaaggaagatggcacagaagaatgcccttgtgaggaagctgccgagtgtggagacattgggttgtacaactgtgatttgctctgataagaccggaactttgaccacgaaccagatgtcagcagtgaagcttgtagcaattgggaggtggcctgatacacttaggagctttaaggttgatggaaccacttatgatccgactgatgggaagatacacgattggccaagcttgagcatggatgaaaatctccagatgatcggaaagatagctgcggtttgcaatgatgcaagcattgcccactctgagcatcagtacgttgctactgggatgcccacagaagctgctctgaaggttttggttgagaaaatggggcttcctggtggttatactccatctcttgattcatctgatttgctaaggtgttgtcagtggtggaataatgctgccaagagagtagcaactctggaatttgatcgcaccagaaagtcaatgggagttattgtgaaagcaaactctgggaagaacttgctgcttgttaagggagcagtagaaaatctgctagagagatgtacccacattcagttgctcgatggatctgttgtgctattggatgatggtgccaaggcgctcatattatctacactccgtgacatgtctgccagtgctttgcgctgcttgggttttgcttacaaggatgaattgtcagaatttgcaacatatgatggtgaagaacatgcagctcacaagtatctgcttgatccttcatattactcatccatagagagtaatatgatcttttgtggttttgttggtctaagggatcctccacgagaagaagtccacaaagcaattgaagattgcagagctgctgggatacgtgttatggtgataacaggagataacaaggaaacagcagaggccatttgtcgtgagattggggtttttggccctcatgaagatatcagttcaaaaagcttcacagggaaggaattcatgggtctttctgataaaaaggagctcttaagacaacagggtggccttctcttctccagggcagagccaaaacacaagcaggagatagttagactgctcaaagaagatggtgaagtggttgcaatgactggtgatggggtgaatgatgcaccagctcttaaactggctgatattggagttgcaatgggcattactggaactgaggttgccaaagaagcttcagatatggtacttgcagatgataactttagtactatagtcgcagcagttggtgaagggagatctatttacaacaacatgaaggcttttattagatatatgatctcctcaaacatcggagaggtcgcgtccatattcctgacatcggctttgggtattccagaaggtctcatcccagtgcaactcctatgggtcaatctagttacagatggccctccagcgactgctttggggttcaacccgccagataaagatatcatgaagaaacctcctcgaagaagtgatgactcgttgatcactccttggatcctgtttcgctatatggttattggcctttatgttggggttgcaacagtgggaatcttcatcatctggtacacgcatgacagtttcctgggaattgacctggctagtgatggtcatacacttgtatcgtactcccagctctcaaactgggacaagtgctcctcatgggagggcttcaaggtgtcaccattcaccgcaggagcgaggacattcagcttcgatgcaaatccatgcgattacttccagggtggcaagattaaagcaacgaccctctccctgtcagtcttggtggccattgagatgttcaactcactgaatgccctgtcagaggacggcagccttgtgagcatgccaccatgggttaatccgtggcttcttctggccatgtcggtttctttcgggctgcatttcttgatcctctacgtgcctttcctcgctcaagtgtttgggatcgtgcccctcagtttgaacgaatggctcttggtggtggcagtggccttccccgttgtgctgatcgacgaggttctcaaatttgtggggcggtgcctgacagcgcgtgcccggaaacaatcagggaagaggaaggcagagtag

SEQ ID NO: 38835 - DNA, 312 bp, Zea mays
  Peptide Sequence Number=SeqID_80614
atgggcaggtctaggggcaccacgtggccaggaaagatgatacaccccagggtgcatcattggcaccggacctccacggaggaacactggacctttgtacgcacaacccggatcctcgattacagacccggaatcccaagaaggcatgtcgggtccctcggatgggccccaggtccctccgagaaaggttcggaccgcagcaagtgtccaacacaagtgcctaagtgtaaaaaggtggacaaagtacaaatcaaggataaaggaaaaatccaattgaaaaagccttggctcgagcagccaagactttgctga

SEQ ID NO: 38836 - DNA, 444 bp, Zea mays
  Peptide Sequence Number=SeqID_80615
atggcccctggtgagaccgtgaagcttggaaggtgtcacaacaactccctggctgttgataatgctcccggagtcgccctcgatggagtccgggacgggaagcttcttgtagaagggacgatgggcacagtgcaccgcatggcacgggtgcactgtttggcgtgccatctgctggatgaccctgacgccaggctgcacggctttaggggccttacgtcaggctcggcccattggattatgtcacgggtcacaagccacgcggcagcagagggtctccgcctgagcgaggagcgtagggcaaggcctggacgcgtgccagcaccggacccttactcatgttggggtcctccccgtcctgggaccttgccaaggcctggaccttactcggagggacctggggcccacccgagggacccgacaagccttcttgggagctccggactt

SEQ ID NO: 38837 - DNA, 1506 bp, Zea mays
  Peptide Sequence Number=SeqID_80616
atgacgaccgcctcaccgcgtgcggaaaggtcctcgcccccgtccccctacgggggtgaggacaagaccatccaagaacgcgatcgccacctccacggcgtacgacgtcttgtacgacccctaggcgacgctggaggcggcgccaaagccatccaagccagggagccagacacgctgcagctaacggcacttgccgccgaccggccccacgtagccgaagttcgcctcctccgcaagatgaccactggcgagagagtgcagtcgggctgcatgatgaaaatccttgaagccgagcgatggcagaagagcgccaacccccatgtggtcgcgctcctccaacagcagcaagaagaagacaagatcgaccgcaccaccgcacaggaaacgaagagcgcgagctccccgatggccccacatgtcatacaagctggcccgaagcacgaagaaggcgaatcgtcgcatagggagcgtgcaaccgccctgcggttatacacccttccatcttcgccgcaaccagcggtcaaggaggcgaaccgccgcacaaggagcgtgcaaccgccctgcggttattcgcccttccatcttcaccgcaaccagcggtcaaggaggcgaaccgccgcacaaggagcgtgcaaccgccccgcggttgtgcgccccctcggcttcgaccggtggtccaacctctggcatgggggcccaggcccacatgacatgcacccggtgcgccggtttctgggtgcagaaaagtcgcaccgccgctcgcgccaataccgcgcctcctcgaggccgtcgcaaaaggctgagaagataaattttcaaaaccaatgcagtgacccgaggcaccccgtgcatggcccaacgaaggcattaagtgcggaggtcacgggccagtcagccatgggggcaggcatggtagtcggcgtgaccatgggtgggccggtagtaattgcatcaacgggcgcgcaggagcagcgagccaatcaccagtcaaactttggccccacctgcaggctcgcatcctcccctgaggcgggcccgggggccactgtcgtcgagccggacctccgcgagggggcgccggacccctgtacgcacaattcggaccctcgattgtggcccgggactcccgagcggagacccgatgcggccacgtggctcattgcccgtgacataagccagcgggcggagcctgacgcgatgtgcccactcagcatctattgcgtcctgtccacttcgctggcaagcggcgccagtgtcaccctacagatggctcacctgtccagtccattgtcgaaacagtgcgcccgtgctgcacggtgcattgtgctcatcatcccttatacgagaagcttcccctgcgcgtcgaggatacgcagatctcgggtgtcagggtacaagaagattgccccagcagcaaatattaggagctccaagtactacttttgcgaggttcctaggcccacatgtcggggcccagcactcttgtacatgcccctttggctataa

SEQ ID NO: 38838 - DNA, 1557 bp, Zea mays
  Peptide Sequence Number=SeqID_80617
atggacccccaggggaccccgtgctccccggtctatggggtcaaagcctgccttcccccagaaacccttctagactccccatgggtccagacttccgacaggttcatgcagaaatggccacagtcgaagacgagggctccctcgtcaaatgcagatgggaacccagggtcgggacctagtcctacggcaagtaccaaaccaagaagggctcctcaactctcccccagctgggaaggacccttcaaggtaacgggaatacgccgactcgagggtgaccgtctagctgcgactgaaggagtgcctccccctggtgctggagcatctctgtataaactaccagacgccagcgaagtcacgctggaaagcccgcggccactgcccttgcggaatcctccaagatggtgtgacaacggtgatggccgcctcaatgcgtgcgccattccgaagaggtcctcgcccccatcctcctacgggggcgacaacgaggccattaaagccaaagagtgggaggctcgacgtggacgaacagccgcgccccgcttggcggtggcaggcgacgctggaggcggcgccaaagccatccaagccagggagccagacacgctgcagctaacggcacttgccgccgaccggccccacgtagccgaagttcgcctcctccgcaagatgaccactggcgagagagtgcagtcgggctgcatgatgaaaatccttgaagccgagcgatggcagaagagcgccaacccccatgtggtcgcgctcctccaacagcagcaagaagaagacaagatcgaccgcaccaccgcacaggaaacgaagagcgcgagctccccgatggccccacatgtcatacaagctggcccgaagcacgaagaaggcgaatcgtcgcatagggagcgtgcaaccgccctgcggttatacacccttccatcttcgccgcaaccagcggtcaaggaggcgaaccgccgcacaaggagcgtgcaaccgccctgcggttattcgcccttccatcttcaccgcaaccagcggtcaaggaggcgaaccgccgcacaaggagcgtgcaaccgccccgcggttgtgcgccccctcggcttcgaccggtggtccaacctctggcatgggggcccaggcccacatgacatgcacccggtgcgccggtttctgggtgcagaaaagtcgcaccgccgctcgcgccaataccgcgcctcctcgaggccgtcgcaaaaggctgagaagataaattttcaaaaccaatgcagtgacccgaggcaccccgtgcatggcccaacgaaggcattaagtgcggaggtcacgggccagtcagccatgggggcaggcatggtagtcggcgtgaccatgggtgggccggtagtaattgcatcaacgggcgcgcaggagcagcgagccaatcaccagtcaaactttggccccacctgcaggctcgcatcctcccctgaggcgggcccgggggccactgtcggtaccttggataagggataccccttactacaatataaagatgtggtgctcatatgtcgttccttagccacacggtga

SEQ ID NO: 38839 - DNA, 561 bp, Zea mays
  Peptide Sequence Number=SeqID_80618
atgggcggcttcccgtggcggtgggacctccggcgaggaatccgtgccgctacgtcgttcgatccgtcccgaattcaaggtgaagctcccgagccggtcttggagccctcactgttagcgtccgcgcgtgtcaacacggtcgcccagggaacttcgcacgaacagataagggaaggggacgatgttctaccggcgggtggactcccagatcgcctcgcggccaaggggtctgacaaccgagggaccgggagatgggattaccaaggggaaggcgagaagaactcaagggctccagcttttaaccacaagcgcggaggagtgggtgttacaaatcctacccctcttaaaaataatctcgtcctcgagattagtaagcagaagggttataccgaggtaagaagagagatggtcagagtgaggttagctgatggtaagaagaacttggtaagggaagactccgtccaaggtgatgcaattgtggacattactccacaactcatcacactcaatcaaagatccaaatcaaacaagtatcataagaacaagcattcaagttcatag

SEQ ID NO: 38840 - DNA, 360 bp, Zea mays
  Peptide Sequence Number=SeqID_80619
atgggcggcttcccgtggcggtgggatctccggcgaggaatccgtgccgctacgtcgttcgatccctcccgaattcaaggtgaagctcccgagccggtcttggagccctcacagttagcgtctgcgcgtgtcaacacggtcgcccagggaacttcgcacgaacagataagggaaggggacgatgttctaccggcgggtggactcccagatcgcctcgcggccaaggggtatgacaaccgagggagcgggagatgggattaccaaggggaaggcgagaagaactcaagggctccagcttttaaccacaagcgcggaggaggtcaacccgattcccccggaagcacatcgcgaggtcgttga

SEQ ID NO: 38841 - DNA, 303 bp, Zea mays
  Peptide Sequence Number=SeqID_80620
atgttctaccggcgggtggactcccagatcgcctcgcggccaaggggtctgacaaccgagggagcgggagatgggattaccaaggggaaggcgagaagaactcaagggctccagcttttaaccacaagcgcggaggaggtcgacccgattcccccggaagcacatcgcgaggtcgttgagctcgcgccacggagtccgcgggcgcttccgccatggacgggcaaggtggttggattcgcggctgacaactcgggtccacgcgccagcgggtcatccacagcggcagtacacgcgactggataa

SEQ ID NO: 38842 - DNA, 360 bp, Zea mays
  Peptide Sequence Number=SeqID_80621
atgggcggcttcccgtggcggtgggacctcaggcgaggaatccgtgccgctacatcgttcgatccctcccgaattcaaggtgaagctcccgagccggtcttggagccctcacagttagcgtctgcgcgtgtcaacacggtcgcccagggaacttcgcacgaacagataagggaaggggacgatgttctaccggcgggtggactcccagatcgcctcgcggccaaggggtatgacaaccgagggagcgggagatgggattaccaaggggaaggcgagaagaactcaagggctccagcttttaaccacaagcgcggaggaggtcaacccgattcccccggaagcacatcgcgaggtcgttga

SEQ ID NO: 38843 - DNA, 303 bp, Zea mays
  Peptide Sequence Number=SeqID_80622
atggccgtgcctgacatgtcgtgccggcgcgagggccccgtgaggcggcgttgttcgctagcgcgagtgcgcgacggtagctgcggcgtggatcacgcacgccatacgtgcccagggccccagaacaacagtttagcgggccttgagggtaatagaaaggcagccttttacttcagtcatgtgatcggccatggcggccagcaggcacggtccataattgatagcagacatgacaagagatcaagaatcctttgccgagtacgggtacatgcagacatgataaggtggctcaggcggcgctga

SEQ ID NO: 38844 - DNA, 789 bp, Zea mays
  Peptide Sequence Number=SeqID_80623
atggcctccccttgtggtgtggtcagcccgagcgaggtggtgactcctccgaggtcgatgtcgagtccgagccctggggttgggcgaggcggagaccttcttccggagtcgaggtcgagtccgagccctggggtcgggcgaggcagagatcgtcgtccgagtcgaggtcgagtccgagcccgggggtcgggcgagacggagatcgtcgtccgagtcgaggtcgagtccgagcccaggggtcgggcgaggcggagatcatcgtccgagttgaggtcgagtccgagcccaggggtcggggaggcggagattcctatggcgcccgaggctggacttggttgctgtcagcctcaccctggcgggtggcacagcagtcggagcagcgcaggcggcgctgttttcctgtcaggtcggttagtggaggggcaaagtgactgcggtcacttcggccttgtcgactggaaagcgcgcatcaggataaggtgtgaggagatccttgcattgaatgctcctgcgatccggtcggcttggcgaggcggtcttggcaaaggttgcttcttcgtgaagcctgcccgagcttggcctcgggcgagtcgaaggtgcatagtcaggttccgagttctcgggctgccgggtttgcgagagcagcccccgagcctctgcacagggcgagaggacggtcaagggcagactcggatttcttcatacgcccctgcgtcgcctttccgcaaggaggaggggggaaagcaccatgttgccctcggtgggcgtcgaacatggtgtctccagtga

SEQ ID NO: 38845 - DNA, 667 bp, Zea mays
  Peptide Sequence Number=SeqID_80624
cccgagcgaggtggtgactcctccgaggtcgatgtcgagtccgagccctggggttgggcgaggcggagaccttcttccggagtcgaggtcgagtccgagccctggggtcgggcgaggcagagatcgtcgtccgagtcgaggtcgagtccgagcccgggggtcgggcgagacggagatcgtcgtccgagtcgaggtcgagtccgagcccaggggtcgggcgaggcggagatcatcgtccgagttgaggtcgagtccgagcccaggggtcggggaggcggagattcctatggcgcccgaggctggacttggttgctgtcagcctcaccctggcgggtggcacagcagtcggagcagcgcaggcggcgctgttttcctgtcaggtcggttagtggaggggcaaagtgactgcggtcacttcggccttgtcgactggaaagcgcgcatcaggataaggtgtgaggagatccttgcattgaatgctcctgcgatccggtcggcttggcgaggcggtcttggcaaaggttgcttcttcgtgaagcctgcccgagcttggcctcgggcgagtcgaaggaaccctcggctgctctgcgatgagccgaagccagaggcagcggtgtcagcatggacagaggcggagttagctggagaagaaacttcgtcgacctag

SEQ ID NO: 38846 - DNA, 258 bp, Zea mays
  Peptide Sequence Number=SeqID_80625
atgggccaaaatggaagccgccagcccaacagcttggtggagctggtggtggtggtggaggttgttgttgttgttgtctctccgaccgcacttgccttatttcttggcggacctgacgtatttcctcgcgttcttgtcttatctgattttgcatctcggtcaccagatgtaattgtggacattactccacaactcatcacactcaatcaaaaatccaaatcaaacatgtatcataagaacaagcatccaaacacatag

SEQ ID NO: 38847 - DNA, 345 bp, Zea mays
  Peptide Sequence Number=SeqID_80626
atggcggtcaagagcatgtaccacaggatgaggcacgtggaggatgctgtgatgagttcgaaaggaaagattatcacgcaacaacaaacagaaatgaattccccaaatcctccacctgttgaaaccgatcaagtggttgctgcccaaagactggtaatacaacaattaacagacctggtgatcgagatgcaaaatcagataagacaagaacgcgaggaaatacgtcaggtccgccaagaaataaggcaagcgcggttggagagacaacaacaacaacaacctccaccaccaccaccagctccaccaagctacataaacatatatataaattactaccatttgtaa

SEQ ID NO: 38848 - DNA, 246 bp, Zea mays
  Peptide Sequence Number=SeqID_80627
atgaatcctccaaatcctccacctgttgaaatcaatcaagtggttgctgcccaaagactggtaatacaacaattaacagacctggtgaccgagatgcaaaatcagataagacaagaacgcgaggaaatacgtcaggtccgccaagaaataaggcaagcacggttggagagacaacaacaacaacaacctccaccaccaccaccagctccaccaagctacatagatataaattatgacgatttgtaa

SEQ ID NO: 38849 - DNA, 264 bp, Zea mays
  Peptide Sequence Number=SeqID_80628
atgaatcctccaaatcctccacctgttgaaatcgatcaagtggttgctgcccaaagactggtaatacaacaactaacagacctggtgaccgagatgcaaaatcagataagacaagaacgcgaggaaatacgtcaggtccgccaagaaataaggcaagcacggttggagagacaacaacaacaacaacctccaccaccaccaccagctccaccaagctacatagatataaattatgatgatttaaggaacaataaggtctattga

SEQ ID NO: 38850 - DNA, 333 bp, Zea mays
  Peptide Sequence Number=SeqID_80629
atgtcggtcgacttgtggtgtgcagttgtggagcacaggaacggtggtcgatggctgagagtggaccgtgttgcatgcgtggttgaggactggtgggacacgcgtctaatcgtggaggacgtgcacgaggtgcggtgctcacgacaggtttggtggtttgggcttcaaaaccacccggcgctacggatggcgggttttactgagtttgggcctcaaaactcggcggtggcggttccagagggaaccggtggcggcacgcggcatgatcgcggagggtgcgtcaaggcgaagcaactccgtgtgaaggacgtggccgtcggatcgaaaacctag

SEQ ID NO: 38851 - DNA, 168 bp, Zea mays
  Peptide Sequence Number=SeqID_80630
atggctgaagtgaaggtcatgcaggctcgtgctgataaaccgaaagcggtgaaggtggcagcggtggtttcgaagggagctggtggcggcacatggcatgatcgtggagggtgcgtcaaggcgaagcaactctgtgtgaaggacgtggtcgtcggatcgaaaacttag

SEQ ID NO: 38852 - DNA, 801 bp, Zea mays
  Peptide Sequence Number=SeqID_80631
atgcctaaaacctcactggcagttgaaaagaacagacctaatatagtgatctatgcagtttccatcacaatccatatagtgcttggatttatgctcattgcattgatctggcaatacgatttctctcccttcacggttcttatcattgccattctcaatgacggtactatcatgaccatctctaaggacagagttaagccatctccgttgcccgacagttggaagctgaaggagatctttgttacgggcatcgacaaattcggtgtgaggtcgatcagggacagcgagcataagatgatgtccgccctgtacctccaagtgagtatcgtgagccaggctctgatcttcgtcacccgttcccgtagctggtccttcgtggagcgccctggtctgctcctggtcaccgcgttcctgctcgctcaacttgttgcgaccttcctcgctgtctacgccaactggggcttcgccaggatcaagggtatcggctgggctggtgttgtctggctctacagcatcgtcttctacttccccctggacctgatcaagttcttcatccgcttcgtgctcagcggcagggcatgggacaacctcctcgagaacaagccgccggaggcttcctccaacacgctgttcaacgacaagagcagctaccgcgagctgtccgagatcgccgagcaggccaagagacgagctgagatcgcgaggctgagggagctcaacaccctcaagggccacgtggagtcggtggtcaagctcaagggcctggacatcgacaccatccagcataactacacggtgtga

SEQ ID NO: 38853 - DNA, 1170 bp, Zea mays
  Peptide Sequence Number=SeqID_80632
atgcctaaaacctcactggcagttgaaaagaacagacctaatatagtgatctatgcagtttccatcacaatccatatagtgcttggatttatgctcattgcattgatctggcaatacgatttctctcccttcacggttcttatcattgccattctcaatgacggtactatcatgaccatctctaaggacagagttaagccatctccgttgcccgacagttggaagctgaaggagatctttgttacgggcatcgacaaattcggtgtgaggtcgatcagggacagcgagcataagatgatgtccgccctgtacctccaagtgagtatcgtgagccaggctctgatcttcgtcacccgttcccgtagctggtccttcgtggagcgccctggtctgctcctggtcaccgcgttcctgctcgctcaacttgttgcgaccttcctcgctgtctacgccaactggggcttcgccaggatcaagggtatcggctgggctggtgttgtctggctctacagcatcgtcttctacttccccctggacctgatcaagttcttcatccgcttcgtgctcagcggcagggcatgggacaacctcctcgagaacaaggagcgtttgctaacatgttctcatgtgcacagaccggccgccttcaccaccaagaaggactacgggcggggagagagggaggcgcagtgggccaccgcgcaaaggacgctgcacgggctccagccgccggaggcttcctccaacacgctgttcaacgacaagagcagctaccgcgagctgtccgagatcgccgagcaggccaagagacgagctgagatcgcgaggctgagggagctcaacaccctcaagggccacgtggagtcggtggtcaagctcaagggcctggacatcgacaccatccagcataactacacgtcaaataactgggtacctcgacgtgaggagattaaggccaagataatcagtgaaattcactctgaggcagaaaagaatcttggattacgccctggagcagcatctgtcattaggaatggccgtagctcaccaggagggcccctttcacctggagggggatttccaatgaatcggtcaggaactggaggcatgatgtctgggatgcctggttcaaggaagatgcctggaatgcctgggttggacagtagatag

SEQ ID NO: 38854 - DNA, 352 bp, Zea mays
  Peptide Sequence Number=SeqID_80633
atggagcgaccacccgagaaaacagtgctaccacaagggtttatggacacctgttggaacttgctctcagcagcaaggaggccaacaagggtgaatggtggtgacaacagggacgaggccgtgctgcggggagacgtcaccgcaggccttcgtctggtgctgaatgaagcgaagggtgtccctgcccgttttgtcttcgtcaaaccagcgactgcagcgaaaggcgacgagcgaagggtggcgtctttgccttcgcccccaacattttgccctccgagggaccagttcgacaaagtcacctggtgcccaaaaacgtcgctagatggcggagacgctgccctcgctcgaagtg

SEQ ID NO: 38855 - DNA, 333 bp, Zea mays
  Peptide Sequence Number=SeqID_80634
atgaggacttcaaagccgactccagcgatttggatttggagctcacagaaggggctgactccagaaggtctttctccagagacgattagaatctacgagttggttggggtgccgccgccgccgcagggaacccctcgctggcgggtctggtcgagtccgtttggccctgtcccggcgtggtggccgctaaacttcatggagctcgaggacgtgtggatcctcggcacctcgcacctctccgcgtcctccacaccgtcaaacccgacaacgtcgtcgtctagctctgccggagcaggcaaggacgtgcatccccttaaatgttatgccgcttaa

SEQ ID NO: 38856 - DNA, 255 bp, Zea mays
  Peptide Sequence Number=SeqID_80635
atgaggacttcaaagccgactccagcgatttggatttggagctcacagaaggggctgactccagaaggtctttctccagagtttggccctgtcccggcgtggtggccgctaaacttcatggagctcgaggacgtgtggatcctcggcacctcgcacctctccgcgtcctccacaccgtcaaacccgacaacgtcgtcgtctagctctgccggagcaggcaaggacgtgcatccccttaaatgttatgccgcttaa

SEQ ID NO: 38857 - DNA, 261 bp, Zea mays
  Peptide Sequence Number=SeqID_80636
atggcggagaacgtggaagcagtcgggtcggcggagagcgaggaagcagacgcgtcggcggagaaacggcgggaatattggagcgtggattggggacaccgaggacgcgccgctcaaatgccgattgcgactggatcgacagcgagcggcgaggggatggaagagtcgtcggagaggggagcggagtcatcggggatggaagagtcggcggagattcccggagtcgtggcgaggttgggtttttgcggctatggaaactga

SEQ ID NO: 38858 - DNA, 261 bp, Zea mays
  Peptide Sequence Number=SeqID_80637
atggcggagaacgtggaagcagtcgggtcggcggagagcgaggaagcagacgcgtcggcggagaaacggcgggaatattggagcgtggattggggacaccgaggacgcgccgctcaaatgccgattgcgactggatcgacagcgagcggcgaggggatggaagagtcgtcggagaggggagcggagtcatcggggatggaagagtcggcggagattcccggagtcgtggcgaggttggggttttgcggctatggaaactga

SEQ ID NO: 38859 - DNA, 1473 bp, Zea mays
  Peptide Sequence Number=SeqID_80638
atgggcaccgaacatggtgtctccggtgagctgcaagcggggcccacgcgatctgaggcggctgttgaacccttcggggggccagccttcgaacctctgatcagtaaggaggctcggagcctggttccttcacggggaaggatccttttcgggcatccggcgcgccggttgcgtgacgcgtgggcctgggcctccacgctggcgtgtcgggggtcggagaagcgtgtccacttggcgtggttgcatgccgcctgcatggctgcccgcctctttcgcccgttggtttgggcaaaagtggaggcccccgcgccgcaggggaggaccttggagcgtgttggagaagactcagcccgtgacggttggaggcgcaagcagggagagtggcctttaaaaggagggcgatccctttcggaaggcgaccatgtcttctcccttccttatgcatcgcgtctttccaccttccaagcccccggatgggggatgcccgccgtcttttcgccttatcgttggaggaacgcaactccatgggagttggtacctttcagccatcgttcggcttcaaggattttcatcagccagcccggctgtcccccccgccggcggtcacccgagacggtgaacaccagctcctgggtggggagaagtaagtcgggctgcgatcttggtcccaccctcagcttcaaggatgttcatcatcctcgctggggtgggggccgggctgagccggcgctctacctcccgcgcgggttcgtgggtcaccctctcccgcggtgttcgaaggagagggcgctcactggccctgcgggcggcacggactttgacaacgcggggctgggcgacggtggacgtcgccacctccagcgtgtcgggtgcgttggcttggctcccagcggccccttctgccggggggcggctgccgcgccgtgcgcacgggaggaccgccccagatgtcgcgcgctgctagggcggcgttcgtgttctgggtggtcctgcctttgcaccgggatggcgccttcacgcggaggccggtgccccactcgtccgggaggatttgagtggggatctgccggagagccgatggcccctgccgtcggtgccgaggcggaggcggctcgagaagtccccgtcgccgacgggatcactgccaccatccgcgcttcgggcctccggtccttcgtacttgtcctcgcccctcgagcgtcgacggcgggcggcggcgtgccgctcgtcagtcttctgttgctccgcaggcccaccccaatcgagtggggttactcgcctgttgattatctgaaccgcttcaccaagcatgagtcgccccgtgtcaaggtgacgagtgagagcggagatcctcagaccgcgtcgccgtccgaggctaggtcggatctcgccgaaggtgtcgtcgatgccgagggtgctgctgcccccttccagcgccaagacccgagcctgcaggatcagagtgtcttgtag

SEQ ID NO: 38860 - DNA, 243 bp, Zea mays
  Peptide Sequence Number=SeqID_80639
atgggcgccgaacatggtgtctccggtgagctgcaagcggggcccacgcgatctaaggcggctgttgaacccttcggggggccagccttcgaacccctgatcagtaaggaggctcggagcctggttccttcacggggaaggatccttttcggagtatcccccttccctggcgaagcgtcgcccgctgctcctgccagaagcgccgcctgtccagccgcggagttaatgcgacggggcgagtag

SEQ ID NO: 38861 - DNA, 360 bp, Zea mays
  Peptide Sequence Number=SeqID_80640
atgaccagccatgatcgaaccttcctgttcatacaaatacctcaccgccacccccatgtgagcgatccgggacaccacggagacgcctcgtcggaaagcagtacggcgaggcagagcaacgctggtggtcgtggaaggatggagcaacagccccacgggggaccaagttatggttatcgaggtagagtgatgcttgcttttgaagataatgggtcctcaaaaattggagtccggtttgacaagcagatccctgatgctgaattactgcgcccagacttttctgctggtgaagaagtcgagaggctagctatgaccgagttaatagaggtactactgctttttgggacaaggaatccttag

SEQ ID NO: 38862 - DNA, 771 bp, Zea mays
  Peptide Sequence Number=SeqID_80641
atgaagggtgaggcgcgggcgcaacctggcgggtggggtctactcgtcagaggttcggaggggagagtgagagcagcgaccgcgcgcgtgcgcctgaagctaaacctcgccgcgcgcgcccgccgccacaacctcaccggcgccacgcctccaccccgcgcccaccccgccgcccctcgccgtgtgcccccgtcgctgcacccgccctgcctccagcagcagaacgaaagggatctctggtccccgagccctggctcgtccccttccgattccaatctggtctcgccgagcctggcgacgagggagagatggggaagaaccaggcgtacaaggcaatgcagtgggcgcggctggggtcctcgtccgacgcgctgggcaccgccgacgccctcgaagacggcatggtcggtccccttcctctcccctaggagatctctgtttcccatctgcacttccgagttccagatccctgatggtaatgatcttggtggtttgtgcgaggaagatcatggcttcttctgctctgctgaatcacttcgcccagacttttctgctggtgaagaagttgagaggctagctatgaccgagctaatagaggtcatttcagaagagaacaaatctggacctctgattgtgttacttaaggatgtagagaaatcattcattggagttaccgagtcactttcatcttcacggagcaaatttgaatcgcttccatctggtgttcttattataggatcccacactcagatggacagccgcaaagaaaag

SEQ ID NO: 38863 - DNA, 747 bp, Zea mays
  Peptide Sequence Number=SeqID_80642
agtagcataaaaatacgctgtcgctcacgccctaagggagtcgtcgcccgctgcacgcgcctctgggatccgacgctgctcgcgcctaggggaggccgtcgtcgcagctcgcccctcgggaagtccgtcgccgccgatcccatctcagccgtgttgcctgtgacggcgccacgtccgtccgccagccgtggaccccttctgtccacgtcggaaccgcccggccgcgcgtcgggcagagccgcgccctgttcgcgctggatcccgccagacccacgtgctcgcatgtcggccatcaccgtcgtggttcgcccgtgtcggatcagcccgcccacgcgcgttggttccgccgtcgcgcaaccattgcagctgccacatccccatggcaccctggggaaccgcgagatcaggcgcgcgcgaatgagatcagcagcggcagtaggtccctacatggttgccacgccggcagcagccgccgcgtgctcagccagcgatgcctgcgctggatccgccagcccgcatggccgccgtcacacgttcggccagcacccctcgtgctgggatctgcccgcccgcaaccgctgccccgctgaaactctaattcgtgggtggtctcggagcgtgcgcgacggtagacccccagccggtggccgcagctccatgacctcgacgcgcggtggcggaggttcctcgattcggaatagtggcgacggttcccaggtcggtggcggcggctccccgatcctgagg

SEQ ID NO: 38864 - DNA, 198 bp, Zea mays
  Peptide Sequence Number=SeqID_80643
atgggcgtcgcttgctcgtcgaccttggaagtgccgcctcctcagggcttcggagacgccgccgcttgcccgcacaagggcctcgtcatcgctcgccctctggatcggggagccgccgccaccgacctgggaaccgccgccactactccggatcgaggaacctccgccaccgcgtgtcgagttaaaatacaaccataa

SEQ ID NO: 38865 - DNA, 2010 bp, Zea mays
  Peptide Sequence Number=SeqID_80644
atgacacttgatgcactgggtagccgttctcatcttcgttggttgatggataagttggaccacaaggatatgactattcgccctggagttggcaaggaactaaagattacgaaagaaactgtccaccttatactaggccttccgaatgctggcagtggtaagccactaggaatcgatgaagcagtggcgggcaataacttgagggctgaacttggattgtccaaggatgagtttgttgttgcatctcttcaggaccgattgagaaaaggaaatgatgatgacctctctatcagatgcttctttttgatattgttcaatagattgttgttccccacttccagctggggcatatctaaccatgaagtgttattgacggaagaaatggaccgtttccatgaaatagactggtgccacttaatttttaacgacctatgtgaagctgcacaaaagtggcatacaagaagcacttctaatgtgtccacgacgatatatggatgctcagttgtcatactaccccccctcaataaacgtggcacaccccgcataaaattctttgataaaaacattatccaagctctgacaaaagctgataagaggaagccacgccaaagcggtgaaccttttggccattgtgagttccgaagcttttctgaaacttgctattctgctgtccctagtgtgcagtttcaatcagagcatagggacaggacaaacatttttgatgtccctcgtcccgatccttgtggtcatcatactattcatatccagctcccattgatcaaggatatgctttcaagtaagataaagcagctccaaccacgtgaccgaccaaaattcattgaaaagtttgttgagtatgattctgaagttggcaaagcgtgttccatcataaaaagtactcttaccaagatggttgtgaagcagtatgaactagcggacacatttgctgagttaattgatgatgtccttcgcgcggagtctggcgacccagacaatgttgcggaagcgcctcaaacagataaacctccagatatatctcaacatatgtcgtcagaggaacagatccatgagggtacccagaatacccaggacatgactatgccatattcacaaccgaatacggagttgacaggtacccagtttgaagaaatacacgaaaagcaacaacaaatgcgtcgtgcatttgagggctgccctgacgatttggagacgaacataaccccaaatgcggaaaaccagggaggagacattggtgcatctcatgacactccaacttacacgggccccctttttgatcagacacctagtggtcatgttgcagatggtgaggaaacacatagcttgcacactacacatgaccactctctgccacgtttaacagaattggactgtgctcggtcgcttcgtgattttttgtgctcctcaaaaactaacccaaacaggaagatcatagaattcgatgaatgtattggaaattgtctcgatatacaacaatcatttgcagatgggatgtgtctggagaatgtgttcatgcagtgtttcatcatgggttttcgccatgacaaaaacaataattgctcgtccatcaacaaagacagacttgtactggatgtcaatgttggtatttttgatcaaactgtccttgatgcttatctggacaagaccctgccccaactggacaattttggtgactacaaaacgattatggtccctattcttcatatgggacattggacattgtatgtcatcaatatccagtttcgatgtattcacattttagattcaaatccatatggtccggagttgggtgctggatctaatgactgtggcttttttgtcatgagatacatccagtactatgactatatggatggttctatcaagcaatttatacaacgagaaaactctggtgacctacgatctctggctctatattacctcaccttccatagcaagaacaagtgcctcccgttgcctccagaaattcaaagattcaagtttggacgctag

SEQ ID NO: 38866 - DNA, 891 bp, Zea mays
  Peptide Sequence Number=SeqID_80645
atgaggtgtcaggtcatccttgcattaaatgctcctgcgatatggtcggtcggcgtggcgatttggccaaggttgcttcttggcgaaggctgggcctcgggcgagccgaagctttgtgctgatgggggttaccagctgagattaggagcactggggcgtgatgagctcagaaaagatattgagcaattatgtatgcaacaagctgggcctggttatgtttctgttgcaactcgaatgcttactcagaggacagcagctttggaacaggatattgagaacctccagaaaaagttaggtggttgcttaagagagaatcaaaatttgcaagaggagcttgctgaagcttatcgaattaagagccagcttgctgagttacatggtgctgcactatcaaagctcagtctcgaagcacgtgaccttatcggggttggtgctggtgaggttcatggccctttacactccctctcagcatgctcgaccacaacgccgggcaggcttggaatccaggacaacaacattggcagtggtggtgtttggggcgacgatgcattgaagatcggagctcgggtcatggaggtgggtgggggctggggcattgttactcagggcagcagagttcaagttgatggtgtgtgttggagtggagcaccagtcaggaggctgggagcaagtgctgaccttggcggggacttgataccgaccttgctggggttgctgaggttgacgagggaggactggggtgtggagacgggctgggttgtcaatgagccaagttcaagcgagcctagaatttccttcgaggttggagtcaagctcaagcttggctcaaatgaagctaaaaaaggctcgagcttggcttggctaagcacaactgatgacatcctctgctaa

SEQ ID NO: 38867 - DNA, 681 bp, Zea mays
  Peptide Sequence Number=SeqID_80646
atgaggtgtcaggtcatccttgcattaaatgctcctgcgatatggtcggtcggcgtggcgatttggccaaggttgcttcttggcgaaggctgggcctcgggcgagccgaagctttgtgctgatgggggttaccagctgagattaggagcactggggcgtgatgagctcagaaaagatattgagcaattatgtatgcaacaagctgggcctggttatgtttctgttgcaactcgaatgcttactcagaggacagcagctttggaacaggatattgagaacctccagaaaaagttaggtggttgcttaagagagaatcaaaatttgcaagaggagcttgctgaagcttatcgaattaagagccagcttgctgagttacatggtgctgcactatcaaagggcagcagagttcaagttgatggtgtgtgttggagtggagcaccagtcaggaggctgggagcaagtgctgaccttggcggggacttgataccgaccttgctggggttgctgaggttgacgagggaggactggggtgtggagacgggctgggttgtcaatgagccaagttcaagcgagcctagaatttccttcgaggttggagtcaagctcaagcttggctcaaatgaagctaaaaaaggctcgagcttggcttggctaagcacaactgatgacatcctctgctaa

SEQ ID NO: 38868 - DNA, 243 bp, Zea mays
  Peptide Sequence Number=SeqID_80647
atggcctgttgtgacctttcgcttcgggccgcctgcctgttttcgtttggatcatctaagatttgccatggagttgggtttgtggtctggtgcatgaagtcggagctgctaagcctcggtgctaagctcgacaacgatgacttgagccaggctttagaactgctgacgaggaaagagaggtaccttgtgagcaggaagatcaagatccttgttctctcggataactttccaaatctgttgtga

SEQ ID NO: 38869 - DNA, 639 bp, Zea mays
  Peptide Sequence Number=SeqID_80648
atgacgtcgctatggggcgtttacttccttggaagcgtctatcgacatatccttgtccctttgcatagcgtgctatcttctgggggtgtaaaccctgaccttcgggtcaggcaacgacggctccatacgtcgcacccttccttggaggcgtcacttttgaggatcgtgccagccgacttgcttggtgatgtgtgctgcggcgaagtcggagctgctatgttgacgaggaagtcggagctgctaagcctcggtgctaagctcggcaacgatgacttgagccaggctatagggaccacacgacgaggtgtgagtggagtagagcaaaagcgttgtgggacatgtgttgatgtcccaatccaaccgaccgattttgttgttctagttggttcgagtgttgtgcggcgcgtgttgatgcccaatccaactgcccgttgttgcttgggcctttggcactccgggcgtctgtttgctcccggtgctcggcgctgtggctccaagctcgttggtgaagaatcggagctgccttgctgttggggcgaaggcatagacgccacccttcgctcgaggccttcgctgcagtcgctgttccgacagagacaaagcgggcagggacacccttcgcaggactcggcactttga

SEQ ID NO: 38870 - DNA, 588 bp, Zea mays
  Peptide Sequence Number=SeqID_80649
atgacgacgacgggggaacggcagattgggcagttgacgtgggcgcggagccaggtgtcgatacagggcgcatggaacgggtgcgcgcagcgcgggagcaggcgcaccagctccccatcgctgaactcgccgaggcacaccgcgcagtccccgccccggcccaccccgcggcggtactccactgcggctatgggacgcaatggtggcctcgtcgagccccactgtccggatgtaccacacgtggtgcaccacccctccaccgcctccgccctcctcctcgtcgccgaaccctccgtcgtcggcaccctcagcggcggccgcggcgaggcgccggcggcgtcgcaggatgaggcggcggcggcggtagaggaggagcgtggagagcgcgagcgagaggaagaggaaggcggagagcagggagatgatgaggaggaggcggacgggcgcgtggcggtcggcgaccggcgcgcgcgggatcaccgggatagggggcggcgggggcagggcgtactcggagcaggccttgccgccgccggggcagagggggaggcactcgagcggtgcttccgtgcagttgagggtgactga

SEQ ID NO: 38871 - DNA, 324 bp, Zea mays
  Peptide Sequence Number=SeqID_80650
atggagaagctcttggcgtctctggaggcgtcgttggaggaccacgtgggcctcctcgccgccgtggcgcaggctgacgtggtggtcacggccatgtccggggcgcacatctgcagccacaatctctccctgcagcataagctcttcgaggctatcaaggaggctgggaacatcaaggtcaaattgtttcttttggagaagcttattatctggtcagaaaaaataaaagaaaagttttcctccaatgggggaagttctaatttttttacactctatccagatatggaactattcttgagaaagagagcagtaagatcacagtaa

SEQ ID NO: 38872 - DNA, 1269 bp, Zea mays
  Peptide Sequence Number=SeqID_80651
atgcacctaacgctccaccaaagttgctgcccgtggcggaaacgggcgagcggaaccaccttccgggcgcacgtacactgcccctgcctcccccatgcccgcccgacgcaatccccaaccgccctccgcaatcccctaccgcccgccgtgatccccgccgccgcggcagtcgccctccgcaacctctgcctagataaggatagggggcgccctcctccctcgatcatccgcacttgtgtagccatcgcgccatctacaccggccaccgccacacggaggttcgcctctggccttgcggcttacgacctcgaggtgaccgagcccgcgggctccatgacgacaacggtgacgccggaggcaaagatggcggcgcagcagcaggcccccgcgtcgcgctcctcctcccgacctcgtcgtcgagtccctattcccgccggacctcgatatcttcgcaggccgctggaccccgccggggcgggtggttggatggccttcgtgcagtccgtcgtctccaacagtgacgacgaggaggacttcatcatcgactcccgccacggacaggctagctggctaggcggccgacggcgaacccctcccctgcccccgcagttcttccgcctgctggctggactcagttcggcccttaacaagagaacgaagaccatgccgatgcgtggcgtcgatttcaagtgcataagctccggggcgcacatccgcagccacaatctctccctgcagcataagctcgtcaaggctatcaaggatgctgggaacatcaaggatgtttttactcgggagatctggaggttggcgaacgcccggggagaaactattcaaggagaaactataatgtataaggagaaccggtgggacgcaaagcagctggtgggctccggcgggatgtcgtcctcgcactcggccaccgtcacagcactcgccgtcgccgttggcctgcaggaggggttcgccagctcgctatttgccaccgtcgccgtcttcgcctccgtggttggttcccctccccgctccccctcttaccatcatcgtaaaccttcggctttgccaactctagcttggctcctgccgaaggtcgagcgccgggccttgatttctacagcaaggagaatagataatagaaaagacttgacagagaacctgaagcagctacagtgcaggacactaatttttgttggtgagaattcccagttccatgctgaagttgtgcacatgactgcaaagcttgataggcgatatagcgctcttgtggag

SEQ ID NO: 38873 - DNA, 384 bp, Zea mays
  Peptide Sequence Number=SeqID_80652
atgggcctcgtggagtctaccaagatcacccttgataacagggatgaccttgtagtagacttgtccactcagttggtggagaaggatctagaagtggaacagatggccaaccacatacaagagctcgaggatcaggtggaagccagggagaacaccattgaggttctggaagaccagctccagaacacccagcagaagcttgaggaggccaaccagcacttgaacttacaccatcaagagatcgaggacatggaggcagaaggggccgatgaggacgtggatattgagggaggcgaggagccggagccctcatctagcatagatactgctggctcaggaggaccaccttcccctgagtctagcgttgcctcatttgctcgttag

SEQ ID NO: 38874 - DNA, 510 bp, Zea mays
  Peptide Sequence Number=SeqID_80653
atgtcgaaccaccccattgccttgttccccgctgagaaggaggacgacccgatgtggaaggatcgggttgagcacgccaaggatgtgtgggctccttaccttggacataccgctcacttgacgcttatgggcctcgtggagtctaccaagatcacccttgataacagggatgaccttgtagtagacttgtccactcagttggtggagaaggatctagaagtggaacagatggccaaccacatacaagagctcgaggatcaggtggaagccagggagaacaccattgaggttctggaagaccagctccagaacacccagcagaagcttgaggaggccaaccagcacttgaacttacaccatcaagagatcgaggacatggaggcagaaggggccgatgaggacgtggatattgagggaggcgaggagccggagccctcatctagcatagatactgctggctcaggaggaccaccttcccctgagtctagcgttgcctcatttgctcgttag

SEQ ID NO: 38875 - DNA, 243 bp, Zea mays
  Peptide Sequence Number=SeqID_80654
atggcccacagtgcctacaaccaaagacctttttcaaaacatggtgttgatgagctgagcttttcagctaaactaaacttcagctcagttgaccttcttcagctgcagctgagctttttagctgagctgaacttcagctgtgttgagctttctcaactccagttgaacttcaacttcaactggggtacaggcgagttcaaccggggtccaggcaggttcagccggggtccagggcaagtttaa

SEQ ID NO: 38876 - DNA, 585 bp, Zea mays
  Peptide Sequence Number=SeqID_80655
atggcggtcgcggtgtgcatggacacggttgtagcagacgcggtaaaacagagcacgacatggatttcaggaggccgtggttggagcggccgcggttacaggtgggttcatggtgagtggaggggttgcgagatttccagggctcttaggggcaattgcaagctccacatcaatggaggcgtagcggaggcggcgtggggaaggatgtcgtggggaggcgacaggcggagcaacgaaatggggagggaggccgcggggagatccagacgagcggaggcgtggaggaggcggtgtggggagggaggcgcggggaggcggcatggggagggagggttcaaagtagtagatctgagaagggcacttctcaaaatccacacaccaaaaagatatgaacaagtcttccacggaaggggccggttcaaccgcctggggaaggctgacagtcagtatgccagtcagactagcagactgcagaccccgattgaacctgcctggaccccggttgaacttgcctggacccccgttgaagttgaagttcaactggagttgagaaagctcaacatagctgaagttcagctcagctga

SEQ ID NO: 38877 - DNA, 1524 bp, Zea mays
  Peptide Sequence Number=SeqID_80656
atggcctggttccaccgagacaactgcggggctagggtttggattcgtgggtggagcccaaggctagatccagcaggggagggaggtgctccttcgtcctcgcccgccgtcctttcgtcgtcctcccccgccgagcgcttgctccgcgttcgtcattcttcactgcgtctcgcgaccgagacgccctcccctccccaacttgctcagcccttccgtgtggacgtcgttccccgtcgtcatcgcttgcatagcgcctgcttcgctgcgtcccgcgcccgagacaccttcccccaccccctccccgacctgttgcgccccctctgtgcccaagacgcaccaccccctccatcacagtcgtcctcgcttcctccctccagcgtcagcggtctgtctcactccatggcatggatctggatggtcctcgtagcggcagtcgtgctcctttgtcgtgttgtcctgtgtggccccgagcgtgcagttcatgcccctcacagcagcgataggagaagccggaacatgttgctgatcgtcccccaccctgacgacaagtccattacaccagaggtcctgcagcgggtcacaaccactgagatattgcagggcaatgacagtcttgggttgaaatatgccgctgcggcggagtgcgcgacaggtgaaggcagcagcgaggatgatggtgacgccgcgtggaaggcagccattgactccatcgtctccgttggattcagcgtcccttcgtccaacggcatggtgaaggcagcctctagcggcaacgacgaggtgaacaaccacgtggatctggaagagccgcgtgagaggaaactaaagggtcctggcttaagttgtatcagacccctcgttgccgcggcaacgtctggctccaacgtgaaggtcgtcatatcccttggggccccctggtcagtgcccatccgcccccctggcctcctatcgttggacccctcgtcgctgcagcaacgtctggctctagctattccagataatattaggatacactggccttatgtcactgtttctgagcaatttcttgcagccaaacaggctcctaaggatttccttcaaatcattgattttgacaaggatacaataatgaaggttcttaatcgagccattgaggttaaggcattgataaagtctggagacaagagcttccaaccgttcaaagggaaaacaatggtcatgatttttgccaagccatcaatgaggacccgtgtttcatttgagacaggattctttttacttggtgggcatgctatttatttgggtccagataatcaagagtttgatgctgccgccaaagagatcaccaaggcattaacaactgttggtatctctcatattattgacactactgcaatttctattgggaggagatatgggaggaccgatgagattggtgttccatttgttgtggcaatggattcaacaaacgtgacgatccgagagagggatgacaaggagcagatccgtgtggacatcaacgaggtggcgtccgtggtgaaatag

SEQ ID NO: 38878 - DNA, 399 bp, Zea mays
  Peptide Sequence Number=SeqID_80657
atgcaagaggttatggtgagaaattcagttgaagctaccacatccttgacaagtacaaaacaagggagacacatgagaactggattattcaatgtgtcaactgtgacaccatttccccggcaattttgtgtgatatttgatagtacatttgttacttgctgtagaaatcaagagtttgatgctgccgccaaagagatcaccaaggcattaacaactgttggtatctctcatattattgacactactgcaatttctattgggaggagatatgggaggaccgatgagattggtgttccatttgttgtggcaatggattcaacaaacgtgacgatccgagagagggatgacaaggagcagatccgtgtggacatcaacgaggtggcgtccgtggtgaagtag

SEQ ID NO: 38879 - DNA, 1074 bp, Zea mays
  Peptide Sequence Number=SeqID_80658
atggggagaggcaagccgggctgtgatctcggtcccgccctcagcttcaaggatgttcatcatccttgctggggcggagagcgaggcgggccggggctctacctcccgcgcgggccggctggccgcctcttcttccagcttctggtggaggcaaccatcctccagctctgcggaggaggcgtcctccagccatgtcggggaaggcgaactgttgctgcccagctaggatgcaacattccgccctcttcctcgctttcgtggcgaggatgggaacgaagacctgccggtgcgctttggagcggcccgctctttggctttgatggctggttcgcgtcccttgagcgggaacgcaaacgagagccttccggcggccgtgtctgtcctgggaccatggctgctgctgcagaggtcgctggcgagtcacccggaactcgtcgccccgcagactcgcctgttggttgtctgaaccgcttcaccaagcgtgagttgccccgcgcaaaggtggcgattgagcatggacggaggcagagttggctcgagaaagaagacttgatcgaccggagcctggccgggtcgtccgttagcgggaccgacgccggaattgatctgccggggccttgggtcgggctgatgtcctcggaggacagctggccgaggcctcggggtgatcagccgagccgcctgctcgggccggactctcggagaagaccctggcggcaatggcccgggcgtggtgatgacgtcgtccttcagaggggagatcctcagaccaggtcgccgtccgaggctaggtcggacctcgccgaagtcgagaaggcccgaagaaccgctttggcagaggagctttcgagcgtgaagacttgttcggtccgaggaatcacttatccgaatgtgagttacttatcgcagaaggtgatgagtgaggatccactttcgaagtggtcgaaaagcacgaaagacattctggcagaaaggatcttttttcgaggaaaaaattcagcgcagagggggttcccccttttagcccccgagggagggtcgggctttgccgaggcaaggttgacccttccttga

SEQ ID NO: 38880 - DNA, 885 bp, Zea mays
  Peptide Sequence Number=SeqID_80659
atggggagaggcaagccgggctgtgatctcggtcccgccctcagcttcaaggatgttcatcatccttgctggggcggagagcgaggcgggccggggctctacctcccgcgcgggccggctggccgcctcttcttccagcttctggtggaggcaaccatcctccagctctgcggaggaggcgtcctccagccatgtcggggaaggcgaactgttgctgcccagctaggatgcaacattccgccctcttcctcgctttcgtggcgaggatgggaacgaagacctgccggtgcgctttggagcggcccgctctttggctttgatggctggttcgcgtcccttgagcgggaacgcaaacgagagccttccggcggccgtgtctgtcctgggaccatggctgctgctgcagaggtcgctggcgagtcacccggaactcgtcgccccgcagactcgcctgttggttgtctgaaccgcttcaccaagcgtgagttgccccgcgcaaaggtggcgattgagcatggacggaggcagagttggctcgagaaagaagacttgatcgaccggagcctggccgggtcgtccgttagcgggaccgacgccggaattgatctgccggggccttgggtcgggctgatgtcctcggaggacagctggccgaggcctcggggtgatcagccgagccgcctgctcgggccggactctcggagaagaccctggcggcaatggcccgggcgtggtgatgacgtcgtccttcagaggggagatcctcagaccaggtcgccgtccgaggctaggtcggacctcgccgaaggtgtagccgacgcagagggtgctgctgctcccttcaaccgtcaagatccgagcctgcaggatcggattatcttgtag

SEQ ID NO: 38881 - DNA, 234 bp, Zea mays
  Peptide Sequence Number=SeqID_80660
atgccgcgccgcgccaggacctcgcccccgcacgaccggacggacccgaccgcagcagacgtcaggaacccaagcgccgccaagactccgacgaccacccttattccttgctgctgtgttgaaaaagtggttgatctagtagttaagaatcaagatctattccgatccgtggaagagtctcaagttttcaataagcaaggcaagtggacttctccctctgcatactctatttga

SEQ ID NO: 38882 - DNA, 171 bp, Zea mays
  Peptide Sequence Number=SeqID_80661
atggtgttggccccctgggtgaggtaccttagccaagaatacgtccccatgttaacgtgggctgccaacacctaccgctccccctcttgcccatatttcagagtatgcacagggagaagtccacttgccttgcttattgaaaacttgagactcttccacggatctgaatag

SEQ ID NO: 38883 - DNA, 747 bp, Zea mays
  Peptide Sequence Number=SeqID_80662
atggatatagtggtggagaaaggaaatgtcgatgttggcaatactgctgaaccatcgtatgaggttgtggctagaagtggttgttcagcacaattgtcaactaatgacaccgatgaacatgaattggagagcgaggatagtaaggtcagtgttggtaatgctgcaaaacaatcacacgatgttgtgggagtaggcattgactgtattttcaatcatgtaaaagtgtcaactgaagccgatcttgggccacaaccggatgtgatacacctgacatctttggatgttccaaatgaatcaagtcaaataagttctgatgcggatatggtaaagcagaaccaacaagatgctttggacacacttattagaatatcacaacataagaaaccaaagaaattgaatgtagctcgagttgtctctgaagattataagtgcaccccagaagatgttcagcttattgaattcattaaaacattaccggggaaacaagttgtggtgaacatcgacagcgcatggttaaatagaaatgatatggaatgtctttttcatggtgacatgcaattgtctgacaaagccctcaatgcatatatacactgtattaggggtgaagagcatttacttcatagagaaggtggaaaggtcttcttggagaacacattcatttccagtctgcttaagcgtgatggcgaccctaaggtgttcctttccaatgaatatagaaagattttcactggtacctggcagttctga

SEQ ID NO: 38884 - DNA, 762 bp, Zea mays
  Peptide Sequence Number=SeqID_80663
atggatatagtggtggagaaaggaaatgtcgatgttggcaatactgctgaaccatcgtatgaggttgtggctagaagtggttgttcagcacaattgtcaactaatgacaccgatgaacatgaattggagagcgaggatagtaaggtcagtgttggtaatgctgcaaaacaatcacacgatgttgtgggagtaggcattgactgtattttcaatcatgtaaaagtgtcaactgaagccgatcttgggccacaaccggatgtgatacacctgacatctttggatgttccaaatgaatcaagtcaaataagttctgatgcggatatggtaaagcagaaccaacaagatgctttggacacacttattagaatatcacaacataagaaaccaaagaaattgaatgtagctcgagttgtctctgaagattataagtgcaccccagaagatgttcagcttattgaatacattaaaacattaccggggaaacaagttgtgttgaacatcgacagcgcatggttaaatagaaatgatatggaatgtctttttcatggtgacatgcaattgtctgacaacgccctcaatgcatatatacactgtattaagggtgaagagcatttacttcatagagaaggtggaaaggtcttcttggagaacacattcatttccagtctgcttaagcgtgatggcgaccctaaggtgttccttccaatgaatatagaagattttcactggtacctggcagttctgaatgcaaaaaaaagtgag

SEQ ID NO: 38885 - DNA, 1395 bp, Zea mays
  Peptide Sequence Number=SeqID_80664
atggatatagtggtggagaaaggaaatgtcgatgttggcaatactgctgaaccatcgtatgaggttgtggctagaagtggttgttcagcacaattgtcaactaatgacaccgatgaacatgaattggagagcgaggatagtaaggtcagtgttggtaatgctgcaaaacaatcacacgatgttgtgggagtaggcattgactgtattttcaatcatgtaaaagtgtcaactgaagccgatcttgggccacaaccggatgtgatacacctgacatctttggatgttccaaatgaatcaagtcaaataagttctgatgcggatatggtaaagcagaaccaacaagatgctttggacacacttattagaatatcacaacataagaaaccaaagaaattgaatgtagctcgagttgtctctgaagattataagtgcaccccagaagatgttcagcttattgaatacattaaaacattaccggggaaacaagttgtgttgaacatcgacagcgcatggttaaatagaaatgatatggaatgtctttttcatggtgacatgcaattgtctgacaacgccctcaatgcatatatacactgtattaagggtgaagagcatttacttcatagagaaggtggaaaggtcttcttggagaacacattcatttccagtctgcttaagcgtgatggcgaccctaaggtgttccttccaatgaatatagaagattttcactggtacctggcagttctgaatgcaaaaaaaagtgagttaaaaggtctagaaagacagattaaacttgcagcaaaacataaagagctttaccaaggcaagtggtcgaaccttgatgttgcatcatggccagttatagagaagatcacaacacaaatgcaaaccgatggggtatcttgcgggctatggatgataaactatatggaatactggacaggatcctccctatctgataacgtaactcaggatgatataacaatgtttatgtttaagctacctgcaatattatgggactcgagattaaacacaaagaaaggacatcaaaatcttgaccacaatgtggatgaagatggagagagttcaagtgatgttcaaataatcgatactccattaacatcaacaaacgcgcaagaactgatgtttgtattatgcacatatatcatggggatagacaacgacaaatatttaaagaaacattggattcagagcactaaaccttatccaatttctttaagtcttcaaaaacttaaagatatattggatgtaaataagccgatggatacagattgttttaacatggctgttcggatgatcgcatgcaatgattccttgttcttgttggaagacaaataccactacatggatctacagtttctgtgtgagttcaagtaa

SEQ ID NO: 38886 - DNA, 390 bp, Zea mays
  Peptide Sequence Number=SeqID_80665
atgggacaaagccctgagtacgaagtgtactttcgcaagacttacccgacaaagttgcaagtcagtgaccaagtcttcataaccgcgaaggatgaaaagagcatcacaggaaactttgcagtaagatcccaccatgcttccaatgaaaatatattcttgcagaaagacccctctggttctatttctttgcacgatgaggtccccgacggcgcaccgaacaggggggcgagctccggcgagctagaccggccgtatgacgctacggcaggagctccaaagctacagggaccaaatcagatgcctaccgcacctttccccccaatcaatttcgctagaggtggtctatcaagctctgtccacggtgacagtgcgggtgatcaagtgaactaa

SEQ ID NO: 38887 - DNA, 237 bp, Zea mays
  Peptide Sequence Number=SeqID_80666
atggtgggatcttactgcaaagttccctgtgatgctcttttcatccttgggaacataaacaatcctaaggatggaagcttgatgatcgaggaccctttaactggtcacatgcctcgtcatgggaagcgacaaattttcattgcttttgctccaaggtggtatctaatgaagaaaaacaagaatgaagatacgggaggacttggtcctccacataggatctttttgtttgatagttag

SEQ ID NO: 38888 - DNA, 408 bp, Zea mays
  Peptide Sequence Number=SeqID_80667
atgtcttcatactgtagtaaggggtaccctgattcagggtaccgacagtggcccccgggcccgcctcaggggaggatacgggcctgcccccgtgttagagactgggctgtcggtttcggcgggggcgaagaggcgcactatcgcaggcggtggcgtgcttcttcacgcctcagttcgcctgctccgcacatagaaactggtgcaccagctgctggaggggcttggcccctagcctctacccgtgggggaaggatgatcaccagcctcgtgaaggtggacagcgggctgagccacggctccaacccacgtggttatgagattgatggttctggttatgattatggtgctggcgaagatgaagctgtggaaggagacttccaggagttccaagactacgacgagttctag

SEQ ID NO: 38889 - DNA, 393 bp, Zea mays
  Peptide Sequence Number=SeqID_80668
atggcatggtcactcgcggttgtttggtgtttctgtttgcaggcagtggacactttctctggtatcagaggatcaatgtccaattattatgatgactacgatgacattgacgggatggaggatgattatgatatggatgatcccattgatgacatggtagacgagcagcaagggattagggattctgatgtggaagataatgattatggacaaccaaatgataagatcccagatacttcatcagcagatgcaagaaaaggaagggacattcaaggaataccctgggagcagataaacataacccgtaaaaaatacagacagtccagattagaacagtacaaaaattatgagaatgtacctaactctggagaagaagctatgaaggtgagttaa

SEQ ID NO: 38890 - DNA, 348 bp, Zea mays
  Peptide Sequence Number=SeqID_80669
atgaacttagaagaaatggaacctgaacttcgaccttactacgagaggaagaagaaagagctcagggacggcggcgcttcgggctcgaggaccgtgacggcgacgcttgggctcggggactcggcgctcgggctcggggacggcgacgctcgggctcggggaaggggacggtggcgcactcggcgctcgggctcggggacggcggcgctcgggctcggggacggggacggcggcgctcgggctcgtgctcggggacggggacacgacggcaccctggcggcgcaactgtgtcagctcgggcgggaagagttagggttcccaccgaccaacaagccttttatattgtaa

SEQ ID NO: 38891 - DNA, 279 bp, Zea mays
  Peptide Sequence Number=SeqID_80670
atgaacttagaagaaatggaacctgaacttcgaccttactatgagaggaagaagaaagagctcggggacggcggcgcttcgggctcggggaccgtgacagcggcgcttgggctcggggactcggcgctcgggctcggggacggcggcgctcgggctcggggaaggggacgacgacgcttgggcttagggtctccggcgcactcggcgctcgggctcggggacggggagtttcctctgctcggggacggggacacgacggcagcctggcggcgcaactga

SEQ ID NO: 38892 - DNA, 279 bp, Zea mays
  Peptide Sequence Number=SeqID_80671
atggggaaacaggaaaggaggaacagtgggtgtcggccatgggagatgactaaaaaatctgggcgccattgttgggcttggcagccaagggagatgagaaggcagagaggggcttcggcttccatggggaagaagtgggcgagctcacgtgctgctgcattggagagggagggagctcggcggccagggagctcctgcgctggctgctgttgccgtgggaggactcctgcgcgaggtagaagacagggggagaagaaagtggcggccagggaaaagtga

SEQ ID NO: 38893 - DNA, 363 bp, Zea mays
  Peptide Sequence Number=SeqID_80672
atgagtgcgacgaggcgaacctcgcagctgcgctacttcatccatggaagggatcgagtgggggaaaaacagggggagatgcagggaggggcgtcacccatggggctgtttcctgctgctgccatggggaaacaggaaaggaggaacagtgggtgtcgtccatgggagatgactaaaaaaatctgggcgccattgttgggcttggcagccaagggagatgacaaggcagagaggggcttcggcttccatggggaagaagtgggcgagctcacgtgctgctgcattggagagggagggagctcggcggccagggagctcctgcgctggctgctgttgctgtgggaggactcctgcgcgaggtag

SEQ ID NO: 38894 - DNA, 429 bp, Zea mays
  Peptide Sequence Number=SeqID_80673
atggggtcctcgggttcctattccactaagtatctgatagcgcagaaaagcccctggggtaaccctaaatctaacccgcggtccttcccctattggaacaggacccgtggcggagaaaatggcggcagggcttaccggcgacgagatagctccggcaaggtggtcgatgacgtaggggaggttgcggcggtcacgtcggtgtgccgatcgtcgtcgaggatggccggagttggtcggccctcgtgggcaggcggggaagctcgtcggcggcgaggattccagcctaaccacagcgatatagcacaatccagtgagttggggagcttcaagggaggtcagggaggtcgtgggtgcaaggaatcgaagaatggttcacctggtggcccggtctacgagtggtggcgggcggccgaagtccgacgatggtga

SEQ ID NO: 38895 - DNA, 291 bp, Zea mays
  Peptide Sequence Number=SeqID_80674
atgaagattttgggccttacatcaagcgagctctacgccgcccgccagagccacccgaacgccagccatcgcggccagccattcccagagacccctagcctcacccgagcctttggacagtttccccgtggagccgtgaaggttctccaagcaaggatcgagacactacctcatcgaagcagtgggatcaccatcgccggacttctgtcgcccgccaccgctcgtagaccgggccaccaggtgaaccattcttcgattccttgcacccacgacctccctgacctcccgtga

SEQ ID NO: 38896 - DNA, 366 bp, Zea mays
  Peptide Sequence Number=SeqID_80675
gcatcctgctttagtcctcaacaagctaggacttttgttttagaacgtcacagaagatctgtcaaagtagatagaaggggagatgacaaaaagtatcttggcaaggttctagctaggggtgttgaatgcgatcttgcgttgctatctgttgagaatgaagagttctggagaggaacagaggcacttcattttggtcgtttgccatgccttcaggacgacgatgacactgatattattggttgttgtacgctgaaggttgataatgttacatgtaaagattcaataagatactttaacatcgtagagattgaagagcttgtgtacaaggcaattaagggtttctgtgctggtatctctctcatataa

SEQ ID NO: 38897 - DNA, 735 bp, Zea mays
  Peptide Sequence Number=SeqID_80676
gttttagctaggggtgttgaatgcgatcttgcgttgctatctgttgagaatgaagagttctggagaggaacagaggcacttcattttggtcgtttgccatgccttcaggattcagtaactgttgtgggatatcctcttggtggagacactatatctgtaacaaaaggcgttgtgtcgcgcattgaggtcactccatatgcacatggaacatcagatcttcttggcattcaaattgacgcagccataaatcctggaaacagtgggggaccagcctttaatgatcaaggggagtgcattggtgtggcatttcagaatcacatgcgttcatttttcattgtctttgagggtgcttttatgcttttgatcagggtgtacaggtcagatgaagctgaaaatattggatatgttattccaactacagttgtatcccatttcttaaatgactatcagaaaaatggaaagtacacaggatttccatgtttgggtgtcttacttcagaaattggaaaatccggcattgcgtgaaagcttaaaagtaccttcaagcgagggtgttcttgttcgtcgggtggaacctactgctccagcaagcagtgttttgcgaaagggagatgtaattgttagctttgatggtatcgcagtaggatgtgaagcaacagtaccatttcggtccacagaacggattgctttccgctatctcacaagccaaaaaagagtgaactgttgtattgcatag

SEQ ID NO: 38898 - DNA, 150 bp, Zea mays
  Peptide Sequence Number=SeqID_80677
atgaggcttgaattccggcttgggaagttggaggttgaccatatgaagacggtggatattgatacaaatgatagggataagggtgacccatcggactgcaagagatccgtgaaggtgttcaaatctggggaccaacccgacattgtgtga

SEQ ID NO: 38899 - DNA, 1563 bp, Zea mays
  Peptide Sequence Number=SeqID_80678
atggattcgcctatcaaggtggtttctcacctggggggcggacgaggaggaggagggggagagggagagggagagggagagggaggggccgcagcgatcgacgcggggaagtcggcacggaggccgctcagcctgtggcccgggatgtaccactccccggtgaccaacgcgctctgggaggcgcggtccagcatcttcgagcggatgatggacgctgggaacggcgcttcctctgccgagcagcggccgcagactgagctgctcgtcaagacgcccgcgcagagccggaccagcatcgtgtacaagttcgccaccgacgacatcctcagggagcagtaccgggacccctggaacgaggtgcgcatcggcaagctgctcgaggatcttgacgccctcgccggcaccatcgccgtcaaggtggagcatatggatgaggtgctccatacggaggtggagcatatggagcataaggaggtactccatacggaggtggagcatatggaggaggggcgtatggaggtatctggaaagaagcttgacttccgtccgcagcagtgggggaggggcataccggacgtaccgggaatgaggcttgaattccggcttgggaagttggaggttgaccatatgaagacggtggatattgatacaaatgatagggataagggtatggtggtgaacgcgcagaccggaaatagtgcccgggggagtgaggctgaaacatcggagcgacgatgtagtgaagaagactcatctaacggaagggttgtaggtgacccatcggactgcaagagatccgtgaagattgaagtgactcaggttgataaaggtattattggttcagttgaagcagatggcgataatcagtctgatcccattgcattgaccgctaacttcacctttgtcgcacgcgattctaagactggaaaatctgctccggttaaccgcctttcacctgaaaccgaaagagagaagcagctatttggagaaagtgaagcacgcgataagatgagaaaaaggaagagagaagaacagaagggaggactcgaaaatgggatacataggctccgtgccgaggccgagaggctggacgtgttgctcgcggagggccgtgttttctctgacctgcctgctttggccgatagagatagcatcttgctgaaggatacccgcctggagaattctcttgtctgccagccccaacaacggaacttgcatggtcgaattttcggtggtttcctgatgcaccgagcatttgagcttgccttctcgactgcgtatgcttttgttgggcagagaccttgtttccttgaagtcgatcatgttgacttcttgaaaccacttgacaatccagagcagcctctggtcaacgtcgaagttgttgctcatgtaacaagacctgagctccggaaaagtgaggtctccaacaccttccatttcaccttcacggtctgtagtgacacgctgaagaacgggttgaagattcgcaatgttgtcccctcgaccgaagaagaggcgcggcggatattggagcgcatggaggcagagggtttatgcaactaa

SEQ ID NO: 38900 - DNA, 240 bp, Zea mays
  Peptide Sequence Number=SeqID_80679
atggacgagctcgaggaggtgctgagcagggggaactcgcggctggggaagcagtggccaaggaagagcgccatgggagggaactgggcgtcgcggctggagatggagctcggtcggacggctgccatgggcagggaatacggcagggcgcgccccgagcagagggatgagcgcacaggagctttggctgctagcaggggagggcgcggcgggccagggaagagcagccggcgcgcgtag

SEQ ID NO: 38901 - DNA, 252 bp, Zea mays
  Peptide Sequence Number=SeqID_80680
atgaaatgctacgagcgcgacgcaaaggcgagcaggacgcgaactgggcagagtcgagccagggagcttggaacagcggcgagggagctcggccggccggcagaggaaagcgcgcagggcgcggctgggggagcggagaagaagctgagcgccgccaggaagagggagcaggccgacaggggaccgagcaggggaagcctcggccaggcaaagggagcagtcgcgacgggctgtagaaggacgaatctctag

SEQ ID NO: 38902 - DNA, 609 bp, Zea mays
  Peptide Sequence Number=SeqID_80681
atgtcgactgcgagcagtttcgcgcgtacgacaacgcgacggaggagaactgaacagggagcttcgcgacagcacgcgcaggaacaacgaaatgctacacgcgcgatgcaaaggcgagcaggacgcggactgggcagagtcgagccagggagcttcgacgaacgcgaaggggctcaggcaggatcgacggcgcggctggagaaacaggagatgcgccagagaaaacaccagaggcgcgactatgagggagatggaggtgcagccgagcgcggcgacataggcagaggtgagctcgagggcgcgcagaacgccgagctcagcgcgcgcgcagacagagagcagagcaggggcgcggctggggctgaatccaagcgcggcaagaagaggggaggggaaaggggctccacagcttggagacgcagaggacgcgcgcgcacaggatttctacggcagggaaagacgatgggcgtgagcagagaggaagcggctgccatgggcgagcagcagcaaggcaagcagaggtcgggggcgagctcggcacggcgcgtgcgtaggagctccacggcttggtgcagggaggactccagagcacggcgagcagggagctag

SEQ ID NO: 38903 - DNA, 983 bp, Zea mays
  Peptide Sequence Number=SeqID_80682
cacgacaaactgaaacagggacgcggcaacatgggcttgacccagcgaacagcgacgcaaagagcaaagcgaggttgcaaccgggcgggctcggatacaagcacacgcagcgtatcaccgtgtccagcgcgcgcgttacggactcgatgtcgactgcgagcagtttcgcgcgtacgacaacgcgacggaggagaactgaacagggagcttcgcgacagcacgcgcaggaacaacgaaatgctacacgcgcgatgcaaaggcgagcaggacgcggactgggcagagtcgagccagggagcttcgacgaacgcgaaggggctcaggcaggatcgacggcgcggctggagaaacaggagatgcgccagagaaaacaccagaggcgcgactatgagggagatggaggtgcagccgagcgcggcgacataggcagaggtgagctcgagggcgcgcagaacgccgagctcagcgcgcgcgcagacagagagcagagcaggggcgcggctggggctgaatccaagcgcggcaagaagaggggaggggaaaggggctccacagcttggagacgcagaggacgcgcgcgcacaggatttctacggcagggaaagacgatgggcgtgagcagagaggaagcggctgccatgggcgagcagcagcaaggcaagcagagggcgctgggggatggagccgagaaggattgcgcgcagcagggagatgagtaccgcccgatagggagatggggaactcgcggctggggaagcagtggcccaaggaagagcgccatgggagggaactgggcgtcgcggctggagatggagctcggtcggacggctgccatgggcagggaatacggcagggcgcgccccgagcagagggatgagcgcacaggagctttggctgctagcaggggagggcgcggcggccagggaagagcagccggcgcgcgtaggggaggaactcagggagagagaagcagggtgcggtag

SEQ ID NO: 38904 - DNA, 885 bp, Zea mays
  Peptide Sequence Number=SeqID_80683
atggggagaggcaagtcgggctgtgatctcgatcccgccctcagcgtcgggggtgttcgtcatcctcgctggggcggggagcgaggcgagccggggctctacctcctgcgcgggtcggcgggccacctcttcttccagcttctggaggtggcaatcgccctccagctctgcggcggagacgtcctccagccatgccggggaaggcgaactgttgctgcccagctaggatgcaacattacgctctcttcctcgcattcgcggcgaggacggcagcgaggacctgccggtgcgcttgggagcggcccgctctttggctttaatagctggttcgcgtcccttgagcgggaacgcgaacgagagccctccggcggccgcgtccacccgggaccatggctgctgctgcagaggtcgctggcgggtctcccggtgttcgtcgccccgcaggctcgaggctgctcatacccgcggggacggaaccggagttccgtttgtaatggcactttgaatgccaactcgcatgttggttatctgaaccgcttcaccaagcgtgagtcgccccgtgtcaaggtgacgagtgaggccaggggtagcgatatcagcattaacaggggcagagttggctcaaaaatgaaacctggttggctggagcctaaccgggtcatccgttggcgggaccgacgctggggtcgaccagccgacgcctcgggtcgggctggcgcccttggtggaaggctggtcgaggccccggagcgaccgaccgagccgcctgctcgggccggactcccggagaaaaccctggctgtggcagaacctcccaagttattgggcccacatgcacctgtccttgtctcaaagactgctatgcatgtgcaccagataacttaa

SEQ ID NO: 38905 - DNA, 795 bp, Zea mays
  Peptide Sequence Number=SeqID_80684
atgtcttcgcgctcccttatgcgttgtgtctttccaccttccaagcccccggatgggggatacccgccgttttttcgcctcatcgttggaggaacgcaacttcgtgggagttggtacctttcagccatcgtttggcttcaaggattttcatcacacagcccagttgcacccctccgctggtggtcacccaagacggtgacctccagctcctggatggggagaggcaagtcgggctgtgatctcgatcccgccctcagcgtcgggggtgttcgtcatcctcgctggggcggggagcgaggcgagccggggctctacctcctgcgcgggtcggcgggccacctcttcttccagcttctggaggtggcaatcgccctccagctctgcggcggagacgtcctccagccatgccggggaaggcgaactgttgctgcccagctaggatgcaacattacgctctcttcctcgcattcgcggcgaggacggcagcgaggacctgccggtgcgcttgggagcggcccgctctttggctttaatagctggttcgcgtcccttgagcgggaacgcgaacgagagccctcccggcggccgcgtccacccgggaccatgactgctgctgcagaggtcgctggcgggtctcccgggtgttcgtcgccccgcaggctcgaggctgctcatacccgcggggacggaaccgggagttccgtttgtaatggcactttgaatgccaactcgcatgttggttatctgaaccgcttcaccaagcgtgagtcgccccgtgtcaaggtgacgagtgag

SEQ ID NO: 38906 - DNA, 300 bp, Zea mays
  Peptide Sequence Number=SeqID_80685
atgtcgacctgctttgctgattctccctccccaggcccacgaaagaatgaccttacgatttattgggcccttgggcctttcgtgaggtcttttactcttccagtggacccaagggatatctgtcccccacaagcccccgatctttgggttgattttgaggcaatcagcccaaagatcccaggtccagcttgcaggtattcattgcatgccctgcacggatgtgacagttttgaaaaatatactgataattcctgggcatccccccaatgggtgtgggcaagggacggtttggtacgctga

SEQ ID NO: 38907 - DNA, 459 bp, Zea mays
  Peptide Sequence Number=SeqID_80686
atggtttgtgccagatgcacgaggaacaatggacaatgtttacaggttcgggccgcttggaaatgcataacaccctacgtcctggcgagtattcattgcatgccctgcacggatgtgacagttttgaaaaatatactgataattcctgggcgtcctccccaatgggtgtggacaagggacggcttgacttacatccgggccatcgagcgctccgggctcgagggctcggatgagtcggagtactcctcggacgaggaggactcgtccgagggcggtggcggcgatggcgacgacgacgacgacgacgacgacggaggtggtggcggcaatgacggtgacggtggcgatgacggtgacagcggcggcaggggcggcaacggcggcagcaaggatggtgacggtggcagcagcaggggcagcaacaggggcggcagaggcagcaacagggccagtggctag

SEQ ID NO: 38908 - DNA, 1812 bp, Zea mays
  Peptide Sequence Number=SeqID_80687
atgtcgtcctcttcttcttcctccgacaccacgccgccggccgccgcctcgtctgaggagacgttgagtagcgtgatggtggaggagttgcgcgccggcgactccgttgattttggtgtgtcacggatgacgtcagcccgcgttgaagatatgcagcggttgggctactttggcggcggagttgctcgtgctccggggacggaggaagtccccgagccggaggtgatggacaaggatcgccaaggggcggcgcaaaaacgccaggcggctgtcaggattcacgaagctcggccgaaaaggccgcggggaactgcgaaggctgtggcttccggcggaggtaagccgccgctggcggcgaaggctggcgcctctgcacctagcaaggcgccggaggcaacggcgggcgccggaggctccaagtcagcgaaggtggtgcccccggccagcggagtggcgaaggcttcgaaggcggcccgagcgctgccgctggcgggcaagcgtgttgccgacttcggcaccgacattactgtggatgactatcttggtgggtcggacgagggccagcttgccatagttgcgcctgccgcggcgatcgcgacggctgcgcaagcgccgaaggcgaggggcgagatccttggcgccggaggcgaggtgccggccctcacgttggtcagggacgaggcgggcgcggcgacccgccggctgaagggagtgacggaggcgctgagtcaggcgacggaggcgctgagtcaggtggctgatttcaccagccgtactgcgtcgggggcccttacggcggctttgtctgccgaagtcgagagacttcggacgcaacatgctgacgctgtccgtgagaagtcggcctccgacagcaagtgccgcaatctgacagacaaggtggccgccctggagagggagaaagttgacctccggcgccaactggcggcggagaggagggaagccaacgaggccatcgccaaggaacaggctgcgcaggcggatgccaagctggcgcgggcggagggcaatcttgccaaggagctcgtggagcaactgcaagggcggctcaccgccctggagagccgcgcgaaggaggccgaggccgtgatgcgtgcggaggccgaacggacgcgcacacagcttatggatacatatcgtgagcttggtgcgcggaccggtgacttcgaggtgccggaccgagagcccgggcttcgctgtctgcagtgggcgcaggaggagctgctggaacttccaaccgttgtgggcgggttgatgtcgtacgcctccctgatcacctgcgagggggcgatgaacgcgctctcccgcgaagggtgccggcacttcgaggccttcgaccaggtggatgaagactttgagcgagacatctataaggtcgaagaccccgtagtgaaggagtccgccggggccctttacgaccggatgtggggtctgtacggtcgtgaggtggtcagtgagcgcgccgaggctgcgagggctcaggcgcagcgcggcgagcgggtggacgacttcggggctctggacagcgtgctgccagatctggggtcgaccctcgcggaggctgtgactggggtcgacctggagccaatcccggagaccgcagcgatcgcgacggctgcccccccatccgctgcgactggcgaaggcgaccctgatgcctccgcagccgctgtgccgagtgctgaaggttccgcggcggtggcggcggaaactgcggcggaggccgcggcggagcctttggcggagccaacggcgggggctcccgcagcgccagggccttcgcaggtggcgtag

SEQ ID NO: 38909 - DNA, 141 bp, Zea mays
  Peptide Sequence Number=SeqID_80688
atgcggcttcatacccttagagatgatgtggttttataccctcagaggtatgaagacagaggacctacacattgcattcctatgcatacattgagtgatatttgcaggtgcttgttactcatcaaggggagtgggaagtag

SEQ ID NO: 38910 - DNA, 183 bp, Zea mays
  Peptide Sequence Number=SeqID_80689
atgaagtcttatttgagttttgtcgtgacctatggtccgaccgtaccggtacaacttagcatcatgatgtggttttataccctcagaggtatgaagatagaggacctacacattgcattcctatgcatacatcgaagtgatatttgcaggtgcttgttgctcatcaaggggagtgggaagtag

SEQ ID NO: 38911 - DNA, 141 bp, Zea mays
  Peptide Sequence Number=SeqID_80690
atgcggcttcatacccttagagatgatgtggttttataccctcagatgtatgaagacagaggacctatacattgcattcttgtgcatacattgagtgatatttgcaggtgtttgttactcatcaaggggagtgggaagtag

SEQ ID NO: 38912 - DNA, 141 bp, Zea mays
  Peptide Sequence Number=SeqID_80691
atgtggcttcatacccttagagatgatgtggttttatactctcagaggtataaagacagaggacctacacattgcattcctatgcatacattgagtgatatttggaggtgtttgttactcatcaaggggagtgggaagtag

SEQ ID NO: 38913 - DNA, 486 bp, Zea mays
  Peptide Sequence Number=SeqID_80692
atggtgggcaaagtacaaatcaaggataaagagactaatgtattgtgtctaagtgctggaaacaggaaaaatcgaattggaattgtcttggctcgagcagccaagactctgctcagtctgggagcaccggacagtgtccgaattactgtgtacatgctaggagaaaacttgttagaatctctatttgttttatcatttaatcaccaaaaccctcaattagggttgattgcacttacagttctttgtgccgcctttgtccaacttggtgtggaatcacggatgcgcaatgccgagcggcgcaccgccgccggcatcgctgatgcacggagccgctcgtcgtccatggacatggcttcaggctttgaacaaggcaaacaactaacaactatattccagagcactcgaatccaatccaagtatccaacacctgtagagatgaacgggactgggccattggggactggggagaagatcgagatggactag

SEQ ID NO: 38914 - DNA, 315 bp, Zea mays
  Peptide Sequence Number=SeqID_80693
atgcctaagtgtgaaatggtggacaaagtacaaatcaaggataaagagactaatatattgtgtctaagtgctggaaacaggaaaaatcgaattggaattgtcttggctcgagcagccaagactttgctaagtctgggagcaccggactgtccggtggtgcaccagacagtgtcggtgcgccaggctggctcgagcgaactggccgctctcgggaattcaccagcgacgtacggctataattcaccggactgtccgaacttcaagtgtaagggcgagaggctccaagttgtggagattcctcgcaaacgggattga

SEQ ID NO: 38915 - DNA, 576 bp, Zea mays
  Peptide Sequence Number=SeqID_80694
atgaacgtatgtgagctcactcttgctgtctcacacccccccataggtcaagaacagctggaggagcgcaccaaggccgcgtcccaccaattcgcctcggagcgttccgagcttgagcaggagcgcgaggactacaaggaggacctccagaaggtgttttaccaggagcgggaggtgacccagaaggagaagaagctggctaagaaggatgagcacctggaccaaagggaggaggtcatcacggcgctgtcagaaaagctgaaggcctataatgtgatgttggagaaacaatgggacgagcagaccgcagctgaggcgagtctgcaaaagctgcagcgggagctcgatgaaagggccagcaacatcgctctcgccgaggagaacctcaaggcgaaggatgcctccctggagaagcaggtgacggatctcgcctggcaggagaaggacctcgccttcagtgaggagatgtgggaaaggcgggacaagttgctggctgatcatgagctcgaggtagaggaggagaagagactggaggagaaagagcggacactggaggagcgggtccgccggttctag

SEQ ID NO: 38916 - DNA, 525 bp, Zea mays
  Peptide Sequence Number=SeqID_80695
atgaacctggaggagcgcaccaaggccgcgtcccaccaattcgcctcggagcgttccgagcttgagcaggagcgcgaggactacaaggaggacctccagaaggtgttttaccaggagcgggaggtgacccagaaggagaagaagctggctaagaaggatgagcacctggaccaaagggaggaggtcatcacggcgctgtcagaaaagctgaaggcctataatgtgatgttggagaaacaatgggacgagcagaccgcagctgaggcgagtctgcaaaagctgcagcgggagctcgatgaaagggccagcaacatcgctctcgccgaggagaacctcaaggcgaaggatgcctccctggagaagcaggtgacggatctcgcctggcaggagaaggacctcgccttcagtgaggagatgtgggaaaggcgggacaagttgctggctgatcatgagctcgaggtagaggaggagaagagactggaggagaaagagcggacactggaggagcgggtccgccggttctag

SEQ ID NO: 38917 - DNA, 378 bp, Zea mays
  Peptide Sequence Number=SeqID_80696
atgggccggatcacacgtgggcctccatgctggacgaggccgcacggtgggatgacctcgtcacaggtcttcgtccgatgtcgtatggggcgaagggtgtccctgcccgttgtcttgtctccgttggaccaacgactacggcgaaggcctcgagcgaagggtggcgtcttcgccttcgccccaacagttacccggtccacgtgctccggcggggttacgaactccggcgagcgtgatcgcactgttccggtggggctggtccttagctcaagcttgggaaagcttcacggcctctcgaggaagctatctgagggctcggatcgagcggaggtgggcgagagtggtttggccacggtgggcaccctcgggcggctctga

SEQ ID NO: 38918 - DNA, 369 bp, Zea mays
  Peptide Sequence Number=SeqID_80697
atgcttgagccaaggaccagccccaccggaacagtgcgatcacgctcgccggagtgcgtaaccccaccacagcacgtggaccaggtgccgccgacgacctctgtcgcctgcgctcgtggccagagcagctccagccacctccgacgccgacccgcacaccgacgtgactgccgtgacctccccgacgtcaccgaccaccccaccggagctctactgccgccgattgcaaccttcgctgacggagagtacgtgatcatccctgagcaaggagttgatagggaaggagtccaggagccagcaccagagcctgccaccgaggatctccctgcagccccagctttggaaggcaagccccggttttatgcataa

SEQ ID NO: 38919 - DNA, 912 bp, Zea mays
  Peptide Sequence Number=SeqID_80698
atgacacatagctcgggccgtgaggctgcgccccgcatgaacgggagaggagtgaggaagcgatcttggcgagatccgctatggcctggtggcctaggagccgcgtggaaccgtcccgtgatctctggtgtagggggccttagcgatgaaggaggagatgacttggaagaggttcgtgaatgcgccgatgagagaggggtgaatctgccatggatcactgctataggagcgtgcggcttgtgcgacggacttgcggacgtcgtcggcgtaggcacagcgggtgggcacacggagggcaccttcgtggggagggaatggcaagtgcgtactagcgagaaggagtcagaggaggaggacgtgagtaccggatgctgggaagcggaggaagaggggcctcgatcagcaggtcatgtagaagatcttggtctgaatgacagcattacagagctcaaggatgaccccatacagaagaaattgatcgaaaaagcagaaaaagaagagaaacaaaagaatgttgaagaaaataatgttttcttgacatatgttaaatattttgagaattttcacctagacgatgtagaagcaaatgggttatgtggatttgagtatataattagtggcaacaaagagatatatggttgttttgctgatggccagatggcgagtcaagatcacatagacttttatgctatatgccttgattataatgacaagcttttcaggatgaaagctcacggatacagaatattcctacccacagcactacctttgtggtgtttgttcccatcgtgtatcggccacactgagtggtatattgcatcaacatggttcataagcaaatcgacattcgagatcctcataaatgggagcagcattcagacaaagatcaattccacgctagattttgcttaa

SEQ ID NO: 38920 - DNA, 531 bp, Zea mays
  Peptide Sequence Number=SeqID_80699
atgccaatccaaaccctagccgccgctgagtgccaggcctccgagaacaccaggtcatctcctccttcatcgctaaggcgccctacaccggagatcgcgggatggttctgcgcggctcctaggccaccaggccatagcggatctcgccaagatcgcttcctcactcctcttcctgaaggcgacaacgactgtgtggaggaggcatcgggggtgaggatggtccgcgctagaggctggacggtccgcgacttagagcagggctcaggtttccagcctgacgggccggacggtccgagcgtgtgcatgggcggcaaggaccagcgactaggccaccccttgccgcctgcccagccagcgccagcgcccccacccagcgaccccgccatcaccggtgaccagccccaaccccatcacaaggttggcgacaaggaagcggatgtcgccatcatcgaaactgatgggtccaaggcggggtcatcctcatcgcactcgtctcgactgctctgggagctaggcatccacgtctcctag

SEQ ID NO: 38921 - DNA, 927 bp, Zea mays
  Peptide Sequence Number=SeqID_80700
atggggggcacccgcgttgccttcgtcttgctgctgttggaggagcgcgacttcgtgggggttggtgccttcagccatcgctcggcttcaaggattttcatcatgcagcccggctgcattccctcaccaatggtcatccaggatgatgaccaccagttcagtggtggggagaagcaagccgggctgcagcctctgccccgccctcagcttcaaggatcttcatcatccacgctgggaaggagggcgaggcgagttggggcctacctccgcgtgggccgggtgcaactgtccgtcctccaccccaagcggcggttgtgccatgtgcgggccgaccacgtccaggtcctccctgcgctgtcggctgcacaacacgtcgtacgccgcgagggtggtactcgtgttctgggacagtcccgttctcgttctcgtggcaagaacgggagtgaggacctgccggtgcgctttggggcggctgccgctcgctggtgcggtgttagtgggcaggtggccgctgtcgtcggtgctgaggtggtggtcgccataggtgaggctgcttctgctgaagcggttgcccctgttgacgagaccgtcagtgccacctgtgctccgggccttcggctctttggctttaatggctggttctcatcccccgtgagggggcgtgaacgagggccttccagcggcagcgtttgccctggggctattgctgctgctgtcttgtcgtccgagacggaggtcgctgccgcgctgttggtgcagcggtcgccggcgagccacccggagtttgttgtcccgcaggccctctggtgtggaggttgttcatacccgcgggagtggaaccggagttctgtttgtaatggcaccctgagtatgagtgtttgttcattgtggctgtcgaggcctgaacatctgggtatttgggcgtga

SEQ ID NO: 38922 - DNA, 1020 bp, Zea mays
  Peptide Sequence Number=SeqID_80701
atggggggcacccgcgttgccttcgtcttgctgctgttggaggagcgcgacttcgtgggggttggtgccttcagccatcgctcggcttcaaggattttcatcatgcagcccggctgcattccctcaccaatggtcatccaggatgatgaccaccagttcagtggtggggagaagcaagccgggctgcagcctctgccccgccctcagcttcaaggatcttcatcatccacgctgggaaggagggcgaggcgagttggggcctacctccgcgtgggccgggtgcaactgtccgtcctccaccccaagcggcggttgtgccatgtgcgggccgaccacgtccaggtcctccctgcgctgtcggctgcacaacacgtcgtacgccgcgagggtggtactcgtgttctgggacagtcccgttctcgttctcgtggcaagaacgggagtgaggacctgccggtgcgctttggggcggctgccgctcgctggtgcggtgttagtgggcaggtggccgctgtcgtcggtgctgaggtggtggtcgccataggtgaggctgcttctgctgaagcggttgcccctgttgacgagaccgtcagtgccacctgtgctccgggccttcggctctttggctttaatggctggttctcatcccccgtgagggggcgtgaacgagggccttccagcggcagcgtttgccctggggctattgctgctgctgtcttgtcgtccgagacggaggtcgctgccgcgctgttggtgcagcggtcgccggcgagccacccggagtttgttgtcccgcaggccctctggtgtggaggttgttcatacccgcgggagtggaaccggagttctgtttgtaatggcaccctgagtatgagtgtttgttcattgtggctgtcgaggcctgaacatctggaggcttcgtcggctcgaaaagaggcttcgtcggctcgggagcacgtggcttccctggccgaggacgtgcagcggcgacgactggagcttggccaggtcgtccgctag

SEQ ID NO: 38923 - DNA, 1013 bp, Zea mays
  Peptide Sequence Number=SeqID_80702
atgaccattggtgagggaatgcagccgggctgcatgatgaaaatccttgaagccaagcgatggctgaagggcgccaacccccgcgaggtcgcgctcctccaacaacagcaagacgaaggcaacgcgggcggctctccccactcgcatcctcaagtgtcacgggcaaagtcttcaccgacgtgctccagggtcctccccctacgacacgggggctgggtcccacacgtcatgcaagctgacccgaaacagaagaagccaaaccaccgcacgcggagcatgcaaccgcccggtggttacaagcactcctccatcctcgtcgaaacccacggtcgaaagggcgaactgccatgcaggtggcatacaactgcaccgcggtggcgcacccctttggcttcgtcgcatccggcatggtggcccaggcccacgcgtcatgtaaccggcgcgccggttactacgtgcaagaaatcgcaccgccacctgcgccaatgtcgcgccttctcgactacggaactggtgccgcgactcaaggcagccctgcgcatgacccaacagcgccaatcgagcacaatgatcaagggtcagtcagccgcgggaggaggcgcgacggtcaatatggccaaaagtggaccggcaataatggcggcagcagacgagcggaagcagcggtcaaatcgcctggcaagcgacacctttggcaggcgaagcgggcgtcgtttcacctccgccatgatgaccgcgtcaaaaagggaccgggaaaggggatacttcgaaagggatccttctctgcgaaggaagcgggccccgagccctcctactgataaggggttcgaaggctggcccctcggaagggttcgacagccgcccgagagcactcgggctccgcgcccactactaatcaggggttcgaaggctggcccctcggaagggttcgacagccgccccagagcacgcagagtgagggatgactctgggtacgtccgttacatggccgaggctcgggctacgctcccgag

SEQ ID NO: 38924 - DNA, 591 bp, Zea mays
  Peptide Sequence Number=SeqID_80703
atggcaagcgacaccttttacaggcgaagcgggcgtcgtttcgcctccgccatgacgaccgcgtcaaataaggggttcgaaggctggcccctcggaagggttcgacagccaccccagagtactcaggctccgtgcccactactgatcaagggttcgaaggctggcccctcggaagggttcgacaaccgccccagagcacgcagagtgagggatgactctgggtacgtctgttacatggccgaggctcgggctacgctcccgagtcacttcgcccttccactgaccgatctgacaggaaaacagcgccgctcaccccactccgactgctgtgccagccacccgggcaaggctgacaacagcaagttcagcctcgggcgcgacaggatgctccgcctcgcccaaccttgggcctcggccttgggaggaggtctccgcctcacccgaccccaagactcgtcctcagcctcggtctcgggaggaatcacgtcctcgcccgatcccggcctcggcctcaggagaagtctccgcctcgcccgaccttgggctcggaccgaccgcgccacaggggatacatcattaccctacccctag

SEQ ID NO: 38925 - DNA, 306 bp, Zea mays
  Peptide Sequence Number=SeqID_80704
atgtcgacggtcgagaagggcgaggtgggcgcgcagcttttggtggccaacctccatgccggtcgagcagggaagggcagggctggacgagggcgagcggggcctgcatgccgaggcatagggacaggggaggctcgaccgcgcccaggctgcacggaaggagcggttagggcgcggctacgtagacgcgagcaggtcgataggggagagcgcgcccaggcggcggcggcgctcccagacgcgcgcgagggcaggggcaagggcgctcagctgtgcgcggcatgggccgtcgcggctgggagctag

SEQ ID NO: 38926 - DNA, 402 bp, Zea mays
  Peptide Sequence Number=SeqID_80705
atggcagcacgcagggaggctcagacggccctggacagctgcacaggaataggatcacaccggggtcaaggggtcgcgctagtaggggacctcgccggacactggcagtcatgcatccgccatggattcggccatgggtggctcggctcgacgaaagagaaaaagcagggtagggcgagatccagagaggggctgcgggcggccatggaagctgagagagatagagacgaggacgactgctccagggcttcacgatgtcgacggtcgagaagggcgaggtgggcgcgcgacttttggtggctaacctccatgccggttgagcagggaagggcagggctggacgagggcgagcggggcctgcatgccgaggcacagggacaggggaggctcgaccgcgcctag

SEQ ID NO: 38927 - DNA, 381 bp, Zea mays
  Peptide Sequence Number=SeqID_80706
atgacgaaggtcacggcttgccgaaggtggtcgattgagttcaccggaggttataaaggatgtaccttcatcatcataatgtatattaatggttctgagaccagacaaggaaaaccacagatggacatacagtggtcgatgccccctagaggacagattcttcctcctccacaaccaggtatgggatattggccgccaccaccatggggatatcctacacatccaatggggccttggggatgccccccatggccaacacagccacttccatcaccagcggattccggctctcatcaagtgactcctccccctcacgttgactttgcggacagatgtctcaattctagtggtggagctacgaacaacaatctgatgtcctga

SEQ ID NO: 38928 - DNA, 336 bp, Zea mays
  Peptide Sequence Number=SeqID_80707
atggcggagcttggcagcagggccagacaaataaatcagcttgatagcatccttgcagcggtgccttggactttggcgtttggtttcttgaattgcactttgttattcaaactgatatttgatgagttcacagtacgcattattccaagagatgctcctctactagaatctgttggaccacaaaagtgtcttgctttcagcacagatggtgcaaaatttgcaattggtggagaggattccggctctcatcaagtgactcctccccctcacgttgactttgcggacagatgtctcaattctagtggtggagctacgaacaacaatctgatgtcctga

SEQ ID NO: 38929 - DNA, 687 bp, Zea mays
  Peptide Sequence Number=SeqID_80708
atgtcgcgtcgtttctttgacaccccttccatctacacgcacgagcaccccaccgccactaccacaacagaaaagtttcagtctgcaccgcagttcttccagagaaggagaagcccagccgccactactgtcctccccagcgagcagtttcaaccgaacaagcgattagagctcgggcacaaattccatcgccttgggcgccccctcggcctctgcgttggcatcaaacttcttgatgggacccgcctctccttcttcttttcaaaatttccccaaaaaataacaaataaaaaacaagtgcaaatctgtggggcttggtaccttgttccgacctacatcgacaagatcgtgcgattcttgttgccaccgtcggacacaaatctaggcagggtagcaacggtggagaggagacctagggaggagcaggcgggcgggatcaagacagtgagcaagggtggggtggtggcgtcggtgatgtcgatcaagcttgatgtcctcgacacgctctacgccggcatggaggagccaggcttggtcaccggcgtcgatcttgggcacggtgaagcaaatctgtggggcttgaagcatgatgtcctcgacgcgctctgcgccggcacgaaggagccaagcttggtcgtcagcgtcggtcttgagcagacctggcgccaccactgccgcatcgcctag

SEQ ID NO: 38930 - DNA, 393 bp, Zea mays
  Peptide Sequence Number=SeqID_80709
atggtcgagcgcagaagagatgttcgggctgttggctcgaggctctcgagctcgtggaggaggagacactgtgctggtgcgacgatgagagctgccgcgttcgacttggtccctcgtgaccgcggcgagcctgagatgcgcggcggcgtcctgaggtcccagcatcctggtgctcctgcacggcttcggcccctaggcgatgcggcagtggtggcgccaggtctgctcaagaccgacgctgacgaccaagcttggctccttcgtgccggcgcagagcgcgtcgaggacatcatgcttctgtgcttcccggagcaactatggtggctcctgcagctcgcctaccaccggccgcaccatttcacgccggggttcatgctatgcgaccttgtctag

SEQ ID NO: 38931 - DNA, 396 bp, Zea mays
  Peptide Sequence Number=SeqID_80710
atgtcccagctgatgggcctggtggaggctaccaagatcaccctggataatagggaggaccttgtggtagacctgtccactgagctggtggagaaggacctccaggtggagcagatggccacccagattcaagagcttgaggagcaaggaggagcgagggagaacaccatcgaggttctcgaggatcagctcctgaacactcaacagcaacatgaggaagccaaccagcacctggatatgcatcaacaggaaatccaagacatggaggccgaaggggccgacgaggatgttgacatcgagggaggagaggagccggagcctgcatccagcttggacaccgctggctcagggagaccaccttcccccgagtccagtgttgtctcgtttgcccattag

SEQ ID NO: 38932 - DNA, 273 bp, Zea mays
  Peptide Sequence Number=SeqID_80711
atgccgaccatcatcgtctcggtggacctggaatgcagccgctgccgtgccaagatcgagaaggtgctcaacaggatccaagagaagggtgagttctgcatcgacgacatcgactttggacgagaagagcaacaaggtgaaggtgacggggctccttcgactcggacaagctcgccgacaagctgtgcttgcaaggcgtggcaagatcattcaagcaaatcgagattcgtgggagccgtccgcctcgctctcctgaaaactctcacaaaggaa

SEQ ID NO: 38933 - DNA, 1107 bp, Zea mays
  Peptide Sequence Number=SeqID_80712
gcggcaaaggaggaggcgcagccgcctggattagacccaagaacccgccgatctgcggtgaccagggcgaccggcgacatggatggcggtggccgaggagaggagtgggagggcccccccggctacgtgctctcgctccctgcggcggcgctgcccctgcccgtcgccgtctcctgcctggacgccaccgtccggcgcaaggggcgcagccatatccgccaccgtggccatccatcgggctggtgggccttcagtctccccgtccccgcgccggaggaggcaaaggggccggttcccccatcgtcgacggccaataatccgaccgaggagggccgttcctatcctcggtggcggattgtgtggaggaagcaagtgcccctcctccaccgagccacgctgaaaacctccacggcgtccgatttcccgcgatccactcccccatcgggctgctttccctccggggtcgcgatctcctccacggcgagatccacgctgctctccaaggaaggacgaggatttgctctaccccgcgatccactcccccaccgagctgctttcctaccgaggtcgcgaactcctcctatgcgagatccacgctgctctccatggaaggccggggacctactgtaccccgatgtggaaatctcctcctcggcgattcaagcaagtagcaacacgagaggaaagaatttggccgtgagtcgcgaccagggagctgtgcagatgtcgaccatcatcgtctcggtggacctggaatgcagccgctgtcgtgccaagatcgagaaggtgctcaacaggatccaagagaagggtgagttctgcatcgacgacatcgacttggacgagaagagcaacaaggtgaaggtcaccacattgctcctggtgggccctagaggttctggcaagagcacacttgtaaaccgaattactagggtctttgacaaggatgatgatccttttgcaccagatcgagcacagctccagaacataaaatctgaaatagctgatgtgtctgctaatcctcaagcatcaagagttgatcatgatgcgctgatttcagttgtagaaccacttctgtctgaccttccgtgcgtgaaaacgtcctga

SEQ ID NO: 38934 - DNA, 442 bp, Zea mays
  Peptide Sequence Number=SeqID_80713
atggtggtgatgcactgcactgcacttgaatacttgattgatggagtccgcccacccacatccttttggcgcggcaggcggcctgccaagatgctgctgcactgcagctgcagctgcagcgacgccgacgccccgaccgagcctgcacatgttgggccggacccggacccggacccggaccgggggagggcctgtacccctcctcggtttcttgccgtgccgaacgaccccaagtccccaacacggaacggaaccgtcaatccgctacgccacagcaacgaccaaccggagccgccgccgccgccgccgacggggacggggacagggaaaccaccaccaccaccaccggccatattaacagctgcgcgtgcacggtggagttctacttccgcccgcgattcgactcgactcgactgctcgttccgtctcgaccttcaggcgg

SEQ ID NO: 38935 - DNA, 1002 bp, Zea mays
  Peptide Sequence Number=SeqID_80714
atggtggtgatgcactgcactgcacttgaatacttgattgatggagtccgcccacccacatccttttggcgcggcaggcggcctgccaagatgctgctgcactgcagctgcagctgcagcgacgccgacgccccgaccgagcctgcacatgttgggccggacccggacccggacccggaccgggggagggcctgtacccctcctcggtttcttgccgtgccgaacgaccccaagtccccaacacggaacggaaccgtcaatccgctacgccacagcaacgaccaaccggagccgccgccgccgccgccgacggggacggggacagggaaaccaccaccaccaccaccggccatattaacagctgcgcgtgcacggtggagttctacttccgcccgcgattcgactcgactcgactgctcgttccgtctcgaccttcaggcggctgagctcccggatcatattgctattaccttgaaggagcaggtttcttcgaccaagattcctgtccgtctcaagagtggcagcccgctgtgctcagcctgtgaaaacttcacgggcaaagctgtcagttatatcagtgagaaacagacgcaagataaggtcatgggattccttcatgacgcttgctctcagtcattctcgtttgaacagaaggtgatcatcttgagcatgttttgggcacggctctttttctctggtgtgacaagtgacagcacatgtgtgttctgccaccacctgcttgatgaagttatgtccaaactgaaagatccggacgcggagtttgagataattcagattcttatcaaggagtgcaataagattgaaggccacgtccagcagtgcaagcgactggtcctgcaatacattcccctcatcctggtgaacggcgagaagttcctcgagaagaacgatgtttgcgcgctcgtacaggcttgtccagccacccataagaagactttcagctcagtcttgaagggagccttgttgctgagtgacgcttga

SEQ ID NO: 38936 - DNA, 438 bp, Zea mays
  Peptide Sequence Number=SeqID_80715
atggcagcggggtctaggaaagaagtgggagggttgatctgcacagtgggggctgtgaagggagcgggatgcacggcgatggcagtgagtgattctaacaaaaaagaaagaatcgggagatggcagtgggtttacctgcgggagcggggcgatcgtgcaggccggcggcgcgtcaaagacgatgagcgggaggttgaggtccgggtccccgcgaagtgcgacgcgacggtagtctccaaaggagggggggcgttgcggctcaagcgcggctgtgacaggagacggacgggggcgaaggtcgcagaggtcaccgcttccgccctcgtcgcagaggtcaccgcttccgccctcgtcggcaacgcggatcgtggcatcaccgccgcgggcgtccactcgcctctgggcacgggcggcggcggttggacgagggtcgagtga

SEQ ID NO: 38937 - DNA, 309 bp, Zea mays
  Peptide Sequence Number=SeqID_80716
atggcggcggggtctaggaaagaagtgggagggttgatctgcacagtgggggctgtgaagggagcgggatgcatggcgatggcatctcgaaaggagggggcgttgcggctcaagcgcggctgtgacgggagacggacgggggcgaaggtcgcagaggtcaccgcttccgccctcgtcgcagaggtcaccgcttccgccctcgtcggcaacgcggatcgtggcatcaccgccgcgggcgtccactcgcctctgggcatgggcggcgacggttggacgagggtcgagcgagagaggagggggttgcgatag

SEQ ID NO: 38938 - DNA, 588 bp, Zea mays
  Peptide Sequence Number=SeqID_80717
atgcagcccggctgcatccctcaccaatggtcatccaagatgatgaccactagcttcatggtggggagaagcaagccgagctgcggcctctgccccgccctcagcttcaaggatgttcatcatccgggctggggaggggggcgcaccgagtcggggttctacctcccgcatgggctggcaggccgcctcttccttcagcattcaggggagagggcgctcatcggccttgcggagggggcgaactttgacaacgcgagaccggtcggccacaagcatcgtcagctccagcgtgcctggctcgctggctcagcgggctctgtcacggcctccgacgctgcctcctgccgcttgatcctggcgtggccgtccgttcaccgcacgggcgactgttgcgccgtgcgcaccggggaatcgtccaagacgtcgtacgccacgtgggcggcgttcgtgttcttggattgtcttgtcctcactccgacacgacgcctccgtgcggagccgcccgaggcggaggtcgttgtcgctgctgatggagcggtcgccggcaagccacccagagtttgttatcccgcaggccctctggtgtag

SEQ ID NO: 38939 - DNA, 138 bp, Zea mays
  Peptide Sequence Number=SeqID_80718
atgcccttatcgaatgggatcgacaccggggacgcccgggatagctcggcggactttgctggtcatcaccaagccgcatggcgacgtggtcgagctccctgcgttgatgtctgctcaaggtggaagaaggatttctag

SEQ ID NO: 38940 - DNA, 222 bp, Zea mays
  Peptide Sequence Number=SeqID_80719
atggccttatcgaatgggatagacaccggggacgcccgggatagctcgtcggaccttgctggtcatcaccaagccgcatggcgacgtggtcgagcttcctgcgttgatgtctgctcaagcccctggatcgtgatcctgcggctcgggatggaatcgtttgccattaagtgcccaccgttgatcttggatcttgtggactggaatgcataccggttcaattga

SEQ ID NO: 38941 - DNA, 843 bp, Zea mays
  Peptide Sequence Number=SeqID_80720
atggccagagaccatgtcttcctccccacgacggactgggcagcagcgcagctcacctcccgacggcgaacacaccggagcagcatgcccccacccaagaagctcgaccacgtcgccatgcggcttggtaatgaccagcaaagtccgacgagctatcccgggcgtccccggtgtcgatcccaccccgcatgcatcacgatggtcccagaatcggtagcgcgcacaaagaagtgcaccgcccggggcgacgcggagggcgacgaagacgacacagcggcggtggatcttcttctccagccaggtaagccgagcggcggcctcgttcagcccgcaacggtgccatccgaccaggagcttcgaaccgccagggcgcttgccatctcgccagatccctgcagtgccaccgccgagcctccagcgcagccgtttacgaacggtcgacggcgcagaccggagttcacgcgccaccgcatgattctctctctctcccgattccccgagcgctcagaggattcgcaatgtgcttggatggccagggtgatgcggcgtcaacttcttatatactgcccgcagggaaggcctgctccaaccgtgcaagcttgcggatcccgagcgaattgcccagttttcctcgctgtttgttgccgtgaagatcgccacagagtttattacgctagaggggaaggagctgacacaggcgaccccacctggcagcggtacaagcgcagaccagcggctgcagcgaagacttcgagcgaagggtggcgtctttgccttcgccccaacatttgccctccgagggaccagttcgacaaagtcacctggtgccgaagacgtcgctag

SEQ ID NO: 38942 - DNA, 1641 bp, Zea mays
  Peptide Sequence Number=SeqID_80721
atggaggtagttgagttggttccttgcgcccgcaacaagtggggcaattggcatgaattttggttctacgtcgcggagggtaccgtcgaagaccatccggggctccccgtgtccgagatgtgctcgcatttttactcagcatacccgccttttgaagtggcggaggaggatgcggacgaaggggcccttcggcgcgccgccagtctgagcagtgggcgcgacttggttgaggaatttgtggcgtacggggtatggcctttggcgcatggctgggcgttgggcgaagtgtgccctcgccagatgccttcccatggtgggaagctggtgcgaagtcctgtcttcgcgctggatctgcaaagccgcgatccggccgcctttgtgcgtgaggcggaggatggggcggtgcggatcgttggtcggtacgtgccgaggacagagggccagcgtagctgggatatccgcgggtcgaatgaccgtttgaacagggtttttgaattgaatcgactgccgtatggcggttatcccggccaagacgatgtggatcgtcgcgggaagaagccggtggtagagtctggagacgaccccgcgccggcggccgccccgtcctctaagaagaggaaactaggtactgcgatgggaggacttggggtttccgatggttttgctagagaattgatgaggacatgcgcggccccggggggaaggatgacttcgcccgagctccgggagtcttcggcgcgaatgttgagggttaccgggggttggtggcctaggaatgttcctatcccccgcgcggccggcgaagacttttttacatctcgcatggttcgtgaatggaaagtgtttccttacgggcggaatattgctactgttgtgtcggcagtgatggacaaggatcgccagggagctgcacagaagcaccaggcggtcgtcaggcttcatgaagccaggccgaagaggcagcggggggctgcgaaggctgctgcccccggcggaggccagccgccgctggcggcgaagtcggccgtccctgcatccagcagggcgccggaggctgcgactgccgccggtggttttaagtctgggaaggctgcaccgacgtccagcagggtgccggaggccgcgaaggcgggccgaggtttgccgccgccgggcaagcgcgttgccgacttcgccaccgacattagtgtggaggactatcttgttgggtcggacgaaggccaacttgtcgttgttccgcctgctgcggcgactgcggcgactgcggtgactgccgtagtgccaaaggcgaagggcggtgctcttagtgctggcggtgagatgccggcactcactgctgtgagggacgaggcgggagctgtgtcccgccggctgaaggagatgaaggaggcgctaagtcaggcggctgacttcgcagaccgcgcggcgtcgggggccctgacggcagttgtgtctgccgaagtcgagagacttcggacgcaacatgctgacgccgtccgggagaagtcggccgccgacagcagtgccgcaagctggcggacaaggtggccacgctggagggggagaagactgacctccatgttggggcgaaggcaagacgccacccttcgctcgaagtcttcgctgcaaccgctggtctaa

SEQ ID NO: 38943 - DNA, 495 bp, Zea mays
  Peptide Sequence Number=SeqID_80722
atggcgacgggttacaggttgcgtgccatggatctatacgagatcctcctcctcgtgacatggctggctcacagggcgatgacgtcctcaatctatcgcatagccaggttactgattttacataatgcttcctgccatatggagtggtttgtttggttaaagccagttagtgctaggcagggcatattatcaggcggggtcgagattggcattgtctccactgtcatatcgtcgagcaaagactggtccaggagcgcagaaacatgcttcaagaaaaagtgtttattcttgttcgattacttcgattctaggactgtgattttagttcgattacttcgattctgggactaccaaaatacagataggggttacactgtttacttcgattctaggactaccaaatgtctctactgtttgaaggcggtgtttattcttgtttattatttactagatgtgtggcggaactgcccgaattattccaacttaagtgcctaa

SEQ ID NO: 38944 - DNA, 1386 bp, Zea mays
  Peptide Sequence Number=SeqID_80723
atggcgtccgcgacgggggtttcctcctcggagatggcggtggaccacgcgacggggccgggcgccgtggagaagccgcggttcgatgctctgacgccgaatgagatgagcggcgggaggccccaattccggaaagtgcccatgccgcagcaccggttcgcgccgctcaagcgatgctggatggaaatctacaaacccgtatacgagcacatgaagatcgatatacgcatgaacctcaaggcaatcctattaaagaatttctccagttcacagacacttccaatccagataagccctctactccacggtgctccaaacaatcagcctctgataatggagtttagcgtgcttgagtttgacgacttaggtatttcccctatatcaaatttaagcatgcttgattacaatgactaccacagaaccatagattgtatacttcagatcgccgtcaagaagctcaacccggagagcgtccagggcctgcagagtggcaggataacatggagaacttcaaccctttcggtcaccatagaatgttctgggctcttcagtactcctgtactaacaacggtacgcattggtgccagcttcactataccttggttttattacattgatcatttgggttgggcaggcggggtcgagatcggcattgtctccactgtcatatcgtcgagcaaagactggtccaggagcgcagaaacatgcttcaagaaaaagtgtttattcttgttcgattacttcgattctaggactgtgattttagttcgattacttcgattctgggattaccaaaatacagataggggttacactgtttacttcgattctaggactgccaaatgtctctactgtttgaaggcggtgtttattcttgtttattatttactagatgtctctgtatgcttgattatgcaagtagattattcagcttatgtccataattcttcaagtctgcatatgactgcatcattcttcagccttctagactccttccacttctgccccctcggatacaaggacttcccagacttaggtaacacaacctcttctcttctttcaacatgttgtcatgtggtgctcgagttatggtacaactggagttgggtgaaagcgacatggagccttgaagtggaggtctctgacaataactgtgtctatcggaacgaggtgcaccacactgctggggaacgaacccaggtcttgcaggatgtagcttctgatccaactcttcccagaaccaagactgtccgctgcaatctctgtgggcatggagaggttgttttcttccagcaaagtgatatttgtatttcagtagttgcaattgatggccgcggcaagaggggaggaggggatgaccctgttctttgtgtgctgcagccctga

SEQ ID NO: 38945 - DNA, 375 bp, Zea mays
  Peptide Sequence Number=SeqID_80724
atgcgccggcagatgctcgaggcggccttggtgacggttgacctcggcacatgggggcgcgacctcgccctgtcggacggccatcagcagtggcaccgggccgctatctccaagtgcgagcatggtacatatcccgcgggcgacaaacttaaactctacggtagtggcggtaaggaaggcactcccctcgtcatcggcaagggcgcactattcaacgccaccacattccgctatcggccgccacgagggcgcctccgatgctatcaggaggaatcacactcggcggctctggcgtccacatcttcatacacggttgaccccaactggtacaacgacaccggtgctaccgtccacatcaccagcgatctcgactaa

SEQ ID NO: 38946 - DNA, 939 bp, Zea mays
  Peptide Sequence Number=SeqID_80725
atggcttctactgccaatttcgcggcgtcatcctggcaaccggcgtccccatctccatggactgtgccgtatgtcaccttcgtcacgccgtcctggcaaccgacgtccccatctctatgggcagcgtcgtatgccacctttgtcacgccatcctggcaaccggcgtccccatctctatgggcaacatcgcctgtcaattttatcaccacatcctggacgccggcgtgcccatctccagggacaacgccaaattttgtcacatcttcgttgacgacgtctccgtccccatgggcgaccccactaggggcagccacaactcagcaatcaccagctccatcaatgggggacttgtggaccaacataagggctgatctcgcaaagatgcaagccacactccagaaggttgagcaagggctgctgcaaatcaaggtagcagtgcaacatgagcaccaccacctggcgttgtccgcacgcctccagacgtcggcggctgtgggcatacaagctgctgctcgtggcttccttgcacgacggagagtgcgggagatgcgccggcagatgctcgaggcggccttggtgacggttgacctcggcacacgggggcgcgacctcgccctgtcggacggccatcagcagtggcaccgggccgctatctccaagtgcgagcatggtacatatcccacgggcgacaaacttaaactctacggtagcggcagtaaggaaggcactcccctcgtcatcggcaagggcgcactattcagcgccaccacattccgctaccggccgccacgagggcgcctccgatggttattgttgcgacctattccaggtgcccgtccatatgctcccctttcgtctagatggcgtccatgggatccaggtggctgcacacgtgcaagtccaatgcgcggagggtgtccgccttatcttatggggtga

SEQ ID NO: 38947 - DNA, 642 bp, Zea mays
  Peptide Sequence Number=SeqID_80726
atgccgccggaggccgcctcgtcaacaggccacatcgtcgcccgcatccggcgtccgctgcccgcggagcggccgcacgtgaggcgatgcaccaggctgctgtgctcggcgttcctcaccgtgctcctcgtcgccggtgtggtcctctttgtcgtgtacctcgctgtccgcccgcatcggccgcggttccacgtgacggcattctccgcgtcgggcatcggcccgtcgtccggcgggaccgtgtcgctgtcggggcagctctccatccgcaacccgaaccgggacatcgccttcttctacgaccggttctacctctcggtggagtaccgcggcgccgacgtggtgaagggccaggccctgacggccgcgccgctgtaccagccacccaagacgacgtcggccctggcgttccagggcgtggcggcgtcggcggccagcggggacatggcgcgggacgcagtggaggccggcggcagggtggagctgacggtgaaggtgcggtccaggatccgcgcgcgcctggcgttctggggcaaccggcactggcacccgctccacgtcggctgcgaggtggccgtcggacccgacggccagttgctggccgagtacatgcagaaacgctgcagcatagacttcttctag

SEQ ID NO: 38948 - DNA, 675 bp, Zea mays
  Peptide Sequence Number=SeqID_80727
atggaggaaaacagacagtgcgtccatgtccggagtttgaggatttcaggcgggaaagagaaacaaaatgcccgcttaccgaagatccgggagaaggccttgaggcccttgaagatccctttcaccttgcacgccattggcgatcgacgccgggccgcgcacgacgtcgtcccgctgagaacacaaggagacggaaagcaggcgagcacggtaagcgaccgagggcaggcagcgatcagcgaagcgttcatctgctggccgcatgcctcgagagagttgctgtcggggcagctctccatccgcaacccgaaccgggacatcgccttcttctacgaccggttctacctctcggtggagtaccgcggcgccgacgtggtgaagggccaggccctgacggccgcgccgctgtaccagccacccaagacgacgtcggccctggcgttccagggcgtggcggcgtcggcggccagcggggacatggcgcgggacgcagtggaggccggcagcagggtggagctgacggtgaaggtgcggtccaggatccgcgcgcgcctggcgttctggggcaaccggcactggcacccgctccacgtcggctgcgaggtggccgtcggactcgacggccagttgctggccgagtacacgcagaaacgctgcagcatagacttcttctag

SEQ ID NO: 38949 - DNA, 540 bp, Zea mays
  Peptide Sequence Number=SeqID_80728
atggtgagtacttgggtatctcgtctgaggatgaactcaaacttcgtggccttcgcatcaaggacaaccatatctagaagcaaagagaagcatcatggacaaccatatctagaagcaaagataaatcctcacagccaaaaggcagcgaacaaacatgcagaccagaataatcatggaagaggaagaaaggagaaggcccttgaacaggaacttgctgaaatgcagaatgaaaccccctcatcgtcaacccttgatgctgtcttcaatcagaacaattttcaattcgagaggccacctcaggcacaagccgcattccaggggctcaaccctcatgtggaactatatcacttcgagaaatatgctcggtccgaagagctacattaccgcaagcggcaaagcctcggtggtgcaccaagtggtagaggccgagatagaggtccacaacaacccaagaagttttattgcgtcttccacgatgaagactcaaaccaccccaccagggattgcccagagacaagaaaccaaagtgagtatggctag

SEQ ID NO: 38950 - DNA, 519 bp, Zea mays
  Peptide Sequence Number=SeqID_80729
atgagggggtttcattctgcatttcagcaagttcctgttcaaggaccttctcctttcttcctcttccatgattattctaatatggttgtccttgatgcgaaggccacgaagtttgagttcatcctcagacgagatacccaagtcctcaccatcttgaaagttgtctttgtcctcttaaattgtgtggggtcccatgggtgggaactcaggtggtgcgtctctgaggggaaggtcttcaatgtggacctagatgatggcatggcagagtctgggccccactacattttggcctggccatcatttgcacatcgcggcctcgaccctgcggagtcgtgccttcctgatcctgtgaagacttggacctcgcgatctaggagagttagactaatcgaggggacgtttggccttcgcaccaacaagtggaaagatgtgtcagatgatgccaagaatcaaatggggaataagctattaacaaggttcattctgcctcgtggttcagaagaactcgtgaaggaatag

SEQ ID NO: 38951 - DNA, 156 bp, Zea mays
  Peptide Sequence Number=SeqID_80730
atgacgaaggtgatgcttgccgaaggtattcaaagctcaagaaatggaagaaccaccttggcacagaagcaacagaaatctgctacttcctcacctaaaaacaacgaagggataaaccctgagtatggaattactcagcaagtcttacccgactaa

SEQ ID NO: 38952 - DNA, 324 bp, Zea mays
  Peptide Sequence Number=SeqID_80731
atgaagccgtggaggaagacttctaggagttccaagagtacgacgagttttaggcgtgggttagcggcaaccctcagtcggctgcctgtgaaggccgcgtgtatctacgtttcgttttcgcactttgattactatgtggatgtatcaaacattatgaggaatctccacaaattagagtctctcacgccttacacaaatgatcacaatcaaaacaagagaaccaccttggcacagaagcagcagaaatctgctacttcctcacctaaaaacaatgaagggataaaccctgagtatggaattactcagcaagtcttacccgactaa

SEQ ID NO: 38953 - DNA, 651 bp, Zea mays
  Peptide Sequence Number=SeqID_80732
atgggtggatccgcggctgaccgagatcgtcggcgagaaattgtggcggagttggccgccaatcgcgagtggcacggcctcggacgcccttccccaagttgggtgaaggccccggacaccaccgacggtatatacggtccacgaccgcgcacgtgggtgcgccatgcacggaggtcattgacgattacagggggcgtgggcagcggaagaaccgaccgattggttaggctcgcccagacgtccacagtgcgagatctgcgcgaggacgaagaccgagcgagggagggcccactagcagagaggaagaagatgtgcttcgatgtgaatgaaaagaagggaaggtgtttttcgccttcagctcaaaaagctacgagcattggtttcatccacaacaaattagataacgcacggaggaaaggtatcttcggattcatgataaaagcgtacacaatgaagagcgtgatcgagacgaaggttgctgttgctccgaagctgtgcataagggagcttcggctaaatcgcagaaaagggaaccgacttaaaagggaaaggccattcagtcctcatagattcttctataagccgatagtaaatgtaaagggcatgactgtaatttctcataggctgcgtcctgtgcctataaatagatga

SEQ ID NO: 38954 - DNA, 483 bp, Zea mays
  Peptide Sequence Number=SeqID_80733
atggccgagccaacggtcagatgggggcaccggactgtccggtgtgcaccggacagtgtccggtgcgccaacggctccaggactgcaacggtcgactgctccgtttctggaaggaaatcgggcaccggactgtccggtgacatccagatcctgttcccgggtcaaagggaactttcaattggtatcggagctaggcctctccagtgtgggcttagccgtctggagatgacgatgtcgtcacaagagggagaagaaaagcactggccaccaaacgatgaatccacctcatcaacaggtttgtctcccactagtaataaatgtcttattgctaacaatgatggtggagataagagcgatgatgaggaggaatatgaggatgaggagtctacatcatcacaagggaaaatgagaccgacgatgtggaagaagaggagattcgccgtttctacacccatctcaacaaagaagacaaagtgctcttga

SEQ ID NO: 38955 - DNA, 357 bp, Zea mays
  Peptide Sequence Number=SeqID_80734
atggagcagtcgaccgttgcagtcctggagccgttggagcaccggacactgtccggtgcacaccagacagtctggtgcctccatctgaccgttggctcggtcacgcgtcacgcgcggattgcgcggccgaccgttggcccagccgaccattggctcaccggacagtccggtgcaccaccggacagtctggtgcaccaccggacagtccgaacctcccaagttatcgggcccacatgcacctgtccttgtctcaagaccgcagacagctatgcgtgtgcaccaaacaacttaacaggatctgtccgagtgccccgaggaccccggataaacgacttaccgccaagatcgcaggattaa

SEQ ID NO: 38956 - DNA, 1077 bp, Zea mays
  Peptide Sequence Number=SeqID_80735
atgcagatctttgtgaagacgctgacagggaagaccatcaccctcgaggtcgagagcagcgacaccatcgacaatgtcaaggccaagatccaggacaaggaagggatcccgccggaccagcagcggctgatctttgccgggaagcagctggaggatggccgcacccttgcggactataacatccaaaaggagtctacgctccacctcgtgctcaggctccgcggtggcatcattgagccctcgctgcaggcgctcgctcgcaagtacaaccaggacaagatgatctgccgcaaaaccaagcctgcggcagaggggtataacctcgccggagaagacagctatcccatggaccgaaggtccatgacacctggtatcagctccaggttatcctcaccaccaccagccgcccatccctcaccaccaccagccgccgcaacgccctcccacccgccctctccaactccagatgcattcactcggctcgaagagagttttggccgtctcgcagagaagtgggatcagttcgttgtgatgttccaccgctacaaggagaagacagagaaggaactccaagcagcggtgcggcttcaggcggcagcgcgagggttcctggcacgccgccaggtacagtcccttcgtggggagaagcaccttgctgtggcctccagggccatcccatggccgtcatcacatgagcaggctgtggtgcgcttgcaagccgcagtgcgcggcttccttgttaggcgggcggtgcggaagctgcacttgctgatcagctcatcgctgcaccaactcgcagcctgctcgcccaaccaccaggtctcgtctatactttttgaaccccctgcagaagtcgagatctgggtatgcagcccccctgcacggccaaagagggtcatctccttcattcgggcaactaccttggtgctggacagacccaacataagaacgggctggttcctccttcacctttcatccaacctcaaggacgagctggtcctcaagggagggggagatgtcatgggcatcatagggagcgagaggcaacatcgaggctgggataaggctagagaataa

SEQ ID NO: 38957 - DNA, 423 bp, Zea mays
  Peptide Sequence Number=SeqID_80736
atgcagatcttcgtgaagacgctgacagggaagaccatcaccctcgaggtcgagagcagcgacaccatcgacaatgtcaaggccaagatccaggacaaggaagggatcccgccggaccagcagcggctgatctttgccgggaagcagctggaggatggccgcacccttgcggactataacatccaaaaggagtctacgcttcacctcgtgcttaggctccgcggtggcatcattgagccctcgctgcaggcgctcgctcgcaagtacaaccaggacaagatgatctgccgcaaatgctatgcacgactgcaccctagggctgtcaactgccgcaagaagaagtgtggtcacagcaaccaggttagtgttattgcattggaaagtatcgcgcctctgagggccaagaagaagatcaagaactga

SEQ ID NO: 38958 - DNA, 168 bp, Zea mays
  Peptide Sequence Number=SeqID_80737
atggagtatattgtcttttttggccacgtggcggccctggagccgtccacgtggtgggggcagggtactgacaatggcccctgggcccgcctcaggggaggatacgagcctgaaggtggggccaaagctggattgtcgattggcgcgctgctttcgtgcactcgctga

SEQ ID NO: 38959 - DNA, 322 bp, Zea mays
  Peptide Sequence Number=SeqID_80738
atggcctggacgccacccgtcagcagagtggacagggctcatttaatgctaaggtggcacatcgcttgcggctggccacacggcagcatcgggtctccgcctgagtggggagcagggacatacgcaacatggtccggacacgtgttggctccggacccccgcctggccttgattaaggtccgggggtccggacccaatgttgacaccatggagtatattgtcttttttggccacgtggcggccctggagccgtccacgtggtgggggcagggtactgacaatggcccctgggcccgcctcaggggaggatacgagcctgaag

SEQ ID NO: 38960 - DNA, 249 bp, Zea mays
  Peptide Sequence Number=SeqID_80739
atgggcgcgattaaggccaaggctcagtccactcaagggacacgatctcgcctcgcccgagcccagcctcgggcgagggcagccgacccaggaggattcacgactcgctcaagggtcccctcaaacagcgaacgcaccttcgactcgcccgaggcccagatcgggcaggcttcgcggagaagcaaccttggccagatcgccacgccaaccgaccatatcgcaggagcatttaatgcaaggatcgactga

SEQ ID NO: 38961 - DNA, 1158 bp, Zea mays
  Peptide Sequence Number=SeqID_80740
atgcaggcggcatgcaaccgcaccacgaggatgcaccccttcgacttcgacgcgtccagcatggaggcccaggcccacacatcacggaccgagaaaggggatacttcgaaagggatccttctccgcgaaggaagcgggccccgagccctcctactgatcagaggttcgaaggctggcccctcggaaggggttcgacaaccgcctcagagcacgcgggccctgagcccccctactggtcagaggttcgaaggctggcccctcggaagggttcgacagccacctcaggccactcgggcttcacgcccactactgatcaggggttcgaaggctggcccccccgaagggctcgacagccgcctcagaacatgcagagcgagggatgactcttggtacgtccgatacatggccgaggctcgggctacgctcccgagaggctcgagggctgctctcgcaaacccgactccggccaaaccgttgatagcgtcaacataccagcccgagaactcggaacctgactatgcacccgggctacgaccagtcaaggctccgcccactcaagggacacaatctcgcctcgcccgagcccagcctcgggaaagaacatcagacccaggcttcgcggagaagcaaccttggctagatcgccacgccaaccgaccgtatcgcaggggcattcaatgcaaggatcgcctgacaccttatcctgacgcgcgcccctcagttgacagggccgaacagccaagtctagcctcaggcgccataggaagctccgcctcgcccgaccccagggctcaggctcaacctcgacctcggaagacggtctccgccttgcccgaccccagggctcggactcaacctcgacctcggaagacggtctccgccacgcccgaccccagggctcggactcaacctcgacctcggaagacggtctccgcttcgcccgaccctagggctcggactcaacctcgacctcagacgacggtctccgtcctcgcccgaccccagggctcggactcagcctcaacctcggaggagtcaccgcctcgcccgacctcgggctcggaccgaccacgccgcagggggggaaccaagaccctgcgtcccatctggctcgcccccgggtttaagcgctcctccgacggccacgacatcacatga

SEQ ID NO: 38962 - DNA, 261 bp, Zea mays
  Peptide Sequence Number=SeqID_80741
atggaacaagcagtgtaccagatgtggctggtccgagttcttatttatacgctcggcacactccaaattggagggtcccgtctgtcattgactgttgctattctagcaaaaggaaggtaccttcggactcaggataaaagcatacacgatgagaagagcatgatcgtgacgaaggttgtcgttgctccgaagctacgcgcaagggagcttcggctcattcgcgggaaaaggaaccgacttaaaggggaaaaggctatttag

SEQ ID NO: 38963 - DNA, 237 bp, Zea mays
  Peptide Sequence Number=SeqID_80742
atgtctagaggtagaggagtagactcctcacaccgggtactccttaggatgattggatgttgttgtgacttggccttcgtccctgccaccgggatatatggtcaagagggtggtgacgaggataatggttttggttatgcctatggtaatggttgtccacgttgcaaccactgctcgggtgaagatgaagtcgtggaggaggacttccaggagtttcaagagtacgatgagttctag

SEQ ID NO: 38964 - DNA, 258 bp, Zea mays
  Peptide Sequence Number=SeqID_80743
atggaggaccaccctccaatggatccaggacgtgaggcaccaaatcaatggagagagaggtggcacagccgcgcaggtggtaccagcgaggtggagcccggtcgcatcccatggaggacaaccttccaattgatccagggcgtgaggcaccaattcagtggagagaaaaacaagaatcgtgactgcaatggcaaatggaaggtgaaggcccttttgattgacaacttaggaaaagatggaatggaactcaaattttga

SEQ ID NO: 38965 - DNA, 588 bp, Zea mays
  Peptide Sequence Number=SeqID_80744
atggaggaccaccctccaatggatccaggacgtgaggcaccaaatcaatggagagagaggtggcacagccgcgcaggtggtaccagcgaggtggagcccggtcgcatcccatggaggacaaccttccaattgatccagggcgtgaggcaccaattcagtggagagaaaaacaagaatcgtgactgcaatggcaaatggaaggtgaaggcccttttgattgacaacttaggtatatttactgtttcattacacaccttgcgcaggaaaagatggaatggaactcaaattttgatggtcggtcaagggcttgaacaacccaccacaatccacgcgagtacaagctctagcgtatctggcgtcaacgtgtgtgcgacccatcagggctacgacaacacaacaagccttcgtaataagtacaacaggcaaaattattgctcggtaattggggtacacgataaatccacgcaacgtgcgcaacaggcgcaatcgtggctcgatgatcacggcagacagacagtgcctacagggcatgcgaaaaatacgcgactccgcgatggcggttcgactcaacgggagctgtccgattaa

SEQ ID NO: 38966 - DNA, 294 bp, Zea mays
  Peptide Sequence Number=SeqID_80745
atgagcaagaacacaagagacacaagatttatcccgaggttcggtcacaccactaaggtgccctacttcctcgttgaggcgcccacaaagagccgggtctctttcaaccctaatcctccctttgccgaccacaaagatttgaaatgggagaggcaagaggtgtgtgagagagagtgggaggtgtttctcaggttaggaatggagtccaagtcgtgctcttctgtggggaagagtgtggaaggtgtatataaaggtgctcccaaaagctggtggtcgttggggaaatctgactga

SEQ ID NO: 38967 - DNA, 249 bp, Zea mays
  Peptide Sequence Number=SeqID_80746
atgagcaagaacacaagagacacaagatttatcccgaggttcgatcacaccaacaaggtgccctacttcctcgttgaggcgcccacaaagagccgagtctctttcaaccctaatcctccctttgccgaccacaaagatttgaaatggaagaggcaagaggtgtgtgagagagagtgggaggtgtttctcaggttaggaatggagtccaagtcgtgctcttctgtggggaagagtgtgggaggtgtataa

SEQ ID NO: 38968 - DNA, 294 bp, Zea mays
  Peptide Sequence Number=SeqID_80747
atgagcaagaacaaaagagacacaagatttatcccgaggttcggtcacaccaccaaggtgccctacttcctcgttgaggcgcccacaaagagccgagtctctttcaaccctaatcctccctttgccgaccacaaagatttgaaatgggagaggcaagaggtgtgtgagagagagtgggaggtgtttctcaggttaggaatggagtccaagttgtgctcttctgtggggaagagtgtgggaggtgtatataaaggtgcccccaaaagctggtggccgttggggaaatctgactga

SEQ ID NO: 38969 - DNA, 294 bp, Zea mays
  Peptide Sequence Number=SeqID_80748
atgagcaagaacacaagagacacaagatttatcccgaggttcggtcacaccactaaggtgccctacttcctcgttgaggcgcccacaaagagtcgggtctctttcaaccctaatcctccctttgccgaccacaaagatttgaaatgggagaggcaagaggtgtgtgagagagagtgggaggtgtttctcaggttaggaatggagtccaagtcgtgctcttctgtggggaagagtgtgggaggtgtatataaaggtgctcccaaaagctggaggccgttggggaaatctgactga

SEQ ID NO: 38970 - DNA, 492 bp, Zea mays
  Peptide Sequence Number=SeqID_80749
atggtgagtaaatgtacggcccacgtatcgtggactgagcacgccgcctgtcagtggaatggacaggcgcacgtcttatccgtcatgaaggcgcgtgtagcccagaggcgtcacgccgggttccgcccgttggcttatgccgcgcgcagtgtgccacgtggcagcatcggggctccgcctgagtggggagcagcagtgtatgcggatagccacgtggcggccctggagccgcccacgtggtggggtcaggcgctgttgctggcccagagtagtcgctcgaggctggggcgagtcatggtctggtcccacgtacagctcctttaccacgtgactgaagatagccgtgtgggtactgcgtcttcatacaatagtaaggggtaccctagttttaggaatttgggtactacaaatgctaccccttacaaagaatctcgtcctcgagattctaagaaaagagatgatgatggtctatttgtaattggttcaaaatag

SEQ ID NO: 38971 - DNA, 480 bp, Zea mays
  Peptide Sequence Number=SeqID_80750
atgtggcacacaaccatgtggagtgagaatagtaacaaaagtggcccaaggacttatgatattctaatgccacacccgtttttaaagacaaatctagatgcatctcaaatgtgtgataggatcaactctcacacatatggagtcttgatgtccgcaatccatgctgcattgatgggcagttaccgtacgagtaatgcgggagtaatggtgagtaaatgtacggcccacgtatcgtggactgagcacgccgcctgtcagtggaatggacaggcgcacgtcttatccgtcatgaaggcgcgtgtagcccagaggcgtcacgccgggttccgcccgttggcttatgccgcgcgcagtgtgccacgtggcagcatcggggctccgcctgagtggggagcagcagtgtatgcggataggtccgtagcgcaccagaacaggtctggacacgtgttagctctggacccccgcctgggccttaagtaa

SEQ ID NO: 38972 - DNA, 162 bp, Zea mays
  Peptide Sequence Number=SeqID_80751
atggcggacgtctcttctcaactcatttattcggtcgccatctacgacccatatagccgtcctgcggcggagttccgcttggagccgactcacttctgcttcgagatcccctataggatcattgcttccactactactattatcatgtcttggggccagctg

SEQ ID NO: 38973 - DNA, 843 bp, Zea mays
  Peptide Sequence Number=SeqID_80752
atggcgggagtatcgtgtaccctccgtagcaagaggctggacggtggtgtatttgtgctctcggtgaggaagcgacaaatttttgttgcttctgttctaaggtggtacccaaggaagagcgcaaggaatgaagtgcgggaggaaaggatcctccatttagaacttttgtttaaagctattgggaggagtttttgcctcccttgtttatgtaatcgcttccgcatttctatatctccaatgttctgtaatgtctgcaagacgggtgaaacgttcctggaaaggagaacaacgcgcaaacatactggaccgattggtgtgccgtgtcaccagctggccccaagacatgataatagtagtagtggaagcaacgatcctataagggatctcgaagcagaagtaagtcggctccaagcggaactccgccgcaggacggctatatgggtcgtagatggcgaccgaataaatgagttgagaagagacgtctgccatctgcgagatcagctcgcggaccgggatttggcactcgactgggttgttcaatctcgttcgcttgcatgggccaaggaggaaaaggctcaagctcgagtagccgagctcaacttggccgttgatgacctgcagacatattgcaataccttacatgaagaagttcatgtattatattcacaattgcatcccagtgagcctacgaatcctgtcgagtcagaagccggaccctcgcatgttgcgggacaaacgcttggtggtgagttggacctttttcagccccctccttctatgaggctggtcgatgaatggtctcccacacccaacgacgaggctgccaagagcaaccggaagtag

SEQ ID NO: 38974 - DNA, 276 bp, Zea mays
  Peptide Sequence Number=SeqID_80753
atggcgacaagcaatcctagcaggggcatggcgcagagattcaaccgcctcggtcagtggagacggcaccaacccgccgtgtgctctcagtatttgtgtgaccgggcggatcctccaattccttgtgagcttgtgaggggccatcttgactatacacctcatgcttggaacattgttcctgttaaaaagaggaatggctgggtaaggatgattgttgatgcttgttaccccaccaacataaaggaagaaacagatccagagtacttttgcaggtag

SEQ ID NO: 38975 - DNA, 285 bp, Zea mays
  Peptide Sequence Number=SeqID_80754
atggcgacaagcaatcctagcaggggcatggcgcagagattcaaccgcctcgatcagcggagacggcaccaacccgccgtgtgctctcagtatttgtgtgaccgggcggatcctccaattccttgtgagcttgtgaggggccatcttgactatacacctcatgcttggaacattgttcctgttaaaaagaggaatggctgggtaaggatgattgttgatgcttgttaccccaccagcataaatgaagagacagatccagagtacttttgcagatacagaaggtga

SEQ ID NO: 38976 - DNA, 903 bp, Zea mays
  Peptide Sequence Number=SeqID_80755
atgtccgatgaacagaaaaacgagaaaaacaaaaagcgtcgagaagcacgtctacgaaataaagagttgaataagaagctgcctgaagcgcgtcaacgaaacaattgccaaaatatgatgcccaacgcgccaagaggtggagacaaaaaagtaaatgttgatccaaatgatgattccgactgtttgcatatcaattatacagtacagtcgaacgacattgacgcaccgacagaagttctaacaccaggcagtgtgcacgaaactgttggccacacacctaagcatactacgcagaggaccgcctactttagcgagcggtacaaaaacttaactcccgtcgagaaggagtttaggcgtgaacgccttaggttgtataatagaacaccaaggcgaaaagaggcaaaggtagaccacaacaggagacatagagttatgcaagccgacactttgaatcccacatccatcgccatggaggacccaacatatacccctgagtttgtacaccctacagcagatgcaaagggatctgatggatccatattatctgtctgcgactgggttatccctgaattcgtcaacgcacctttcttgccatctccaacccagaccgaggatgtcgcttcgcccgatatgtctaccaatacactaaagcgtaaacatcatgttcctcgtggggaaagacaagctatattagctcgtcgaaaccagctatttgaatcagccatatcaaggaaggtgggaacttcgattgaggatactagcggtgacgttgttgaaggggacgattggacacagcgccatacgcctatgaagatcaccaacaatggtgatgacgatgagggtgtcatattcgaagacgatgatgatgagaacgagggatacctattcgctgcgcaattgtaa

SEQ ID NO: 38977 - DNA, 3618 bp, Zea mays
  Peptide Sequence Number=SeqID_80756
atggaggacccaacatatacccctgagtttgtacaccctacagcagatgcaaagggatctgatggatccatattatctgtctgcgactgggttatccctgaattcgtcaacgcacctttcttgccatctccaacccagaccgaggatgtcgcttcgcccgatatgtctaccaatacactaaagcgtaaacatcatgttcctcgtggggaaagacaagctatattagctcgtcgaaaccagctatttgaatcagccatatcaaggaaggtgggaacttcgattgaggatactagcggtgacgttgttgaaggggacgattggacacagcgccatacgcctatgaagatcaccaacaatggtgatgacgatgagggtgtcatattcgaagacgatgatgatgagaacgagggatacctattcgctgcgcaatatgaggataccgatgaggatatcgagatcgatggtactcaagatgaatctactgccacttatgtttctgacccgtacgacaaggtgtacagcaacatccctgaagagacacatatgctaaagcttgttcctaactgcggttattgcaccgcgaagaagtttgagtatgagccacctgggttttgttgtcgtggtgggaaggttgagctagctccagtggagacccctccccaactgaagaggttgtgggatagtgcagactctgatgctaggcactttcgtgataacattaggtttttcaatggccatttctctttcacttccctatactgttgcctcgatagtatgacaactaatgtaagggattctggtatatacacgtttcgagcacaaggcatgatgtaccacaatattaagtcatttggtagggaagatggggcagagcataaacaccttgagctttacttttatgatgacgatcccagcctcgagcatcggtaccgtaagtgccgtgaagagcatcaacagaaagacaaggaggttatcaaccagatagtcgacatactacgtggaaacccatactccgagcaccttaggaccatgggccacgttgacaaccttgatgactatcgtatcgcgttgaaccttgaccagacgttgaaccagaagacatataacgcacctctcacttcggaggtggccgctgtctggatcgaagggagcgaagggcgaggccaattcagcaagagtgttatgctccatgggaaggacagttcaagacactgcatccgctcataccatggatgctacgatgcactatcatatccattgttcttccctagaggcgaacttggatggcatgcaaatatcccaaaggttggagtatccatggacgaagtggatgcataccgcgcgacacatagggcaagtaatgcaaatgatgaagatgcggaatctcctagccatttatgtgtctttgtacgtgactactactgctacaaattccagattcgtcccggggtattcaatccaatacttcatggaaagcggcttttccagcagttcgcggtcgacacgtacataaagattgagagctctcgtttagatttcatacgtaagaatcaagatcggttaagggcagacctataccagggcttggtggatagcatgctagatggagatattagagcagagaagattggcaagcgaactgtgctgtcaacatcgtttattggcggtcctcgtgacatgagacgtcggtatatggatgctatggctctggtgcgcaagtttggtaaaccagacatctttcttaccatgacatgtaaccctaactgggatgagataaggagggagcttctccctgggcagacaccgcaagatcgtccggatcttgtagtgcgtgtctttcatgcaaagctacaggagttaaagcataggctgactaaacaggatattcttggtaaggtccgagcctacgtctatgtcgtggagtttcagaagcggggtttgccgcatgcccattttctactcataatgcagaggaagtacaagctcacatgccctgagcagtatgaccttttgatctcagctgagatcccaagcaacaagtaccctgaactacgaaagatggttatcaagcatatgatgcatggcccgtgtgggtcgctaaaccctaactgcccatgcactaagggtcgtaaatcgtgcaagaatcattaccctcggcctttcagtgacacaaccttgcaagggaaggattcgtaccctgtttacagacgtcgtgacgatggtcgtaccgaaaaggttcgagggtgcgaattggacaatagatgggttgtcccttacaacccatacctccttcgtctcttcaactgtcacatcaatgttgaggcatgtgggagcatcaaggctgttaaatacctgttcaagtacatatacaaaggccatgatcgtgcttctgttgttatgagagatgcgagcaaggcagatgatgatgtagatgagatcaagcagtacagagatgcaaggtgggtgactcctccagaagccttatggaggatatacggctttgagcttagtcagatatctccacctgtgatgcagctgcaactccatcttccaaacatgcacatggtggcgtttcacgagcggcaaatggtcgagcgagtcgtcaaccgtccaggtgttgataggtcaatgctcacaacatattttgaggcgaatagtctacacaaggaggctcgtggcatcctgtatcgtgacttccctaaatggtacacttggcagagtggtaagggaaaaatatggcaaaagaggaaacgagatacgggtggacaagtcggtagaatagtctctgctcatccggccgagggggagcgctactatcttcgtgttctcctaaaccatgtgactggcgccacttcctatgtggatctaaggacagtagatggtgtcacgctacccacttttcgtgaggcagcagagagaaggggactgcttgagtcggacaacacactggatgagtgtctcactgaacgtgctcttttccagatgccatcggcgctgcgacggctttttgccacaatacttgtgtactgtgagccaagcgatgtggttgtactctggcagaaacacctagattctatgtccgaggactatcaacacaggaatccgtgcaaaactcatgttgagcagatggtattgattgacattaggaacatgttgcagtcaatgggaaaggacataaagacattccctcttcctcctatcatggatgcgtatgacgatgctattggtactgctagggaggtttacgaggaggaaattatcgaaccagcagcagaagatgtggctcttaaagactgtcttaacaaggaacagagggccgcctatgataagattttatctgccgttgacactgatcagggcggattattctttgtggatggacctggtggcaccggaaagacttacctatatagagtgctactcgcgacgctacgcagccagggcaagattgcagtggcaacagctacatctggcgttgcggcttccataatgcctggaggaagaaccgcccattcacgcttcaagatacctctcactattgacgatggcgctgtatgtagcttcacgaagcagagtggaaccgcagagttgctacggaaagcatctctcattatctag

SEQ ID NO: 38978 - DNA, 831 bp, Zea mays
  Peptide Sequence Number=SeqID_80757
atgcaggcggcatgcaaccacaccaagggggcgcactctttcgactccgatgcatccagcgtggaggcccaggcccacacgtcatgcgggcggaagcagcggtcgagtcgtctgcaggctcacgtcccctcctgggacagcgagagagccctcacccacggagtgaagacgacgcgacgcttcacctccgccatgatgaccgcgtcaaaaagggaccgggaaaggggatacttcgaaagggatccttctccgcgaaggaagcaggccccgagccctcctactgatcagaggttcgaaggctggcccctcggaagggttcggcagccgcctcaaagcactcaggctccacgcctactactgatcagaggttcgaaggctggcccctcggaagggttcgacaactgcctcagagcactcaggctccgcgcccactactggtcagaggttcgaaggctggcccctcggaggggttcgacagccgcctcaagccactcgggctccgcgcccactactgatcaggggttcgtaggctggctcccgaagggttcgacagcctcctcagagcacgcagagcgagggatgactctgggtatgttcgatacacaaccaaggctcgggctacgctcccgaggtaccctaggacatttccgagaccagcgggagagattttgtaacggaatcccatcagagggaggcatcgagacctcggaccctatcgaacgggaccgggtccggcaaatcacctgcaggctcgggggctgctctcgcaaacccggctccggccaaaccgttgacagcgtcaacataccagcccgagaacttggaacctga

SEQ ID NO: 38979 - DNA, 696 bp, Zea mays
  Peptide Sequence Number=SeqID_80758
atggcgcggtcggtccgagcccaaggtcgggcgaggcgaagactcctcctgaggccgaagccggggtcgggtgaggacgcgattccttctgaggtcgaggttgaggccgagccctggggtcgggcgaggcggagaccatcttccgaggccgaggttgaggccgagccctggggtcgggcgaggcggagaccaccttccgaggccgaggcaggggccgagccctggggtcgggcgaggcaaagacctcctcctgaggccgaggcccaaggtcgggcgaggcggagcttcctgttgtgcctgaggctgaacttagctgtcgttagcctcaccctggcgggtggcacagcagtcggagcggggcaggcgacactgttttcctgtcaggtcggtcagtggaagggcgaagtgactgcggtcacttcggccctgccgactgaggaacgctggtttgttgacgctatcaacggtttggccgtagctgggtttgcgagagcagcccccgagcctctgcacagagcgagaggacgatcaaggactgtctcggcttttatcatacgccccttcgtcgccttttcacaaggaggaaggggggaaagcgccatgttgccctcggagggcgccgaacatggtgtctccagtgatttgccggacccgatcccgttcgatagggtccaagggctcgatgcctccctctga

SEQ ID NO: 38980 - DNA, 537 bp, Zea mays
  Peptide Sequence Number=SeqID_80759
atggtgggtacaagtgcggtcactgcacgcgcggcagccggggtcagtggagcattgtatgctaaggcgctgtacaaggagcatcgggtgccacgttgccgagtctggctgactctggaggctcaccccctacagctgtgttggcattcccttgactccaagactattggattcaggtcggacgacaccaccgaggctgcagctatgaagaccctgacaactttctgcgactaccatcccttggagatggtcatgcacccacttggactcttccccgctaagaagagggatgaccccatgtggtgcaaccaagtgagccacgtgaaggacgtgtgggccatgcatcccgaccaagttggcaggatcactgttcagcgcatgagcgcactatatcgccttcaggccctgcaaagcgatgtcgtggcaaacctcactaaccttgctcagaccactaagctcaccctcgacagccgagaggacttcatggtcgacttgtcttcagaattggtggaaaagacctacaggtggaacagttga

SEQ ID NO: 38981 - DNA, 255 bp, Zea mays
  Peptide Sequence Number=SeqID_80760
atggggacggttgacatgtgtggggatggagtgcccctacatgtcgtgtgtttaggtttaccttgcaaggtacgctacaggacatggttgatgaccactaagctcaccctcgacagtcgagaggacttcatggtcgacttgtcttcagaattggtggaaaaagacctacaggtggaacagttgagccagcgcatcgcaaccctggagcagcaggtggagatctgggataacaccattgatgtcctggagaactag

SEQ ID NO: 38982 - DNA, 168 bp, Zea mays
  Peptide Sequence Number=SeqID_80761
atgggaaaggggctggccacggtggttgctctcgggcggcactggcgggtcgcggggaggtcgccggagctaagggctggctcggggaagtcaggcgaggttatgaattatactacaacttttatatttggcccaagccatgatcataaggtttacatgaccttttga

SEQ ID NO: 38983 - DNA, 408 bp, Zea mays
  Peptide Sequence Number=SeqID_80762
atgaccacgccccacgccacggctataaagcccgtcccagtgctcggctgccttccccgttgcctcctccgtacctcgcctgacttccccgagccagcccttagctcccagcgacctccccgcgacccgccagtgccgcccgagagcaaccaccgtggccagccccttttctcgtcctcctccgttcgatccaagccttcagatagcttcctggttaagaaaaatagaaaagactgtaaccttgctgacggagagtacgtcctcgtgccggagcaaggagctgctcaggaggtagccccagatccagcaccagagtctacatcagaggatctgcctgccacttctttggaaggcaagccccggtttatgcataacctgttatttatgctattttactacacttattga

SEQ ID NO: 38984 - DNA, 720 bp, Zea mays
  Peptide Sequence Number=SeqID_80763
atgaggaaaacaaagggtgcaacatttgcatatcgtgatcgagcttttgctcgcttgcagatggacaaggcgaccatccttggggacgcggtgaagtacgtgagggagctgcaggagaaggtgaaggggctcgaggaggaaggaggcgccggtggcagcggcggcatccagtcggcggtgctcgtcaagaagcagctgccgccggaggacgacgccatggcgagcagccatggcggtagcggcgaccacggtggcgatggcggcggtatgccgctcccggagatcgaggcacggctgtcggagaggagcgtgctgctgctgcggatccactgctacagcgccagggggctgctggtgagggtgatctcggaggtggagcagatgcagctgtccatcacccacaccaacgtcatgcccttcccggcctctaccgccattatcaccatcacggccaaggtgtgtttgaatgtaaagccaacaatcaagagcggaaatgggaagggtgattgtggaatcgtggaaactcgtgctttatacaacagagatataacacgtggaaattgtcaaaagggtcggggtggtggtggtcaccactttgttaagaatgccaatgcaagggtggaggatgggttcaatgccacggtagacgagatcgtgagaaggattaactccgcgctgcaccaacattatagcagcagttctgaagaaacaagaggataa

SEQ ID NO: 38985 - DNA, 357 bp, Zea mays
  Peptide Sequence Number=SeqID_80764
atgcccctgaccgttatgagtgtttcatcgtgccagagggcaccaagaagtgaaccattcaccatacttgccctactgtctacctgcatgcaatcgtttactcaattgattttcgttgttcatgactctgggaaagtgtcctatgagagggatacacagattttgaatgctgcatcattcactgtcgaacgcgaggatcacactgtaggcaatatcctccgcatgaggaaggacgcacaggcccttgcatggcgaatacaaagactacgaagcaatggtttccagcagcatgcgcattcagatgtgcatcctctcgcagaggagatgtgcatccgcatggtcgaccgcacattttga

SEQ ID NO: 38986 - DNA, 357 bp, Zea mays
  Peptide Sequence Number=SeqID_80765
atgcccctgaccgttattagcgtttcgtcgtgccagagggcaccaagaagtgagccattcaccatacttgccctactgtctacctgcatgcaatcgttgactcaattgattttcgttgttcatgactctgggaaagtgtcctatgagagggatacacagattttgaatgctgcatcattcactgtcgaacgcgaggatcacactgtaggcaatatcctccgcatgaggaaggacgcacaggcccttgcatggcgaatacaaagactacgaagcaatggtttccagcagcatgcgcattcagatgtgcatcctctcgcagaggagatgtgcatccgcatggtcgaccgcacattttga

SEQ ID NO: 38987 - DNA, 396 bp, Zea mays
  Peptide Sequence Number=SeqID_80766
atgggtcagaggacacttgccttcaccaaattgctgctcagggacctcttctgcaacctcctcgggaaacacagactgcccgttgtctacgtaaaggccgtccgatctaagatggacggcggagatctggcggctggcttctgtcctcccctccggctagcagaggcggcggcgcccgttcccgaggcggggagctcgccggagacaaggggcgcgggggctctgcgggtccttagggcgaccgggatggccggggaggttggggaaggcgcggggagtcttctggtgggggctaggtcgggacaggggcaccggagggggtggtccacggcgaagtggctcggcggcggcgctaatcgactccggcgaggaattaagcgcagcagggcgcaatag

SEQ ID NO: 38988 - DNA, 327 bp, Zea mays
  Peptide Sequence Number=SeqID_80767
atgggtcagaggacacttgccttcaccaaactgctgatcggggacttcctctgcaacttcctcgggaaacacagactgctcgttgtcaacgccgggacaggggcaccggaggggggtggtccacggcgaagtggctcggcggcggcgctaaaggactccggcgaggaattaagcgcagcgggggcagtaaaaaaaggaagggagagggcgagagaggttccttacctcaaggcgaactccggggactcctcggtggcggcgaagacacagtggctgcccgagtcgacggtggcggaccccggcgactgcgcacagaacggctggtga

SEQ ID NO: 38989 - DNA, 2409 bp, Zea mays
  Peptide Sequence Number=SeqID_80768
atgaagcaagtcgaccgtcctccaaataaccccaagcgtataacaatccagtcaagccaggagtgcttcagtgttgacattccctctgcagaacagcctaatccatgtccagaagttgaaaatcctccaaatgctgacagtcaaaatgtgaccaatgaaacagttcagattgattctgatgaagatgacttcatgccagctctgaagaagcgtaatgtttctgaaagccacacaagagtgttaagaaaagtcgtgacaaagaggattaaacatgaggagctaccccgacagctagaccccaaggatatgacaatacgtcctggtccaggaaaggaactcaagatcacaaaggacattgttcatcttattcttggcgtgccaaatcatggcggtggtaaacctttgggtattgatgaagcagttgcagcaagcaacttgagggcagagcttggtgtggccaaagatgagttcaatgtggcatttctacaggatcgtttaaggaaaggcgaggatgatgacctttcaatcagatgtttcttcctcattctattcaatcgtttgctgtttccaactgctagctggggcatcacatatcatgaggtgcttctcacagaagaaatgcaccgtttccatgagatcgactggtgccagttgatttttaatgatctatgtaaagctgccaagaagtggcacaaccgaatcaccacaaatgtctccacgactatatatggatgctccattgttgtccttttgtattacttggatcacctgcatacagccgcttccccccaaaataagagtggcacacctcgcattaaattttttgataagaatagcataaaagctttgaccaaagctgacaagaggaaggtacgccatggggctgaatctttcggacactgtgaaccggagtgcaggaccaatatttttgatgcaccgcgccctgcccccatgcctcggccaacttttaacatcaaacttccatctatcaaagagatgatgtcaagtaagatcaacgatctcccacatcgtcatcgatctaaattcacagatattcttgctggatatgacttggaggttgacaagtcatgcgtagccataaaagacagcattgacaaaattattgagaagcaatacgacatagcagacaagtttatagaattgatagacgaggtactacgtgccgagtctgaaaatttggaaaacgagactgatgagccacagcaaccggggaattcggctgattcagcaggacacactgttgatgccacccagcccacacccgatatgccatcccaagcttcgcagcttgagacccaactgggtggtactcagtttgaagaaattcacgaaagacaacagcatatccgtagagtgcttgagacgtgtcccgacgaatcggatgtggtttcagatcaacagagaggtgaaatggcaacagaggaaatggaacacaatgacagtgggccagtttttgaccagaccccaactcctcatgatgatacactcaaaggtactacaaactctggatctgatccaccccttacagagcaagagtgtgttcgttctctgtgggatttaatttgttccaaggacattgaccaaagcagggttgttattgattacggtgaatacagtgcaaactgtatggatatttatgaatctttcgcggagggcaaatgtcttgagaatgtcttcatgcagtgtttcattgagtgtgtccgtgatgattctaaaaatcattgtcgaactctgacatctaacagattaatacttgatgtcaacgttggggctctgttaaattttgaagaacaggaacgtcacagcaagaatcctcagccgtttgatcaaaatgtcttacagaattgcttgcacaacacattgcctgctttggcgaatctggataaatgcaagtcgatattggtacctatgcttagcaggggtcattggacactgtatgtgatcaatctacaccatcgggttgtacacattttagattcgaatccctatggtatacaacttggtggcaccgaatggaaggactaccattatgatccaatttatttaggtggcaggaaattcccatgggctagggtgataatgagtaggctgagcaaagcgttacaacacgtttgccccaacgcagaatttcctaagtttggtaattttccattggatatgccatctaactacccaacaatgaggacagggtcaaatgactgtggattttttgtaatgagttacatgaagtcttatgatcacaatgcaggtgtcatatcttctttcaatcaaccagacaattcccgagacctacgtgctcatgcccttcatcaactcacattccatcgcatcaacaaggcgttgccacttccattagatatccagagatttatgtttgcgcgcaattag

SEQ ID NO: 38990 - DNA, 381 bp, Zea mays
  Peptide Sequence Number=SeqID_80769
atgcctcggccaacttttaacatcaaacttccatctatcaaagagatgatgtcaagtaagatcaacgatctcccacatcgtcatcgatctaaattcacagatattcttgctgcatatgacttggaggttgacaagtcatgcgtagccataaaagacagcattgacaaaattattaagaagcaatacgacatagcagacaagtttatagaattgatagacgaggtactacgtgccgagtctgaaaatttggaaaacgagactgatgagccacagcaaccggggaattcggctgattcagcagtgatagaccacatgtatttccgaaaagaattattaaacctctattattcggaatctctacaattcagtgtaaggatttga

SEQ ID NO: 38991 - DNA, 1158 bp, Zea mays
  Peptide Sequence Number=SeqID_80770
atggcgagggttcgagacaggacgaagcacttcaaaggggtcgcaatgctctcacatggatacatcgagaaaatgggaaccactcgaaaacgtcgctcactctggctgagggggattgtggttaatgggaaaagtacttcagagctattgagtggctctgtatcattgaggtcagctgaggtggttggaacacctgttggacgaattgtgaagtgtgaggagtttctgaaggctgcaggacctgttatggctgtgaaagaaattgagcctgcacttaagaagcagctcatcatctccaccaccctgatgactgttggtattgctgtaatcagctggttggcccttctagctaagttcaccatcttcaactttggtactcagaaggatgtctccaactggggcttgttcttctgtgttgcaattggtccatgggctggtctgattattggttttgtcacagaatactacactagcaatgcatacaagttcaaagcctacaaaactggtgctgtcactaatgtcattttgggtcttgctcttggatacaagtcggttatcatcccgattttcgctatcgctgttatcatctatgttagtttctccattgctgcaatgtacgacatcgcagttgccgctcttgtgacaatgctggtggtattgctgagaactgatgctgttgatgctgctggcaacaccactgccgctattggaaagggatttgccattggttcagctgctcttgtgtctctggcgctttttggtgcctttgtcagcagagctggagtcaaggttgtcgatgtcctctcccccaaggttttcattggtttgattgttggagccatgcttccctattggttctctgccatgaccgtgaagagtgttggaagtgctgccctaaagatggtggaggaggtccgcagacagttcaacaccattcctgggttgatggagggaactgccaagcctgactatgcaacctattggaagatctccactgatgcttccatcaaggagatgattcctcctggtgctctggtcatgctcactcccctcattgttggaaccctcttcggtgttgagactctctatggtgttcttgctggtgccctggtttctggagtgcaaccgtcgttttctcttaacagaaaagaactataa

SEQ ID NO: 38992 - DNA, 1116 bp, Zea mays
  Peptide Sequence Number=SeqID_80771
atggcgagggttcgagacaggacgaagcacttcaaaggggtcgcaatgctctcacatggatacatcgaggggattgtggttaatgggaaaagtacttcagagctattgagtggctctgtatcattgaggtcagctgaggtggttggaacacctgttggacgaattgtgaagtgtgaggagtttctgaaggctgcaggacctgttatggctgtgaaagaaattgagcctgcacttaagaagcagctcatcatctccaccaccctgatgactgttggtattgctgtaatcagctggttggcccttctagctaagttcaccatcttcaactttggtactcagaaggatgtctccaactggggcttgttcttctgtgttgcaattggtccatgggctggtctgattattggttttgtcacagaatactacactagcaatgcatacaagttcaaagcctacaaaactggtgctgtcactaatgtcattttgggtcttgctcttggatacaagtcggttatcatcccgattttcgctatcgctgttatcatctatgttagtttctccattgctgcaatgtacgacatcgcagttgccgctcttgtgacaatgctggtggtattgctgagaactgatgctgttgatgctgctggcaacaccactgccgctattggaaagggatttgccattggttcagctgctcttgtgtctctggcgctttttggtgcctttgtcagcagagctggagtcaaggttgtcgatgtcctctcccccaaggttttcattggtttgattgttggagccatgcttccctattggttctctgccatgaccgtgaagagtgttggaagtgctgccctaaagatggtggaggaggtccgcagacagttcaacaccattcctgggttgatggagggaactgccaagcctgactatgcaacctattggaagatctccactgatgcttccatcaaggagatgattcctcctggtgctctggtcatgctcactcccctcattgttggaaccctcttcggtgttgagactctctatggtgttcttgctggtgccctggtttctggagtgcaaccgtcgttttctcttaacagaaaagaactataa

SEQ ID NO: 38993 - DNA, 186 bp, Zea mays
  Peptide Sequence Number=SeqID_80772
atggggacgtattcttggctaagatcctggaacacatatgcgatgcacccggttctgcccttagaaacgggtgtgacacactgtgttcatcatcccttatacgagaagcttcccctgcacaccgacgatatggagatctcggatgtcagggcacaagaagattgctccggcagcaaacatctgtag

SEQ ID NO: 38994 - DNA, 1113 bp, Zea mays
  Peptide Sequence Number=SeqID_80773
atgtgggaggcgaagccgcggctcagctcgttccccaccaccgcgaggctgatgaacatccttgaagccaagcatcggtggaagagcgccgctcccacaaggccgcgcacctccagcagaggaaaaacaagaccagtagcaccggcctgcggtataccatttcgagcactcactcagtctgggcgtgctcgggatgaagtcacaaggccatggcaaactacggcaacgcgaaacagagaccttgaaagcaaaggggcgcagggagctcggaggcgaaaggacgccgcgagtgggagagaagcaagacatggctgctacttgagggagaagtcgcaccgccgctcgctccaatgtcgcgtctcctcggggccgtcgcagaagactgagaagataaattttcaaaaccaatgcagcgactcgaggcaccccgcacatggcccaacaaagacattaagtgcggaggtcatgggtcagtcagccgcggggacaggcatggcagtttgcgtgaccatgggcggactgacagtaattgcatcaacgggcgcgcaggggcagcgagccaatcgccaatcagactttggccccgcctgcaggctcgtatcctcccctgaggcgggcccaagggccacagtcggtaccctgaatcaggggtaccccttactacagtatgaagacgaggatgtatcagttggaccggacctccgcgagggagcaccagcccctgtatgcacaacccggacccccgattacggcccgggactcccaagcctcatcctgtgcgactccctgctcaggcggagacccgatgctgccacgtggcttgttgcccgtgacataagccaacaggcggagcctgacgtcatgcctctaggccgcacagtctttgcatttattgcagagaggacgcgccgcctgtccaccctgctgacaggcgatgtgccccctcagcatttaatgtgtcctgtccactccgctggcaggtggcgccagggccatcctacagacggcgcacctgtccagtccattgtcaaacagtgcgcccgtgccgcgcggcacactgtgctcatcatcccttatacgagaagcttcccctgcacaccgatgctacgctga

SEQ ID NO: 38995 - DNA, 585 bp, Zea mays
  Peptide Sequence Number=SeqID_80774
atgcccaggagacaggccctcaaggaagagcagtgcagagaagagaaaggtatctcgactattccaaagcacaagtatgcatccaaagcctgttccccaaaaggtcaaggctccgtccactcaagggacacgatctcgcctcgcctgagcccagcctcgggcaggaacagtagacccaggcagattcacgcctcgcccgagggcctcctcaagcaacgggcgcaccctcgactcgcccgaggcccagttcgggcaggcttcgcagtgaagcaaccttggccagatcgcctcgccaaccgaccgtatcgcaggagcattcaatgcaaggatcgccagacaccttatcctgacgcgcgctcctcagtcggcaggaccgaagaagctctgtctcgcccgaccccagggctcagcctcaacctcgacctcggaagacggtctccgcctcgcctgaccccagggctcggcctcgacctcgacctcggaggagtcaccgcctcgtccgaccttgggctcgggctgaccacgccacagggggggctcaagcactcctccgatggccacgacgccacatgcacagggcactag

SEQ ID NO: 38996 - DNA, 511 bp, Zea mays
  Peptide Sequence Number=SeqID_80775
atgcccaggagacaggccctcaaggaagagcagtgcagagaagagaaaggtatctcgactattccaaagcacaagtatgcatccaaagcctgttccccaaaaggtcaaggctccgtccactcaagggacacgatctcgcctcgcctgagcccagcctcgggcaggaacagtagacccaggcagattcacgcctcgcccgagggcctcctcaagcaacgggcgcaccctcgactcgcccgaggcccagttcgggcaggcttcgcagtgaagcaaccttggccagatcgcctcgccaaccgaccgtatcgcaggagcattcaatgcaaggatcgccagacaccttatcctgacgcgcgctcctcagtcggcaggaccgaaggctcagcctcaacctcgacctcgggaagacggtctccgcctcgcctgaccccagggctcggcctcgacctcgacctcggaggagtcaccgcctcgtccgaccttgggctcgggctgaccacgccacaggggg

SEQ ID NO: 38997 - DNA, 408 bp, Zea mays
  Peptide Sequence Number=SeqID_80776
atggccccgcttgtcagtcgcttcgtcgtcttccccgccgtcccttcatcgcggtcacctccggccatcgcctccgtcccctcctccgtcttctcgccgcacagggaagtttggcaccgctccgtccccccccccctgaccagcgtcctcgccggtaccgcctcgccgtggcgtctcatcggcggcgctgtgcggcatttatgggcggcgctgtgcaagctcaccggcgcccttcgccacaccgccacggacacagtacaccactcccccacctcgattgctcgcccagagctcaccgacggcaaccccgccgcgaagctccgccgcctccccgcggacagccccctcccggccccctctagccaaattgagcccacctctaggctcgccagcccctccccgtgctaa

SEQ ID NO: 38998 - DNA, 333 bp, Zea mays
  Peptide Sequence Number=SeqID_80777
atggcgccgaggtacgtgctgcgttggcacaaacggacgtcgtggcgtcgacgtggcaccgagctcggcgccatagatcttggcgccgagctcagttttgtatacaaagctggtctagctcagttgatttttcgtttatggctcaggttaaagagtgccgagattttcttgatcgcagggatgcgatgcatcggtgttgatacaagcgacattgtcgtcctcgccgcaagagatgctgttgtatttgcaagtaacagtccaaccggatcaaacctcttggctttttttttctatgctaataatgtactcaaaacttttttttttgttcgctga

SEQ ID NO: 38999 - DNA, 228 bp, Zea mays
  Peptide Sequence Number=SeqID_80778
atggcgccgaggtacgtgctgcgttggcacaaacggacgtcgtggcgccgacgtggcaccgagctcggcgccatagatcttggcgccgagctcagttctgtacacaaagctggtctagctcagttggtaagtccttatggatctccaggcgtggagatggagaggcagaggccacatggacctagaggagctgccagggtggattggatgccatgcaccagggcgtga

SEQ ID NO: 39000 - DNA, 135 bp, Zea mays
  Peptide Sequence Number=SeqID_80779
atggggtccaggtacagtgcttgctctgccgaggctgggtgccgaggttctttcgttctgcttttgttagtcaccctcctgcggggagagtatttcctctccgaggaggttgcatttggtgcaatctatgctcag

SEQ ID NO: 39001 - DNA, 192 bp, Zea mays
  Peptide Sequence Number=SeqID_80780
atggggtccaggcacagtgcttgctctgccgaggttgggtgccgaggttctttcgttttgcttttgttagtcaccctcctgcgggaagagtatttcctctctgaggaggttgcctttggtgcaatctatgctcagagcaatactaagcataagaaaaatcctttcataaaacaggtgatcaaggaaaggtaa

SEQ ID NO: 39002 - DNA, 270 bp, Zea mays
  Peptide Sequence Number=SeqID_80781
atggggtccaggcacagtgcttgctctgccgaggctgagtgccgaggttctttcgttttgcttttgttagtcaccctcctgcggggagagtatttcccctctgaggaggttgtccacattgcagccactgctcaggagaagacgaagccgtggaaggagacttccaggagttccaagactacgacgagttctaggtgtgggttggcggcaaacccccagtcagctgcctgtgaaggccctatctttactgcgtttcgcttagcactttga

SEQ ID NO: 39003 - DNA, 270 bp, Zea mays
  Peptide Sequence Number=SeqID_80782
atggggtccaggcacagtgcttgctctgccgaggctgagtgccgaggttctttcgttttgcttttgttagtcaccctcctgcggggagagtatttcctctctgaggaggttgtccacattgcaaccactgctcaggagaagatgaagccgtggaaggagacttccaggagttccaagactacgacgagttctaggtgtgggttggcgacagacccccagtcagctgcctgtgaaggccctatctttactgcgtttcgcttagcactttga

SEQ ID NO: 39004 - DNA, 522 bp, Zea mays
  Peptide Sequence Number=SeqID_80783
atggatcgaactgctccggtcgtcgctgttgcagaagctgttgatgctgctcgtgctgcggctgttgcagctgcggaggcgagatgtgcggcgttggttgctgagaaggaggcacgtgcggctgttgaatctgccactattgcagcagataaggttaacctagccgtctttgctgtgaagtatcgaagatttgttgaagatgactccacggtggaatcacagggtacagggctgttgttcattcaaattagggttagttcttcagaagcatgcatcccagaagttgaagggggtaaggttggaaagcttgctggccatttgaaggaagtgtgcaagagtctcgagaagacttcaattgtgtgtgaagaagatctagggaacaaatgtcctggttgggaccttgatcatcccctttcagatgttgaagacaactctaacccttctgattttgaggaccaagtggatggatatgtgtcagaagatccggagctgtgggaaatggtttttgaagacatgaagtga

SEQ ID NO: 39005 - DNA, 675 bp, Zea mays
  Peptide Sequence Number=SeqID_80784
atggatagcacagctccggtcgtcgctgttgcagaagctgttgatgctgctcgtgctgcggctgttgcagctgcggaggcgagatgtgcggcgttggttgctgagaaggaggcgcgtgcggctgttgaatatgccaccattgccgcagataaggttaacctggccgtctctgctgtgaattatcgaagatttgttgaagacgactccacggtggaatcacaggaacatgttgatttgaagtatcatattagcatcaagaactcactgcgatatgccattcaagagatgaggaggcaaagttcacttttacaaaatatgaataggttgtgttgtagcatcccagaagttgaagggggtaaggttggaaagcttgctggccatttgaaggaagtgtgcaagagtctcgagaagacttcaattgtgtgtgaagaagatctagagaacaaatgtcctggttgggaccttgatcatcccccttcagatgttgatgacaactctcacccttctgattttgaggaccaagtggatggatatgtgtcagaagatccggagctgtgggaaatggtttttgaagacatgaagtgggagcagaacaaagtgcctgtctctttgttcgagcattgtcgtattatgggctacgactacgaccagatgtttgatcgcgagacgaaatga

SEQ ID NO: 39006 - DNA, 399 bp, Zea mays
  Peptide Sequence Number=SeqID_80785
atgtgcctcatcctgcggtacctgttcttgacctgtgtgggggggtgtgagacagcaagagtgagctcacatacgttcatcgctcaacaagttgtggggaataatgtgtatgaactcgccaaaggaccgccatcgcagcaaaatcctcccgagggcctccctacactgaccactcccctactgcccttgcccctttcgggtaagggactcatacgcaaaaccaacagccgaaagggtatcggcccatcaaagccgaccgatgaagaaaggatggcccagattagatccatcccgcggataactgatgcgagaccagtacggtcagattctgatccaacggtccaaatggatccagcgcctatacgagtctcaaccgatcgatccaagatcaacggctaa

SEQ ID NO: 39007 - DNA, 243 bp, Zea mays
  Peptide Sequence Number=SeqID_80786
atgcgcctcatcctgcggtacctgttcttgacctgtggggggtgtgagacagcaagagtgagctcacatacgttcataactcaacaagttgtggggaataatgtgtatgatctcgccaaggtgggagctcatgaagtgaagctccagtgcaggaatcccttgcctgaccgccatcgcagcaaaatcaaccaaggacctccctacactgaccactcccctactgcccttgcccctttcggctaa

SEQ ID NO: 39008 - DNA, 267 bp, Zea mays
  Peptide Sequence Number=SeqID_80787
atgaacgtatgtgagctcactcttgctgtctcacaccccccccccacaggtcaagaacaggtaccgcaggatgaggcgcttgaaggatgctgcgttgagttcgtgagtggtctaggtcgtcgtctcccagtcaactttgggttgctggaccgttgtctccttataatagataaggacgacaaagctgctggtggtggcggctgcaacgacgttcctgctaaacctcggtacctctacttgattccagcatctttagagattatataa

SEQ ID NO: 39009 - DNA, 348 bp, Zea mays
  Peptide Sequence Number=SeqID_80788
atgaaggattgtccctctcgcctaaggaccggtttgtcatcactccttacctatactcttatcaagtacaacaactcgagactgtatgcgcagtcgcttgatctgaacttctacggtccgaaccccaggattatgatggctggggagcaccgggaggataaggaaggggaatgttttgtccggtttgggcatggtggtggccttgttccttccggtataatcgctaagaaaaggagatcgttgatcggcctcctgagactagtaattgtatcacatttgagtccagaggattggggcgcttcaggtggtatcggagctgttaggttggccgcaggacgtaacccttag

SEQ ID NO: 39010 - DNA, 387 bp, Zea mays
  Peptide Sequence Number=SeqID_80789
aggattggggcgcttcaggtggtattggagctgttaggttggccacaaggcgtaacccttagaagtcagatggaggtccgctgccaaaccagcttttgcgagaatgaagatggtttccccaagttgttgagagcatgcacagttcgcctcagaatcaggagccagccagagtatgatggtcgtgaatttgtcgagcatggcacaaagaaagagaccgtccagtttggatggccaggatgcgtgcattggaagggcagcagccgcttgaggatgaccccacagtcgtctcaagcccgtgtagctgccttggaaagtcgtgaagtcattgctgttgaagccctgaagcaagccaaggatgagcatgtccagaagttgatggaggcctaa

SEQ ID NO: 39011 - DNA, 318 bp, Zea mays
  Peptide Sequence Number=SeqID_80790
atgaaggccaagtcacaccatcaaccaatcaaggagtacaatggatcaagcagtctcattagctgcgagaagcagatgattcgaatcgagtttaaccttgcaagctatctatacgtcatttggcacaacaagtcaactgatgcggacatcaacaccaacacgagcacatctacaccagcagcaccttctccaagcccaggcgccaccccttccacctgggccagtgactcgggcccgtgcaagagaattgaactacatcatgttgttaaagaacgaaggcccggaagaatagacgaccagcccaattgcggcccataa

SEQ ID NO: 39012 - DNA, 366 bp, Zea mays
  Peptide Sequence Number=SeqID_80791
atgaaggccaagtcacaccatcaaccaatcaaggagtacaatggatcaagcagtctcattagctgcgagaagcagacaattcgaatcgagtttttaaccttgcaagtggccgcacttgtacccaccatatctagaatgggagacccagtctcaggtcgcgtgagggataaagtccgcgcccggcttcactcaggtatccgcacgttaatccttattccaattttgtctcatagacaacgcatccccatggatccgtgtccacagaccatcatccttctgttatcaaaatggatacaaccaattcctgacctcgcgcgagtgctagaaaaatcactcgacttctaccgagatcctgatttagcatag

SEQ ID NO: 39013 - DNA, 342 bp, Zea mays
  Peptide Sequence Number=SeqID_80792
atggggaactccgaagtcgacgacaccaaggccttcggtattgcgtcaacatcctctgcaagactggagaaggggggtggtggccgggccgcctggaattcgtctccgatgccgctcggaccggtagcgttggttgcgaagctccttcagggtgcgacgggggtatcctcaacgtcgctatgggaaaagaacccgcggtgcgcggtgaattcctcaatggagccgctcaccgccgttgagcctcttcacgccggggtcaggccatttcgctgctccaaccactggagttttaccccgagccccctgctgttctcagattttgaggcgcagtccaggaattaa

SEQ ID NO: 39014 - DNA, 255 bp, Zea mays
  Peptide Sequence Number=SeqID_80793
atggggaactccgaagtcgacgacaccaaggccttcggtattgcgtcaacatcctctgcaagactggagaaggggggtggtggccgggccgcctggaattcgtctccgatgccgctcggaccggtagcgttggttgcgaagctccttcagggtgcggcgggggtatcctcgacgtcgctgtgggaaaagaacccgcggagttttaccccgagccccctgctgttctcagattttgaggcgcagtccaggaattaa

SEQ ID NO: 39015 - DNA, 360 bp, Zea mays
  Peptide Sequence Number=SeqID_80794
atggggaactccgaagtcgacgacaccaaggccttcggtattgcgtcaacatcctctgcaagactggagaaggggggtggtggccgggccgcctggaattcgtctctgatgccactcggaccggtagcgttggttgcgaagctccttcagggtgcggcgggggtatcctcaacgtcgctgtgggaaaagaacccgcggtgcgcggtgaattcctcaatggagccgcttcacgccgggctggcggatttggggcgcgtcgatgagggcctccaccgtggggtgggccgccgtatccctggtgtctgggcggagaagaaactgtgggggcccgtcggacacgcgatggatggacgagattag

SEQ ID NO: 39016 - DNA, 321 bp, Zea mays
  Peptide Sequence Number=SeqID_80795
atggggattttgttgccggaactggcggatttggggcgcgtcgatgagggcctccaccgtggggtgggccgccgtatccctgtgaagtgcctgagccctgtgtacatgccagcgtggctgtcggagaggtgcttgagccctgtgtacgcgataacatggccgtcggagaagtgcctgagccctatagaagcacagctggcgagacttctcctgaggccgaggccggggtcgggcgagaaagcgattcctcccgaggccgaggctgaggccgagccctggggttgggcgaggcggagacctcctcccgaggccgaggcctaa

SEQ ID NO: 39017 - DNA, 381 bp, Zea mays
  Peptide Sequence Number=SeqID_80796
atgtactatgttgaatatggattctttcctatttcatgtttatctaacatcggtgaagatattggcgtgaaagatgtgaaagggaaatgtgcccttgggccatttctaagtattttggtgattgagtgcaaacacaagggcttaaatgtgaaaatatgcttatggatgaacaaagtgcaaatcacaagtaaaggagaaagaagaaaagaaaagaagtggagagtggctgtgtacagccaaaggctgcttcagactggggcaccggactgtccgggcgagagactccaagttgtggagattcctcgcaaacgggaaaagatcaaaggaaagaaaaacactgtggtattcaagttgatcattggatcacttgagaggagttga

SEQ ID NO: 39018 - DNA, 441 bp, Zea mays
  Peptide Sequence Number=SeqID_80797
atgaaccagtccttgcctccctcgttcaccatagcctctcagtttctcttttccccaaatctgttttccgcgccgccgagagtctctcgccgtggccagccctccttaggttggttcatgcctctctgttggatgttgaaagggaaatgtgcccttgggccatttctaagtattttggtgattgagtgcaaacacaagggcttaaatgtgaaaatatgctcatggatgaacaaagtgcaaatcacaagtaaaggagaaagaagaaaagaaaagaagtggagagtggctgtgtgcagccaaaggctgcttcgggctggggcaccggactgtccgggcgagagactccaagttgtggagattcctcgcaaacgggaaaagatcaaaggaaagaaaaacaccgtggtattcaagttgatcattggatcacttgagaggagttga

SEQ ID NO: 39019 - DNA, 333 bp, Zea mays
  Peptide Sequence Number=SeqID_80798
atggtgctggcctctgctccctgtgcggcatgctctgttcgccggcgagctcatgtgctcatggcacctctccctgccttctctctgtcccctgcgatcagcagcaaggacagcccccttccctctctcctttccgatgtgcgtcaggtgttcgacacaatgcctgcgaggaagatatattgtcacagcaccatcgacgctcgccgggagaggcaccccgtgttttgcgtggagaagaaggcaagccgctcgacgctcgtcgatgttcgtagcgatgcacaaatcagaatcgccatcatcctcacaaacaccgattgggtttgtttatggtga

SEQ ID NO: 39020 - DNA, 279 bp, Zea mays
  Peptide Sequence Number=SeqID_80799
atggccgcgagctctctcctccagctgctcgacgccccctgcttcttctccctcgcgcaacagcagccggccatctccctcagcacaaccgagctccctcccaaggacaacgtccctcccctgctgctgctcgccctttccctcccctacgcaggagagaaccccgtgttttgcgtggagaagaaggcaagccgctcgacgctcgtcgatgttcgtagcgatgcacaaatcggaatcaccgtcgtcctcacaaacaccgattgggtttgtttatggtga

SEQ ID NO: 39021 - DNA, 486 bp, Zea mays
  Peptide Sequence Number=SeqID_80800
atgtcgccgtgctcaacaacccgcgcacatccgccggggtcgttgcggcccacgcagccatcttccctgggatttatctaccggccccagcctctcctccctctcgtttccagtcaccagaaccaaatccagacaccaacgctcgtgcgggagagagagagagagccgaggtcagagtgcatctaccaacgccggccccgtccgcgcctggagctcgggagttcacgacgggttagcgtacttcgtgaggttgctggtgaagcgcttgtggccgattggggaggaataaaccactgtgtcgaccagaattcgtcgtcggtcgccggattccgccacgcactgtgggtgggtctgggcgcccttcggatctcggtaccttcgaacttggacctttcggacttgagtcaaaatcacagtgtgaagaagcacaagggatatgaaggatggaacgaagccgaagctgtgcgcaagggagcttcggcgtga

SEQ ID NO: 39022 - DNA, 165 bp, Zea mays
  Peptide Sequence Number=SeqID_80801
atggagaaaaataaggatgtctttgcatggtcctccatagacctcgtcggtgtaccttcgaacttggacctttcggacttgagtcaaaatcacagtgtgaagaagcacaagggatacgaaggatggaacgaagccgaagctgtgcgcaacggagcttcggtgtga

SEQ ID NO: 39023 - DNA, 228 bp, Zea mays
  Peptide Sequence Number=SeqID_80802
atggcaaagagcgtaccaagtgagctcgcggtgtgctcatatttatacgcctacggcgttgcaagtgggagggtcccgcttgtcattgactgttgctattctagcaaagggaaggtaccttcgcacttggacctttcggacttgagtcaaaatcacagtgtgaagaagcacaagggatacgaaggatggaacgaagcagaagctgtgcgcaagggagcttcagcgtga

SEQ ID NO: 39024 - DNA, 174 bp, Zea mays
  Peptide Sequence Number=SeqID_80803
atgactcctcacggcccagacgaagatccccattctgataattgcttcgagagtaatctggtacctttgaacttggacctttcggacttgagtcaaaatcacagtgtgaagaagcacaagggatacgaaggatggaacgaagccgaagctgtgcgcaaggtagcttcggcgtga

SEQ ID NO: 39025 - DNA, 534 bp, Zea mays
  Peptide Sequence Number=SeqID_80804
atggagcacgcgggggtgccatcattacttgtttaccggggcgagccagatgggacgccggtctttgttccccgtagccctgagctagctaggggtccgagcccaaggtcgggcgaggcggaggctcctccgaggtcgaggctgagtccgtcgtccgaggtcgaggctgagtccgagccctggggtcgggcgaggcggagtccgtcgtccgaggtcgaggctgagtccgagccctggggtcgggcgaggcagagtccgtcgtccgaggtcgaggctgagtccgagccctggggtcaggcgaggaggagaccgtcgtccgacgtcgaggttgagcccgagctctggggtcgggcggggcagagcttcctatggcgcccgaggctggacttagctgctatcagcctcactctgtcgagtggcacagcagtcggagcagcgctggcggcgctgttttcctgtcaggtcggtcagtggagcggcgaagtgactgcggtcacttcggctctgtcgactgaagagtgcgcattaggataa

SEQ ID NO: 39026 - DNA, 168 bp, Zea mays
  Peptide Sequence Number=SeqID_80805
atgtccggatacttcaacgaagtatccacagctgctttccagcttgggaatcgaatcgaaggttataaaattttatttgatgcactgatatctgtttatgagaatcaggttgctgtatcaagaaggatgtcattattcgaggactgttatcagctattgtttgagtga

SEQ ID NO: 39027 - DNA, 2703 bp, Zea mays
  Peptide Sequence Number=SeqID_80806
atggtgtcggcgtcgaacccggagcgttgggaccagtggggggggggtagggctacgaccggagagaaggccctgcgcgacgaccatatgagtggtcaaggcggcgcccatggtgcgctcttactccaaggcaagggacgtgagtcgctcgcgctcctaagaggtggcgatgaccgcctttatggtggcgatggtcgcaaccaactcggaggagatgggtggagaggccgacgaggacacgacgatgtcggcccatgtgggctcagcgagggcattgtggtctatgatatgaggtttgagttgaatgaagtagaagcgagaagggagagttacccctcgaccatatctttcctcaaattgatcaatgcacttattgtggaagaaagaaacataagtgacaaaggccggaggttcatgggtatctttaagtttgtttatgaggatgtctttggtccttttcctcaaagagcttatgctgaccccctggaaaaatgggagcttgctcttgcttgcttggagcattttcgcatggttttgagcatgtatgatataaaggatgatgatatttatgcttctgtgaacacattagctccttcctctcttgagagacaactccctctgctagaactactcaaagatttcatgagtgggaaagttgctttccggaatattatgaacatcatattagtgggtgttgactctattatcaatgagcgaactacccaaacatacggtatcattttggagagaactgtccttctatctcttgaaatatttattcttgtcatggagagagatcttgctcttgctgatgtttttcggccgctctaccagccattggatgttatattggctcaaagtcatagacagattgtagcattgctagagtttgtacgatatgattatcttccccaaattcaacagtgttctatcaaaattatgggcatcctaagttctagaatagttggtttggtacagttgcttttgaaagctgatgttggaaaaatggtaatagaagattatgctgcttgcttggagttccggtttgatgattttcagttgcttgttgacaatatttgtcgtccagctccaaacattacacatttgctcttgggattcgatgtcaatgggtccattgagcaaacagttctaaaaccaaaatctcaatacagttgtttgaagataatcttggacaatcttgaaaaagcgacaaagccggatataaattccttactgcacgaattcagttttcagcttctctatgagttatgtcttgatcctttaacttgcggacctgttatggatctcttgagtacaaagaagtaccagttcttttctaagcatgttggaaccattggagtgacaccgcttccaaaaaggaacagtaaccaatctcttcgaatcagcatgctccatgagagggcatggttgctaaagatgttagcactggcattacatatatccgatatatcatcatctgtatacagggaagcctgcatggctattctttatcatacttttggtcagtgtgctgagaacttccagagcacaagcttgatccattcacatgatgctttgactagcattagcgatgtaccagcaaagaggaacaaggttttggacttgcttgaggttctacagtttagatgtccggatacttcaacgaagtatccacagctgctttccagcttgggaatcgaatcgaagattgaagagatcctaaggaactctgccactttcgaaaatggtggtgtatattattattcagagagaggtgaccgactgattgatcttgatgctttccgtgaaaaacttctccagatttcacaagaattgaactcacaattaaccgagcctgagaaagctggactaaaagaatcagttcatcatttgctcaaatgggcgtggcgatataacaaaaatcttgaagagcaggctgcccaacttcacatgttgactggctggtcacagattgttgaggttgctgtatcaagaaggatgtcattattcgaggactgttctcagctattgtttgaactgcttgatgcttcgttgaatgccacaacatctccagattgttcagtgaaaatggcatatgttttaactaatgtatcgttgacctgtatggcgaaactgcgggatgaaagattcatatgcccagctggtacagattctgatgcggttacttgccttgacattatttcgtcaaagcagctaccaaatgcagcttgtaactcattgttattcaagcttgtgatggcaacattaagaaatgaatcatctgaaatcttgagaagacggcaatatgcattattactgagttattttcagtattgtagcagcattctggactctgatgtccctccatctgttcttcggttcttgctactggaggagcaagatggtgatgatgaggacatcactcttcaaaaggttctcaaggagcacaatgaattagcacatgccaacttttccatcataaggaaggaagctcaagctatcgttgatttggttactaaggatgctttccatggtagtgaagctgggaaagcactttccttttatgttcttgatgcattaattagtattgaccatgaaaagtattttctaaatcaacttcaaagtcgagggatccttagatcatgcctgagtgatgttgcaaactatttgtcaaagatctgctgtcctaattggaggctttag

SEQ ID NO: 39028 - DNA, 201 bp, Zea mays
  Peptide Sequence Number=SeqID_80807
atggatattttgatgattaggaaccttggagaggaccagcaaggacttgggaaaggcctaggtgttgaggaggagcagcaagggcgcccacaacaggaaggcgatcaagtccgactcggctgcgactccatctcggggataagccttcgtggcaaggtcactcgtgtgtcacgggtgataaccaacgaagctgtggtgtag

SEQ ID NO: 39029 - DNA, 510 bp, Zea mays
  Peptide Sequence Number=SeqID_80808
atggatgttttgatgattaggaaccttggagaggaccagcaaggacttgggaaaggcctaggtgttgaggaggagcagcaagggcgcccacaacaggaaggcgatcaagtccgactcggctgcgactccatctcgggaataagccttcgtggcgaggtcactcgtgtgtcacagggcaaacttgcagaaattccagaggacgcgtcattgcacaaaaatctgaaacttggaccaaagaatcaaatggacaaggacaaggggcctaagcttaatgacgatgagtgtgtctctcagatggaattgaaggagatgatgcacatgatgattgaagcttttaaaaaataccaggactctgcggcgacatcctatgagcagcttgatcgacgagttgttgaacttgttacacgcatggacgtactggaggctcgtcccccaccaccaactccagccccagctcactctcttgtggacgacgacgacgatgacgacgatgtttatgcaccactgtga

SEQ ID NO: 39030 - DNA, 720 bp, Zea mays
  Peptide Sequence Number=SeqID_80809
atggcgccttatccagtattaccgcagcagcaggtgcaggtgtctggtgcggaggtgggggtgcggctggtttgtggtcccttctctgtcatgggcaacctctcctcgggagccgtggcccatggttcttttgctccatactcgacgattttatgccaggaatccggcctccagcacccaacttcgtccactcctctagatctggagggtgaagcgggtgttcgagtgcagcacttattattacataactgggaggcaaaacaccctcccacgaataagtttagtattcttcctcctgctttgacaccatctttgagcaaaaacagcaaaactcagttgtttcataacctacaacaacatgggttcgaaaaccctaagtacaaagtgtactttcacaagtcttacccgtcaaatgaaaaagactctcaaggatatactggcttttgggaatcaaggcacttagcctatgctaaccatcttttatcatcccttcagttcactggattgctacttaatgggttaatgccaaccgagagcacagatacaccaccgtccagcctcttgccactgagggtacacgctactctcgtcatctctccactcccattgtgtggtggcctttctagtattggtccgaccgaggcaaagcttacccatgacgaggcatgtggccagttaaaaggtcctcgatcatcaagcctacatcggttcggtccttaa

SEQ ID NO: 39031 - DNA, 348 bp, Zea mays
  Peptide Sequence Number=SeqID_80810
atggccatgatgggttcaacatcggaaaagatgtacctctgccaggatcgtaccgatgtaggcttgctgattgaggaccttttaactggccacatgcctcgtcatggtgtgattcttgaggcactaggtggagctgcagtgttgattgtgaggggttcgcgcccacctcgtcggagcggcaaaggcgacgctagtgaaatcgagatcctacaacaagtctgcgaggcaaagtggatgaccaagaccctcgccgagcaagtctacaaggcggagcgaatggccaagtcctctgccgagcaagtttgcgaggcgaagcggatgatcaagtaccccaccgagcaagtctaa

SEQ ID NO: 39032 - DNA, 489 bp, Zea mays
  Peptide Sequence Number=SeqID_80811
atgacgctgctgtggccgtcgatcgttgcgggaagaaaccagtggctgcggctggggaagctggctgttgtcccgactctggtggcggccacttcgccgacggcggcggttggtgcaaagggtgcttcgcaggacccgtggtccaccttctacgcgagcggcgagatttcatcggccgccgccgctaaatatgtggcgggctctgtgtcccatcagctgaggcatgcgtcgcagcagctgaagcatagtttgctgccgaaatcgagtgtctccgggcgcagcatacggatgctgttcgggagaagtcggctgcggaaaaacaaaagccgcaggctgacggagaggttggctgctgcggaggccaagaagggggatctctggcgtcagctggtggaggagaggagggacgcgaacaaggccattgccgatgcgcaggctgctcaagccgaggccaaacttgcgcgggtggaggccagtctcgcccgctaa

SEQ ID NO: 39033 - DNA, 444 bp, Zea mays
  Peptide Sequence Number=SeqID_80812
atgagggaggcaaaggacatgaggcccgtcacaattgtcgggagcacccccagctcctcctatagccactcgaggaagcggaggcccacctcttggccgggcacttcgaaggcggcactcctcggcgcgttggcgggcgagactggcctccgcccacgcaagtttgacctcagcttgagctgcctgcgcatcggcaatggccttgttcgcgtccctcctctcctccaccagctgacgccggagatcccccttctcggtgttggaacttgctatcagtcgcaagaaggccaacagggggcccgttacaatgggccggatagcacgtgggcctctgagctggacgaggccgcaagtgggatgccttcgtcgccggtcttcgtctggtgccgatcaagcgaaggggaccagttcgacaaagtcacctggtgccgaagacgtcgctag

SEQ ID NO: 39034 - DNA, 297 bp, Zea mays
  Peptide Sequence Number=SeqID_80813
atggagaagcggcctcaggaactcaccagcttcgggaaactccaacggatagtccgctataattcaccggactgtccggcgactttcactgaccgtgcacccgggctacggccaggccgcatgagggaacaacaaggccgaccgaggcatcgcaaaaaattaagacctcagaggagtcaaaccactcctccgaggcctcgggggctacacccggcgggtgcgctcgcgcgcacctaccggaacaaaatacaaccgagaagggccggtccccttgcaaaaatccggcagaacctctaa

SEQ ID NO: 39035 - DNA, 906 bp, Zea mays
  Peptide Sequence Number=SeqID_80814
atgtcgcgtctcctcgactgtggaactagtgccgtgactcgaggcatccctgcgcgtgacccaacagtgccaattgagtgcaacgatcacgggtcagtcagccgcggggagaggcgcgatggtcgaaatgaccagaggcggaccggcagtaattgcagcagcagacgggcggaagcagcggtcaaatcacctacaggctcgcatcctctcctgagacggcaggggagccccctcccacggagtaaagacgacgcacccgtgttccattcctcgaacggctcacgcacgcgcaatagacgccccgcgaatcgcccgtcccgtcgcattaactccttggcagggcaagcgacacctccgggaccgggaaagggggatatttcgaaaaaggatccttcccagcgaaggaaacgggccccaagccctcctactcatcaggggttcgaaggttacgccctccggggttcggcaaccgccccagagcacgcagagtcagggatgaccctgggtacgtctgttacatggccgaggctcgggctacgctcccgaggtaccctaggacatttccgagaccagcggaaacgattttgtaacggaatcccactggagggaggcatcgagccctcggaccctatcgaatgggcccggtccggcaaatcacctgcagaggctcgggggctgctctcgcaccaggctacggccgaactgttgaccacgtcaacaaacctacgtgaaaactctaagcctaaccgtgcacccgggccacggtcaggccgcatgagggaacaacaaggccgaccgaggcatcgcaaaagattaagacctcagaggagtcaaaccactcctccgaggcctcgggggctacacccggcgggtgcgctcgcgcgcacccaccggaacaaaatatga

SEQ ID NO: 39036 - DNA, 333 bp, Zea mays
  Peptide Sequence Number=SeqID_80815
atggctttgttcagccaaagactgctcggtctggggtgcaccggactgtccggtggtgcaccggacagtgtccgctgccttggggctataaaagggacccctaggcgcatggaggagtacaccaagcatcctttgagcattgttgatcactcacacttcattcttgcgcacttgttcgacattcttagtgatttgagctctgttctagatcacctattcaccccccctctaggtgctctcaactcccaaaagatgaagatgaatggggaagaaagaggaggaaagcaagctgtctgggctgcaccggacagtctggtgcccctcactggatag

SEQ ID NO: 39037 - DNA, 261 bp, Zea mays
  Peptide Sequence Number=SeqID_80816
atggcgagagtggcacgtaccctcctggcaacggatcgcctaaaaggggtggtgtactctcgggtggcgcggacctgttcatgcagtggaggatccgtgggaatagtagacatcaagcatacccttgagagtcttttccttagtcgggtgaggaagcgacgaatttttgttgcttttgctccaaggtggtatcaaatgaaggaaaacaggagcgaagatgcgggaggacttggtcctccatataggatctttttgttttaa

SEQ ID NO: 39038 - DNA, 261 bp, Zea mays
  Peptide Sequence Number=SeqID_80817
atggcgagagtggcacgtaccctcctggcaacggatcgcctcaaaggggtggtgtactctcgggtggcgcggacctgttcatgcagtggaggatccgtgggaatagtagacatcaagcatacccttgagagtcttttccttagtcgggtgaggaaacgacaaatttttgttgcttttgctccaaggtggtaccaaatgaaggaaaacaggagtgaagatgcgggaggacttggtcctccatataggatctttttgttttaa

SEQ ID NO: 39039 - DNA, 261 bp, Zea mays
  Peptide Sequence Number=SeqID_80818
atggcgagagtggcacgtaccctcctggcaacggatcgcctaaaaggggtggtgtactctcgggtggcgcgaacctgttcatgcagtggaggatccgtgggaatagtagacatcaagcatacccttgagagtcttttccttagtcgggtgaggaagcgacaaatttttgttgcttttgctccaaggtggtatctaatgaaggaaaacaggagtgaagatgcgggaggacttggtcctccatataggatctttttgttttaa

SEQ ID NO: 39040 - DNA, 261 bp, Zea mays
  Peptide Sequence Number=SeqID_80819
atggcgagagtggcacgtaccctcctggcaacggatcgcctaaaaggggtggtgtactctcgggtggcgcggacctgttcatgcagtggaggatccgtgggaatagtagacatcaagcatacccttgagagtcttttccttagtcgggtgaggaagcgacaaatttttgttgcttttgctccaaggtggtatctaatgaaggaaaacaggagtgaagatgcgggaggacttggtcctccatataggatctttttgttttaa

SEQ ID NO: 39041 - DNA, 636 bp, Zea mays
  Peptide Sequence Number=SeqID_80820
atgccgctcttcccctccaccgccgtggcgctgccccgcctcagcatcccattcccattccctctccaccacagccccatcccccttcccctcctgctccgccgccaccactcctcgccccacccgcgccttctccccttggcggcgtccctcccgcccccacctcccgaggagctgctccacagtcaggccacgggtctcgtcgctgcctcacaggccaacttcatgcgcgtcatcgtggacgccacggccccggggctggaccaccaccgcggctccgacctgctctgcgtcgtccgcgcgctgctcaagaagatccgccgccgcgtgctcgtcggtgaccgcgtcctcgtcggggcggtcgactggaccgatcgccgcgggatgatcgaggatgtcttcgagcggagatccgaggttgtcgacccgcctgtcgccaacgtcgaccgccttgtcgtgctcttctcgctcgaccagccgaagcccgagccggccacgctcacccggttcctcgtcgaggccgagtcttcaggaattccgtttgtgctcgtcttcaacaaggtcgagctcgtcgacgagcaggatttacctgttattcacatcaatattactatcagtatcaacggccagaattga

SEQ ID NO: 39042 - DNA, 1020 bp, Zea mays
  Peptide Sequence Number=SeqID_80821
atgggcgggtccggtgccaccacgtgtccagagaaagtgacatactctgaggtatcaccagtgagtacggaccctcatgggaagaccccctatatggggtccaggccgtccacagtggggtcccagggtcccaggacagagcatacccggtccttaatcaggacccaggcggggtctgatgccgacacgtgtccagacctgatcttgtgggatccggaccttatcacatacactcctgctccccgcccaggcggagacccgatgcttccacgtggcctactgtgcgcggctggtacaccgcgccgtcccgcgggccgcggggacaccagcctctccactgcgctctgcgctccaggcccctctctggcctctgcgaaatgccgctcttcccctccaccgccgtggcgctgccccgcctcagcatcccattcccattccctctccaccacagccccatcccccttcccctcctgctccgccgccaccactcctcgccccacccgcgccttctccccttggcggcgtccctcccgcccccaccctcccgaggagctgctccacagtcaggccacgggtctcgtcgctgcctcacaggccaacttcatgcgcgtcatcgtggacgccacggccccggggctggaccaccaccgcggctccgacctgctctgcgtcgtccgcgcgctgctcaagaagatccgccgccgcgtgctcgtcggtgaccgcgtcctcgtcggggcggtcgactggaccgatcgccgcgggatgatcgaggatgtcttcgagcggagatccgaggttgtcgacccgcctgtcgccaacgtcgaccgccttgtcgtgctcttctcgctcgaccagccgaagcccgagccggccacgctcacccggttcctcgtcgaggccgagtcttcaggaattccgtttgtgctcgtcttcaacaaggtcgagctcgtcgacgagcagcctctgtccacgtcaaagttggccgacctctacctctcttcacattctcgggacgcctaa

SEQ ID NO: 39043 - DNA, 381 bp, Zea mays
  Peptide Sequence Number=SeqID_80822
atgaacaagaacacaagagacacaagatttatcccgaggttcggtcacaccaccaaggtgccctacttcctcgtcgaggcacccacaaagagccgggtctctttcaaccctaatcctccctttgccaaccacaaagatttgaaatgggagaggcaagagatgtgtgagagagagtgggaggtgttcttcaagttagaaatggagtttgggtcgtgctctagtgtggggagagagttgaactttccctggaccccggttgaacttgcctggaccccagttgaagttgaagttcagctggatttgagaaagctcaactcggctgaagttcagctggagttgagaaagctcaactcggctgaagttcagctcagctgcagctga

SEQ ID NO: 39044 - DNA, 303 bp, Zea mays
  Peptide Sequence Number=SeqID_80823
atggcgagagaacgaagaacacaaacaaacacaatgagcaagaacacaagagacacaagatttatcccgaggttcggtcacaccaccaaggtgccctacttcctcgttgaggcgcccgcaaagagccgggtctctttcaaccctaatcctccctttgccgaccacaaagatttgaaaggggagaggcaagaagtgtgtgagagagagtgggaggtgtttctcaggttagaaatggagtccaagtcgtgctcatatgtggaggagagagatataactgttaagaccaatcaagctctagtttga

SEQ ID NO: 39045 - DNA, 447 bp, Zea mays
  Peptide Sequence Number=SeqID_80824
atggtgagagaacgaagaacacaaacaaacacaatgagcaagaacacaagagacacaagatttatcccgaggttcggtcacaccaccaaggtgccctacttccttgttgaggcgcccacaaagagccgggtctctttcaaccctaatcctccctttgccgaccacaaagatttgaaatgggagaggcaagagatgtgtgagagagagtgggaggtgttcttcaagttagaaatggagtttgggtcgtgctcttgtgtggggagagaggaccggttcaaccgcctggggcaggctgacagtcagtctgccagtcaaactggcagactgcaggtcagactgcaaaaacaggtcctgacaccggttgaaccgcccctagggccggttcaaccgcctgggggtcagactggtagtcagtctgctagtcaggaggtcagaccggtcagttga

SEQ ID NO: 39046 - DNA, 387 bp, Zea mays
  Peptide Sequence Number=SeqID_80825
atgaacaagaacacaagagacacaagatttatcccgaggttcggtcacaccaccaaggtgtcctacttcctcgttgaggcgcccacaaagagccaggtctctttcaaccctaatcctccctttgccgaccacaaagatttgaaatgggagaggcaagagatgtgtgagagagagtgggaggtgttcttcaagttagaaatggagtttgggtcgtgctcttatgtggggagagaggaccggttgaagttcagctcagttcgggaaaaaaccctggctgaacttttccctgaaccccggttcaacctctttagaccccggttgaacttgccctggaccccggttgaacctctctcaacctcggttcaacttgccctggaccctggttga

SEQ ID NO: 39047 - DNA, 330 bp, Zea mays
  Peptide Sequence Number=SeqID_80826
atgaacaagaacacaagagacacaagatttatcccgaggttcggtcacaccaccaaggtgccctacttcctcgttgaggcgcccacaaagagccggatctctttcaaccctaatcctccctttgtcgaccataaagatttgaaatgggagaggcaagagatgtgtgagagagagtgggaggtgttcttcaagttagaaatggagtttgggtcgtgctcttatgtggggagagaggtcaggcagactgtctgccagtctgactatcagactgactggcagactgacctacagactggtcaagttgaccaagaccggttgaaccgcccctaa

SEQ ID NO: 39048 - DNA, 312 bp, Zea mays
  Peptide Sequence Number=SeqID_80827
atggtgagagaacgaagaacacaaacaaacacaatgagcaagaacacaagagacacaagatttatcccgaggttcggtcacaccaccaaggtgccctacttccttgttgaggcgcccacaaagagccgggtctctttcaaccctaatcctccctttgctgaccacaaagatttgaaatgggagaggcaagaggtgtgtgagagagagtgggaggtgtttctcaggttgggaatgaagttttatgcgtgctctcctgtggggaagagtgtgggaggtgtatataaaggtgccccaaaagctggtggccgttag

SEQ ID NO: 39049 - DNA, 279 bp, Zea mays
  Peptide Sequence Number=SeqID_80828
atgagcaagaacacaagagacacaagatttatcccgaggttcggtcacaccaccaaggtgccctacttcctcgttgaggcgcccacaaagagccgggtctctttcaaccctaatcctccctttgccgaccacaaagatttgaaatgggagaggcaagaggtgtgtgagagagagtggaaggtgtttctcaggttgggaatgaagttttgtgcgtgctctcctgtggggaagagtgtgggaggtgtatataaaggtgccccaaaagctggtggccgttag

SEQ ID NO: 39050 - DNA, 315 bp, Zea mays
  Peptide Sequence Number=SeqID_80829
atgagcaagaacacaagagacacaagatttatcccgaggttcggtcacaccaccaaggtgccctacttcctcgttgaggcgcccacaaagagccgagtctctttcaaccctagtcctccctttgccgaccacaaagatttgaaatgggagaggcaagaggtgtgtgagagagagtgggaggtgtttctcaggttaggaatgaagttttgtgcgtgctctcctgtggggaagagtgtgggaggtgtatataaaggtgccccaaaagctggtggccgttggggaaatctgactgaaattcggttgaaccggttctaa

SEQ ID NO: 39051 - DNA, 324 bp, Zea mays
  Peptide Sequence Number=SeqID_80830
atgagcaagaacacaagagacacaagatttatcccgaggttcggtcacaccaccaaggtgccctacttcctcgttgaggcgcccacaaagagccgggtctctttcaaccctagtcctccctttgccgaccacaaagatttgaaatgggagaggcgagaggtgtgtgagagagagtgggaggtgtttctcaggttaggaatgaagttttgtgcgtgctctcctgtggggaagagtgtgggaggtgtatataaaggtgccccaaaagctggtggtcgttggggaaatctgactgaaattcggttgaccggttctaaaaccggttga

SEQ ID NO: 39052 - DNA, 345 bp, Zea mays
  Peptide Sequence Number=SeqID_80831
atgatcaagagggtcaaggtacctgaagctaaggtttggaatccaacactcagctcaaacaaggcaaaaaggaaaaacttggtaaaggctagaaataacatacattgcaaaagtgctttttggtgcccgtttgagttgaaacaggaacttcaagtggagaatgagatagaggttaatcaagtcaatgagatgagctcttgcgaacacagacaatcaaagaaggaacaatcacaagagacacacgattttatcccgtggttcggccaagtaacacttgcctacttccacattgtggcgtcccaatggacgagggttgcactcaacccatttcaagtgatccaatga

SEQ ID NO: 39053 - DNA, 531 bp, Zea mays
  Peptide Sequence Number=SeqID_80832
atggacgagggttgcactcaacccctttcaagtgatccaatgatcaacttgaataccacggagttggcatttggcatggcatacatgcttgtagagaggggtaatcatggtgacactgcggatgcccgaacccagagcagcgtcgaggccttccatcagtgccatcaactccaccattatgcggccacccacgaagctctccaccggcttctgtatcctaagcacctccccgcccgtgagatcgatggcctggacggcgaaaggccatgtgattattatgggcctcatgatttccagccagattctcctgaggatatcccttcggcaagatcccttccacatgactacttcgttcatgttgcaggagacattcctgatgttgttgatgatcctccgattagggcatgtgtccactttgaagaggggtttaatgtctctaatagtcctgaatttataattgaagaggagccttatggtgttgctatggctgctgattctgatgatgaccacccggtttgtgagcttatgtag

SEQ ID NO: 39054 - DNA, 273 bp, Zea mays
  Peptide Sequence Number=SeqID_80833
atgtccactctgctgacgggcggcagccaggccatcatgcaggtggcgtgcccgtccgccccggtggcaggcagtacgcccgtgctgcggcatacactgtgctcatcatcactctttggcgacacggacgaccattgtggtgacactaacggtccacaccgggcagctggacaagttcgaggccgttatccaaagagccatatagttgttcctcctgtagcgcccactcgagaggaggatgagtatgtgatcacatcttatggcgatgagtga

SEQ ID NO: 39055 - DNA, 453 bp, Zea mays
  Peptide Sequence Number=SeqID_80834
atgcacaacccagacctccgggcgaggttcaagacctccacaggtggcgtgcccgtccgccccggtggtaggcagtacgcccgtgctgcgacatacactgtgctcatcatcacaacaccatacaactacgtagacatcccggactccgtcaagggcagctccgggggcgttgtctgcggccagggagttactgcgccacccccaagctccacggcctcaccaggggccatgaagcagtggcgtgacgacgtcgaccgactgctcggcatggcgcactccggctcgaccaggtcgaggtcgcggtcatcccggcgccaacatgaggcgacgacgtctgtgcgctcaccctcagtgaggggtgcacagaccgacgaccttcgggcagagctcaaccgtagtcgtgcgggagaggatgcccgggtctccctagagaggacacgggagcgccgatga

SEQ ID NO: 39056 - DNA, 318 bp, Zea mays
  Peptide Sequence Number=SeqID_80835
atgaccctttatgcagagacacaaagttacttcttttctgacctcctcccccccaatgatctccaatatgccgagaaggatgagcttcgtgatgagaagcagaagctgaaattggagaatgagagtttagaacaccagatgaagctgatgacatcgactccaacctacatgcctcatccaaccctgatgccggtgcctttccctcaggcacccctagcaccgttccatgcccaggggcaagctacatggcagaagctgatgatgccctttgtcagctatccggggtacccaatgtggcagttcatgccgccttcatag

SEQ ID NO: 39057 - DNA, 243 bp, Zea mays
  Peptide Sequence Number=SeqID_80836
atgagtgtggaagtgggcagctatgtgaacaccaatgatgttttcaaggagcccaatgatgtcttcaaggagcctggcagcaataaacgtttgaggtcaggatccaatgatatgcatgtgccaacatctaaagcttctaccgaaaggttgccggggcgccgttgcagcatgacttccagaagcaccagcgccacgctggccaagttctcgtcgaccacacacaccgctgttgatgcagtctag

SEQ ID NO: 39058 - DNA, 642 bp, Zea mays
  Peptide Sequence Number=SeqID_80837
atgacgctcgacgcgcactacctcaggggctccatggcagccatctactcgctgctcaagcacgcctcctgcccggagtcgctcttcttccactttatgctggcgactcaattgatggaggattgtgtcaccagtcctgatgttaatgtggaagtgggcagctatgtgaacaccaatgatgttttcaaggagcccaatgatgtcttcaaggagcctggcagcaataaacggttccttgaattagggtctacattagaaccagggaagccagtaaaagctgacaaagttgctatcctaagtgatgctactctcatggttattcagcttcgtttagaagcacagcagctgaaagaaactaatggtagccttgaagaaaagatcaaagaactcaaggccaagaaggatgagcttcgtgatgagaagcagaagctgaaattggagaatgagagtttagaacaccagatgaagctgatgacatcgactccaacctacatgcctcatccaaccctgatgccggtgcctttccctcaggcacccctagcaccgttccatgcccaggggcaagctacatggcagaagctgatgatgccctttgtcagctatccggggtacccaatgtggcagttcatgccgccttcatag

SEQ ID NO: 39059 - DNA, 642 bp, Zea mays
  Peptide Sequence Number=SeqID_80838
atgacgctcgacgcgcactacctcaggggctccatggcagccatctactcgctgctcaagcacgcctcctgcccggagtcgctcttcttccactttatgccggcgactcaattgatggaggattgtgtcaccagtcctgatgttaatgtggaagtgggcagctatgtgaacaccaatgatgttttcaaggagcccaatgatgtcttcaaggagcctggcagcaataaacggttccttgaattagggtctacattagaaccagggaagccagtaaaagctgacaaagttgctatcctaagtgatgctactctcatggttattcagcttcgttcagaagcacagcagctgaaagaaactaatggtagccttgaagaaaatatcaaagaactcaaggccgagaaggatgagcttcgtgatgagaagcagaagctgaaattggagaatgagagtttagaacaccagatgaagctgatgacatcgactccaacctacatgcctcatccaaccctgatgccggtgcctttccctcaggcacccctagcaccgttccatgcccaggggcaagctacatggcagaagctgatgatgccctttgtcagctatccggggtacccaatgtggcagttcatgccgccttcatag

SEQ ID NO: 39060 - DNA, 1354 bp, Zea mays
  Peptide Sequence Number=SeqID_80839
gcagagcgcaccccgcgccatgtcagccacgtcgtcgttcacagcgggggagtcgtctcgagctggcgagcaaccggagcgcgacgaggtggtcgagttcctggactgcccttgggtagcactctcctccgccatcgtcgtcatcggcgccaacgacgagcgggcacggatgctcgcgcccggtgcctccgacatctttctcgacctccagcccccgctggtcggcgcctcctatctggtcctgcccgagcgcatcgtcgcgcactacaggtattcaggctaccaaccctgcgtcttgtccgcctgctccaactgcctcctcttcctggctatccaagccgagggcgtctcgaacccggccttcttcctcggcaacgcccgcgcccgcaccgtcgtccgcctccccgacgtccccgcccacctcggcgtcaacatcatccggcgacagagcattggtctcatcgccgatcagcgacacgatggacattacatggtggcccagctccaccccacctggacgaccctccacaagaccctgctatgctactccaccgtcaccgaccagtggactgccaggccgctggcctccgccgaggagcaccctcgctggggcgcccacggcgttctcgcccacggcggcctcctctggtggatcgacgtctcctacggcatgctcgtctgcgaccctttcgccgcagacgacaacctgcacctccgctttatcccgctcccggtcggctccatgctcatggcccagccagagctcatggcccatggcctccgctttatctcccgctcagggctcatggcccatcaacgcttcatcaggcccagccagggcaagctgcgatacgtggagatccaaggagcccccagcggtatgcttactaccaactaccagcccccgtcgaacccccaggtccgcatgttcacgctcgtcagccaagagggccagcatcactgggtacacgagtacacggcgaccttcctcgacatttggagctaccgcagctacgccgacgccggtctgccccggggcgtggtgccttcgctcgccctcatcgaccccaacaacgccaacatcatctacttcttccagggcacgacgctcttcgcagtggacagatacgccaggaaggtcttgcaccacctgcaatacttggtagacgtagtagactccacatacgcggacctcacgttgcagaactcccgctacgttagtgcctgggagctgccaccaggagttttcgtcaacggtcatgggccaaacgggacggcggaagtcgccggcggcgcctggatctcgctctcgggagggaccccgtcgggaggagagatcctaggggatgtctag

SEQ ID NO: 39061 - DNA, 1329 bp, Zea mays
  Peptide Sequence Number=SeqID_80840
atgtcagccacgtcgtcgttcacagcgggggagtcgtctcgagctggcgagcaaccggagcgcgacgaggtggtcgagttcctggactgcccttgggtagcactctcctccgccatcgtcgtcatcggcgccaacgacgagcgggcacggatgctcgcgcccggtgcctccgacatctttctcgacctccagcccccgctggtcggcgcctcctatctggtcctgcccgagcgcatcgtcgcgcactacaggtattcaggctaccaaccctgcgtcttgtccgcctgctccaactgcctcctcttcctggctatccaagccgagggcgtctcgaacccggccttcttcctcggcaacgcccgcgcccgcaccgtcgtccgcctccccgacgtccccgcccacctcggcgtcaacatcatccggcgacagagcattggtctcatcgccgatcagcgacacgatggacattacatggtggcccagctccaccccacctggacgaccctccacaagaccctgctatgctactccaccgtcaccgaccagtggactgccaggccgctggcctccgccgaggagcaccctcgctggggcgcccacggcgttctcgcccacggcggcctcctctggtggatcgacgtctcctacggcatgctcgtctgcgaccctttcgccgcagacgacaacctgcacctccgctttatcccgctcccggtcggctccatgctcatggcccagccagagctcatggcccatggcctccgctttatctcccgctcagggctcatggcccatcaacgcttcatcaggcccagccagggcaagctgcgatacgtggagatccaaggagcccccagcggtatgcttactaccaactaccagcccccgtcgaacccccaggtccgcatgttcacgctcgtcagccaagagggccagcatcactgggtacacgagtacacggcgaccttcctcgacatttggagctaccgcagctacgccgacgccggtctgccccggggcgtggtgccttcgctcgccctcatcgaccccaacaacgccaacatcatctacttcttccagggcacgacgctcttcgcagtggacagatacgccaggaaggtcttgcaccacctgcaatacttggtagacgtagtagactccacatacgcggacctcacgttgcagaactcccgctacgttagtgcctgggagctgccaccaggagttttcgtcaacggtcatgggccaaacggtacgtacacggttgggattaaattagttattgggaacgtattcagggcacataacactggtgcacaaggtgcatag

SEQ ID NO: 39062 - DNA, 252 bp, Zea mays
  Peptide Sequence Number=SeqID_80841
atggtctcccattccggttatggtgggtacaagtgcggtcactgcacgacggcagtcggggtcagtgaggcattgtacgccaaggcgactcagctagtgcttttggcaaaccaaacccctcagccatacagctgcatgtctagaggttctctggaggacatggttgctggagtgacttggccgtccatcttgccaccgggttggatagtcgagtgggaccctacctcggctgaggaggagcatgaggagtga

SEQ ID NO: 39063 - DNA, 204 bp, Zea mays
  Peptide Sequence Number=SeqID_80842
atgacagtcggggtcagtgaggcattgtacgccaaggcgactcaactagtgcttttggcaaaccaaacccttcagccaaacagctgcatgtctagaggttctctggaggacatggttgctggagtgacttggccgtccatcttgccaccgggttggacagtcgagtgggatcctgcctcggctgaggaggagcatgaggagtga

SEQ ID NO: 39064 - DNA, 231 bp, Zea mays
  Peptide Sequence Number=SeqID_80843
atgcggtggctagggtttggggggaggggcgcactgagatgggtgggccacgcgtgcgcgccggccgagggtggccgctgggctagcgcgcggagtggggggaaaggtgcgggttgggcctcctgggccacgggcgcgagggggatggtggtctttccttaccaaggggaaactactctaaggccattgaaaggcaaggggaatgataagacatgcaggataggggcatga

SEQ ID NO: 39065 - DNA, 402 bp, Zea mays
  Peptide Sequence Number=SeqID_80844
atggcgggctctacggcgggtggggctgacggcggtggcgtctgctcgccggagtcggggctgagcgacgcgcaacagcaccatgcgagggcgtgtcgtagcagggaaggctcggctagacatcggcctggccagggatcatgcagggtggctgcgcgagctcggatgggggcgaggcgggctagttgtgtgggccacgccaggccgcaccggcgaggggctgggccagctgcgttgccagggtgttacaaatctaacccacttaacaggaatctcgcccccgagcttcaagaagacgctagcaagaaaaacaagatggtggtatttccttacaaaggggaaactactctaaggccattgaaaggcaaggggaataataagacatgcaggatagggacatga

SEQ ID NO: 39066 - DNA, 387 bp, Zea mays
  Peptide Sequence Number=SeqID_80845
atgggggataagcttcatcgtcgagagggaaacagcccggatcaccagctaaggcccctaaatgaccgctcagtgataaaggaggtgggggtgcaaagacagccaggaggggagcgttccgccttagagggaagcaaacgcgaaagcgggggtcgacgaagcggaagcgagaatgtcggcttgagtaacgaaaacattggtgagaatccaatgccccgaaaacccaaggtttcctccgcaagcttaggtggaaggcgaagaaggcccccttccgggggggcccgagccatcagtgagataccactctggaagagctcggattctaaccttgtgtcagacccgcgggccaagggacagtctcaggtagacagtttctatggggcgtag

SEQ ID NO: 39067 - DNA, 567 bp, Zea mays
  Peptide Sequence Number=SeqID_80846
atggtcagcaagtatgatggttctaatgatgatcctgcacgcgtggttttggctgtattgactgcatcatttggtgtaactggttattctttgccttgggatcaaattggttattgggcagtcaaaattgttacaggtgtacccgaagctattccggggtcaaggtcggccagtgagacgatgggggataagcttcatcgtcgagagggaaacagcccggatcaccagctaaggcccctaaatgaccgctcagtgataaaggaggtgggggtgcaaagacagccaggaggggagcgttccgccttagagggaagcaaacgcgaaagcgggggtcgacgaagcggaagcgagaatgtcggcttgagtaacgaaaacattggtgagaatccaatgccccgaaaacccaaggtttcctccgcaagcttaggtggaaggcgaagaaggcccccttccgggggggcccgagccatcagtgagataccactctggaagagctcggattctaaccttgtgtcagacccgcgggccaagggacagtctcaggtagacagtttctatggggcgtag

SEQ ID NO: 39068 - DNA, 447 bp, Zea mays
  Peptide Sequence Number=SeqID_80847
atgaaccggagatctgatcaaacgaaccggaagcacgatgacgatgctctcgtcgagctggtcacggtgatgttctgggttgccacagaagatgaacgggcggagacagattcctcaccagagttgtcgctagagtttgggcgggagtcaaacttcgacgagctgatcatggaggcttacggctcttattgtcggcgtttcgagaccggggggtccctcaggccgacgagtgagtgccgcgtgccccagcccagatgggtcgagcgcgtgggcgagcgcgaaggggggaaaggagcgaggcggccggagaccggcgtgagagaggtgggaatcccgcggccttcgtgtttgtcccgcgcccaggtcgggcgtaaggagaggatccaggtgtacaacgggggtgtagcaaagtgctacgtgtctagcgggggagagctagcgccctaa

SEQ ID NO: 39069 - DNA, 261 bp, Zea mays
  Peptide Sequence Number=SeqID_80848
atgaaccggagatctgatcaaacgaaccggaagcacgatgacgatgctctcgtcgagctggtcacggtgatgttctgggttgccacagaagatgaacgggcggagacagattcctcaccagagttgtcgctagagtttgggcgggagtcaaacttcgacgagctgatcatggaggcttacggctgctgggaggtgggtggttacatgatagatctaatctggtacttatctgttacaatcctatcatatcctatctattaa

SEQ ID NO: 39070 - DNA, 496 bp, Zea mays
  Peptide Sequence Number=SeqID_80849
atgtcctctgaatgcaagctagtggaagatgaggtacttgtggacccagaggtttttgaagttgatgacccagatggatcttgcctgggagcaacatttattcatcttaataaacatttatccatcttgcctggtacgcggccgtgggacgaggtgaggatgccggccgcctggagctcgcgggacgaggggaagacgccggccgcctggagctcgcgggacgaggggaagacgccggccgcctggagctcgcgggacgaggggagggacgccggccgcctggagctcgcgggacgaggggaggacgccggggcgcgggacaaggggatggacgccggggcgcaggacgaagggagggacgcagcggcggatggggggcgcgggaagaggggaggacgccggcgcgggatgaggggaggacaccggcgcaggacgacggcgcaggacgacggcgcgggacgaggattgccgaacgcgggacgtggggagaaacgcg

SEQ ID NO: 39071 - DNA, 435 bp, Zea mays
  Peptide Sequence Number=SeqID_80850
atgagttctgagtcatcttctgatacatctgggtcatcaacttcaaaaacctctgggtccacaagtacctcatcctccactagcttgcattcagaggacattgtcgaaaaaggttcttgtacttctgccaggcatagaacgaaacgaggtcacgccaaatgcaagaagctagaaaaaggaggtccccgtcgtcttacgtttgataaaaatgggattgcccagtcaccagtaaaacatgtcaatgaattctcaagttattgtggttatatagcacgcatgcgtgttgatattaggataaaggattggcgaaaagtgcctacagtggtaaaatcaaacctatgggaggatgtttcaaagaaatttgtcatgccaagagatgaaacccataccctcaatgtgaagaaggtcgctttgaaatctatgagtaaggattga

SEQ ID NO: 39072 - DNA, 1686 bp, Zea mays
  Peptide Sequence Number=SeqID_80851
atgagttctgagtcatcttctgatacatctgggtcatcaacttcaaaaacctctgggtccacaagtacctcatcctccactagcttgcattcagaggacattgtcgaaaaaggttcttgtacttctgccaggcatagaacgaaacgaggtcacgccaaatgcaagaagctagaaaaaggaggtccccgtcgtcttacgtttgataaaaatgggattgcccagtcaccagtaaaacatgtcaatgaattctcaagttattgtggttatatagcacgcatgcgtgttgatattaggataaaggattggcgaaaagtgcctacagtggtaaaatcaaacctatgggaggatgtttcaaagaaatttgtcatgccaagagatgaaacccataccctcaatgtgaagaaggtcgctttgaaatctatgattgtcatgagtggacatgttgcacccccaaagtcatcgaacttctttgttgaatttgggatggacagtggatatcacaaaaaatatacatccagttcatccaaagtgcaggggatactttttacctacacttttgtacaacatatgctctacagaatccttcaagtagcaggaactgtcacaaaggcaatgggtgccagatattgtatcatcccaataccaacctcttcacagaactccactatctctttgttcaggatcttgccaaagacttccttagcaaatctgcggatggagctcctcggtattagaagattcagccaaggatgtggaacttctccaagctcaccttctggacgaatgctcctattcaatgttctgcgtgcaatgcataaaagagagttggatgaaaaggttcgtgatgcacttcatctttacattgaagcccgcggcataaatgagaagctcttccgttttctccaagcttggcttcatgtaaaggatcaccgcaatcttgtacgctggttcaagagcgttggttcattcatcagtgaccaaagccaaagcaagatgacaaacactgtgacaagcatgaaccagtatattctttcattatcagatgacaaacaattggtccccgggctcatttctctaatagaacagggaactgatgttctgcgtgtgaagccccttttgtttgttgctctgctttgcaagaatagtcgaaggtggcttcctcatttcttttgcaatgcaaaattaatatcagctgttgatagactgggaaaggagaaggagggttttattcatcattgtacagaagcatttgtgcagttggttgcttccttggtccctggtattcttgacactgtctccagcgatatacaacaggttatggttggcaagcgccatggacctgttactgctttagctgggcgagctcatccaaagagcacaattcatctgttccctgttattcttcatcttctgggaagtgcatccttcaagcatagagttgtgacagggcatgtattgcttcagttggcaaatcttattaagattttggaggcaccatttcaggtgctatttaagaaccttactgttgacataaaggatgtgaaaccaacgtccctgctcaaagatcgtctgcgtgaagttgagggaaatccaaagctcggctcccttggtccacaacttcaatatagcaagtatgcctccaagtttctgaaaggattgttatatttcatttcgtatttaatctga

SEQ ID NO: 39073 - DNA, 1002 bp, Zea mays
  Peptide Sequence Number=SeqID_80852
atgggaccattgttgctatctttcaggatcttgccaaagacttccttagcaaatctgcggatggagctcctcggtattagaagattcagccaaggatgtggaacttctccaagctcaccttctggacgaatgctcctattcaatgttctgcgtgcaatgcataaaagagagttggatgaaaaggttcgtgatgcacttcatctttacattgaagcccgcggcataaatgagaagctcttccgttttctccaagcttggcttcatgtaaaggatcaccgcaatcttgtacgctggttcaagagcgttggttcattcatcagtgaccaaagccaaagcaagatgacaaacactgtgacaagcatgaaccagtatattctttcattatcagatgacaaacaattggtccccgggctcatttctctaatagaacagggaactgatgttctgcgtgtgaagccccttttgtttgttgctctgctttgcaagaatagtcgaaggtggcttcctcatttcttttgcaatgcaaaattaatatcagctgttgatagactgggaaaggagaaggagggttttattcatcattgtacagaagcatttgtgcagttggttgcttccttggtccctggtattcttgacactgtctccagcgatatacaacaggttatggttggcaagcgccatggacctgttactgctttagctgggcgagctcatccaaagagcacaattcatctgttccctgttattcttcatcttctgggaagtgcatccttcaagcatagagttgtgacagggcatgtattgcttcagttggcaaatcttattaagattttggaggcaccatttcaggtgctatttaagaaccttactgttgacataaaggatgtgaaaccaacgtccctgctcaaagatcgtctgcgtgaagttgagggaaatccaaagctcggctcccttggtccacaactccaatatagcaaaaattatggatttggctttggataa

SEQ ID NO: 39074 - DNA, 240 bp, Zea mays
  Peptide Sequence Number=SeqID_80853
atgagggtcgcagtccatgcagtattgataggcggtgaccgtttctttggtaacgtgcaaacctcagacaaccctgcaggtgcccctgaatcacttgacaagttcggtatctgcttttcttaccttcccaagagcgtttcacccgtcatgcagacattacaagcatcggagcaagtcttacccgacttaagaaaagactctcaagggtatgctggctttaagggagtcaaggttaagtaa

SEQ ID NO: 39075 - DNA, 471 bp, Zea mays
  Peptide Sequence Number=SeqID_80854
atggcctcggcaagtgtcgggggtactagaggtggattcggggttgcctccctcccacgagaggcggcggatgtcatttctcaattcattgattctgttgccatccgcgacccatatgtcagtcctgcgtcagagttctgtttgaagctgattaactttcacttcaagatccctgatcggatcattactcccactactgccatcctcgtgtcttggggcaagttgatgacgtggcacaccaattgggccaagatgggcttcgctctgataccagctgtgacggaacctcccaagtcattaggcccacctacagttgtccttgtccaatggacctctgacaaccctgtaggtgcccctgaatcacttgacaagttcggtatctgcttttcttacctttcccaagagcgtttcacccgtcatgcagacattacagatcatcgaagatacgaaaatgcggaagcgattacataa

SEQ ID NO: 39076 - DNA, 684 bp, Zea mays
  Peptide Sequence Number=SeqID_80855
atggaatgctgttatcaagttcttatacgttcttaccaagccacagtggtgaaatgcaatcaacaggtggaaccggtgaaagattggatgagcgattgcgtggagaaacagaaacctgctcgtcgtagaaatatgtggagttctgggtgcaaaggacagatggaactagcagaatggcagtaccgtaaatattgtactagtgatgccaaaaaggcactagtaggaatcacaggagaaaaaacactcgataaactcaccgatcaacctggaaatctaataccaattgatgtagctgaggtgcccgatctttcgggaggggatgctcggagtcgtgggcatctcttgatgctagttgatgtgtcgctggacctggcgtaccgctgggaagcttccaattgctcgtcagaatctcctctgccccgccaatcgcctcccaccgtggacgtgtgcctccgcgccataatcgccagtaagaagtcttcctatgtgttcaccttcgccttctcatcgcgtagaacccgtgggattcgagtttgcgtggcccgtgtgtgggggagggagatccggccatggagcgccgccgctcagggtgctcactctgtcgtagtgtggaccgatcgtggagacgtgtgtagtccgttggatgttcagccgagggccgggattgattcgggatcgtactga

SEQ ID NO: 39077 - DNA, 606 bp, Zea mays
  Peptide Sequence Number=SeqID_80856
atggaatgctgttatcaagttcttatacgttcttaccaagccacagtggtgaaatgcaatcaacaggtggaaccggtgaaagattggatgagcgattgcgtggagaaacagaaacctgctcgtcgtagaaatatgtggagttctgggtgcaaaggacagatggaactagcagaatggcagtaccgtaaatattgtactagtgatgccaaaaaggcactagtaggaatcacaggagaaaaaacactcgataaactcaccgatcaacctggaaatctaataccaattgatgtagctgaggtgcccgatctttcgggaggggatgctcggagtcgtgggcatctcttgatgctagttgatgtgtcgctggacctggcgtaccgctgggaagcttccaattgctcgtcagaatctcctctgccccgccaatcgcctcccaccgtggacgtgtgcctccgcgccataatcgccagtaagaagtcttcctatgtgttcaccttcgccttctcatcgcgtagaacccgtgggattcgagtttgcgtggccgtgtgtgggggagggagatccggccatggagcgccgccgctcagggtgctcactctgtcgtag

SEQ ID NO: 39078 - DNA, 360 bp, Zea mays
  Peptide Sequence Number=SeqID_80857
atggccggctctggagagtcgccggcgatggaaggagatgacgttcgtcttgatccagagacagagggaggagttgatggtaactcactggtcacaccacctcctgctctactgggtcctgtgatcgccgagatgagcataggggaagaaggagaacaaagggttcgacctcctatgtccaatattagctccagggagatggatacgcctcaaatactgcattcacatggaaaaaacattgatccaactatagtgccaacagtagggatgactttcaaggatgttgatgatgcatataaattctataaaaggtctattgtgtgttcatcttttaagatccttcatgcatcttcaagttga

SEQ ID NO: 39079 - DNA, 627 bp, Zea mays
  Peptide Sequence Number=SeqID_80858
atggccggctctggagagtcgccggcgatggaaggagatgacgttcgtcttgatccagagacagagggaggagttgatggtaactcactggtcacaccacctcctgctctactgggtcctgtgatcgccgagatgagcataggggaagaaggagaacaaagggttcgacctcctatgtccaatattagctccagggagatggatacgcctcaaatactgcattcacatggaaaaaacattgatccaactatagtgccaacagtagggatgactttcaaggatgttgatgatgcatataaattctataaaaggtatgcatatgaagttggatttccactgaagaaatacagagagaagacattcagtaagtggataaattgttcacgtgaagctgcaaaaattgaactggtaaacttggagcataaccatgagttcataactgacgaagcagagaaacaacatttatgttgcaacaaaattagggatgctgagttcataaattttgttgatgcaatgcatgatagccgagtgccgcagcattgcatagttgattttatatcagaaatgcatgatgggccggagaacgtaccggagggcagccaggagaagagaaaactgcgcaaatga

SEQ ID NO: 39080 - DNA, 240 bp, Zea mays
  Peptide Sequence Number=SeqID_80859
atgagcactataaaggatggagctaaagcaaggattgtaaccgacaggggagagaatgcaaccaaagtcaagataggtaaaacatcattctcaaatcaaaataggaaagatgatatttcaaaaggtaggcataggaactggcaaggtgtcaaagaagagggagcagtcaatgatgaaatagatgaggcattatccccgaacagggatggaaaagaggaggctcaaaggggtaggttcaat

SEQ ID NO: 39081 - DNA, 366 bp, Zea mays
  Peptide Sequence Number=SeqID_80860
atgcaggatgggcgcatgagcataataaaggatgaagctgaagtaaggattgtaactggcaagggagagaatgcatccaagttcaggataggtgtcaaagaagagggagcagtcaatgataaaatagatgaggcattatcctcgaacagagatggaaaagaggaggcttcaaagggtaggttcaaggtaaagatgataataatgaaaagcataacaaaggatagcgttaagataagactcgcgaagtggcaaagtggagaaaacaataaaggaggtacaaggacaaagataaattacaaatgtaccttcggcttgaaggaaagaaagtacaagtgtggcgcaaaagtgaatgccaagtccgcgtga

SEQ ID NO: 39082 - DNA, 711 bp, Zea mays
  Peptide Sequence Number=SeqID_80861
atggaagacagactcgacctcggcttcggaggagcctccacgtcgcccgacctagggcacaggccagccacgtcaacaggaagcgccatcatcaccctaccccgagccgactcgggccgcagagaacaagaccgctcccttacggaagcagggggacgtcagcaaggactcaaccgctccgacagctgtccctccgccaggcttcgccgctcctccgacagccacgacatcacaccagcagggtgccaagatctctccggctgccaccttggcatggccttcttagaaaaggttggccgcgcggggacgaggacgagacaggcgctctcttggggccgctcgcttccctcacccgcatggacgcttgtaaccccctactgcaagcgcacccgacctgggcgcgggacgaacacgaaggccgcgggatttccacctctctcacgcccgtctccggccacctcgcttccccccttcgcgctcgcccacgcgctcgacccatctgggctggggcacgcggcacattcactcgtcggcttagggaccccccggtctcgagacgccgacagcatcgagaaggtggaggacgcaacgacgaaccgaacctcctccatgcaggaccttgggaagctggagactgacgagcaaaaggaggtcacctactacgatgcatatccagtcgtgcgtggtctccttcgaggagcaggttggtga

SEQ ID NO: 39083 - DNA, 1119 bp, Zea mays
  Peptide Sequence Number=SeqID_80862
atgcaaccgagaaaggctggtccccttgcaaaaaagtgcgacgaaagcctccaagcgagtgctaacactcccttcgaggctcgggggctactgtcggggaccataattaggggtaccctcaagacgcctaattctcagctgcagagccgaagtgaccgccgtcacttcgccgctccactgaccggcctgacagaaggacagtgccgcctgcgccactccgactgcagtgccactcgacagagtgagactgacaggcagtcaggccttgccaaagggctcggactcaggctcagcccccagaagacgacgaactccgcttcgcccgaccctagggctcggactctgccctggcctctgccgaacaacctccgcctcgcccgacccaggggctcggcctcggcctcggccatggaagacagactcgacctcggcttcggaggagcctccacgtcgcccgacctagggcacaggccagccacgtcaacaggaagcgccatcatcaccctaccccgagccgactcgggccgcagagaacaagaccgctcccttacggaagcagggggacgtcagcaaggactcaaccgctccgacagctgtccctccgccaggcttcgccgctcctccgacagccacgacatcacaccagcagggtgccaagatctctccggctgccaccttggcatggccttcttagaaaaggttggccgcgcggggacgaggacgagacaggcgctctcttggggccgctcgcttccctcacccgcatggacgcttgtaaccccctactgcaagcgcacccgacctgggcgcgggacgaacacgaaggccgcgggatttccacctctctcacgcccgtctccggccacctcgcttccccccttcgcgctcgcccacgcgctcgacccatctgggctggggcacgcggcacattcactcgtcggcttagggaccccccggtctcgagacgccgacagcatcgagaaggtggaggacgcaacgacgaaccgaacctcctccatgcaggaccttgggaagctggagactgacgagcaaaaggaggtcacctactacgatgcatatccagtcgtgcgtggtctccttcgaggagcaggttggtga

SEQ ID NO: 39084 - DNA, 465 bp, Zea mays
  Peptide Sequence Number=SeqID_80863
atgaccggggataaacaaaggcaaaagctcaagcaaaagccatcaagcaaaatctccaacacctacatcaaaaaggtgaacaaaaaggatgctacaccatatttgatcaagaagaaaaagaacggaaaggtgatagcaatcaaggccaacaagcaagccaacaaaggaaaggaggccaaacacatctgggtgccaaaggagataatctcaaccatgaaaagcactaagaaggtttggatcccgaaagggaatttattgccaagtgggttagtgaaaattttggacccaaatttcccacccatgactaagatatgcgtatgtatttatcttttatctagtttacctttcttgcctagtattacatttgttatgtacttttgttcaaaatcatgcatactagttcacaggatgcgaagagaattggaccaaggcaatgaggatgcaacacctcaaaagaagacataa

SEQ ID NO: 39085 - DNA, 465 bp, Zea mays
  Peptide Sequence Number=SeqID_80864
atgaccggggataaacaaaggcaaaagctcaagcaaaagccatcaagcaaaatctccaacacctacatcaaaaaggtgaacaaaaaggatgctacaccatatttgatcaagaagaaaaagaacggaaaggtgatagcaatcaaggccaacaagcaagccaacaaaggaaaggaggccaaacgcatctgggtgccaaaggagataatttcaaccatgaaaagcaccaagaaggtttggatcccgaaagggaatttattgccaagtgggttagtgaaaattttggacccaaatttcccacccatgactaagatatgcgtatctatttatcttttatctagtttacctttcttgcctagtattacatttgttatgtacttttgtttaaaatcatgcatactagttcacaggatgcgaagagaattggaccaaggcaatgaggatgcaacacctcaaaagaagacataa

SEQ ID NO: 39086 - DNA, 348 bp, Zea mays
  Peptide Sequence Number=SeqID_80865
atggccgaggcgacccaattcgcccacacgatgagtcgattgctaaatcagttggtgcaaaatgaaattaggaagatggcgaacacagaggtcgtttccccgaccgactccacttggctcacccgcggaaggctccgccgcgaacccgcgacgattaccgacccgaactacggctcacccgcggcccagacgtccagatggtcgtgcggccgcctcttcttccctttctctctactcacggtaatggcggcatacggtatgcgtgttgacgagcttcaccctctctcgcagtctgcccacgccaccagccgccgccggagaccagcgcccgcgttcctggccgtctag

SEQ ID NO: 39087 - DNA, 276 bp, Zea mays
  Peptide Sequence Number=SeqID_80866
atggccgaggcgacccaattcgcccacacgatgagtcgattgctaaatcagttggtgcaaaatgaaattaggaagatggcgaacacagaggtgagaactttaccgaggattaggtcaccggaaggcccgcccacggcgcacggcggaggtctgcgggttaacgacgacaacaacgagcagtccgaggttcctgagtgtgttgttagagacctccctgagcaacaacctggtgaaggcaagtgtcctctgacctattatgtcctacatactttatga

SEQ ID NO: 39088 - DNA, 619 bp, Zea mays
  Peptide Sequence Number=SeqID_80867
catgatggtgtggatcattgagcaccacgctgaaacttcggaggatttcgtgatggagcaagaggttgcatcctccgcgccacgagtgcccgaccgcccggactctgggactgctgacagagttgctacgccaccccctagctccacgacatcaccgggggccatgaagcagtggcgcgatgacgtcgaccggctgctcggcatggcgtattctacttcgaccaggtcgaggcctcggtcatcccgacgccaacacgaggcgatggcgtctgtgcgctcgccctccgtaaggggtgcacagaccgacgacctccgggcggagctcaactgtaggcgtacgggagaagacgcccgggtctccttggaaagggcgcgcgagtgccgccaaaacatcaatggtcgcgacctcgatcagtactttgcagcggtagcaccgcagacaccaatgggcacccggtccccaacgggtgtccccttggtcggcgtaggctgcgccgcactagcggatcatctccgcgcggcgtccttgaaagggaaatgtgcccttgggccatttctaagtattttggtgattgagtgccaactcaagtgcttaaatgtgaatttatgcaatggatga

SEQ ID NO: 39089 - DNA, 535 bp, Zea mays
  Peptide Sequence Number=SeqID_80868
atggtgtggatcattgagcaccacgctgaaacttcggaggatttcgtgatggagcaagaggttgcatcctccgcgccacgagtgcccgaccgcccggactctgggactgctgacagagttgctacgccaccccctagctccacgacatcaccgggggccatgaagcagtggcgcgatgacgtcgaccggctgctcggcatggcgtattctacttcgaccaggtcgaggcctcggtcatcccgacgccaacacgaggcgatggcgtctgtgcgctcgccctccgtaaggggtgcacagaccgacgacctccgggcggagctcaactgtaggcgtacgggagaagacgcccgggtctccttggaaagggcgcgcgagtgccgccaaaacatcaatggtcgcgacctcgatcagtactttgcagcggtagcaccgcagacaccaatgggcacccggtccccaacgggtgtccccttggtcggcgtaggctgcgccgcactagcggatcatctccgcgcggcgtccttgaaagggaaat

SEQ ID NO: 39090 - DNA, 364 bp, Zea mays
  Peptide Sequence Number=SeqID_80869
gtatgcttatccatggtggaaagaaaaagtgattgactcagacttgaaaagaaaagatggcctttgcccattgacgcctgagctcaaggaatgtaactccttatatgaaggttacgttccaatgaaatataaacattattgcaagaaaatgaagaagtatggatattactatattaactttgtcgcttcaataatagaagtccctgaatttgtgatttttctggctgttgtattattgaaaataatcttttccagtattggattgtatgattgtttcctagtaaccacattcacactcatctctatagcaatgaatggacactttgttatatcttttgagtatgtaaacatccaatatgagtga

SEQ ID NO: 39091 - DNA, 483 bp, Zea mays
  Peptide Sequence Number=SeqID_80870
atgcctaacatgactaaccgcgacgtggctagaatagtaggtgggatagacactgatggaacacctattattgcagggattgcaaagttcatggatatattaattactagacttgttacatccccattatcttgcaacactaaattacagtatgcttatccatggtggaaagaaaaagtgattgactcagacttgaaaagaaaagatggtctttgcccattggcacctgagctcaaggaatgtaactccttatatgaaggttacgttccaatgaaatataaacattattgcaagaaaatgaagaagtatggatattactatattaactttgccgcttcaataatagaaatccctgaatttgtgatttttctgactgttgtattattgaaaataatcttttctaggtatggtgaatggggtgaccatgtcacgctacaagcagctgctgacaagattaattcactttttatgctatgtttctaa

SEQ ID NO: 39092 - DNA, 159 bp, Zea mays
  Peptide Sequence Number=SeqID_80871
atgagattgacggttcttggtattgactctggtaatgggtccttcccagctggggagagttgcggagcccttcttggtttggtacttgccgtaggactaggtcccgaccctgggttcccacctgcatttgacgagggagtcctcgtcctcgtgctgtag

SEQ ID NO: 39093 - DNA, 1398 bp, Zea mays
  Peptide Sequence Number=SeqID_80872
atggctccccacctcgtcgccgacctggcaaagaaagggtcgatgacagtgaggtggccgcggctgaacgggacctcggaaatgtctacagcacgaggacgaggattccctcatcaaacgcagatgggaacccagggtcgggacctagtcctacggcaagtaccaaaccaagaagggctccgcaactctcccccagctgggaaggacccttcaagcctcgacaaatcaagtctacatcccagggggccaggtaccaaggaggaatcagttacaccacgcgcaacagggacaagtggtacgaactacctccacaccagtagggccacgtgggtagccagctccgagcggctcgccagcggaggcgaccacctctacaccaacggcagcgaccacctctgcaccgatggctcgccagcggcgacgactacctcagctccgagcggctcgccagcagaggcaaccacctctgcaacgagcagcctcaccagcggcgacgaccacctcaacgtgcgcgccatggcgaagaggtcctcgccttcgtccccctatgggggtgaggacaagaccatccaagccatggagctgggagcacggcggaaggcggtgcttgcggcggtataccatttcgagcactcactcagtctgggcgtgctcgggatgaagtcacaaggccatggcaaactccagcaacgcgaagcagagaccttgaagacaaaggggcacagagagctcggaggcgaaaggacgccgcgagtgggagagaagcaaggcatgtctgctactcgagggatgaacccctctttaaaggcagactcccctgctcctgcctcgaagcaccgcgcgaagcctcccccaatgcacaccggggtcatacagctggcgcactggccttcgagtgcgaagaaggcgaactgccgcacaggaagcatgctaccgccccacggtagtacgcctccttcatcttcgctacgaccaacggtcaagaaggcgaaccgccgcacaaggagcatgctaccgccccgtggtaagaagtcacaccgccgctcgcgccaataccgcgtctcctcggggccgttgcagaagatggagaagataaattttcaaaaccaatgcagcgactcgaggcaccccgcatatggcccaacaaagacattaagtgcggaggtcacggatcagtcagccgcggggacaggcgtggcagccggcgtgaccacgggcggaccagcagtaattgcatcaacgggcgcgcagaagcagcgagccaatcagtcaaactttgcccccacctgcaggctcgtatcctcccttgaggcggcctcggggccactgtcgacaccctggatcaggggtacctctttctacagtatgaaggcacggtgcccgtacggcggtccctag

SEQ ID NO: 39094 - DNA, 369 bp, Zea mays
  Peptide Sequence Number=SeqID_80873
atgggcaaggacaagaaaggtcacggctcgctgcgtcgctccggcgacaaacgaaagcgtgaaccgagtccttcgtcggaggacttcgacgatttccaagggatagccgccgaggtgtggacgtacatccggtccgtcgagcgcgccgggctcgagggctcggatgagtcggaggtctcctcggacgaggagaaatcttccgactcgtccgaggaaggtggcggtggcgacagtgacgacgagggtgacaacggcgatggcggtggcgggggcgatgacaatgacgacggtggcaagggcgacataggcgacaacgaaaagggtggcagcagcagcagcaaggccagtggcaagacgccactggcttaa

SEQ ID NO: 39095 - DNA, 609 bp, Zea mays
  Peptide Sequence Number=SeqID_80874
atgtgggtaacgctcgaaaccccacgagccaccttggctcgcgtttgctcattccctgcgtcggcccattctgctagcagttctcccctggcccacgaagggatggccttgcgagacagaatcggcactctgtcatcaacttacgctttagagatcagtgttctgtcctttggggttaaagttccattggatgcagcggagccatgggcaaggacaagaaaggtcagggctcgccgcgtcgctccggcaacaaacggaagcgtgaaccgagtccctcgtcggaggacttcggggtctctggtctacgcttctcccccagcgtcgttcgatgactcggacgactcccaggggatagccgccgaggtgtggacgtacatccggtccatcgaccgcgccgggctcgagggttcggatgagtcggaggtatcctcggacgaggataactcttccgactcgtccaaagaagggaacgacagcgatgagggtaacgacggcgatggcggtgacagtggcgatagcggcgatgactgcagcaagggtggtggaggcgacggcagcggcaagggcggtgacgatggcaagggcagtggcaaagtgccactggcttaa

SEQ ID NO: 39096 - DNA, 219 bp, Zea mays
  Peptide Sequence Number=SeqID_80875
atgggtatggatatgggacaaaatcttcactcattgggtaaacggggctatccagatgctcctttatcgccaccaacatatgttcgtcctgctatgaaacgacaacaatcctactctacaactcctagtggatctgaaccaaaattctcaaaccaaagttctaccctctcaactgatctgaaccgtctggacagcagcctcaagaacgttaagttttaa

SEQ ID NO: 39097 - DNA, 561 bp, Zea mays
  Peptide Sequence Number=SeqID_80876
atggtcggcggcggcgcacatggcggcaccacctacaaaggctacaccatcccgcacaacaagcgctggcacaccgtcgccggcaagggcctctgcgctgtgatgtgcagaactgggtattggcggcggcggctatgggcaccggcggcggcggctatgggcactggcggcggctatggaccggcggaggcggctatggactgggcactgtcagcactcagcactgtcaacaaacaaattaattcattgtcagcactcagcagaactgggcactgggagctgtgggcggagggtttgcgtcatccttgggatgggcatgatgaccactctcatggtcatggacatgggaatgagaaaacaaagaatcatttgcttacactgatccaccgtgctattccagtcttatttaaaagaaataaagaaactagagatgtcaatggggacccgatacccgccaacccgtggggaattcccttattagggtacgggtatgagacgaaaattgtccccatgggtatggatatgggacaaaatctccactcattgggtaaacgggtatga

SEQ ID NO: 39098 - DNA, 579 bp, Zea mays
  Peptide Sequence Number=SeqID_80877
atgcgcctagggttcccttttatagccccaaggcagctaggagccgttggaggcattcttggaaggcaattcttgccttctgtcgggtggcgcaccagacagtccggtgcaccaccggacagccactgtagcatgtccggtgcggatctccttccattcctggcgcagccgaccgttggatcttcgggctgttccgccttcttcgcgctcgccgtggactggcgcgtgcgcactcgcgcacgtcaccgggtttctcagccacgacgcccgcccacgcgcccagctccctttttagagccccgccagtgccccacactcacccctcgcctcatttcgcacaccctcgccctctctcacgctctgccctcgccgccagacgccgccggagacccaagcccgtgttcccgaccatccaactcgccggagaccgctccaagcctcccgaagctccgcctcaaggtgagacactcgtccccgtgcccaattttccttattgtgccaagtgttcgtccaatttcgccttcgccggtgctcgaccacggtggtccgccgtgctcgcgcagtggccggccgatttag

SEQ ID NO: 39099 - DNA, 510 bp, Zea mays
  Peptide Sequence Number=SeqID_80878
atggccgagattagatctgcggccgagggcgcgcacgggcgagcactaacaagcgggacagggagtgccgggaatgatgagcggctgcgggtggcgctgacagatcggggaaacagacggctgcgggcggcgccgctcctctccgcggcggtgaggtcaccagagttgaggcaggcacgagctagggtggctctggggtcaccggacttgggcagaggggaagagggcgccacgacgaactcaatggcggggaagaggccacaaatccacgggcagagaggggagaacgatggtgagaaggtctcgggcgggccagagaaactccggacagcgattccggccacggggaggggacttaaggccttggctaacttcagcagaggcaggggtgacacgggaaactactccagtgaactagaccgggctaaatcggtcggccactgcgcgagcacggcggaccgccgcggtcgaacaccggcgaaggcgaaattggacgaacacagggcgtaa

SEQ ID NO: 39100 - DNA, 498 bp, Zea mays
  Peptide Sequence Number=SeqID_80879
atggctactttgaggaaaggtgccatttttacccagcggcttcctcgccaccaaattaaaggttgcattttgtctccggtctcaccattcccattttattctctgcgtgttgctgtctgctccagggcgacagtgggcatgctgctcggcgtcgaggacatgcacaggttcccggacgtgcgcatcccgtatcagcagaagcgcatgttcggcttcgtcaccttcgtgtacgctgagacggtgaaggtcatcctgagcaagggcaacccgcactttgtgtgcgacgctcgcgtgctcgtcaagccctacaaggagaagggcaaggtccccggtaggtttaggaagctgcagcacacgcaccatggcggagccgagttcgtcggttgcgcgtcgcccactggattgctggattccagggacccctacgccctcctgcttctttcaggtgcccagaatttctccaggttttctcctgggcatgaagccattgggctatga

SEQ ID NO: 39101 - DNA, 1065 bp, Zea mays
  Peptide Sequence Number=SeqID_80880
atggctactttgagggcgacagtgggcatgctgctcgggcgtcgaggacatgcacaggttcccggtgcgctccccgtggatggaccgcggcgacctcatccgcagtcccgccgcgcgacagatcgtgtccaactacttcaggacgtgcgcatcccgtatcagcagaagcgcatgttcggcttcgtcaccttcgtgtacgctgagacggtgaaggtcatcctgagcaagggcaacccgcactttgtgtgcgacgctcgcgtgctcgtcaagccctacaaggagaagggcaaggtccccggtaggtttaggaagctgcagcacacgcaccatggcggagccgagttcgtcggttgcgcgtcgcccactggattgctggattccagggacccctacgccctcctgcttctttcaggtgcccagaacctcttcacggctgggacggacacgacatccagcacggtggagtgggcgctggccgagctgatccggcatccggacgtgctcaggaaggcgcagcaggagctcgacgccgtcgtcggccgcgaccgcctggtgtccgagtcggacctcccgcgcctcacgtacctcacggcggtgatcaaggagacgttccggctgcacccgtccacgccgctgtcgctgccccgcgtcgccgccgaggagtgcgaggtggacgggttccgcatccccgccggcaccacgctgctggtgaacgtgtgggcgatcgcccgcgacccggaggcgtggcccgagccgctccagttccggcccgcgcgcttcctcccgggcggctcgcacgcgggcgtcgacgtcaaaggcagcgacttcgagctcatcccgttcggcgccggccggaggatctgcgcgggcctcagctggggcctgcgcatggtcacgctcatgacggccacgctggtgcacgcgctcgaatgggatctcgccgatggcgtcaccgccgaaaagctggacatggaggaggcctacgggctcaccctgcagcgcgccgtgccgttgatggtccggcccgcgcccagactgctgccgtctgcctacgcagcgcagtag

SEQ ID NO: 39102 - DNA, 384 bp, Zea mays
  Peptide Sequence Number=SeqID_80881
atggaactacgagacaacatgggagcaatgtacctgggagaaattgacaatgactggaaaatatttggtcagcttggagtgcttgaacttggactcatacaaatagataaaggaaaacaaactgcacctggaatgaaaaatacagacaggccaaaatcaatggcctccttgaacggacgtgttggtgcactcctgccccttgaactgcctcgtgagctgctcggccaggcacgccgcgttcttgttctcggacagcgtcgggaccttgagcgaggacatgtagctgttgatgcccttgaggagctgcgtcattgcctgaaaaggggaggagttcggtcaatttcctaccagaacagcgctagatttcgtagtcagaaggcatga

SEQ ID NO: 39103 - DNA, 1257 bp, Zea mays
  Peptide Sequence Number=SeqID_80882
atggcggcggcggccgcgacacctcccatccccgcccctaaccccaccgatgtctgggtgggcggctcatggacggtggactgttcctgcggcgtcacgttcgacgacggcgaggagatgatcagctatgaacaattctggcgttacactaggctggcagatccgacgatggaagccacacttttgcagcgtgtaagaatattcacaacagctgatccgtctagcaacaatcttgaggttgttattctttatgatttcaaatgtgacacaatttggacagaaaagctatatttttcatcagatgctgcctttctagggtattccctcattttgacgatactgcggacttcaagtttaagagatgaagcatctagagttatggttgccgctcctattctagcatttgtgacaacccacattatgtacctcaacttctacgaacttgacaaaggccggaggaaggatctcaatattctcaaacaagcatttataagctaccagctcgtggcttcagcttcaaccatgcacatatctctgtccgcagaatttgactactcggttgggccaacaattttgtgtccatggatgaggttttttcctcttgaattcagtgggacaaccgttatgttgtgtttcttggaaaaaatgtctttcattagtgttggtcttctaaataagtgccactttcataccactttggatctgactacttatcacaagaatggtcagagtggtctgaatcagcagccttacttgtcctatcaggcaatgacgcagctcctcaagggcatcaacagctacaggtcctcgctcaaggtcccggcgctgtccgagaacaagaacacggcgtgcctggccgagcagctcgcgaggcagttcaaggggcacgagtgcaccaacacgtttttagatgcaactatatttgcattctggacgaagacatcagtggatattgaaccaaagagaattaggctgaagtcaagcagttatacttcaaatactatgcttgacactgtgacagcagcaacagtgcagatgatatcttctgcaagcggtaccaaagcgtctggtagtgacattggtgccttgattgaggttgtaacattgctctatggctctaaacatgctacgaaaaggagacttgatatgctagaaaagaaggctctagagtgcagcgagcccactgttccatctagcaagcaggtgttcgatgaaatgtctgcccgagcctggcaagtttttgaaatggcaagctaa

SEQ ID NO: 39104 - DNA, 522 bp, Zea mays
  Peptide Sequence Number=SeqID_80883
atggcgatccgaatcgattatactcagctgaggatctccaatcacacgacatatgtagcacttaacccttgcatatgtcaacccgccaccggggttcttaagaccagatcaggttcacgcaaaccgagagcacagatacaccaccgtccagcctcttgccacggaggggtttcaaggaaggtaatcaagttcaaggaaggtaatgcaggaattgttttatcaagcaactcctatcacctaatgcagcaagcaagtgagaaacattttaaaaacatcaagggaggtggcaaatgcaccggggcttgccttcgttcacatatcccagaggcagcggccgtgaattttgagcaagacgcgcggcggccgaaggtggagaagaacactgggcgcggtgaatacgtgtccagaggcgtggcggttgttccggcgatcaacggtgagcagggcaaagttgtagaactacaatccatctataactttgctacaatgtgctcccacaaaaagtcactggatcttgcttaa

SEQ ID NO: 39105 - DNA, 445 bp, Zea mays
  Peptide Sequence Number=SeqID_80884
ggtttcaaggaaggtaatcaagttcaaggaaggtaatgcaagaattgttttatcaagcaactcctatcacctaatgcagcaagcaagtgagaaagattttaaaaacatcaagggaggtggcaaatgcaccggggcttgccttcgttcacagaaagacccctatggttctatttctttgcacgatgaggtccccgacggcgcaccgaaccgggggccgagctccggcgagctggactggccggagggagtcaggaccggtgctcccgagtggcggacaccaaatctgacctaccctaaacatttcccccaagttaattgcatagttggtgagctatcaagctctgtccgcgtgaaccgaatgggtggcggacagatgagcgtgttcccggtgaccagagggttcttagcgcaattacgtgggtcagcaagcatcgtggagttataa

SEQ ID NO: 39106 - DNA, 291 bp, Zea mays
  Peptide Sequence Number=SeqID_80885
atgtacgacaagctccggcgcagccgccgcttggacgcggtgcagagcggctgctccgcgttgtccatcgtcaagcagggggacctcatggtcgtcgccaacgttggcgactcatgggttgttctaggcaccgcattcgacgacgacgccatcacatcgtccagctcatcgtccacctcaagcccaacctgccaccctagccaaaagtcatcagtactcggtatgtcgcgcacgttcgacgactactatatcgaggactgtggcgtcatcttggcgccagaggtgacgtag

SEQ ID NO: 39107 - DNA, 366 bp, Zea mays
  Peptide Sequence Number=SeqID_80886
atgtacgacaagctccggtgcagccgccgcttggacgcggtgcagagtggctgctccgcgttgtccatcgtcaagcagggggacctcatggtcgtcgccaacgtcgacgactcttgggttgttctaggcaccgcattcgacgacgacgccatcacgtcgtccagctcatcgtccacctcaagcccaacctgccaccctagccaagagtcatcagtactcggcatgtcgcgcacgttcgacgactactatatcgaggactgtggcgtcatcttggcgctagaggtgacgcaggggaggactgacaacaatgaccagttcgtcatcctcgccaccgttgaggtagcttttgtgccgacttgcctttaa

SEQ ID NO: 39108 - DNA, 366 bp, Zea mays
  Peptide Sequence Number=SeqID_80887
atgtacgacaagctccggcgcagccgccgcttggacgcggtgcagagcggctgctccgcgttgtccatcgtcaagcagggggacctcatggtcgtcgccaacgtcgacgactcttgggttgttctaggcaccgcattcgacgacgacgccatcacgtcgtccagctcatcgtccacctcaagcccaacctgccaccctagccaagagtcatcagtactcggtatgtcgcgcacgttcgacgactactatatcgaggactgtggcgtcatcttggcgctagaggtgacgcaggggaggactgacaacaatgaccagttcgtcatcctcgccaccgttgaggtagcttctgtgccgacttgcctttaa

SEQ ID NO: 39109 - DNA, 279 bp, Zea mays
  Peptide Sequence Number=SeqID_80888
atggtcgtcgccaacgtcgacgactcttgggttgttctaggcaccgcattcgacgaagacgccatcacgtcgtccagctcatcgtccacctcaagcccaacctgccaccctagccaagagtcatcagtactcggtatgtcgcgcacgttcgacgactactatatcgaggactgtggcgtcatcttggcgctagaggtgacgcaggggaggactgacaacaatgaccagttcgtcatcctcgccaccgttgaggtagcttctgtgccgacttgcctttaa

SEQ ID NO: 39110 - DNA, 507 bp, Zea mays
  Peptide Sequence Number=SeqID_80889
atggcgagatgcctggttgttctgacgctggtaccgatttcctccttgctggttgctcttacggtactgctggtactgctgttgagggaactgcctctgatattgctgctggtgctaacactgatgttgatgctggtgactttgcttgaactgttgaggtttggaaagtgtggttcgtcagctggtagtgaagggggtcaaccaaacctctcagaaacgtccttcaggcacatggtaacgatagaagttgtccctgaactcctcacaggtgatggctttagggtcagcatgggtggcgaggcattggtggcatctgaacttgcttctggggttgaggtgggggttgctactgctgcacctgctgcattgctgctaaagtttggccaatcgcttggactgcttgagtttgcatcaggaacatctgctcaatggtcatcgggggtagcggtggcaactgctgctgagctgcctcctcctggggtgcctgctgctcctgcagtcttttag

SEQ ID NO: 39111 - DNA, 282 bp, Zea mays
  Peptide Sequence Number=SeqID_80890
atgactgatgatggcctcgacctgaagtactatcctcgtcgttcgaccagcagcgctggaggtgtgattgtctcgctcgttggtgagggcaatcccaggctgaacatcatggtcaacctggtcgccatgctcaacactgagctggaccacgtccttgatgagttgggcaagatgtctgagaacaggcgcagaggtggaaggcgtgctcagcaggagaagcaggcacccccaggaggaggcagcccagcagcagttgccaccgccacccctgatgaccattga

SEQ ID NO: 39112 - DNA, 156 bp, Zea mays
  Peptide Sequence Number=SeqID_80891
atgaagtcgtgggggatcacgtccttcactgtgggagaccggctcgatcctgttcctcgtctcctctcgctgtcctacagaaggcgcgcgctgacttttgaggaggcggtgggaggtcgcgtccagcgcggatttgttggtcttgaagggatctag

SEQ ID NO: 39113 - DNA, 210 bp, Zea mays
  Peptide Sequence Number=SeqID_80892
atggggaatgagagggataccttgcgtgagcgcttgtggcggggagtaggccttaatgaagtcgtggggatcacgtccttcactgtgggagaccggcacgatcctgttcctcgtctcctctcgctgtcctacagaaggcgcacactgacttttgaggaggcggtggtgcgcagcggccagcagggcgttggtgtggctggtggcctatag

SEQ ID NO: 39114 - DNA, 210 bp, Zea mays
  Peptide Sequence Number=SeqID_80893
atggggaatgagagggataccttgcctgagcgcttgtggcggggagtaggccttaatgaagtcgtggggatcacgtccttcactgtgggagaccggcgcgatcctgttcctcgtctcctctcgctgtcctacagaaggcgcacgctgacttttgaggaggcggtggtgcgcagcggccagcagggcgttggtgtggctggaggcctatag

SEQ ID NO: 39115 - DNA, 210 bp, Zea mays
  Peptide Sequence Number=SeqID_80894
atggggaatgagagggataccttgcctgagcgcttgtggcggggagtaggccttaatgaagtcgtggggatcacgtccttcactgtgggagaccggctcgatcctattcctcgtctcctctcgctgtcctacagaaggcgcgcgctgacttttgaggaggtggtggtgcgcagcggccagcagggcgttggtgtggctggaggcctatag

SEQ ID NO: 39116 - DNA, 174 bp, Zea mays
  Peptide Sequence Number=SeqID_80895
atgaccgaggcgcaagcaggggcgatgttctacggcgacggcggcggcttcctcacattccgcttcaattccgacgatgctggagctagcgatgtaattgtggacattactccacaacccatcacactcaatcaaagatccaaatcaaacaagtatcataataacaaacattga

SEQ ID NO: 39117 - DNA, 582 bp, Zea mays
  Peptide Sequence Number=SeqID_80896
atgaccgaggcgcaagcaggggcgatgttctacggcgacggcggcggcttcctcacattccgcttcaattccgacgatgctggagctagcgtggcggcgcatgagccaactgggtccgagctccgcggatctgcagcggtggttacaacggtcgtccgctatgcacgtcgagaggaggagagcggcgccccagacctggtcacgagcgcgcagatggcggagccccgggctcccggccggtcgcgaggttgttacggggagtgccgcgcgtggggttttgggctggcattcccagttgggccgagggtgccgggttattggccgagaatggtggtttcagcccaggggcagcctgacgaggacgcggagtctaaggtgtctgctgaatggggcgctagtaagactattgtccacctccaggacgagctgcgtgcgggggaggcagaagaggcggaacagatggggattcacgggcgtagtggatggggcttctggcttcacgagacggatcagggcgtgggatcggacagctggtgggcggatcgaatggttgaaattgcagaacgatataagagagtttag

SEQ ID NO: 39118 - DNA, 240 bp, Zea mays
  Peptide Sequence Number=SeqID_80897
atggccttgatagggtttgcgcaactagacaccaacaacaaatatatttttttgacacaggtgcacaaggagacttgggttggtctagcggtcaagctgtgggggtctataagctgtgcaggtgtaacttcaaagctgtggcggaaccgcccgaattattccagcttaagtgcccaagtcgcacccataagggcagcaacacacttaaacaggaataacccgtcagtccctcggatctag

SEQ ID NO: 39119 - DNA, 327 bp, Zea mays
  Peptide Sequence Number=SeqID_80898
atgtccgaacgagaagaagagattgaagtaaccgaagaggagacaccaccaccttcggagtctcaggccgggaatcatttttactttgacatctgtggatctgagcctgattcacctgtgaacgaaggcaagccccggcgtgctgaccgaggaccctttaactggtcacatgcctcgtcatggcatccccttgagagtcttttccttagtctggtgaggaagcgacaaacttttgttgcttctgctccaaggtggtaccaaatgaggaaaaagaagactgaagtgcgggaggactcggtcctccacttaggatcttttgtttattaa

SEQ ID NO: 39120 - DNA, 450 bp, Zea mays
  Peptide Sequence Number=SeqID_80899
atggcaaagttgaagatggactataggtctataaacttgatgcagagaattgaatcggttaccacagcaaatttggagaaaattcaagttgaacatcgtctgtcaggtgctctaattgatggcccccatgaacgagaagaagagattgaagtaaccgaagaggagacaccaccaccttcggagtctcaggccgggaatcatttttactttgacatctgtggatctgagcctgattcacctgtgaacgaaggcaagccccggcgtgctgaccgaggaccctttaactggtcacatgcctcgtcatggcatccccttgagagtcttttccttagtctggtgaggaagcgacaaacttttgttgcttctgctccaaggtggtaccaaatgaggaaaaagaagactgaagtgcgggaggactcggtcctccacttaggatcttttgtttattaa

SEQ ID NO: 39121 - DNA, 705 bp, Zea mays
  Peptide Sequence Number=SeqID_80900
atgtcttctcgctccctcatgcatcgcgtctttccaccttccaagcccccggatgggggatacccgccgtcttttcgcctcatcgtgggaggaacgcaactccgtgggagttggtacctttcagccatcattcggcttcaaggattttcatcagccagcccgactgtacccccccgccggtggtcacccaagacggtgaccaccagttcctgggtggggagaagcaagccgggctgcgatcttggtcccaccctcagcttcaaggatgttcatcatcctcgctggggtgggggccgggctgagccggcgctctacctcccgcgcgggttcgtgggtcaccctctcccgcggcgttcgagagagagggcgctcactggccctgcgggcggcccagacttcgaaaacgcggggctggtcgacggcaggcgtcgtcacctccagcgtgtcgggctcgtcggcttggctcccggtggccccttctgccggagggcggccgccgcgccgtactcgcctgttgattatctgaaccgcttcaccaagcatgagtcgcctcgtgtcaaggtgacaagtgagagtggggatccctggaccgcgtcgccgtccgaggctaggtcggacctcgctgaaggcgtcgtcgatgccgagggtgctactgcccccttccagcgtcaagacccgagcctgcaggatcagagtgtcttgtag

SEQ ID NO: 39122 - DNA, 708 bp, Zea mays
  Peptide Sequence Number=SeqID_80901
atgtcttctcgctccctcatgcatcgcgtctttccaccttccaagcccccggatgggggatacccgccgtcttttcgcctcatcgtgggaggaacgcaactccgtgggagttggtacctttcagccatcattcggcttcaaggattttcatcagccagcccgactgtacccccccgccgggtggtcacccaagacggtgaccaccagttcctgggtggggagaagcaagccgggctgcgatcttggtcccaccctcagcttcaaggatgttcatcatcctcgctgggggtggggggccgggctgagccggcgctctacctcccgcgcgggttcgtgggtcaccctctcccgcggcgttcgagagagagggcgctcactggccctgcgggcggcccagacttcgaaaacgcggggctggtcgacggcaggcgtcgtcacctccagcgtgtcgggctcgtcggcttggctcccggtggccccttctgccggagggcggccgccgcgccgtactcgcctgttgattatctgaaccgcttcaccaagcatgagtcgcctcgtgtcaaggtgacaagtgagagtggggatccctggaccgcgtcgccgtccgaggctaggtcggacctcgctgaaggcgtcgtcgatgccgagggtgctactgcccccttccagcgtcaagacccgagcctgcaggatcagagtgtcttgtag

SEQ ID NO: 39123 - DNA, 228 bp, Zea mays
  Peptide Sequence Number=SeqID_80902
atgcaactaaactatatctcttttgattttgtatttggtttgcaaggtttggttgacatgaacaaacctcctgaaatgatatctggcaatatgaaggtagggtcagcaaactcgtttgaaagaaaaagacctggaaagggaactcttggccaagcttttggtgtacttgtgcacagctcaagagcacttgctgagccagaggcaattactccaggggtcttaggatag

SEQ ID NO: 39124 - DNA, 255 bp, Zea mays
  Peptide Sequence Number=SeqID_80903
atgaacaaacctcctgaaatgatatctggcaatatgaaggtagggtcagcaaactcgtttgaaagaaaaagacctggaaagggaactcttggccaagcttttggtgtacttgtgcacagctcaagagcacttgctgagccagaggcagctactccagggggaaaattagatcttgttgttggaaggcagccacaaattgagcatgtcataccgcacattcacaagtctctgatcaacaagtcatccaaggagtga

SEQ ID NO: 39125 - DNA, 504 bp, Zea mays
  Peptide Sequence Number=SeqID_80904
atggcgtgggcgagctccctccctctccttgcccacggcttcccttccctccagcgcctccctttgccccctgtgctcgacgcccctgcagcagcacgcgcgcatgagcagggcctccatgggcgcgagcccttcttccccacggctacagccaggcgcctttcctccctggtgcaccgaagctccagccatggcgccctgtcccagctcggtccttccggtgcagcgtccccaaatgccccatggcactcggctccctgtccatggatgcaacagcaacaacctcctctcttccccacaaaacagcagccccggatcccctccgcatcgcgtgcttcgttcgatctgcgcagtcccgacccacatcgtcgtgttggtgtttgggatagctccatgccgcgtcatcgctctgcgcagttcgaccgtctatgcgcctcactacgtcggatctgcgcagccccaacatcgacgccgttcaccctcggagagaaaccccgtgcttag

SEQ ID NO: 39126 - DNA, 501 bp, Zea mays
  Peptide Sequence Number=SeqID_80905
atggagctatcccaaacaccaacacgacgatgtgggtcgggactgcgcagatcgaacgaagcacgcgatgcggaggggatccggggctgctgttttgtggggaagagaggaggttgttgctgttgcatccatggacagggagccgagtgccatggggcatttggggacgctgcaccggaaggaccgagctgggacagggcgccatggctggagcttcggtgcaccagggaggaaaggcgcctggctgtagccgtggggaagaagggctcgcgcccatggaggccctgctcatgcgcgcgtgctgctgcaggggcgtcgagcacagggggcaaagggaggcgctggagggaagggaagccgtgggcaaggagagggagggagctcgcccacgccatggatagcagggggaatgctggggagctcgaccaacgaggttgctggcagaccatggagacagggaaacagggagccgagggaaggagcgccaagcatagggggtag

SEQ ID NO: 39127 - DNA, 159 bp, Zea mays
  Peptide Sequence Number=SeqID_80906
atggcgtgcaaggtgaaagggatcttcaagggcctcaaggccttctcccggatcttcgcggtgaaggagcacgagatggagatcggttgtccgactgacgtgaagcacgtcgcgcacatcggctgggacagcgcggcgggcggcgcgtctccgagctgg

SEQ ID NO: 39128 - DNA, 351 bp, Zea mays
  Peptide Sequence Number=SeqID_80907
atggagatcggttgtccgactgacgtgaagcacgtcgcgcacatcggctgggacagcgcggcgggcgacgcgtctccgagctggatgaacgacatcatggcgtcctcagacttgtcgtccctgggcaacttcgcagcgctcactggtacctcctgggtttctcaagatctcgacagccagcagcgtgtcgtcgcggagaacaccggcaggcgagaccactcggccacgtgccccgatattacaaggccgccgaggaatcccgggacgaagaagccgagggacggctcgccgccggcgtcgccaccgtcaccggcggctcgtgtcgacgctgctgcagatgacgcgcgataa

SEQ ID NO: 39129 - DNA, 751 bp, Zea mays
  Peptide Sequence Number=SeqID_80908
atggagatcggttgtccgactgacgtgaagcacgtcgcgcacatcggctgggacagcgcggcgggcggcgcgtctccgagctggatgaacgacatcatggcgtcctcagacttgtcgtccctgggcaacttcgcagcgctcactggtacctcctgggtttctcaagatctcgacagccagcagcgtgtcgtcgcggagaacaccggcaggcgagaccactcggccagagaagcccacagtgctcagcgcgacagcggcctccccaccccgcgcgtcgtcgcctccgctccacctgcgcgcgctgtgtccatcagcccaccccgcgcgccgtcgcctccgctccacctgcgtgcgccgtcatcgccagggctccccacccccgcgcgccacgacctccacagctgcaccagctctccctgcaatcccccacgatctcccttccaactgctccactccctcccagcccccgatggatctcccgtcactctcctgctcttcgcgaccgtccgatccgttgatgccgccaccgtccgcgcgctcctgaccgacgctgaggcatcgggcacctccctgggcacgctcgcggctgcacaaatggacgtcggggagaccgcgctatacgtcgccacggaggccagctgcgaggaggccgtgagcctccttctcctgctctacgaccttgagactgccaccgtctgctcacgccacaatctcgacgccttacatgtcgccgccaagcaagggcacaccg

SEQ ID NO: 39130 - DNA, 2061 bp, Zea mays
  Peptide Sequence Number=SeqID_80909
atgtggtactattttttgtttgccaatacgaattacacttttcctggaaggcccatctgcttgtggcccagagaagcccacagtgctcagcgcgacagcggcctccccaccccgcgcgtcgtcgcctccgctccacctgcgcgcgctgtgtccatcagcccaccccgcgcgccgtcgcctccgctccacctgcgtgcgccgtcatcgccagggctccccacccccgcgcgccacgacctccacagctgcaccagctctccctgcaatcccccacgatctcccttccaactgctccactccctcccagcccccgatggatctcccgtcactctcctgctcttcgcgaccgtccgatccgttgatgccgccaccgtccgcgcgctcctgaccgacgctgaggcatcgggcacctccctgggcacgctcgcggctgcacaaatggacgtcggggagaccgcgctatacgtcgccacggaggccagctgcgaggaggccgtgagcctccttctcctgctctacgaccttgagactgccaccgtctgctcacgccacaatcttgacgccttacatgtcgccgccaagcaagggcacaccggcgtccacactgctgcattctgccacccgcagccgccccgccccgacgacctctttgataaggctatgaactccttcaaactcgccaagaaccaaggtaaaggtagtctgcctcccctcgttctgccactccctcgttctgccttctctgaccgaccgtgggcctcctatgtcagcgcgcgtctcttctatgtctccttcacgcgacgcaggcacgcaacaactgctccctctccggtctccgcaccctccgtccattccttccacacccatggtaatgtaccaaaccccactccgttcctcacccgcggcatcgtcgccaccgaggccgtcggcggcttagccaaagaccgttgcggccccgactccgccgtagcccaccacccggcaaccgctgtgacctacacgaaccaaacccgccgccgcggcatagcgcaccacaccaggctcctcgatggtatagactcgagagcccaacccgacctgagccgatctgaaaggagggttgtcatctggcctcccctggttccggcgcccatggtggtggcagcacctgtccagctaaacctcgacgaggtctgtcatgggaccaccgcagcgcctactgctttgagaaagcagatcgacgagggcacctacggcaacagcatctcaggagctatacccgcagccctcgggaacgccaagtccctgaagttcctgcgtttggatcacaatcgcctgacggggccgatcccaagggagcttgctgggctgcccaatcttggaattgtagatttctccaacaatgacctttgtggcgcgatcccgacagacggagcattccagaacattccccgtagcagagataaacagatagttcctgattcagatcctccaagccctaaagatgtggacctattctatcagtttattgataagaggctcatggtagtgactggggcaggaatgagcactgaatctgggattcctgattacaggagtcctaatggtgcatacagtacaggttttaaaccactttctcatcagtgggctcaagctatcgatagtttggaagtaggacaaccaggttcaggcaaaagctttggaatgcagcaacgacctgatggtgatgttgagattgatgagaagttctgggagcaagattttgaaattcctagctgccatcaatgtggtggagtgctaaagcctgatgttgtgatgtttggtgataatgttcctcaagagagagctgaaagcgctaaggaggctgcaagaacatgtgatgcacttctagtggtcggttcagcactaatgacaatgtccgcttttcggctggcaaggctggcacacgaagcaaatgctcctatagctgcagttagcatcggggagaccagggctgatagcattttatcactgaaaatcaatgcgagatgtggagagatcttacccagaatacttcagatgggaagtctggtggtgccagac

SEQ ID NO: 39131 - DNA, 285 bp, Zea mays
  Peptide Sequence Number=SeqID_80910
atggacgacggggatggggcggctggcttctgtccccttctccagccagcagagacggcggcggccgcacccgcggcggagaagctcgccggagacgagggcgcgggggctctgcgggtccttagggcgaccggagtggcctgggaggttggggaaagcgcggggaatcctcaggcggggctaggtcgggaccggggcaccggaggggggcggttcacggcgaagcggctcggcggcggcattaatcgactccggcaaggaattaagtgcagcagagagccatag

SEQ ID NO: 39132 - DNA, 285 bp, Zea mays
  Peptide Sequence Number=SeqID_80911
atggacggcggggatggggcggatggcttctgtccccttctccagccagcagagacggcggcggccgcacccgcggtggagaagctcgccggagacgagagcgcgggggctctgcgggtccttagggcgaccggagtggcctgggaggttggggaaagcgcggggaatcctcaggcggggctaggtcgggaccggggcaccggaggggggcggttcacggcgaagcggctcggcggcggcgttaatcgactccggcgaggaattaagtgcagcagagagccatag

SEQ ID NO: 39133 - DNA, 318 bp, Zea mays
  Peptide Sequence Number=SeqID_80912
atggccgccgcggacccgccaccgcgcgagaaggtcgtgcccacgctgaagcgcagcgccagcatcgaccggataccggtggacgcgcgccgcatcctgcaccgcctcgccggggacctctggggcggcgacatggaccccggcgcgctggccgtgtcccagctcaggggcgccatgaccaatgaggtcttccggatcacctggctcggcggcgaggccgagggcaacggcccgcgcaaggtgctcgtgcgcatctacggccggggcgtcgaggtcttcttcgaccgtgccgacgagatcgttgccctcaagaagtaa

SEQ ID NO: 39134 - DNA, 960 bp, Zea mays
  Peptide Sequence Number=SeqID_80913
atggccgccgcggacccgccaccgcgcgagaaggtcgtgcccacgctgaagcgcagcgccagcatcgaccggataccggtggacgcgcgccgcatcctgcaccgcctcgccggggacctctggggcggcgacatggaccccggcgcgctggccgtgtcccagctcaggggcgccatgaccaatgaggtcttccggatcacctggctcggcggcgaggccgagggcaacggcccgcgcaaggtgctcgtgcgcatctacggccggggcgtcgaggtcttcttcgaccgtgccgacgaggtccgcaccttcgagtgcatgtcgcgccacggccaggggcccccgcctcctgggccgctttgccaacggccgcgtcgaggagttcatcaactccagtgtacactacgcctctaccaccctaaatgcgtgatgtgtctgctcggatccaatccgcgattggtttttgtcatggctcactcgcgtgttgctcgcgtcctggccttgccaaaccctctccgccgcggatctgcgcgacccggtaatgtccgtcgtgatctgctgccgccatcaacgccctactcccctcctagatcccgtgatctgctacgaagctgccatcaatgccctcctcccccttcgctcagctccccctcgcgccttcgatccgctaccgtgacccgctgcgaggcggccatcaacgcccatgtcctccttcgcgcagctaccttcccaggatctcgggcgctccttcgtcgccatactttttggttcagcgggacgcccagcccgcggagagagcctctgcaggccgtaggagagcagcgttgttgtagcagggtggtcggggtcggggtcgggggtaagtttggcgtgcggcggatcctggccggccaccgcatctgctggagcttggaggagtgcttcacggactgcttttgggtgtcgctaatgatacgaggatga

SEQ ID NO: 39135 - DNA, 360 bp, Zea mays
  Peptide Sequence Number=SeqID_80914
atggaggtttaccattgtggagtggtcacaggcgtggagcgggcagcgccagcggttgtcggccgatcaggggcggctgagcttgagctgggcgttgttggcctacggctggtcgctgcgtcatggcttgtaggcctgcgcgtgggcgaggaggtcgttgctgccaccgaggctcttgttctgcttgcgcttgcgcatctcgcggatcttggagaagtccatggagtagtccagcagtgccctgttcttcgtgttctagtccccgaacgtcggcacagtcatccaggcgttgttggcgctcgcatcctcatggcctcgctgctgcatgcaccaccaatgcacggggtcagtgagaactaa

SEQ ID NO: 39136 - DNA, 624 bp, Zea mays
  Peptide Sequence Number=SeqID_80915
atggaggtttaccattgtggagtggtcacaggcgtggagcgggcagcgccagcggttgtcggccgatcaggggcggctgagcttgagctgggcgttgttggcctacggctggtcgctgcgtcatggcttgtaggcctgcgcgtgggcgaggaggtcgttgctgccaccgaggctcttgttctgcttgcgcttgcgcatctcgcggatcttggagaagtccatggagtagtccagcagtgccctgttcttcgtgttctagtccccgaacgtcggcacagtcatccaggcgttgttggcgctcgcatcctcatggcctcgctgctgcatgcaccaccaatgcacgggatgtggagtgaattcagcggtcagctcaacaaccatgacgcggtggggaagaggatgcaggaactatacctcgaaggttggggggggcgacagcgacgaccgatggatgatgccttcgggccgacgatggtgcggacgggaacaaaggcggcggcacagaggcgacaaaagcctacctcacgtgagaaattgagaattggaggggactcaggagtgggcagaacggggggcggggtcgacgcacgtgagccgtcagatgatacggacggtactgattga

SEQ ID NO: 39137 - DNA, 690 bp, Zea mays
  Peptide Sequence Number=SeqID_80916
atggggctggctatttatgacggcgggcgaggaagggggatgggttgggaacgagtggttgggaaggaccgcgctggctgccggatgccgcggaaagcgaaaccaccacgctaccgcgggaaggtgggggcggaactctcgagaggcagccagagagatgccgcgccgtgccgtatgcagtctgcttcactcggcggcgcggccggcgctggttgcattgcccggtttggtccggcttcctcctacgactggatcctcggctgctgctgcctcgtcgccggcgtcaccgtcttcgcgctcgtcaccgtcctgcaggccgccacgctcgccgccttccccgcgctgctcaccatgtgctgcgccacctccgcgacgggtgcctctctcaccgccgtcctgcggctcgtcctggaagggaggttcctcggcatggggtcgcccaggatcgacgccacgcttgtcgcggggatcgtcgtcctcggcggggccgcggttggcgcgtgcatggcgttccaagcgtggtgcctgggcaggaagggcccgctgttcgtctccgtcttcgggcccgtccagaccgtctgcaccgccatcctctccgcggctctcctccgccaagtcctcagcctgggaagggctattgttggagttactcttatattttactcaaacacgtttccatccgatatctga

SEQ ID NO: 39138 - DNA, 2334 bp, Zea mays
  Peptide Sequence Number=SeqID_80917
atggagcatcctttttttcttcagggaaaaactgaaaatccaaaccatgttgagcaaaaccgagtgggattggaaaccaaaaaacccgagataaagaaactcgagaaaaagcatgaaatcgaaaccaacttcagtaaaacaaaaggaggacagaaaagaaagtcggaagagcatacatatataccttcccaggctgaggacttggcggaggagagccgcggagaggatggcggtgcagacggtctggacgggcccgaagacggagacgaacagcgggcccttcctgcccaggcaccacgcttggaacgccatgcacgcgccaaccgcggccccgccgaggacgacgatccccgcgacaagcgtggcgtcgatcctgggcgaccccatgccgaggaacctcccttccaggacgagccgcaggacggcggtgagagaggcacccgtcgcggaggtggcgcagcacatggtgagcagcgcggggaaggcggcgagcgtggcggcctgcaggacggtgacgagcgcgaagacggtgacgccggcgacgaggcagcagcagccgaggatccagtcgtaggaggaagccggaccaaaccgggcaatgcaacctgcagatgcactagacggaggaaacgaggaggaggagaaaacagagcaagagcaggcggagagaagatagagcaaaacacgagtgaggcacagcgtaagcactcggtagaagtctccagaggcgagatgcagatcttcgtcaagactctcactggaaagactatcaccctcgaggtggagtcctctgacaccattgacaacgtcaaggccaagatccaggacaaggaaggcattcccccggaccagcagcggctcatcttcgctggcaagcagctcgaggacgggcgcacacttgccgactacaacatccagaaggagagcaccctccaccttgttctccgcctcaggggaggcatgcagatcttcgtcaagaccctcactggaaagactatcaccctcgaggtggagtcttctgacaccatcgacaacgtcaaggccaagatccaggacaaggagggcatccctccggaccagcagcggctcatttttgctggcaagcagctcgaggacgggcgcacgctggccgactacaacattcagaaggagagcaccctccacttggtgttgcgtctcaggggcggcatgcagatcttcgtgaagactctgactggcaagactatcacccttgaggtcgagtcttctgataccattgacaatgtcaaggccaagatccaggacaaggagggcatccctccggaccagcagcggctcatttttgccggcaagcagctcgaggacgggcgcacgcttgccgactacaacattcagaaggagagcaccctccacttggtgctgcgtctcaggggtggcatgcagatcttcgtgaagacacttactggcaagacgatcacccttgaggtggagtcctcggacaccatcgacaatgtcaaggccaagatccaggacaaggagggcattccaccggaccagcagcggctcatctttgctggcaagcagctggaggatggccgtacccttgcagattacaacatccagaaggagagcaccctccacttggtgctgcgtctcaggggtggcatgcagatcttcgtgaagactcttactggcaagacgatcacccttgaggtggagtcctcagacaccattgacaacgtcaaggccaagatccaggacaaggagggcattccaccggaccagcagcggctgatcttcgccggcaagcagctggaggatggtcgcaccttggctgactacaacatccagaaggagagcaccctccacttggtgctccgcctcaggggtggcatgcagatctttgtgaagacattgactggcaagaccatcaccttggaggtggagtcgtctgacacaatcgataatgtcaaagccaagatccaggacaaggagggcattccaccggaccagcagcgcctgatctttgctggcaagcagctggaggatggccgtaccctcgccgactacaacatccagaaggagagcaccctccacctggtgctccgcttgcgaggtggtatgcagatctttgtgaagaccttgactggcaagaccataaccctggaggttgagagctccgacaccatcgacaacgtgaaggcgaagatccaggacaaagagggcatccccccagaccagcagcgtctgatcttcgccggcaagcagctggaggatggccgcaccctagcagactacaacatccagaaggagagcactctccacctggtgctccgcctccgcggtggtcagtaa

SEQ ID NO: 39139 - DNA, 318 bp, Zea mays
  Peptide Sequence Number=SeqID_80918
atgggtctgtttggttggtttctctcgccaacctggctgtgtgagccaggatcactggagtctggctctggagatgcgaccaatctgctcgtatctggtgagcctggcccaaggtgctttaaggatcgtgcgagtctggatccaaatctacatgcaagcaaccaaacacagagctcgcacgcgcatagcctggctcatagcaaccaaacagcagctacccgcatcccacgatgcaagcacgcgcagatgcaggcaaccaaacagacccaatgtgtcgtggggccagaaatactttgggatgccaacggaggtggataa

SEQ ID NO: 39140 - DNA, 471 bp, Zea mays
  Peptide Sequence Number=SeqID_80919
atggccaccggtttcaatgtcatcagatgcgttggcacgcgggcccaacgcatcaataatgaaaagcgcagatggatgcattgcgcgctggcaacagcgagcgaggtggtgacggtagcgacaatactatatggcactgccacaaggtacaggggatcactggagcctggctctggagatgcgaccaatctgctcgtatctggtgagcctggcccaaggtgctttaaggatcgtgcgagtctggatccaaatctacatgcaggcaaccaaacacagagctcgcacgcgcatagcctggctcacagcaaccaaacagcagctacccgcatcccgcgatgcaagcacgagcagatgcaggcaaccaaacacacccttagagtcggacatcgtcgtccgatccgagacagcgagttgctaccacgaccccaggcgaatggcgagccgttgaccgagtcgctgtggcatgggtga

SEQ ID NO: 39141 - DNA, 1185 bp, Zea mays
  Peptide Sequence Number=SeqID_80920
atgccgtcctctacaccaccatcagtacaacccactccaagccttcagacattaacatctcctgcagtagcccagaatactcatattgatgttagtgagatcaagtccaagatttttaagaggataggacatgaacgaggaaataaatactttcagcacctggaaaggttcttatcttcaagattgagcaagaatgaattcgagaagctctgtcttgtggcacttggccgtgaaaacctcccattgcacaaccaccttatctgttccattctacataatgccagtcgagcttgtggcccacctgtaattaatgaccctaagctggtcagaggtgccaccacttctggccatgcagttgttcctcctgtctgggacaatggtggtgccttgaacctaaatgccaaagagaaaaaaccattaatcagaagggaaaatgtactaacccaaaagtcatcactgaatcattgtgagactattatgctggagaatggtgttcatcatttgagtgatctgaagagatgtacacaatttcaaaaaaaagaccatgtagagctgctcatcaagcgaccgcgtgtggagaaggaaccagtcagtttacataattctctacacagcaataggttttctaaggcttcaagagaaaacctgggtcaagaaattatacaccaattccaaggtccagttcaagcaccacttggcattcagttacgtcatggcagttttggtgtggcccaaatacctttaccccttgcttctgtgagttcaaaggatacctctgatacttgtattgaagatggtgaactctgtgatacttcgtcagtgaagaaaaggatggacaaagtggcaggagcaaatgggttggaaggggtctcgatagagtgtgctaatttgttgaataatggcattgatgttttcatgaagcagttaattggatcttgcattgaattagttagagcaaggtctcgacatggcaaactaaggcatgagacattgaagcagcagctgtgccgaaagctaataaatggtgtatcagtgcataaccatgttcctgggcagagttctgttatacctccagagacaaattccatctccatgcaggacttaaaggcagtaatagagttaaacccttgtttgcttgggattaatgcatcactgctacacgaaaagatcaattcatatgactag

SEQ ID NO: 39142 - DNA, 1062 bp, Zea mays
  Peptide Sequence Number=SeqID_80921
tagcccagaatactcatattgatgttagtgagatcaagtccaagatttttaagaggataggacatgaacgaggaaataaatactttcagcacctggaaaggttcttatcttcaagattgagcaagaatgaattcgagaagctctgtcttgtggcacttggccgtgaaaacctcccattgcacaaccaccttatctgttccattctacataatgccagtcgagcttgtggcccacctgtaattaatgaccctaagctggtcagaggtgccaccacttctggccatgcagttgttcctcctgtctgggacaatggtggtgccttgaacctaaatgccaaagagaaaaaaccattaatcagaagggaaaatgtactaacccaaaagtcatcactgaatcattgtgagactattatgctggagaatggtgttcatcatttgagtgatctgaagagatgtacacaatttcaaaaaaaagaccatgtagagctgctcatcaagcgaccgcgtgtggagaaggaaccagtcagtttacataattctctacacagcaataggttttctaaggcttcaagagaaaacctgggtcaagaaattatacaccaattccaaggtccagttcaagcaccacttggcattcagttacgtcatggcagttttggtgtggcccaaatacctttaccccttgcttctgtgagttcaaaggatacctctgatacttgtattgaagatggtgaactctgtgatacttcgtcagtgaagaaaaggatggacaaagtggcaggagcaaatgggttggaaggggtctcgatagagtgtgctaatttgttgaataatggcattgatgttttcatgaagcagttaattggatcttgcattgaattagttagagcaaggtctcgacatggcaaactaaggcatgagacattgaagcagcagctgtgccgaaagctaataaatggtgtatcagtgcataaccatgttcctgggcagagttctgttatacctccagagacaaattccatctccatgcaggacttaaaggcagtaatagagttaaaccctt

SEQ ID NO: 39143 - DNA, 465 bp, Zea mays
  Peptide Sequence Number=SeqID_80922
atgggcgaaagtgctccagagataactatgttgctggactccagacaaattgaggaaccatatcaaagatttgatctacaacaattgtttctcaatgatgaacagtggaaacaccctttttgcattgcgtcgacaactctagatgaacaccgtttgcattttgagaaggataaggctttggctcgcagattccagccagtattggtgaatgagcctagccaggaggacgctgtcaagatattacttggtctgcgtgagaaatatgagacttaccataaatgcaaatacactttagaagggatcaatgcagcagtttacttgtcagcaagatacatccctgacaggcatcttcctgaagctggcagtagagctcggatggaatcatttaaaaggaagaaggaagaacaatgcttcattctctccaagtcaccagacgaatattggcaagagattagagctgtttag

SEQ ID NO: 39144 - DNA, 666 bp, Zea mays
  Peptide Sequence Number=SeqID_80923
atggacaaagtggcaggagcaaatgggttggaaggggtctcgatagagtgtgctaatttgttgaataatggcattgatgttttcatgaagcagttaattggatcttgcattgaattagttagagcaaggtctcgacatggcaaactaaggcatgagacattgaagcagcagctgtgccgaaagctaataaatggtgtatcagtgcataaccatgttcctgggcagagttctgttatacctccagagacaaattccatctccatgcaggacttaaaggcagaggacgctgtcaagatattacttggtctgcgtgagaaatatgagacttaccataaatgcaaatacactttagaagggatcaatgcagcagtttacttgtcagcaagatacatccctgacaggcatcttcctgaagctggcagtagagctcggatggaatcatttaaaaggaagaaggaagaacaatgcttcattctctccaagtcaccagatgaatattggcaagagattagagttgttcagagtacacatgaagtggcgctggctaacagattgaagtattctcttgatgagaatgacaaaggggatggtgttaatactgaagtcataggggacaacaagtactttccattgatgcctccaacttcaattaatatttggtggtaa

SEQ ID NO: 39145 - DNA, 486 bp, Zea mays
  Peptide Sequence Number=SeqID_80924
atggaaaagtttcgtgcactctcagaccaactatatagatcacccgattatcacaagaatgttcgaaaggagattgtaaaacagctcaaggaatgtaactccttatatgaaggttacgttccaatgaaatataaacattattgcaagaaaatgaagaagtatggatattactacattaactttgccgcttcaataatagaagtccctgaatttgtgatttttctgactgttgtattattgaaaataaatttttccaggtatggtgaatggggtgaccatgtcacgctacaagcagctgctgacaagtttgctgcaaagatatgtcttctaacatcattcagagatacctgttttgttgaaattgttccacaatatcaagctccacagagagagatttggctgagtttctggtccgaagttcactataactcactgtacgatgctcgagcagttgcggtacagcctgccaagtgggggaagccctga

SEQ ID NO: 39146 - DNA, 1257 bp, Zea mays
  Peptide Sequence Number=SeqID_80925
atgcctgggtcgccaacaaacccatgcctctccttctcatccccacctgccagtgtaggagaagaggacggagatctcgtcgcgctggtggagatggccgaagccgcggagtgcgaggaggagcgggacctgtttgccgatgcgaatgacgacgtagggatcgctggattggaggtcgcggatggcgaggttcacccccctcaccacgcgcagcttcagcagcccgacgagatggtccagcatgtgaacccttcatcctatattctctttgagctaatcttcttgcaccttgatgtaaaccttgacatatctgatggttctgcttgcacaacatttattcagagaaagaaggtcggtgcaataatcggccacaaaggtgagagggtcaaaagactgtgtgaggaaacaagagcatgtgttcgtattattggcggtcatctttgtgcggcagagcaagctgtaatcatttttggaagggagcagcttgatgagccattacctccagccatggatgccctactaagagtatatcagcaaacaattaacaatgactctttagatgtgggacccgataatgtgattgtgaggcagattcttgcaccaagtgagcaggcagcaagccttattggcgagcatggtgtgatgattaattcaatcatggaagcttctcaaaccgacattcgtgtccttggaaatgaacttccatcagacttgatagacacactactaaagtggatcccaagcaatgatgaggagcttaggcttcgactgtcctcccgtagcaccgccacaccgcacgcgtccgtggcggcgttcgcctcggcgccggtctcgcacaccgctccctggctggggaagttcatcgccttcgagcccttcaacgtggggggattcgactgggcgatctacttctaccccgatgggaagagcggcgaggatggtatgcttatccatggtggaaagaaaaagctaaatgcatacagcttgtttgaggtgagagtatctggtgacggaaattgtcagctcaaggaatgtaactccttatatgaaggttacgttccaatgaaatataaacattattgcaagaaaatgaagaagtatggtgaatggggtgaccatgtcacgctacaagcagctgctgacaagagactcaggatcagttctccaagtactcctgcacttggaaccatcaacaaagagtcaaagagtaaagatgttattccacaatggttatctttacgttatgttttgttgtag

SEQ ID NO: 39147 - DNA, 210 bp, Zea mays
  Peptide Sequence Number=SeqID_80926
atggaaacgaacacacactcaaacgcggaaaagcagggaggtgacattgacgcatctcatgacactccaacttacacgggtccccttttttatcagacacctagtggtcatactttgctcaattttgaggagcatgaaagttacagcaagtctcctcagagttatgatcaaactgtccttgatgcttacctggacaagacactgccttag

SEQ ID NO: 39148 - DNA, 2469 bp, Zea mays
  Peptide Sequence Number=SeqID_80927
atgaagtctatggatcgtcctccggctaatcctaaacgtataaccattgagtcaagccaagaattcttcagtgttgagataccgcgttcggcctctattggagttcatccaaacacaaagcattctgttcatccacctgcacctgtcgatagaccatctgttattcatgaagccaatgaccaaactggatctggcaatgacgacgatgattttatgacacctacaaagaagcgtaatgctactggaagtcctatcaaaatcttacggaagacatgcacaaagaggatgaaagtagtaaaaactccaaggcagacaatgcagaaactcaatgttagatgcaaccctcaggatgttattataacgattaagatattgaatgagaggcaacgacaagccgttgctagaaaaggtttttccaatattcttgacatgacccttgatgcactgggtagccgatctcatctttgttggttgatggataagttggaccagaaggatatgacaattcgccctggtcaaggcaaggaactaaagattacgaaagaaattgtccaccttatactaggcctaccgaatgctgggggtggtaagccactaagaatcgatgaagcagtggctggcgataacttgagggttgaacttggattgtctaaggatgagttcgttgttgcatctcttcaggaccgattaagaaaaggagacgatgatgacctctctatcagatgcttctttttgatatggttcaatagattgttgttccccacttctagctggggcatatctaaccatgaggtgttattgacggaagaaatggatcgtttccatgagacagactggtgccacttaatttttaacgacctctgcgaagctgctcaaaagtggcatacaagaagcactactaacgtgtccgcgacgatatatggatgctcagttgtcatactattaccatccatgatagtatacattaattattgtttttttgtagttgtactatttggaccacttgcattatgctgtagcccccacaataagcgtggcacaccccgcataaaattctttgacaaaaacattatccaagctctgacaaaagccgataaaaggaagccacgccaaagcggtgaaccttttggtcattatgagcatagggacaggacaaacattttttatgtcccttgtccaaatccttgtggtcatcataccattcatatccagctcccattgatcaaggatatgctttcaagtaagatcaagcagctccaaccacgtaactggccgaaattcattgaaaagattgttgagtacgattctgaagttggcaaagcgtgttccatcataaaaagtactcttaccaagatggttgtgaagcagtatgaattagcggacacatttgctgagttgattgatgatgtccttcgcgcggagtctggtgacccagacaatgctgcggaagcgcctcaaacagataaacctccagatatatctcagcatatgtcgtcagaggcacacatccataagggtacccagaatactccggacctaactatgccatattcacaaactaatacagagttgacaggcacccagtttgaggaaatacatgaaaagcaacaacaaatgcgccgtgcatttgagggctgccctgacgatttggatgttactgcgcccatggagacgaacacaaactcaaacgcggaaaagcagggaggtgacattgatgcatctcatgacactccaacttacacggggcccctttttgatcaaacacctagtggtcattgttttcgcgatgaagaaataaatcattgctcgtccatcaacaaaaacagacttgtactggatgtcaacgttggtactctcctcaattttgaggagcatgaacggtatagcaagtctcctcagatttttgatcaaactgtccttgatgattatctggacaagacactgccccagctggacaactttgttgactacaaaacgatcatggtccctatacttcatatgggccattggacattgtatgtcataaatttccagtttcgatgcattcacattttagattccaatccatatggtctggagttgggtggtactacatggaagatgtttcattactcccaaaaggacataggctccaggaaattaccatgggctagggttataatgaacaggttgaacaaatctttgcaacaagtccggcccaattcacgcatccctaaatttggaaatttcccaattgacatgccacctatgtgccccaccatgatagctggatctaatgactgtggcttctttgtcatgaggtacatccagtactatgactatatggatggttctatcaagcattatatacaacgagaaaactctggtgacctacgatctctggctctatattacctcacctttcatagcaagaacaagtgcctcccgttgcctccagaaattcaaaggttcaagtttgcacgcaagtag

SEQ ID NO: 39149 - DNA, 393 bp, Zea mays
  Peptide Sequence Number=SeqID_80928
atgaacgccgcgaaggaactccgcgagcagagcgcgacgctggagcacacgcggccctggcgagctgggcaccggcgctggagagctgagcaccgcggagcgcgcagggaggaagacacaccagggagctacgcaggtctggcggaatccgaacagggagggagaggatctgggcgcggccatggctggggagggaaatcgagctggggagctgccatgggaggagcagggacgcgccatgagctggagcagggcgcagctgccgggcgctgggacaagacaaggaacgcgcgcgccaggagatatacgacggatgagaaatatcagatggagggtggcggctggagatttttcagaggaatgactagtggagaggaatcatatggaagctag

SEQ ID NO: 39150 - DNA, 1692 bp, Zea mays
  Peptide Sequence Number=SeqID_80929
atggcgcactgctcctcttcatcccctagccggttccctgcgcgcgtgctccagtctccttccagtgccgcgtcccagcccctctgctccctagcgaactcgccccagccccctgagtctccaagctgtggagcttcttcctcccctacgcagatcgttcttcctccgctcggtgccccctcggctcgcccccatggtgctggtcgtgtccctctgcgccggtcgcttcttcttgctcttccatgccgcggcaatcgccctgctgctccagcgctcccagccgagcggttctctgctcctgcgcgccgaactcctctgttggctgcgtcctgctcgccttcagccgtccatggagctgctcgcgcccagctgtttctctccctccctctatttcttcctcgctgcgcgctgcggtgctcagctctccagcgccggtgcccagctcgccagggccgcgtgtgcttcagcgccgcgctctgctcgcggagttccttcgcgacggcaagcattgaaccaaatttccatgatctgtatctgaagttctttgataaagtaaactcaaaatccttgaacaaggaaatactgaaagccacatatgagaactgcaaggtcttgttaagatcagaccttatcaaatctagttccgaggagcgctacttgctaaaaaacctaggcaattggttgggaaagttcaccattggtaggaatcaggcactaagggctaaggagattgatccaaaatctcttatcgtggaggcatatgagaaaggattgatgattgcggtcataccattcacttcaaagaaccttactgttgacataaaggatgtgaaaccaacttccctgctcaaagatcgtctacgcgaagtcgagggaaatccagatttttcaaataaagatgttactgcatctcaaacctctgtggttgcagaagtcccttcagggaccatcccttcactaactcatatggaacaacaacctgagatcaatatcacatcccgagctatgagccttccaaatatacttaatcagtatgctgctcctgtctgtctacctacaaacaacacggtagaagatgacaaagttgctctgatgatgcctgagcaagtgccctcgttgacccaggtttcgccagcacaaacacaatcaacatcaccatctccattttctgttaaccagcttatggcggctattccacgtgaagagatatgtttcaaaataaatccaaagctcggctcccttggtccacaactgcaatatagcaaaattatggatttggctttggataaggctaacagggagataatactccctgttattcaaagaagtgtgaccatagcaagccgaactacaaaagaacttattctgaaggattatgcactagagtctgataacaatacgataactcgatccgcacatttgatggttagaacattagccggaagtctggcacatgttacttgcaaggcaaggatcatcaagtttgacgtcggcaacgtggtcatggtgactggcgggaggaacaccgggcgtgtaggagtcatcaagaacaggaagaagcacaaggcagctttgagaccatccacgtgctgcttggagctttttgctatgtctagttttctcctatttgttgtacaggaaaacatagaatataattcaaatttgatggtcgcaaaagtgtggagactttaa

SEQ ID NO: 39151 - DNA, 402 bp, Zea mays
  Peptide Sequence Number=SeqID_80930
atggatcaggaacgcccattcgcggtcacaaactaccatcagcgaagaacagacagaaaaacaaacagccaaatcaggagcaagaacagatggatgcacacatacctctaccctcctcctgctgccccccttcctcctccacgaaagaactctctgttacccttcaagatttggttccccctactcttcgccctctccctcctccgaggctccgactccaaggcacagggacaacgacccatgatgagcaggtcgaacttctcgctcatggcgcgcaccacggacgccgtgccctccgcgtcctccaccgtcttctccatgtacaccaccccgctcgttgtccctgtgcctgctccagaactcctgcagcagctcctcgtccctcgccgatcaaccggttag

SEQ ID NO: 39152 - DNA, 366 bp, Zea mays
  Peptide Sequence Number=SeqID_80931
atgtgtctgctccagcgggcggcgctctactttctgggtggcgccgacgaccgcgaggcgctggcgtacgcggcgcggatgccggagaccgggaccatgtcgctgacggtggtgcggttcaagctccggaactgggttgggatgggcgggcgcgacgaggcgaggcgagggacgaggagctgctgcaggagttctggagcaggcacagggacaacgagcggggtggtgtacgtggagaagacggtggaggacgcggagggcacggcgtccgtggtgcgcgccatgagcgaggagttctgcatccacggcgggggaggcggcatcgaggcctcgtcgccttccatggcgaaatcgagtggggaatag

SEQ ID NO: 39153 - DNA, 366 bp, Zea mays
  Peptide Sequence Number=SeqID_80932
atgtgcctgctccagcgagcggcgctctactttctgggtggcgctgacgaccgcgaggcgctggcgtacgcggcgcggatgccggagaccgggaccatgtcgctgacggtggtgcggttcaagctccggaactgggttgggatgggcgggcgcgacgaggcgaggcgagggacgaggagttgctgcaggagttctggagcaggcacagggacaacgagcggggtggtgtacgtggagaagacggtggaggacgcggagggcacagcgtccgtggtgcgcgccatgagcgaggagttctgcatccacggcgggggaggcggcgtcgaggcctcgtcgccttccatggcgaaatcgagtggggaatag

SEQ ID NO: 39154 - DNA, 1287 bp, Zea mays
  Peptide Sequence Number=SeqID_80933
atgccggggaggcgacgccgaggcctcgtcgtcttccatggcgaaatcgagtggggaatagggcggtttagggtttatgggagaggaaaagaggaggggccgagggggagtgaaaaaaatagcttttgcctgattaagaaaggcggtcatctccactgggacactcgctacaagatcgccgtcgaggccgccaaggggctcagctacctacacctcgattgctcgcaaccgatcctgcaccacgatgttaaatcgaacaacatcctgcttgattccaatttcgaagaacatgttgctgatttcgggctcgccaagttcttgcaggactctgtcacatcacagtgtatgtctgccattgctggctcctatggctatattgccccaggtgaaatttggtccggatcagaaggcggtatcataaaggcatggccttgggacaccattgctaagtccctctcatttacatcaggaataagtcataaggctgtctcgctggttgaaaaatcttatattgaccttagaaaccatgctacaattggtaacctgtgttctttgcttgctgctgatgtgaaacacatgctcgcagacagctgtcgagcgaaagtttggagactaactagcatgacatttgctctttgggatgctaagactagggaacttttaaaagtatttggcatcgatggacaagttgacttagctcgtcctgaggccccagtaatgccggaacaattcatagaggaagagattaaaaaatctaggaatgccttgatgggcgcagctgatgctgtacgcagagttgcaacaaaagggacatgtgtggaagataatcggcgaactgaagcagtggctcaagcaatgaatgggacaatttggtctggttgcacagatggttcaattattgtttgggatggaaatgggaatagactgcgagaatttcattaccatagttcttctgttcgatgcataaagacactcggagacagggtttgggtgggctatacaagtggcactattcaagttatcgatgtcaaaggtaaccttcaggcaggatggattggtcatagctgcccagtcatagacatggcaattagtgattcttacattttttctttggcacatcatggtggtattcgaggatggcctctaagttcccctagctctctagatgatattccgccgggtgtagcccccgaggcctcggaggagtggttggactcctccgaggtcttaatgcctcgcgcaatgcttcgggtggtctggtcgttccctcatgcgagctggccatag

SEQ ID NO: 39155 - DNA, 801 bp, Zea mays
  Peptide Sequence Number=SeqID_80934
atgcattccgccgtttccaaatacgccacaacaccatggggagaatctcccggttggctctccgctgctcctctgaatgagcatcagccgaaagaagatcaaaagatccatctgcaggcaccaggcacaacccagcagcaggccacaccctggagatcaaggattcaaggggcactcggcgaaggcgcagctgaactcactgacatggaaggtgaatcacctattgttgcttcaccatttcctgtaccaagttcatccaaagggcatgaaatggagatgactaagaagactgctgctgttgtgcctgaaatgactagcagcagcagtatgcccaatttagctgttgcaaaagatggaaataccaaggttttgcctttcgaatttcgagctcttgaagtgtgccttgaatcagcctgcagatctttggaagaggaaacttctactctggagctagaggcatatccagcattagatgagctgacatcaaagatcagcacattaaaccttgaacgagttaggcaaatcaagagtcgtctggttgcgatatctggtcgagtacagaaggtggtacccacttcaattttcttgcaagaaactttctttactaatctagtttccgcttgtgaaaacattatgttcctcaaggtgagggatgagcttgagcatttactggatgatgaaatggatatggctgaaatgtacttgacagagaagcttactcaacaagaaatcagtgaggcttcatctagagctgaggttgatgatgcatctcttacagaagacgataggcaagtatcatag

SEQ ID NO: 39156 - DNA, 576 bp, Zea mays
  Peptide Sequence Number=SeqID_80935
atgggtacccgggaaactcatgggcttgacaacatcgatccagcgtttctgaggtacaagaacacagagaaaagttatggtgatatatacctgtatattgatgaatggtgtgatgctaattggcaggtcatggcggcgagaagccccaacgtgaggctacaaaggctatcgacaggaagaaccagagctgctccagttgttgcccagatatcaaaggaagccggttatcttacagttggtgttgtcacctatccattcagtttcgagggccaggtatcgcctgaggctggcctcggcggtgcgttggtacccacttcaattttttcccgcgctgaactcgctgacatggaaggtgaatcatctattgttgcttcaccatttcctgtaccaagttcatccaaagggcatgaaatggaaatgactaagaagactgctgctgttgtgcctgaaatgactagcagcagtagtatgcccaatttagctgttgcaaaagatggaaataccaaggttttgcctttcgaatttcgagctcttgaagtgtgccttgagtcagcctgcagatctttggaagaggaa

SEQ ID NO: 39157 - DNA, 897 bp, Zea mays
  Peptide Sequence Number=SeqID_80936
gaaaataatgtcgatgcggaatcgaacacggagcgtcgcggtctcaccggggtgaacgacgacaacgatgaggctgcgcaaaaacagaaacaatcggcgagtgtcgacggcgtgctgttcaccgtgccttataaaacagcgagcccgcagagcgcggagacgccggggctgctgcaggaaatcgacgacgcgtggcttgttgtgcatttcgtcgagcacacagcgagcgtcaacggcgcactgcgcagcagcagagaggaggcatcggcagagggctcgcggccatgggcaactgcgagctcgctgcaatccatggacagggagccaaccgcgctgcgtggaagaggaacagggagggcgtggctggaggaaaggggcgagctgcttgtggccatgggggagaagaaagggcgccgtcgagggagcttcaacagtggagcgctcggctgctggactgctcaccgtggacagcagagaaaggcaggtgcagtggagaaagggtgctcaaaactgctggccggagctagggctcggccatgggaaagaagggggaaggaggaaggggagccggctggtggagatgggagagctcggctccatgcagatatggagctcgccatttggagcagtggcagggggcgtccttggctgctgggcgagctcggcatggagaggctgcttgctgccgtgatgcgggaggaagaaggggtgccctgctcttgcacgttgggaagaaggggaggacgccatgggaggagagggagctccatgctgcagccgctcgcaggaggagccgggagggcgccgggccatggctggccgaggggaggagctcctgccgtcaaccctgcacacgcagagaaaacagcggccaaggggagagcaggggggcgctag

SEQ ID NO: 39158 - DNA, 384 bp, Zea mays
  Peptide Sequence Number=SeqID_80937
atggagctcgccatttggagcagtggcagggggcgtccttggctgctgggcgagctcggcatggagaagctgcttgctgccgtgatgcgggaggaagaaggggcgccctgctcttgcatgttgggaagaaggggaggacgccgggagggcgccgggccatggctggccgaggggaggagctcctgccgtcaaccctgcacacgcagagaaagcagcggccaaggggagagcaggggggcgctaggccaaggtccggctagaggtggaagaaggcttgggcgccatggagaggaagggagccgagctccctgcgcgctggggaagaaggtgctgctgcgcgtgggggaagaagacagggaggctgtggcggctggaaattgttga

SEQ ID NO: 39159 - DNA, 345 bp, Zea mays
  Peptide Sequence Number=SeqID_80938
atggcgctctcgcccgtgctggagcgcccgcccgggcgagaggcgggcgagagggaggcgaggcactggcggggcgagagcgcgagcgagagcgacgtggcgcgatctgattggtccacgtgtcgcgatctgattggtccactggatctgattcgactgcgaataagagaacccgactcggagtctctggtgaatatagttcttgaggcactgaagacaccgaggagaaagtgccccgaccagtggggcgtgatagtgcaaaggcggctgcgcgaaagacaaagacgaaggggaaagggaaggaagccacgagcagcgaatcaacaagtgaagcattcaaaatga

SEQ ID NO: 39160 - DNA, 894 bp, Zea mays
  Peptide Sequence Number=SeqID_80939
atgtcgggttggtccccagatttgaacaccttcacggatctcttgcagtccgatgggtcacctacaacccttctgttagatgagtcttcttcactacatcgtcgctccgatgtttcagcctcactcccccgtgcactatttccggctgcgcgtccaccaccatacccttatccctatcatttgtatcaatatccaccgtcttcatatggtcaacctccaacttcccaagccggaattcaagcctcattcccggtacgtccgtatgcccctcctccacctgctgcggacggaagtcaagcttctttccagatacctccatacgcccctccttcatatgctccacctccgtatggggcacctcatccatatgctccacctacgtatggagcacctcctccagttgcacctttatctgttggatctgaaaaccaagctgaggaaaatcccgtgccgaaggaaaagcgtccaaagaggctagagtggacgaagggtaaaatggtcatggatgcagcaatggcgaggttcgagggtaaaatggggcatccatttaagcgccatcattggtggcaagttgttcgccacgagcccaagtggtcagcaaagcatggtcttggtagtggatctgattcgactgcgaataagagaacccgactcggagtctctggtgaatatagttctggaggcactgaagacaccgaggaggaagtgccccgaccagtggggcgtgatagggcaaaggcggctgcgcgaaagacaaagacgaaggggaaagggaaggaagccacgagcagcgaatcaacaagtgaagcattcaaaatgaagaacttgtggggtggattagtgaaggccaagctttttgaagcaatggaacatcctaaagggccgatcaactag

SEQ ID NO: 39161 - DNA, 438 bp, Zea mays
  Peptide Sequence Number=SeqID_80940
atggcgcaccggacagtccggtgcacaccggacagtccggtgcccctgccacgtcatcactgccgttggattctgaccgttggagcttctgacttgtgggcccgcctgggtgtccggtgcacaccggacaggtgtaagcctaattccctttcagttctgccccccacaccccgtgccaagggcaagggcgccgatttggcaaagtccaccaaggtttccaagaccggcgccaaatctgaggctgccgtcgcggctgggaaggcgaagaaactgccggcggcgaattcgaccgcggatgccggtgccaagccaaccaaatcaggcaagaaggcgccggttcttgccgacgccaaggcaaaagccaatgcgaccgtcgtcagcaaggaggagtcggcggcggaggtgggggttgaggaggacgtggtgttgaccaactag

SEQ ID NO: 39162 - DNA, 402 bp, Zea mays
  Peptide Sequence Number=SeqID_80941
atgggcgattctgacttctgcgcgcgcagagggcgcattaaatgcgcggcagagagccgttggcgcggagatgaccgttgctccgctggacttaggtgtaagcctaattccctttcagttctgccccccacaccccgtgccaagggcaagggcgccgatttggcaaagtccaccaaggtttccaagaccggcgccaaatctgaggctgccgtcgcggctgggaaggcgaagaaactgccggcggcgaattcgaccgcggatgccggtgccaagccaaccaaatcaggcaagaaggcgccggttcttgccgacgccaaggcaaaagccaatgcgaccgtcgtcagcaaggaggagtcggcggcggaggtgggggttgaggaggacgtggtgttgaccaactag

SEQ ID NO: 39163 - DNA, 1110 bp, Zea mays
  Peptide Sequence Number=SeqID_80942
atggaggcccggctcgtcccctcggcgccctctccgcgccgctcaaacgagatcaagaaggcgaccaagacctccgaggagcgccgccaggagatcgaggtacgcctggctgccatgaggctgctgcagcagcagaaggagcagagcaatggtgttgtgtctgccacccctgcctcttcccagtcacagggagatgaggccccctcatcgtctctgtcattggtgggtggacatcgagctgacaggagaaaaggcgggtctaggaaagcaacaggcttatctgcatctgaacgcactgaccaggcgcgtgcctactggggttcgataccagtggatcaaaggcttgcgttcttaaacactagcatttctgagctcaagtcacactatgcttctgcaatccataaggagaaagatgttgccagtgcagcatctgatgtgctgaatgaggtgatacgatttgccaacaagcatggcaactgggagttcatggtatgtggtaggtgtcggggacagtttacagatgttgaggcacaccggtggcatgtcatgggggaacatgttgggctactctcatctgagctgcaggaaatggtgccgcaggagattgatgctgactgggtagaaatgctcattggttggaactggagtccattggatgctactgcagcactgaaactgtttgaggaagatcaaactgacaatcttggaacagataggggcaaagaatcggatccgacggataattggagtaacaaagacaaccctgacatgtcagaatcctctgcctcgccacacaacggggagtgtaatggctttggagtggtggtgagggaaggtgacggtacgtggccactatcagatgatgacgaaagggcaaaaattttagaaaggatccattcattgttcaaaattcttgtgaagaaccataatctttcagtgttcaatctaaacagggtgattcgatttgctgtagaggaactcagggggttgtcatctgggtcactactgcttaatcactcattggacaagtcgccgctttgcatttgcttcttggaggcatcgtcactgtggaaagtagctaaattcttgcaggatttagtgcaggcctag

SEQ ID NO: 39164 - DNA, 4239 bp, Zea mays
  Peptide Sequence Number=SeqID_80943
atggtactgtccttcgcccgcgccgcctccgtccttgacgacccggccgcccgcgcgcgccgccaccgggcagcgctccaggcggcccagcgcgccgtcgagctcgcgccggactccatcgagctctcccactttcatgccatgctgctcttcgacgccgccaccgacacccgcgcctacgaggaggtcgtcgccgagtgcgagcgcggcctcagcatcgaggccccttccgaccccgcgccccactccctcaggctgcccggccccgacgtcgaccaggtccagtccgagctccgcaacctgatccagaaggccaatctcgcctcagtatctacctggtttaaaaccctgcgtagcgcgggcgacgataagtttcgcctcatccccgtgcaccgttttgccgacgaaccaatggaggcccggctcgtcccctcggcgccctctccgcgccgctcaaacgagatcaagaaggcgaccaagacctccgaggagcgccgccaggagatcgaggtacgcctggctgccatgaggctgctgcagcagcagaaggagcagagcaatggtgttgtgtctgccacccctgcctcttcccagtcacagggagatgaggccccctcatcgtctctgtcattggtgggtggacatcgagctgacaggagaaaaggcgggtctaggaaagcaacaggcttatctgcatctgaacgcactgaccaggcgcgtgcctactggggttcgataccagtggatcaaaggcttgcgttcttaaacactagcatttctgagctcaagtcacactatgcttctgcaatccataaggagaaagatgttgccagtgcagcatctgatgtgctgaatgaggtgatacgatttgccaacaagcatggcaactgggagttcatggtatgtggtaggtgtcggggacagtttacagatgttgaggcacaccggtggcatgtcatgggggaacatgttgggctactctcatctgagctgcaggaaatggtgccgcaggagattgatgctgactgggtagaaatgctcattggttggaactggagtccattggatgctactgcagcactgaaactgtttgaggaagatcaaactgacaatcttggaacagataggggcaaagaatcggatccgacggataattggagtaacaaagacaaccctgacatgtcagaatcctctgcctcgccacacaacggggagtgtaatggctttggagtggtggtgagggaaggtgacggtacgtggccactatcagatgatgacgaaagggcaaaaattttagaaaggatccattcattgttcaaaattcttgtgaagaaccataatctttcagtgtgcaatctaaacagggtgattcgatttgctgtagaggaactcagggggttgtcatctgggtcactactgcttaatcactcattggacaagtcgccgctttgcatttgcttcttggaggcatcgtcactgtggaaagtagctaaattcttgcaggatttagtgcaggcctctggaattaatagaaacctggagaatgatggactaggtgacagggatagttccccccaaaaccacaatgtactggagaaggttattcttagttctgattcttctgaactgatcattgatgggcaaacttttggtggaaagtttgactctgagagtgttgatactgacacactgttttcatggttgtacgctggatcctcaattggtgagcagctattggcttggaaccgtatgattgacgaaaggtcaaatcagtgcatggaccttattcgggcacttgggagggagttcaacaacttgcaaaactcatgtgaacggaagcttgaacagctgagaaatgaggaggcttttatttctgtagaggacctcttatgcgaagagcaaacacgaagggagcaggtggagcagtatgggttccaaagttttgaggagatcctcaggaagcggcaggcggagttgttggaacgcaatactgaggtgcagtccgacagtaacagatccgagatagatgcaatctcagctgttttgaagaaactccacacttcacacttcggttatgatgatgccttttctggaatggccccacgcctttttgacttggacggggtcgaagatgaatggaggctgcatgattttatacatccaaatgattcaatggtacacactgttatatcaaagatgaaggaaaaagttactgtggagattagcaagatagatgctcagattatgcgaaatttatctgtgatgcggcatctagagcacaagcttggacctgcttctgctcttgattatcgaatgattcttttaccccttatgagatcgttcttacaaagccatttgggagagctggtggataaggatgccaaagagagatctgatgctgcaagggaagccttcctggctgaactctccttggatgctaagaagaatgcaagcaaaggggctgatatgaaacaatcccatgaaaaatcaaaggataaaaagaagttcaaggattctcgaaaatcaaaggagctcaaggattcaagctggagcaaccagtctctcattcaccaagacagtaccgatgagggaacatcagagacatctcaaatgcttgctgattgtgatgatctgtgttgcaaatgctcgacaagtgaggattacttcaatgaacaagaggaagaacttaggcatagggtacaacttgaagcagaggaaagaaaattggaagaggctctagaatatcaacggtggatagaggaggaagcaaagcagaaacatcttgcagaacaatgtagaagtacacatgcatcttctgttattggtacagctagtctttcaagcactgtgagtttaaacagggatccggataaccatgaaagtgcactcaataactcttcacatacttatcttgaaggcataaagtttggtgactttagctacaccgagaacgagaacaatttcagccagaaactcaatggaatcgagttcgactcatctgatgcacatgcattaaccagcagtgatatgagtgtttctatgttgacgttgaaaatgaatggggtttgcaataatgcacaacctataaagcctcttggtaattttggcacccaaaatcccaagagaagttctagtgaaccacaaaggtattctcaaggtcactctgcaggaatagagaagccaaattttgagaaagttggcagtggtgcaataccatcaacggatgtgtgcatcgaggatgattttgataaaaggtttcaagaagatcttgatgaagcagtgcgccaaagccttggatgcgatgcttatcctgctggtacagtaagcacttcaaatgggacagaagtgtatgggactggacttaaaaatgctgctggtgaatacaattgttttttgaatgtgattattcagtcattgtggcatataaggcggtttcgggacgagtttcttaaaacatcattactgcacaagcatgttgaagatccttgtgctgtctgcgctttatatggtatcttcattgacctgagcaaagcatccaagggacaaagagaagctgttgcacctacttcgttgaggattgctttgagcaaatcctacccaaacagcaaattctttcaggagggacagatgaatgatgcatctgaggtactgggtgtaatctttgagtgtttgcataagtcatacacttctcgtactgtctaccatggtgtatcccacgagaaaaattctattggatcatgggattgtgcaaatatttcttgcataacacataatctttttgggatggacatgatgtgtccagattcttcatttgatgaacttttgaaggttgttataatgaatgatcaactagcttgtgatcaagacgttggcggctgtggaacaccgaatcatatagaccacatcctttctaattccccacatgtctttactgttgttttgggatggcagaacaacaaagagagggtggatgacatatctgcaactttggctggtatttcaactgagatagacattagcatattctaccgtggtctagatcaaggaggcaaacacaccctggggtcagtggtttgttactatggccagcattaccattgttttgccttcaaggatggacggtgggtcatgtatgatgaccagacagtcaaggttattggtagttggggtgatgtgctcgtgatgtgtgaaaagggccatttgcaaccccaagtgcttttctttgaggctgcaaattaa

SEQ ID NO: 39165 - DNA, 537 bp, Zea mays
  Peptide Sequence Number=SeqID_80944
atggcgggcggaattaagctcaccggagctaaggaaaagtggctggccggtgagggtggtgacaaggatgatggttatgattatgcttatggtaatggctctgccaggctggccacggacgtcgtccatgcgaaggcctgggcgccccctttgctccaacgagccgaggcgaagaccatcaaagacttcaaggaccggataactgaggccgcgaagaccacaaggctttgtctccctcaatacaagaaggggcctatgtgcaatccggccattgttgtagggcccgtccgcaggctgccattggcttctcatggaaccactggtgcttttgccaaggctttgtgcaatcacataaggactattaacaaaccaacctttagcctccagccgtcaaacttagttaatattctagccgaagcaagaagtgcagggcgagaggctccaagttgtggagattcctcgcaaacgggagaaagtataagaaaggaaaacaccgtggtattcaagttgatcattggatcacttgaaaggggttga

SEQ ID NO: 39166 - DNA, 252 bp, Zea mays
  Peptide Sequence Number=SeqID_80945
atggcgggcggaattaagctcgccggagctaaggaaaggtggctggccggtgaggagatatggagccaggaaatctggtttgtctccctgcccaaacccgaggcaaatccaagaatcttgaaggggtactcttggtacgatagatctggctctatctccaattctgggctctgctatgatctcggtcagcaatcgaacacacttcttcagctgagatacatggaatacactgtgaatggcagacatctttga

SEQ ID NO: 39167 - DNA, 669 bp, Zea mays
  Peptide Sequence Number=SeqID_80946
atgtccggtgcaccagaggactccaactcgaactcgccaccttcgggaatttccggaggcactcacgctataattcaccggactgtccggtgtacaccggacagtgtccggtgcgccatggaagagcggcctcaggaactcgccagcttcgggaatctccaacggctagtccgctataattcaccggacatgtccggtgtgccccggactgtccggtgcaactccggagcaacggctattcggcgccaacggctacctgcgacgcaattaatgcgcgcgcagcgggcgcagaagtcaggcgcgcccatactggcgcaccggacaaggcacagtgcatgtccggtgtgcaccggacatccaggcgggcccacaagtcagaagctccaacggtcagaatccaacggcactggtgacgtggctggggcaccggacatgtccggcctccatatccaggtggtgcatgtccaggtggtcgttagcttcctcaagctcctgctgcacatcgtggagctggtcgaccacgaagtcctctcggctgtcgagggtgaacttggtggtttgagcgaggttagcaagaaagttgtcagggtcttcaaagctaccgcctcagtggtgtcgtccgtcctgaatccaatggtctcagagttaagggaacgccaacccggctga

SEQ ID NO: 39168 - DNA, 414 bp, Zea mays
  Peptide Sequence Number=SeqID_80947
gtgctcaactccgccggttaccctacgccacctctgtacacggtgcagttgtacaaggagcatcgggtgccacgttgccgagtcttgctgactctggaggcacacccccttcagccgggttggcgttcccttaactctgagaccattggattcaggacggacgacaccactgaggcggtagctttgaagaccctgacaactttctgtggctaccatcccctggagatggtgatgcaccccttgggactcttccccgctgagaagagggatgaccccatgtggtgcaaccgtgtgggccatgtgaaggacgacaacaccattgatgtcctagaaaaccagctccacgatgtgcagcaggagcttgaggaagctaacgaccacctggacatgcaccacctggatatggaggcctga

SEQ ID NO: 39169 - DNA, 339 bp, Zea mays
  Peptide Sequence Number=SeqID_80948
atggctggaggacgcctcctccgcagagctgggggatggtttccaccaccagaagctggaagaggaggtggccagccgacccgtgcgggaggtagagccccggctcgcctcgctctctgccccagcaaggatggcggctctccctacttgtgtccccagccgtcgtgggctgagtcttctccaacacgatccaaggtcctccccctatggcgcgagggctgggtcccacgcgtcatgcaagctggcctagagcagaagaagccaaaccaccgcgcgcggtgcatgcaaccgcccggcggttacaagcgtccctccactttcgcccagaccagcgggtga

SEQ ID NO: 39170 - DNA, 1509 bp, Zea mays
  Peptide Sequence Number=SeqID_80949
atggagtacaccaccctcggcgtcaactacaccttcggcgaggtccgacctagcctcggacgacgaagcagtcggagaatctccactctgaaggacgacatcagcaccacgcccgggccatcgctgccagggtcttctccaggaatccggcccgagcagacggctcggccggccaccccgaggcctcggccggctgtcccccgaagacatgagcccggcccgaggcctcggcaactcaactccggcgtcggttctgccagcggacgacccggccaggctccggccgaccaagtcttcttttcaaagccagctctgcctctgttcgagccgacaccgctacctccagcttcggctcatcgaagagcggccgaggggacgaacgcggccaccggaaggctcttgttcgtgtccccgctcaagggacgcgaaccagacatcaaagccaaagagccgtgcggcgtccgcctcttcaccaacgccgcaccggcgaacgcgggccgctccatagcgcatcggcaggacacctcctccgcagagctgggggatggtttccaccaccagaagctggaagaggaggtggccagccgacccgtgcgggaggggctggtggtcaccgtcttgggtgaccaccggcgaggggatgcagccgggccgcgtgatggaaatcctcgaagccgaacgatggctgagaggtaccaacttccacaaagttgcgttcctccaacgacaaggcggaaggattgcgggtgttccccatccgggggctcggaaggtggaaagacacgatgcatgagggagcgtgaagacatggtcgctttccaagggggtcaccctccttttaaaggcgactctccctacttgcgtccccagccgtcgcgggctgagtcttctccaacacgctccaaggtcctccccctacggcgcgggggccgggtcccacgcgtcatgcaagctggcccagggcagaagaagccaaaccgccgcgcgcggtgcatgcaactgcccagcggttacaagcattcctccacttttcgcctagaccagcgggtgaaagggcggacagccatgcattcggcacgcaaccacgccaagtgggtgcaccccttcgacttccaacgcacccagcatggaggcccaggcccacgcgtcatgcaaccggcgcgccagttgctacgtgcaagcaactgcaccgccactcgcaccactaccacgcctcctcgactgcggaaccagtaccgcgactcgaggcaaccctgcgtacgacccaacagtgccagccaggcgcgacggagaagcaagcggcgctttgccttcgccataatgaccgcgtcaaaaaaggccccgagcctccctactgatcagaggttcaaaggctggcccctcggaggggttcaacagcctcagagtgcttgggttccgcgcccactactggtcagaggttcgaaggctggcccctcggaagggttcaactgccgcctcaagccactcgggctccgcgcccactactga

SEQ ID NO: 39171 - DNA, 1728 bp, Zea mays
  Peptide Sequence Number=SeqID_80950
atggaggttcgctgccaaaccagcttttgccagaatgaagatggtttccccaagttgctgagagtaggcacagttcgcctcggaatcaggagccagccagagtatgatggtcgcgaattcgtcgagcatgacacagagaagtgtgtcgtgactgtatacattgggtccagtccacaccatgtggaatggagtgtcactgctgttgggcacagattcagagacacctgccaagtcgtcgctcgcaaggcattgagggccctgtgtcagatctatgaagaagaagtggccgacaccccgctcagattctttccaccctttcagagagaccgtccaatttggatggccaggatgcgtgcattggaagagcagcagctgcttgaggatgaccccacagttgtgtacctcaccacatacctgcacaccctggatgcacaatatgatttcttgactcggcaccaccgtcagatgattgcccgagcagaagatgcagagaagctcaaccgtcagctccatgtgaatctcaccacagctcaagcccgtgcaactgcattggaaagtcgcgaagtcattgcggttgaagccctgaagcaagcaaaggatgagcatgtccagaagttgatggaggcctacttggtaacccataaccaacgtagagccctgcggatccaagagcccgctccatccaacccagttcaacccaggagagctgaagacccccagattcttgaaggtcacccagtctctatcagaggagagaagaaggcttgggaactcccggaaggagccagagtcttggaaggaattccagtctcccctaaggctatggataagcaagagcaccctgaatcctcccaagatcccccgccagagttgtttgagccccttgccatgaagaagattctagcaccctcccttgaggtcaaagaagaagctgcaagcaccccgccactactgccaccctcagaggagctacaagagccagtcccgcttgaagaagagttcgaccccgtgctgccatctcagtcgctgccagaagaagttttctctaaaaacatagatcacaaattagagctaatccttaccttatgcttccattctcatcttaacccatctgaagagaaaagtgccttacccaagaagatatcgggaagcttacccttgaagcatggaataagctacagaggaacctatccagtcgctcagtcaaaaggaccgatcactcctccagtgggaagagcaaagagaaagaaagagggcagtgaaaaagtgaaaagtgagaagagaaaagaagacagtgaagagaagacaagaagaaggttctcccagaatcaaccctgtgccagtcatccctccgcagccagctcaagcagcaacagcagaagaaggccccgtaacacccttgttatgaggtacttcaaggagttcaaatccccaagattcaagagatctaccctcattctttttaagtggggtagtgttctagcaaggttcctgttgtggagaaaaagaagaaggcctgcagcaagcttgtcgaggaccagatcaccgaagcttataagtttctggatgagaagtggttacccaagttttgttgatgaagcaccagaagaccaatcaaggaaggaatccatgtgggagttcgcaagagaaaggtttgcgtgttggcatcgatgcttcctcaataagctagctgccaagcgaaagctgaagcctgaagatgatctttga

SEQ ID NO: 39172 - DNA, 738 bp, Zea mays
  Peptide Sequence Number=SeqID_80951
atgaagaagattccagcaccgtcccgtgagatcaaagaagaagttgcaagcaccccaccaacaccgccgccctctaaggagctacaagagccagtccagcttgaagaagagttcgaccgccgtcttgccatctcagtcgccgccagaagaagtcatcaacatcagctccctcttgacccatccaggagatgtctcagattgaagttaaaggttttctctaaaaacatagatcacaaattagagctaatccttaccttatgcttccattctcatcttaacccatctgaagagaaaagtgccttacccaagaagataccgggaagcttacccttgaagcctggaataagctacagaggaacctatccagtcgctcagtcaaaaggaccgaccgtgagaatcaaagcactgcccctgagtcaaagtaaacaggaaaagaggacagaaggagttattaccatacagagaggcaaagattcttggaaccagagaccacaaacatcagggtcatcgaccccaccactcacctgtgcccccgcatgcgtgcccgcctctatgcgcactagcaccaccgcccatgccccctttgcagcgcactaccgccgcccacccccctttgcagcgcacccaccgccgccatcatcaccggcaacaccaggccccctccccttgtcgcacctgctgcctcgtgtcacctgctccatcactaccactccacaccaccctagttttggaagatga

SEQ ID NO: 39173 - DNA, 351 bp, Zea mays
  Peptide Sequence Number=SeqID_80952
atggagaggggcagggagccggacacgccagggagccgttacggctcgaaggagatcgagcagggagggctgggccaagcgcggctggggaaggagcgcaggggctgtgcggttcgacgaggccgtggcctgggtgagctcacggctggagcagggacggccaaaggagaacggcactggcttggaatgaccatcggaacggcactggcctggtgctccacggaacggcagggtcgcagggaggcggcttggggagagaaagtgcctgtttgtttcagcttctcgcggcttctggccaccaaaagctgctacggactgccaaacactcaacttttcagccagcttctataa

SEQ ID NO: 39174 - DNA, 237 bp, Zea mays
  Peptide Sequence Number=SeqID_80953
atggaggtcgcggagaccgttgcgggagcggcggtggggggcgcggcggcctgcggcgggggaggctgcgccggcggcgcctgctgtggccccggggacgacatggtcggacgccacaccaagccggcggcagcgctcttctggccaccaaaagctgctacggactgtcaaacactcagcttttcagccagcttctataaaattcgtttgggtaaaaatcattcaaaatcaacataa

SEQ ID NO: 39175 - DNA, 459 bp, Zea mays
  Peptide Sequence Number=SeqID_80954
atgaactccagacgcgggagttccggacgcaggcgatttcggcgacgacgaactttacggtggagagtagaagatcgaccgacggtgttcggcgcgagcagggaactaggcgggatgcttgacggtagcagggaggatcctgggagatgggagcgctcaagtcgagcttcagcaagcggcacgtcgaacaccggtgagcagcacagagcggcggcgagctgtgcaagcagcactggcgagtggcacagcagtgtggtagaggcaggaggcgagtgcgaagagctgcaaggcatgagggagataacgggcgaggaagaaggggcccaggcgcgcggcgctagtgcgcaggaaggcgagcaatggcttgagacgaggcaacacgatgaagattcgactgacgagtgggactttgctcagattgtagccaaagtcccggagggtttgcctcatccagagtag

SEQ ID NO: 39176 - DNA, 558 bp, Zea mays
  Peptide Sequence Number=SeqID_80955
atgcttgacggtagcagggacagggaggatcctgggagatgggagcgctcaagtcgagcttcagcaagcggcacgtcgaacaccggtgagcagcacagagcggcggcgagctgtgcaagcaacactggcgagtggcacagcagtgtggtagaggcaggaggcgagtgcgaagagctgcaaggcatgagggagataacgggcgaggaagaaggggctcaggtgcgcggcgctagtgcgcaggaaggcgagcaatggcttgagacgaggcaacacgatgaagattcgactgacgtgagttggggaacgagaatgcgagcggggcagacatccatgaacgcctgtgcactgtctacgctcgcgttgaagcccgcacgtcttgctgtcagacgagcgccaggatatgcaagtgaatgcgtggagccgcttggagccactttttcaggctccggctcctgctccctgggcggagctgtttttgacacgctgtttgggagggctccggcaaggagccggagctgctcaggagccctcccaaacgggctcttaattgtcacttaa

SEQ ID NO: 39177 - DNA, 630 bp, Zea mays
  Peptide Sequence Number=SeqID_80956
atggcgatgcagatttttgttcacggggagatgttagaatttgagagggccttcattgatttctataactcaatattgcataaaaatgaaaccgttcttcaagaacgagcgacaacgacgctccgaggcaggcgggcaagcggtgacggcgctgtcgaagcggacggacgacggcagcgcaccctaggcccggcgacaacggcggttgtcccgtccgtctctgcgatagccaccgccgccgccgctccagcatctgtggcgccgtcccttgcacccaaggccaacgacagcaggaaggcggtggtgcctgtggacgcgtcggagctggagaagcacgtgctggcggtggacgacaaatccatcgaccgcgccgcgatcgctaggatcctgcgcggctccaggtacagggtgaccgccgtggagtcggcgatgcgcgcgctggagttgctcgcgatgggcctgctccccgatgtcagcatgatcatcaccgactactggatgcctgggatgtccgggtacgagctgctcaagcgcgtcaaggagtcggcggcgctcaggggcatctacgtcgccatcatgtcgtctatgaccatcgtgatttatacattttcaaacaaaattttacgatag

SEQ ID NO: 39178 - DNA, 324 bp, Zea mays
  Peptide Sequence Number=SeqID_80957
atggaacatgtagtttatgcaaatatagtctgcgcatattacgtgcatcgggcccacgatccggcccacgcgctcacaattatccagtcccacgccgccactataaaaacacccccatgccgccagggattaggttttagcggcggcggcggttccctcgggcgtgcgagcggtggtgatcctgggggccagcagcggtgtcgcctcgaggcaggtgaccgacggcggcgctccaccaggaacgagcgacaacgacgctccgaggcaggcgggcaagcggtgacggcgctgtcgaagcggacggatgacggcagcgcaccctag

SEQ ID NO: 39179 - DNA, 192 bp, Zea mays
  Peptide Sequence Number=SeqID_80958
atggtgaaggcgacgatgagtggcaagctcaaggagatggattgggaaaagaagatcaaaatctgcgagcttgtggagcaagatcctgggtacgtccgaatcttgtatacactatttgcatcactaaaccttgattatcagacatctgtagtgagactgttcttttcctatgaatttctgttggtcagataa

SEQ ID NO: 39180 - DNA, 171 bp, Zea mays
  Peptide Sequence Number=SeqID_80959
atggctgcagaaatagtgaaggcggcgatgagtggcaagctcaaggagatggattgggaaaagaagatcaaaatctgcgagcttgtggagcaagatcctgggcctgcagctcaggttggaagggatccaagatttgagcctgtatatggatctgttgacaaagaagggtaa

SEQ ID NO: 39181 - DNA, 435 bp, Zea mays
  Peptide Sequence Number=SeqID_80960
atggctgcagaaatggtgaaggcggcgatgagtggcaagctcaaggagatggattgggaaaagaagatcaaaatctgcgagcttgtggagcaagatcctggacaatctgctggaactgagttgtacattctgcaacttgatggtgtgcacgaggtggatgcggtggcattgccatgggggaaggagacacacgaggacagcaaggcaaaggcgaaacagagggattgcgaaggcagaaccctcttaataaatcatgaagatgaactgcatgcgtatggagaaggggtagatggaatatgtaatttttttgataaaaatgcacagactgctgcactaatagttgctaaatatattaagttcataactgagcaggtcattggtcttcgtcttgcaaatgacaatgggacttctgcaaagcacatcaggaagaactag

SEQ ID NO: 39182 - DNA, 435 bp, Zea mays
  Peptide Sequence Number=SeqID_80961
atggctgcagaaatggtgaaggcggcgatgagtggcaagctcaaggagatggattgggaaaagaagatcaaaatctgcgagcttgtggagcaagatcctggacaatctgctggagctgagttgtacattctgcaacctgatggtgcgcacgaggtggatgcggtggcattgccatgggggaaggagacacacgaggacagcaaggcaaaggcgaaacaaagggattgcgaaggcagaaccctcttaataaatcatgaagatgaactgcatgcgtatggagaaggggtagatggaatatgtaatttttttgataaaaatgcacagactgctgcactaatagttgctaaatatattaagttcataactgagcaggtcattggtcttcgtcttgcaaatgacaatgggacttctgcaaagcacatcaggaagaactag

SEQ ID NO: 39183 - DNA, 1077 bp, Zea mays
  Peptide Sequence Number=SeqID_80962
atggtggtcgtggacgtgtcggagttcgggacggaggactttgacccgaagcggtggatcaatgcggcgctggacgcgcgacacccatcggagcctctcgatcgcttcctcaccagcaccggaattagtagtaggattgtgggctttcgaccatctattttcctgacctatgatgacgactcaaggaggttgactggtgagatatggaccttgaaattccattgcattggagcacaatctggaaaagaaattgtcacagtaaatattgataaagcttatgttgccttttacaacatggtgtacataaaatcgaaacttggatattctaggagggacttcttgttttacaagaaacgatgtggcattgatcgatccaggctattggcacttgattacatccaccaagaagaggccatgctgtctgataacatggatgagagaaaaataagttttgtgctcacaaaagatccacccagtgatctagaggtaagcataactcccatcaagcgtccaaggcagcggacaaatgttgatgaagaaactatagaagtgtcgattgatgcatataaggagtggcttgcaatactacaacatgataatccagaaacggatgaagaaattcatggcagcagcaaacctactgctaattggccatctcatgctagacgtcataggaaaagagatcctgatgttattggtatatatgtagataacgatggagtattcaaaaaggaggggcgtggtacccttaagggtatagcagcagccaccaagcgaatgaagaacggtgatcacaaacttaagattgaattttcatctaagcttggaggtcctacaattaaccttctctttatatcaaaactgaaacaacgaaggtgggagtttccaaccaatgaggacgcgcatgaaaagatctggtctattgccaaggagagatacaaaggatggcgatcaatgttaagctcaacatacaaggcatacaatagttatgcagaaaggatgaaaaacaagcctgaagatgtagacatcgtcgagtggcattacatgatattgtattttggatctgagaaattccag

SEQ ID NO: 39184 - DNA, 333 bp, Zea mays
  Peptide Sequence Number=SeqID_80963
ctcatctactccctggaatacatcaactccccgcctaatgtcacaagcatgccatggatctcgggcctagatggcgcgggccacgagcagcgcgacgacgaggttgcccacgcagagtgcgacagcgacgcggtggcaggtgcaccacctcagcgtggcagccgcgcggccaccaagctgcaaggccctcaccatggtcctagtaccgccatcggcgccgagtctggtaatatccaacagacgggtcagctgggcacggtgccgcccaagcagcggacgccggagtcgatgcggcgcgcggcggaggtgattgcggggggcgacgtgggttaa

SEQ ID NO: 39185 - DNA, 207 bp, Zea mays
  Peptide Sequence Number=SeqID_80964
atggcgcgggccacgagcagcgcgacgacgaggttgcccacgcagagtgcgacagcgacgcggtggcaggtgcaccacctcagcgtggcggccgcgcggccaccaagctgcaaggccctcaccatggtcctagtaccgccatcggcgccgagtctggtgagccctacagtcgcgctagggttccacatgggagctagcctcaagtga

SEQ ID NO: 39186 - DNA, 354 bp, Zea mays
  Peptide Sequence Number=SeqID_80965
atgagcgtggagatcctggacgggagcacggtgcttcgtggaggacgagcgcgccttcaactcctcggtggacggccgcttcgccgcgctggacgccgaccacgacggcctgctcacctacgcaaccaggtgctgccgagccgcctctccaagcgccgccgagcagagcgccctcgtccaagcgccgccgagcagagcgcccgcgtccaggcgtccagcgccaccgagcgcgtccgcccgaccggcgccgccgagccagctatcgccgagggcgtgctccctctccgtgccgcgccgtcggtggaccagccgcttcaagatttgctgcctagggttcttgggaagttgggatag

SEQ ID NO: 39187 - DNA, 189 bp, Zea mays
  Peptide Sequence Number=SeqID_80966
atggagcggtgtgagcttgggctcggtgatgtcctgacggtgaattccggtcgttgtagccgccagagggcgatgctggagactttgatggagattttgatgacgatgaattctaagtctaacgatacgccggtcatcttccagtgggagattgcccatgttatttatttccgctttactttgatgtga

SEQ ID NO: 39188 - DNA, 168 bp, Zea mays
  Peptide Sequence Number=SeqID_80967
atgggcaagagggggagcggtggtgttggcagcccacgttatcatggggacgtattcttggcaaagagggtgatcctggagcctttgatggagattttgacgacgatgaattctaagtctaacgatacgccggtcatcttcctgtgggagattgcccctgttatttaa

SEQ ID NO: 39189 - DNA, 429 bp, Zea mays
  Peptide Sequence Number=SeqID_80968
atggattacaaaggtctaaagaatgaacatagacattatgaaaacggatgttccgtatacactatgaaaaactgcagcgaacatagacattatgaaaaactgatttcagatgtacttagtgaggctggtgcgccatgtgggataaaatcagtctgtatttatggtggaactaaaaaggaaccccaaatatctgcccttaaatctggagtggatatagtcataggaactcatggtcgtatgaaagaccttattgaaatgggtgtttgctgtcttaatgaggtttcgtttgtggttctagatgaagcagataggatgctggatttgggtttcgaacctgaagtcagggcaattttgagccaaacatcatctggtttgtatccattactttctcttcccacagaagaggccgcgttctgctcaaggacctag

SEQ ID NO: 39190 - DNA, 1524 bp, Zea mays
  Peptide Sequence Number=SeqID_80969
atgggccgcaatcttccagccgagcaagtggaagcacccaggagcagcaagatggacaagaagagaaagaaggacaagaagcggaagctggcagccgaggccgaggaggaggcggcggtgacggcgacagtggagaccgtgaagagcagcaagaagaagcgggtggagaatgaacccggcgcaggagcagtggaggcggagaacggcgctgagaagaccgtggcggtgaccgggaagggttcggaggaccctaagtacgcgccgctacggtcgttctccgctgccgagctgccgtctcaggtgctcgaatgctgcagcgcgttcgcgcggccgtcacctatccaggcacacgcctggccgttcctcctcgacggccgggacttcatcggcatcgccgccaccggatccggaaagacaatcgcctttggcgtgccggcgctgatgcacatcaggaagaaggtaggggggaaagcagggaagaaggctgtgccacggtgcctcgtgctatcaccaacgagggagctcgctcagcagattgcagatgtacttagtgaggctggtgcaccatgtgggataaaatcagtctgtctttatggtggaactaaaaaggaaccccaaatatctgcccttaaatctggagtggatatagtcataggaactcctggtcgtatgaaagaccttattgaaatgggtgtttgctgtcttaatgaggtttcgtttgtggttctagatgaagcagataggatgctggatttgggttttgaacctgaagtcagggcaattttgagccaaacatcatctgtacgccagatggttatgttcagtgcaacatggcctcttgctgtccacaaattagcccaggagtttatggatccaaatccgataaaggttgttattggatcagaagaccttgctgctaaccatgacgtgatgcaaattgttgaagtattggatgatagaacaagggattcaagattacttgccttgcttgacaaataccatcaagcacaaagcaacagggttttggtttttgtgctgtacaagaaagaagctgcacgagtggaaacaatgcttcagagaaggggatggaaggctgtttcagtccatggcgacaaggctcagcatgatagaacaaaagctttatctttatttaaagaagggaaatgcccattaatgattgctacagatgtcgcttcacgtggacttgatattcctgatgttgaagtagtgattaactatagttatcctttgaccactgaggactacgtccacaggataggaaggactggtcgtgctggcaagaaaggtgttgcacatacctttttcactcaagcgaacaaggcacttgctggtgaacttgtgaatgttctgcgggaggctgatcaggttgttcctccagcccttatgaaatttggcacacatgtcaagaaaaaggtatggatgcctagcaacgtcagtaagagtacagaaagaaatacttttgaaaatgcagtcggagagtacattctcaagaaatcactttga

SEQ ID NO: 39191 - DNA, 501 bp, Zea mays
  Peptide Sequence Number=SeqID_80970
atggtgacctccagttcgatggcggggagaagcgagccgggctgcgatcttggtcccgccctcagcttcaaggatgttcatcatcctggctggggcgggggccgggctgagccggagctctacctcccgcgcgggttcgtgggtcagcctctccctcagcattcaagggagagggcgctcagcggcccagcgggagggtcggacttcgacaacgcggggctggtcgacggcgggcgtcatcagcttcagcgcattgggctcgctggctcggcccgcggtgccccctctcgccgcaagggcggttgtcgcgccgcgcgcaccggaggaccgcccaagacgtcgcgcgcttctagggcggcgttcgtgttcggggctgtcctgcctttgccccgctgttggggcctgaacatgtatgtatttttggcacggagccgtgttttttcttcatttcgagcactaagactcgcctaccgactatctgaaccgcttcaccaagcgtga

SEQ ID NO: 39192 - DNA, 180 bp, Zea mays
  Peptide Sequence Number=SeqID_80971
atgggcgagggccttatggcagcagcatccgccctgaggtcatcgctgctgctgttcggccccccggggcagaagtcgtcgtcgtcgctgctactagagcgggcgacgagccgtgttttttcttcatttcgagcactaagactcgcctgtcgactatctgaaccgcttcaccaagcgtga

SEQ ID NO: 39193 - DNA, 552 bp, Zea mays
  Peptide Sequence Number=SeqID_80972
atggtgaccggcgggaggaacaccgggcgtgtaggagtgatcaagaactgggagaagcacaagggcagcttcgagccaaagccagcgctgtccgggtgcaccggacagtgtccggtgtgccaggctggctcaggcgaacttggcgctctcgggaataaattaacggcgtacggctataattcaccggactgtccggtgtgcaccggactgtccggtgagccaacggttggccgggccaacggtcggctgcgcgatctgcgcgagactcgtggacgagccaacggtcgggaggggcaccggactgtccggtgtgcaccggacagtgtccggtgcgctaacggctccaaggctgccaacggatcacctattcacccccctctaggtgctctcactgtggcgcggtcggtccgagcccaaggtcgggcgaggcggagacttctcctaaggccgaggccggggtcgggcgaggacgcgattcctcctgaggccgaggctgaggccgagccctggggtcgggcgaggcgaagacctcttcccgaggccgaggcctaa

SEQ ID NO: 39194 - DNA, 345 bp, Zea mays
  Peptide Sequence Number=SeqID_80973
atgaaacttggtcagagtgtttaccatatggattggcaggtatcttttagcttcttacatattaaagtgaaaccaaaaaagaaggcgcgctactgttcttccgttttcatgtcaatgcaacaacagctatgcctggtgagtggagataagtggaggtggcactaccaattccttgatgtaccaggaatgtttggattgttgtattctgacattgtttggctcaacatattcaagatcgatctagagaccaacaagatcatggacttcttcaagtttgacgtcgataacgtggtcatggtgaccggcgggaggaacaccgggcgtgtaggagtgatcaagaactag

SEQ ID NO: 39195 - DNA, 186 bp, Zea mays
  Peptide Sequence Number=SeqID_80974
atgtggaaggaaacagtgggcgatgaaagcagggaatttgggaggtacatgcgacagagagaagagcaagagaagcaggaagcggagttgttcactcgggctcctgtaaccaaacatgataagcagatcgagaagcgcataaggagacaacttcatggggagaaaatttacaattgctcaaattaa

SEQ ID NO: 39196 - DNA, 391 bp, Zea mays
  Peptide Sequence Number=SeqID_80975
tgcatggaaggaaacagtgggcgatgaaagcagggaatttgggaggtacatgcgacagagagaagagcaagagaagcaggaagcggagttgttcactcgggctcctgtaaccaaacatgataagcagatcgagaagcgcataaggagacaacttcatggcacttggtttgcccattgggattttcagcttgtcttaatatccaacgtacaccaccatctgatatttgatcccgacaacaggctaggaggcttaactgacgattttggccttgggatgaacatgctgttgggaggagacaaggaagatgatggcggttcaagaaagtcgcatggcaaaagcggaaaccgaaagaagcacctgaagaacagcaagaagaggatgaggcattag

SEQ ID NO: 39197 - DNA, 1482 bp, Zea mays
  Peptide Sequence Number=SeqID_80976
atgcatgaggggagtgcgaaggcatggctgccatccaagggggtcgccccctttttaaaggcgactctccccacttgcgtcctcagtcgtcacagactaagtcttcaccaacgcgctccaaagtcctccccctacgacacgggggctgggtcccacacgtcatgcaagccggccgggatagaagaagccaaaccgccacgcgcggagcgcgtaactgcccagcggttacaagcactcctccactttcgcccagaccagcgggtggaagggcggacctccatgcaggcggcatgcaactgcaccaagggggtgcaccctttcgacttcgacgcgtccagcatggaggcccaggcccatacgtcatgtaaccggcgcgccggttactacgtgcgagaaactgcaccgccacttgtgccagttccgtgccttcttgactgcggaaccggtaccgcgactcgaggaaaccctgcgcatggcccaacagtgccaaccaagcacatcggtcacgggtcagccagccgtgggagaaggtgcgacgatcgatatggccaaaagtgggccagcagtaatggcggcgggcggcgggcggaagcagcagtcaaattgtctgcaggctcacgtcccctcctgggacaacgagagagccctctcccacggcgtgaagacgacgcgcccgtgttccgttcctcgaacggctcgcgcacgcacaacggctgccccgcgaaccactcgtcccgtcgcattaactctacggcagggcaggtgacacctttggcaggcgaagcgggcgacgcttcacctccgcatgatgaccgcgtcaaaaaagggaccgggaaaggggatactccgaaagggatccttctccgcgaaggaagcgggccccgagccctcctactgatcagaggttcgaagactagcccctcggaggggttcgacagccgcctcagagcactcgggctccgcgcccactactggtcagagccgcctcaggccactcgggctccgcgcctcctactgatcagaggttcgaaggttggcccctcggaagggttcgacagccgcctcagagcactcgggctccgtgcccactactggtcagaggttcgaaggctggcccctcaaaagggttcgacagccgcctcaggccactcgggctccacgcccactactgatcaggggttcgaaggctggccccctaaagggttcgacagccgccttagaacacgcagagcaagggatgactctggggtcaagactccgtctgctcaagggacacgatctcgcctcgcccgagcccagcctcgggctagaacagcagacccaggtggattcacgcctcgcccaagggtctcctcaagcaacgggcgcaccttcgactcgcccgaggcccagctcgggcaggcttcgtggagaagcaaccttggccagattgcctcgccaaccgaccatatcgcaggagcattcaatgcaaggatcgtctga

SEQ ID NO: 39198 - DNA, 1197 bp, Zea mays
  Peptide Sequence Number=SeqID_80977
atggggagagtcgcctttaaaaagggggcgacccccttggatgggagccatgccttcgtactcccctttatgcattgcgcccttccaccttccgagccctcggatggggagcgtccgcgtttctttcgtcttgctgtcgttggaggagcgcaacttcgcggaagttggtacctttcagccatcgctcggcttcaaggattttcatcaggcagcccggctgcatcccctcaccgatggtcacccaagacggtgaccaccagtttgatggtggggagaagcaagccgggctacggcctctgccccgccctcagcttcaaggatcttcatcatccttgctggggcggagggcgagctgagccgaagctctacctcccgtacgggccggcgggccacctcctccttcagcattcaaggaagagggcactcaccggcctagcagagggggcggacttcgacaacgcggggccgatcgtccgcaagcgtcgtcagctccagtgttcccggttcgctggctcagctggctctagcacagcttccggacttgagtggggatctgccggtgggcaggtagctgccgtcgttggtgctgaggtggtggcggctgaagaagtcctcgtcgccgacaagatcgtcgccgccatctgcgctccgggcctccggctctttggctttgatagcttgtcctcacccctcgagtggggacgtgggcgagggccttgtcgcagcagcgtctgccctgaggtcatcgctgctgctgtttggccgcccggagcggaggtcgttgtcgctgctgtcggagagtccctcggctcggtcggccttgccgcccgaggcttctcttgctcagttaaagaaaccctcggccgctctgcgatgagccggagccggaggcagcggcgcggtgctgacgtcttccttcgaggtggagatcctccgaccgtgtcgccgtccgaggccgggccggatttcgccgaaggtggagtcgacgtcgagggtgctactgcccccctattgatgtctgaacctgcaggatcagtttgtctgtacggaatcacttatccgagcgtgagttacttatcgcagaaggtgatgagtgaggatcccactatcgaagtagtcgaaaagcacgaaagatgttctggcagaaagactttttccgaggaaaattttgacgcagagggggttccccccttctag

SEQ ID NO: 39199 - DNA, 1266 bp, Zea mays
  Peptide Sequence Number=SeqID_80978
atgggtgcgagggctgctgcttctggcgcgggcaagctgccctcggccgagcccgcgaaggagcgaaggccgctgtcgtcggcacgcactgacgtggcggtggcgcatgttgccaactttgacatggacatctgcgtgggggattatcttgttgggttgaatgcggggcagttggctgttgtcccgactccggtggcggccccttcgccaacggcggtggttgggttcattgtttttatgtggttgcgaatctcattgtttttgtggcgggcgaccgacttcgccgaccatgtcgcatcgggtgctctgacttcggagtttgctgtcgagatcgagcgtctccgggcgcagcatacagatactgttcgggagaagtcggctacggaaaacaaaagccacaagctaacggagaggctggctgctgcggaggccgagaagggggatctccggcgtcagttggcggaggagagtagggacgcgaacaaagccattgttgatgcgcaggctgcacaagccgaggtcaaacttgcacgggcggaggccagtctcgcccgccaacgtgtcgaggagctggaggtgaggatcaaccgcctgcgcaaccgcgtggacaaaaccgaagtctcgacgagcgcggaggttgagcggacgcatgcgcagttcgtggacgcgtaccgggagctaggtgcgcggactgccgccttcgaagcgcccggccaagaggcgggtctctgcttccttgagcggttacaagaggagctgggggttctcccgacaatcgtgacgggcctcatgtcctttgcctccctcgtcacctatgagggggtcgtgaatgctttgtcccgcgaggggtgcgggcacttcgaggtcttcaacctgttgaacgaaggcttcaaacgcgaaatcttccaggtcgaggacccggtgctgaagcggtcggcgggggtgctcttcgacaggatgtggggccctcacggccgagagacggtccgggagaggtccgatcgggcaatagatcagatggcgcatgacgaagaggttgaggaccttggcgagcaggacagcacgctgcccgaggcatcgagggtggagctggcgccgccatccgatgcgggcaagggcccctcggcgacccccgcgccgactggagctggcgaagaccccgcgctagcccctgcgctgacgggtgaggaagcctcaaaggcggtgggcgaaccagttgccgaagaccccgcggcggtggccgggccttcgcaggtggcggaatag

SEQ ID NO: 39200 - DNA, 1053 bp, Zea mays
  Peptide Sequence Number=SeqID_80979
atggcgctcaacgaggtaggggaaaggcggaatagtggaggggcgaacgagtccacgccacattgcctttatacacgcaggaacagcgaagtcgaagacctccaaggactcccggtggccgtgatgtgctcccactattatgtggcgttcccgccgtttgaggtggcggaggatgatagggacgaaggggccctttggtgtgctgcccgcatgagtagtgagcgcgatttggttgaggaattcatcggttatggagtgtggcccttggcgcatggctgggcgctgggcgaagtatgccctcgccagatgccctccctaggcgagcagcaagtgcgaagtccggccttcacgttggatctgcgtggccgggacccagccgcattcatgcgtgaagtggaggacggaactatgaggattgtggggcggtatgtgccgaggacagaggctctgcggagtagggatattcgtggatccaacgttcgcttgaatagggtcttcgagttgaatcgtttgccatatggcggctttctcggggatgacgctgttgtggtcgtcgatcgcagcgggaagaagccggtggctgcggctggggaaggttcttcacgggaggctacaccggccatgaagaagagaaaattaggtactgcagctgaagggttgggggtctccgatcattttgctgtggtgttaatgggtacttgcacggccctcgggggaaggctgtcttcgcccgagctccgggagtcttcggcgcgaatgctgaagtttaccgggggtcgatggccaagggacgttccgatcccccgcgcggccatgatggagaaggatcgtcaagatgcggcgtggaagcgtcgggcagtcactagggtcggggaccatttccgcgatgcgaagaaggcgcggggaggcgcaaagtctggtgcccctggcagtagcaaaccaccaccgactgcgaagccggccgcccccgggcccagcaagtcttcggcgggtgcgagggctgctggttctggtgcgggcaagctgccctcggccgagcccgcgaaggagtga

SEQ ID NO: 39201 - DNA, 2318 bp, Zea mays
  Peptide Sequence Number=SeqID_80980
atccatttcacgaagtgaaaagaaaaagggacaagaagaaagagagtgctggccagaagagctttgctgatagtactggacaagttgaccagaaccctcaatggatgaggccacatacccacaggatggaaaatgatcaaagaagacttcccaatcagggtcagatgtcaggcccaagtcatgaatttcgggttgtgagggacaacagatttcaacatggtgtggtggagaacagaccagagcccggacacaaaggttcagcagatgtacaaatgtctgataggagcactgttgttcagtccgctcgaaacctctcacctgctacaacctcagacggccagatcacacatcaaaatgctatgcagaactcacaatctgacataactcaagggaagagggatggtcaaggtactacacagaagcacgcgaagccatatctgaagaactctcagaatgagcagcactttccaggttctgacccagctcatgggtcagccacagttagaattgctggtggaactgttggacctactcgacgtcatgttggagttattaattctagtaggcaatttgttggccgttcaggttctcagatgcatgcaccaggtggttcttcctatgcaaatattcagagggggagttttacctcagtaggggcatctgggcgttactcagcttttatgtcaagaaacattcaacaaaacctgagggctgatacaacatttcgtggaaggcccactggtagatcttttattgcacaaaatgtcaacaggtatcaccagggccctactaccaaccaaaaagcagtacaccctattaaggagtggaagccaaaattgacaaagaagtcacccaccatcgatgcagaaaacagtatagctgatgctgcatctccttcagcaagcaactgtgaaaatgccaacacaacagatgtaaatgggttgcctgaaaaactttcacaagctaacttgcatgaggtggagcatgttattattccggaacatcttcgtgtaccagaatatgagcagacaaagttaagcatgccatatctgaatgttattcttgcactctgtgtacaagaaccagttcaacaggtcagtgaaggcgatagtttggatgatggacatgatgacatggatgagcaagctagatcttcacaacacctgtcctcatcaacagctgagatttccttgtccccatctgaggatagtgatcaaatgagtgggcaagtagagaatgatgatgggctgggcttagttcagagtgacactccagttggagcagcagatggtgacagtacccagatcacctcgactttgactgctttttcggcttatggtcataaagatcctaatattcatacaaccaatgaggcccagctatatggactggtggagcctaatgtacatccacaagcattagcttcctcttctcagggatacccttcagaaaatccagaagcagataatgctgtgcaagtcttcaggatgccagattctaatgttcactcacaagttctcccgtccacatctgaggccctaaatccacagatcgtgagcaacagccctgttccgatctcttcacagcagcagcatatctctcagcaacaagctgcaacacagatgtaccctcaaatgcatgtgcaacattttccaaattttatgccatatcgccaactctattcaccagtttatcccatgcctatgccaaactattcgccaaatgtcccttatccatcaaatggaaatagttatcttcaaatgcccagtggaggttcgcatttaactgcaggaagcgtaaaatatggagtttcacagtataaaccagtcccatctggtaacccttctggctacggaaattacactcatccagctggttttacaatgggttctcctggtgttattggagctgcagttggtgttgatgatgtcaataggatgaagtacaaggacaacatttatgcctcaactccacaggtcgagacatctgacatctggattcagacagctagagagatgccaccattgcaggttccttcatattacaacataccaggtcaagcaacacctggtgcttttgtgccaaatccagcaaatgcatctttcaatgctacatctcaatcccctcatgcgcagttcccaggcttgtaccatcctcagcaacctccctctattgtaagtccgcaccccatggtgcatcaacaggtgccatcggccattggtcccaatgttggggtcggggtggcagctccaggcccacaagttggggcatatcagcaacgacaaattggtcatatgaattggagacccagcttttga

SEQ ID NO: 39202 - DNA, 1650 bp, Zea mays
  Peptide Sequence Number=SeqID_80981
atggctggcgttggcggcggggcgcgcagctcagacagggcgggggcggcgcgctcgcccaccaccaccaccaccaccaccaccagggggatccagtccaccatccagtcgatcaaggaggtcgtcgtcggccactccgacgccgacatcttggacaccctccgcgagtctaacatggaccccaacgagacggcgcagaagctgctgaatcaagatccatttcacgaagtgaaaagaaaaagggacaagaagaaagagagtgctggccagaagagctttgctgatagtactggacaagttgaccagaaccctcaatggatgaggccacatacccacaggatggaaaatgatcaaagaagacttcccaatcagggtcagatgtcaggcccaagtcatgaatttcgggttgtgagggacaacagatttcaacatggtgtggtggagaacagaccagagcccggacacaaaggttcagcagatgtacaaatgtctgataggagcactgttgttcagtccgctcgaaacctctcacctgctacaacctcagacggccagatcacacatcaaaatgctatgcagaactcacaatctgacataactcaagggaagagggatggtcaaggtactacacagaagcacgcgaagccatatctgaagaactctcagaatgagcagcactttccaggttctgacccagctcatgggtcagccacagttagaattgctggtggaactgttggacctactcgacgtcatgttggagttattaattctagtaggcaatttgttggccgttcaggttctcagatgcatgcaccaggtggttcttcctatgcaaatattcagagggggagttttacctcagtaggggcatctgggcgttactcagcttttatgtcaagaaacattcaacaaaacctgagggctgatacaacatttcgtggaaggcccactggtagatcttttattgcacaaaatgtcaacaggtatcaccagggccctactaccaaccaaaaagcagtacaccctattaaggagtggaagccaaaattgacaaagaagtcacccaccatcgatgcagaaaacagtatagctgatgctgcatctccttcagcaagcaactgtgaaaatgccaacacaacagatgtaaatgggttgcctgaaaaactttcacaagctaacttgcatgaggtggagcatgttattattccggaacatcttcgtgtaccagaatatgagcagacaaagttaagcatgccatatctgaatgttattcttgcactctgtgtacaagaaccagttcaacaggtcagtgaaggcgatagtttggatgatggacatgatgacatggatgagcaagctagatcttcacaacacctgtcctcatcaacagctgagatttccttgtccccatctgaggatagtgatcaaatgagtgggcaagtagagaatgatgatgggctgggcttagttcagagtgacactccagttggagcagcagatggtgacagtacccagatcacctcgactttgactgctttttcggcttatggtcataaagatcctaatattcatacaaccaatgaggcccagctatatggactggtggagcctaatgtacatccacaagcattagcttcctcttctcag

SEQ ID NO: 39203 - DNA, 2532 bp, Zea mays
  Peptide Sequence Number=SeqID_80982
atggaagaggatgaactcatggctgtctcaggagttggagggtcactggatcgacgtcgtggtggcagagacctgtcactgctgagcgggggcggaggctcgtcactggctggtggaggagaggcaaaaaacttagttggcgatcgggaatactatgttaaatggaatgaacttacatatgaggaatgtacatgggaaaatgagtctgacatcacggtgttccaacctgagattgaacgcttcaatgagatccagttcaggcgtaagaaatctggtgacaagggcaaggccactcgggagccacgccaattcaaggagagccctacgtttctttctggtggcacactacatccctatcagcttgaagggttaaactttttgcgatattcgtggtttcataacaaacgcgtaatccttggtgatgagatgggtcttgggaaaacgatacaaagtattgcttttcttgcctcactctttgaagacaagtttggtccgcatctggtcgttgctcccctctcaaccctgcggaattgggagcgtgaatttgcaacttgggcacctcaaatgaatgttgtaatgtattttggagctgctgcttctcgtgacattattaggaagtacgagttttactacccaaaagagaaactgaagaagctgaagaaaaagaaatcttctccatctaatgaagataagaagcagtcaaggataagatttgatgtcttattgacgtcttatgagatgatcaacatggactcgtctattctaaaaaatatagaatgggagtgcttggttgtggatgaggggcatcggttgaaaaacaaagattccaagttgtttggtcaacttaaagattataataccaaacatcgtgttctattaacggggaccccagtccagaataatcttgatgagcttttcatgcttatgcacttccttgagggtgaaagttttgggagtataactgatctccaagaagagttcaaggatataaaccaagacaagcaaattgagaagcttcatggaatgctgaagccacatcttcttcgaagattcaagaaggatgttatgaaagaacttcctccaaaaaaggaattgattctacgagttgaattgacaagaaaacagaaggagtactataaggcaattctcaccaagaattatgaagtgttagcccgtcgtaatggtggacatacatctctaataaacgttgtaatggagttgcgcaaactctgttgccatggattcatgattgatgaacctgatcttgaacctgccaatccagaagaaggtttaaggaggcttctagattcatcaggtaagatgcagctgctggacaagatgatggtgaaactgaaagagcagggtcatagagttctaatttattcacagttccagcacatgttggacttgctggaggactatttaagttacaggaaatggacttatgaacgcatcgatggcaagataagtggcgctgataggcagatacggatagatcgcttcaacgctaagaattcaactaggttttgctttcttctttctactagagctggtggtctgggaataaacttggcaactgcagatactgtaatcatctatgacagtgattggaacccacatgcggatttgcaagctatggcaagagctcatcgcttaggacagactagtaaggtgatgatatacaggcttgttagccgaggtacaattgaggagcgaatgatgcagcttacaaaaaagaagattttattggagcacttagttgttggtcgactcaccaaagctaataatgtcaatcaggaggagttggatgatattatacgctatggatcaaaggagctttttgaagacgagaatgatgaatctcgccaaattcattatgacgaagctgcaattgagaggttgttagaccgtgatcaagttgacggtgatgaatctgtggaagatgaagaagaagatggattcttaaaaggattcaaggttgcaaactttgaatatatcgatgaggcaaaggctcaggcagaaaaagaggaggcacggagaaaggctgcagctgaggctgaaaattctgaaagaaactactgggatgaactattgaaggatagatatgatgtacagaaagttgaagaacatactgctatgggaaaagggaaaagaagccgcaaacagatggctgccgctgatgaagatgacattcatgatttaagttccgaagatgaggattactcattggaggatgacatttcagataatgacacaagtttgcaaggaaatatttctgggaagaggggccaatattctaagagaaaatcacgtaatgttgattctattccattgatggagggcgaaggacgtaccttgagagttcttggattcaaccatgctcaacgagcaatgttcctacagacactcaataggaaaaagtgtcgaggaaatccagaggcgaagggcgggcctggtgcagcggtagagcctaccgtctgtaaccggaaggtcttgggttcgagccccaacctctgcatattatgcgggtaa

SEQ ID NO: 39204 - DNA, 966 bp, Zea mays
  Peptide Sequence Number=SeqID_80983
atggcaagagctcatcgcttaggacagactagtaaggtgatgatatacaggcttgttagccgaggtacaattgaggagcgaatgatgcagcttacaaaaaagaagattttattggagcacttagttgttggtcgactcaccaaagctaataatgtcaatcaggaggagttggatgatattatacgctatggatcaaaggagctttttgaagacgagaatgatgaatctcgccaaattcattatgacgaagctgcaattgagaggttgttagaccgtgatcaagttgacggtgatgaatctgtggaagatgaagaagaagatggattcttaaaaggattcaaggttgcaaactttgaatatatcgatgaggcaaaggctcaggcagaaaaagaggaggcacggagaaaggctgcagctgaggctgaaaattctgaaagaaactactgggatgaactattgaaggatagatatgatgtacagaaagttgaagaacatactgctatgggaaaagggaaaagaagccgcaaacagatggctgccgctgatgaagatgacattcatgatttaagttccgaagatgaggattactcattggaggatgacatttcagataatgacacaagtttgcaaggaaatatttctgggaagaggggccaatattctaagagaaaatcacgtaatgttgattctattccattgatggagggcgaaggacgtaccttgagagttcttggattcaaccatgctcaacgagcaatgttcctacagacactcaatagaattatgactggaaagagtatcttcctcgtcttaaaggaaaaagtgtcgaggaaatccagagaccaaatagtgaagaatctggggcatagtttcgcgaagggcgggcctggtgcagcggtagagcctaccgtctgtaaccggaaggtcttgggttcgagccccaacctctgcatattatgcgggtaa

SEQ ID NO: 39205 - DNA, 447 bp, Zea mays
  Peptide Sequence Number=SeqID_80984
atggcgtgcgtcgccgcgctcttcgcctccccggcgctcctccccttcccctccaccacctcgtccatggcctcctgctcgtgccgcctccgccccgccgtcgtcgcccgcgcgccgcgccagcagccgcggggccggcgcgcgctccggcgcttcgatgaggtggaaggggtgtcgaagaaacggcgcggcatcggaggcggtggcggcgtcggcgctggcgggtcgcagccgtcgtcctcgcgcagggatagggggctttccgtcgatttcaaggagccgcaggttgctgagtttgatgatcttgaagaggacaaattccttaatgctgtcgtcaaggcatcctgctttagtcctcaacaagctaggacttttgttttagaacgtcgcagaagatctgcgagtcaattcattaagaaaggagacaaacagaaacggagcgactga

SEQ ID NO: 39206 - DNA, 1179 bp, Zea mays
  Peptide Sequence Number=SeqID_80985
atggtgatttcccgttccaacagactagcctttatcctcgcctcttcatccggctcagtatacgctccccttcgctcggtatctttgtcgaggctgtgcggctcgcaatcttcccctccgtcctcccaccctcacacagccttctgctcacgcgtgatttcgcgcccgcctgtcctcccatgtgctattccacttgcgattccgctgctgtgcagtcgctgccgtcgtggccatcttcaccatgttcaggccatcgtgtgcttctccaactgctcctgtagaaaccgagggcgcagaggctacacttgcttcccagacgcgtctaggaaggcacgatctggagacagggcaccagataggggagatggaacactggtgttggatcgaggctcaattgtcctcaatttgagggtttgcagccctatactggtcactgccgatcatccgaaggctaatgaatattactctgacccaagattagcagcatatgttgtaccctatgcacctatcctatcgtgcttgttactttatttaatttggctccttgttaacagtacggatgctgcaaaaagttccctgaggagagaggtggaaggggtgtcgaagaaatggcgcggcatcggaggcggtggcagcgtcggcgctagcgggttgcagccgtcgtcctcgcgcagggacagggggcttttcgtcgatttcaaggagccgcaggttgctgagtttgatgatcttgaagaggacaaattccttaatgttgtcgtcaagatgaggccactcattttgaaggttacgattttcacacatcttgaacttagaagctctttgtgtatcttacaagacatgtcctttcacagtgcttttatgattggggatggtaaactcttgacaaatgcgcattgcgttgagcacgacacccaggtcaaagtaaagagaaggggagatgacaaaaagtatattgccaaggttttagctaggggtgttgaatgcgatcttgcgttgctatctgttgagaatgaagagttctggagaggaacagaggcacttcattttggtcgcttgccatgccttcagtttgactttctaggtaaagattcaataagatactttaacaccatagagattgaagagcttgtgtacaaggcaattgagggtttctgtgctggtatctctctcacataa

SEQ ID NO: 39207 - DNA, 339 bp, Zea mays
  Peptide Sequence Number=SeqID_80986
atgtcctttcatagtgcttttatgattggggatggtaaactcttgacaaatgtgcattgcgttgagcacgacacccaggtcaaagtaaagagaaggggagatgacaaaaagtatattgccaaggttttagctaggggtgttgaatgcgatcttgcgttgctatctattgagaatgaagagttctggagaggaacagaggcacttcattttggtcgtttgccatgccttcagtttgaatttctaggtaaagattcaataagatactttaacaccatagagattgaagagcttgtgtacaaggcaattgagggtttctgtgctggtatctctctcacataa

SEQ ID NO: 39208 - DNA, 1179 bp, Zea mays
  Peptide Sequence Number=SeqID_80987
atggtgatttcccgttccaacagactagcctttatcctcgcctcttcatccggctcagtatacgctccccttcgctcggtatctttgtcgaggctgtgcggctcgcaatcttcccctccgtcctcccaccctcacacagccttctgctcacgcgtgatttcgcgcccgcctgtcctcccatgtgctattccgcttgcgattccgctgctgtgcagtcgctgccgtcgtggccatcttcaccatgttcaggccatcgtgtgcttctccaactgctcctgtagaaaccgagggcgcagaggctacacttgcttcccagacgcgtctaggaaggcacgatctggagacagggcaccagataggggagatggaacactggtgttggatcgaggctcaattgtcctcaatttgagggtttgcagccctatactggtcactgccgatcatccgaaggctaatgaatattactctgacccaagattagcaacatatgttgtaccctatgcacctatcctatcgtgcttgttactttatttaatttggctccttgttaacagtacggatgctgcaaaaagttccctgaggagagaggtggaaggggtgtcgaagaaatggcgcggcatcggaggcggtggcagcgtcggcgctagcgggttgcagccgtcgtcctcgcgcagggacagggggctttccgtcgatttcaaggagccgcaggttgctgagtttgatgatcttgaagaggacaaattccttaatgttgtcgtcaagatgaggccactcattttgaaggttacgattttcacacatcttgaacttagaagctctttgtgtatcttacaagacatgtcctttcacagtgcttttatgattggggatggtaaactcttgacaaatgcgcattgcgttgagcacgacacccaggtcaaagtaaagagaaggggagatgacaaaaagtatattgccaaggttttagctaggggtgttgaatgcgatcttgcgttgctatctgttgagaatgaagagttctggagaggaacagaggcacttcattttggtcgcttgccatgccttcagtttgactttctaggtaaagattcaataagatactttaacaccatagagattgaagagcttgtgtacaaggcaattgagggtttctgtgctggtatctctctcacataa

SEQ ID NO: 39209 - DNA, 366 bp, Zea mays
  Peptide Sequence Number=SeqID_80988
atggacaccattatgccgcaggaaaaccagaataggttgctggttgagcagtggttagcaatgtgtgtcatgaacatcattgcgtgtgagggtgtggaccggctggcagaaggactcgctctctgtgatgagttcctcctgagtcagtctcagacctcttgtggaggtggagatgaacctagagagaccaaaccctgcctggctgcttatgcccatctgtcagcagaggacttcaagaaggatttagaggagtgccagcggttggagcccacagataacacaaaccttgagcttgacaacactgatgagtttcgactcagccaaattgtatggttccggtaccatcaactaccatcacttaaatga

SEQ ID NO: 39210 - DNA, 945 bp, Zea mays
  Peptide Sequence Number=SeqID_80989
atgaaggcatctgttacactcatccacaaaaacttccaggagtcttctctgtccatttcaggtgttaaacaaaatggaagtgtatcacatttcttccacagaacatttaaggcttacaacactgggactaggaagcgtcgaaggataaacactgacgatgctgatgtccgttggcacaagacaggcaagacaaagccagtactagttgatggaaaacaccttggttgtaagaaaataatggtgctttatataagcccgttgaagggtggaaaggctgagaagaccaattgggtgatccaccagtaccacctaggcactggagaggatgagagagatggtgaatatgttgtctccaaactattttttcagcaacagtttaaacctggggacaagaatgctcaagagctaactacatccgatgatctggaatcaatggctgctgaatcaaatctcccagattttactacattgcccactgacaaacatgttggtacagtccaagaagttgttcataatcctgagcataatctttaccagcttaatagaaactgtgaaataagcattgaagagactgttgtcctcccaccctctgtaaaaacaacaaaggacggagataatctccaatcacaagatcagaagttgtgggaaggcgattcccagtttgaattgttagactctcagcagctggcagaaggactcgctctctgtgacgagttcctcctgagtcagtctcagacctcttgtggaggtggagatgaacctagagagaccaaaccctgcctggctgcttatgcccatctgtcagcagaggacttcaagaaggatttagagtgccagcggttggagcccacagataacacaaaccttgagcttgacaacactgatgagtttcgactcagccaaattgtatggttccggtaccatcaactaccatcacttaaataa

SEQ ID NO: 39211 - DNA, 2169 bp, Zea mays
  Peptide Sequence Number=SeqID_80990
atggtcttcatcgtgcggcagtactcactgacgctgaggtccccctggacgaaggtaagcacgatgctgtcgaggcgcacccacgcggcggtcggcgccacaccggcggggtcgcagatagggctgggcattcggtctattagggacgacaggaaccatgaggcgaatgttctggacactcccagcctgaaggtggagctgagccacgagcgggtcagtcgggtcatgccacaacaccgtggggatggcgaggagctgttccgccgcggcaatctgagcagcgatagcatcagcggcctcgcgttcgcgctcccacacgagagcggcttcccgcaaacgggcctgtcgcgccgcgtgctccgcacgggaagcagtcagggcggcgacggtggatccctggtgggcgaccggtggagggggaggcggcggatcaacgacaggcgacgaggggattggcgggggagggtcctccggaccggcaacccccgcaggaggggcatctgccacagccgcaaggaccgatgcggtgcccgtcgcggtgagggaccctccggcggcaatgggccctgccccccacggcggcctaagcacagcagcagcggcaggagggacggcggcgggtcgaccaagagacgcggcccgtacccaggaagagaggggagggaactcggcatccatgggaggagggaagacccgggcgcgctggcggcgctcgggggcgtctggtcgggcgggacagaggcagggcgtgcgggggcgcgcacctgggcgctcctggcaggcgcggcgcggctcctggcggcgctcgcctgggacagaggaagggcggggccgggcgagcagagcggcgctctagcggcgctcccctgtgcgcggcgaggcagaggcagggtggggccccccaaggcagggcgaggcgggcagagcggcgcgccggggcgctccgggtgggtgcggcccctggcgggcgcggcagcgggcgctggcggcgcccctgggcgcgacgacggcagcagggaagggaggtggcggctgcatagggaagggaggtggaacccctggctcgataccatgtctcaggttgttcaccagtggcccggtttgcctaaaggtgtaaaatttgatccttctgaccaggaattaatctggcacttaatggcaaaacatggaaaatctggaataaaacctcatccgttcattgatgaattcattccaacagttgaggaagatgaaggcatctgttacactcatccacaaaaacttccaggtgttaaacaaaatggaagtgtatcacatttcttccacagaacatttaaggcttacaacactgggactaggaagcgtcgaaggataaacactgacgatgctgatgtccgttggcacaagacaggcaagacaaagccagtactagttgatggaaaacaccttggttgtaagaaaataatggtgctttatataagcccgttgaagggtggaaaggctgagaagaccaattgggtgatccaccagtaccacctaggcactggagaggatgagagagatggtgaatatgttgtctccaaactattttttcagcaacagtttaaacctggggacaagaatgctcaagagctaactacatccgatgatctggaatcaatggctgctgaatcaaatctcccagattttactacattgcccactgacaaacatgttggtacagtccaagaagttgttcataatcctgagcataatctttaccagcttaatagaaactgtgaaataagcattgaagagactgttgtcctcccaccctctgtaaaaacaacaaaggacggagataatctccaatcacaagatcagaagttgtgggaaggcgattcccagtttgaattgttagactctcagcagctggcagaaggactcgctctctgtgacgagttcctcctgagtcagtctcagacctcttgtggaggtggagatgaacctagagagaccaaaccctgcctggctgcttatgcccatctgtcagcagaggacttcaagaaggatttagagtgccagcggttggagcccacagataacacaaaccttgagcttgacaacactgatgagtttcgactcagccaaattgaattttcacaggatagctttatgacatgggcagctgaaaagattactgacgactga

SEQ ID NO: 39212 - DNA, 357 bp, Zea mays
  Peptide Sequence Number=SeqID_80991
atgaggtcgtgttgccaaatactttctgaatatcacagaaaattagaatggaaggaaggggaccttgatttcgtgtttgttgccctcgctcgaatttgcttggaagatcaagacgaaaaccacttggagaaagctgatctcatgcaggaacttattttggatgacatgacagacactgtaaatctcccaccgatcccttctttagatgaattcatgcagggcttagattccgagccaccttttgttgatctctcagttgggactcctcaagaagatgtcaatgactctgaggaacctgacgccaccatggagcctgaggaccttccagagacagaggataatgcatctacaccatag

SEQ ID NO: 39213 - DNA, 678 bp, Zea mays
  Peptide Sequence Number=SeqID_80992
atggacaggaaggaggacggaccggggtcccggtgtggccacacgctcacaacagtgccggcaaccggggaggagggctcgctcgggtacgtgggcccacgactgatactctttggtggtgccattgcgctcgagggcaactccgccacaccgccctcgtcggctgggagctctaggatccgtcttgctggtgccaatgcagatgtccactgttatgacgtgttatcaaataagtggaccaggcttactcctcttggcgaacctccttcaccaagagttgcacatgtagcaactgctgttggaaccatggtggtcattcagagtggtggttcaaggtcatggtactggtccacggtatggacatgtgatggccttggaaaacgacccctgacagatgtatgggcctttgatactgtggccaagccatatgaatggagaaaacttgaagaacatgcaacaatgatacatcagggcttagattccaagccaccttttgttgatctctcagttgggactcctcaagaagatgtcaatgactctgaggaacttgacaccaccatggagcctgaggatcttccagagacaaaggatgatgcatctgcaacagagaaatttgaatctaaatctgttaaatcatctacacatgttaacagtgataacttcgtgggagatgtgtag

SEQ ID NO: 39214 - DNA, 972 bp, Zea mays
  Peptide Sequence Number=SeqID_80993
atgggattcttccagggcaagacctccaagcagaccgcgagggtcaagaagcttctcgggctcgccctgtcgcgcctcgccattgcacgtcgtccccgccttgctcgcaggtccatctaccgtagcgatgtcggccagctcctctccctcggctacctccaccgtgctctcctccgcgcagagcgggtcatagaggaggataacatgctgcaggcgttcgacatcattgagctctgctgcaagcgactcgtcgagcatgcagcgcatttagacaaaccgcgggagtgcggcgaagagataagggaggcggcagccgggatcatgtttgcagccaggtggtgcggcgacctgccggagctgcaggtcgcgcgcaccatcctagaagacaagttcggcagcgacatggctgtgatcgcgaaggaggggaccagcattgtcgatcccatgttggtgtggaagctatccggcgataagacaaacatggagctgaagaagaaagtgaccaaggaaatcgccgtcgagaacagttttatggtcgacttctccgagctccagctgcaaaaatgtcacacccggatttcggggcacaaagacccgggcgcgaacataatcaacagcgaaaagggccgcgtgtcgcctaatctccaccgctcatccttgaatctacggctagggaacttcttccccgaccgaggtcgagcggcaaaaaggcccaggtcgctcgtggaggcgcgctcgccggtgactggcgtcaccctccctgacgtcgaggctggtcacggcacagggcggaactcaatggaacaggcagggatcattcgggtcgcaactgaatcgctacggatgcggtgggaggtccgcgccgaggaggtagccgggaggtgcggaatccgttgccgcatccgcgattctggcgaggaagacgactatggtgccatgggcccaccagtcggttggcgtgagcgtgaatag

SEQ ID NO: 39215 - DNA, 429 bp, Zea mays
  Peptide Sequence Number=SeqID_80994
atggccaatatcctacgatcccgagatccgaccctaaccctccgatcacgatcctactgccgagatgaatttagcgaaaagggccgcgtgtcgcctaatctccaccgctcatccttgaatctacggctagggaacttcttccccgaccgaggtcgagcggcaaaaaggcccaggtcgctcgtggaggcgcgctcgccggtgactggcgtcaccctccctgacgtcgaggctggtcacggcacagggcggaactcaatggaacaggcagggatcattcgggtcgcaactgaatcgctacggatgcggtgggaggtccacgccgaggaggtagccgggaggtgcggaatccgttgccgcatccgcgattctggcgaggaagacgactctggtgccgtgggaccaccagtcggttggcgtgagcgtgaatag

SEQ ID NO: 39216 - DNA, 297 bp, Zea mays
  Peptide Sequence Number=SeqID_80995
atgggacacaagaagaaggtcggcgtcgagctcctggccatgggggccactgctccttgcttggggaagaagggcgccgccgagggaggtgaagccaaggggaaggggttgcgcgcccatggaggagaggaggccatggagagcggcgcgctggacaccattggcctgctggctggcggacaggactggctggcttggccggcgcttcaagccaaacaccacgcgaccgccatggccactgcagcacacaacaaggtctacgccagcggttggggttataagattcgagtctcctaa

SEQ ID NO: 39217 - DNA, 726 bp, Zea mays
  Peptide Sequence Number=SeqID_80996
atggcgaggcactccgtccccacacatatcaaccgtccccatcgattccccgtcagcagatcagggctcaccgccttggcgtacaatgcctcactgaccccgactggccgtcgtgcagtgaccgcacttgtacccaccataaccggaatgggagacctcgtctcaggtcgcgtgagggggaggcttcctgctgctggtggggccggcgccgaacagaggagcttggctggccgggaggggcggcttgtcatgggtgggagagctagcagcaggggaagcattcggccagggagaaatggggcgagctcctgggcaggggtgagctcggccacggcaagagcagggaatggcgcaggcatggggaggaagagctactgctcctgcggcaagggacacaggaaggaggccgacattgagctcttggccatgggagccgctgctccttcttggggaagaagggcgccgccgagggaggtgaagccaaggggaaggggttgcgcgcccatggaggagaggaggagctgctgctcgcctgcacttggacactccctgctgctggcgaggtgcgccagggaggcggccatgggaggagctgttgcaggactagccgagatctccaccaacgacgagaacttcggccaccaacgcagccagggcagaggcgagttcggtctccagcctgggcgtcaaccgcttgagctcagacctgggagagggagcgcatga

SEQ ID NO: 39218 - DNA, 1395 bp, Zea mays
  Peptide Sequence Number=SeqID_80997
atgaacttcaactctacggcagcggcggtaggaaaggcactcccctcgtcatcggcaagggcacactatttagcgccaccacattccgctaccggccaccacgagggcgtctccgctggttattgttgcgacctattccaggtgcccgtccatgtgctcccctttcgtccagatggtgtccatgggattcaggcctctagtataagtctaccttggaccttaccctatcgtagctcaagccacatcataaatgtctactatgagctgtatttggagctgcacaggggattcgtccaccagaacatgatctggtgtgagctcgtggagactgagcatgtcatgggctttactgctggcaacctcaatcctgtgccatatagtcacaggattactggtgtaatggtgttgctggacgctgtcgatgccgccttgggaagtgcctctccgccagccatgcccttgtggctgcagaagctccaggggcatgcacctgagcagacaaggcaaggcaatgatgctgagcatcatcaagagggcaggtcatctggagtgaggacacatccatttaacggctactttgaactgtgtcgttcaccgagcaagcagattccactggcaggcaaagctggtatcaatcaggtgcgtccattgtcaggacaccaacagggtgttgtttgggaaaagattggtgtggaggtagttcataacatgcagccattgcacgaaatcaagaatccgagcagtgaggggcggaaggccatagactctggcattgaggattgtgtaaagaaacccatgcatcatcgtcttcagtacaaaccagtggatcaggagaatgcagcaagtaatgaccagaagagtacagagttcaacgagccaacagctgagggaacttccgctggggtgaaaaggaagctgaccaccccaagctcacctgtcaagaagcagaagccactcgggcaatggagctgcactatctgccaggctaacccagctagccagcgccaacttgagcaacaccttgccggcaagcggcaccagtcaaatgtcgcagcactgcaaccatctcagagcaacagcagcagccctgagcctgacacaaaagcgacgcccgcgaggagcaggatcatcgcgacgaacgcgcagcaagacggcaagcaggatgtgccggagaacagatggacgtgtacactctgccgggccaagtgctacactgaattgaactactacagccatctcgggggcttgtggcaccgggagaaggcacaggccaggcgcgaggagcacttgaggttctactgctcggtgtgcgacctgcaatgcaacagcgagaaaatgctggagtcacacctcggcggtaggaggcatcgggagactctggaggcgcgcgactag

SEQ ID NO: 39219 - DNA, 425 bp, Zea mays
  Peptide Sequence Number=SeqID_80998
atgcaagccacgctccagaaggttgagcaagggctgctgcaaatcaaggcagcagtgcaacatgagcagcaccagctggcgttgtccgcacggctccagacgtcggcggctgtgggcatacaagctgctgctcgtggcttccttgcacgacggggagtgtgggagatgcgccgacggatgctcgaggcagccttggtgacggttgaccttggcacacgggcgcgcgacctcgccctgtcggacggccatcagcagcgacaccgggccgctatctccaagtgcgagcatggtacgtgtcccgtgggcgacgaacttcaactctacggcagcgacggtagggaaggcactcccctcgtcatcggcaagggcgcactatttagcgccaccacattccgctaccggccgccacgagggcgcctccgctg

SEQ ID NO: 39220 - DNA, 489 bp, Zea mays
  Peptide Sequence Number=SeqID_80999
atgcccggattcacgccctgctcgcccagatccgaccgtgactttgatttcccaaccgacgcaggagcggtgggtctgaccggccgcgacccgtcttctcatgggcgcttgctggtgtggtttgctgatcaaaatggggatggtgcgatgcttccgttgcgccgtgctaagcccacaaagagtgcgaatgggcaggtctgccagatttgtggtgactctataggtgtttcagccactagcgatgtctttgttgcctgcaatgagtgtgccttccctgtctgtcgcccatgctatgagtatgagcgtgaggggaaccaatgctgcccccagtgcaagactagatacaagagacaaaaatgttggtttcctggcaacttctttgagtgggactacaaggacaaggatggtgtcaagggcctgtgcgtcgtgggcgccatcaacaactgtacctcccagctccccacctatgggagatcttctcccccataa

SEQ ID NO: 39221 - DNA, 468 bp, Zea mays
  Peptide Sequence Number=SeqID_81000
atgacggcgatgcgccgggcccggtacatccagccaatccagtgccgccctcgctgcctgcttcagattcagtttctagcggctcatgtcgtgtgcgcgcgtctgtcgctggatctgggccgagcgatgcttccgttgcgccgtgctaagcccacaaagagtgcgaatgggcaggtctgccagatttgtggtgactctataggtgtttcagccactggcgatgtctttgttgcctgcaatgagtgtgccttccctgtctgtcgcccatgctatgagtatgagcgcgaggggaaccaacgctacccccagtgcaagactagatacaagagacaaaaatgttggtttcctggcaacttctttgagtgggactacaaggacaaggatggtgtcaagggcctgtgcgtcgtgggcgccatcaacaactgtacctcccagctccccatctatgggagatcttctcccccataa

SEQ ID NO: 39222 - DNA, 567 bp, Zea mays
  Peptide Sequence Number=SeqID_81001
atgacttgtggccatgatacaatacagcaagttgacatgctgccccaactgcaggagaggcttgccgttgctatcccatcactgcatgccaacaaggatatccaggttaggtgcttcatgaatcaatatttcttgttgatagcttgtctgcagctatggtcacttatcactcctgtaaatcctgcaagtacctggggcccacttatatttatctttgctgtttctgcaaccaaagaggcatgggatgactacaacaggcataacctgacttatgctctgatgacagtggttgtacaagtaacgagtttaaagggtgtctactactacttctaccaaatattccggaacagggccgaggcaagggcccttgagcaatccaggagaaggcttggcgatgggtctgttgggatgctccagtctctcactatcgctgccctgtctggttgtgtcaatgtactgctcacaaacccgatttgggttgttgttacacgaatgcaagtcattactcatcctggcctcactgtctcgatggcacgagctataattcatcgatcttgggaccagtga

SEQ ID NO: 39223 - DNA, 627 bp, Zea mays
  Peptide Sequence Number=SeqID_81002
atgacttgtggccatgatacaatacagcaagttgacaagctgccccaactgcaggagaggcttgccgttgctatcccatcactgcatgccaacaaggatatccaggttaggtgcttcatgaatcaatatttcttgttgatagcttgtctgcagctatggtcacttatcactcctgtaaatcctgcaagtacctggggcccacttatatttatctttgctgtttctgcaaccaaagaggcatgggatgactacaacaggcataacctgacttctgctctgatgacagtggttgtacaagtaacgagtttaaagggtgtctactactacttctaccaaatattccggaacagggccgaggcaagggcccttgagcaatccaggagaaggcttggcgatgggtctgtcgggatgctccagtctctcactatcgctgccctgtctggaaattctccatacatgcagcttgagctcgggggcatcatttcttctagcttcaggaagccggacaagcacaaggcgcagactgcagagactttcatttgggggggtcaagacagcaagcgtgaggagaaaattgatgagaattcagacagtaatcctatagaggtccaaatgcagtctggttag

SEQ ID NO: 39224 - DNA, 729 bp, Zea mays
  Peptide Sequence Number=SeqID_81003
atggccaagaagcaggaggcgaccgcgcggcggcgccgcgtcggcatcctgcgcgccaagggcctctcgctgctccgccgagcgcaccttgcgaccgcggaggcgactccagctcggagcagcccgacgccggccatcgaccaccagccaccaccaccccccacccaccccggcctcacgccccgcgctataccacccactggagctccgcgcgccagtgcggtgccgctcggttcaggggcactcctcctccgcccaggtgcccgcatgcagggatggctcctcgccaacttccactccaccgccaccccaggttcggttagccctcaaaacccggctcatctctggttgaccccatcgtcccttcttccccactacaacacccacttcgtccgaaacgtggcgaactaccttctctcagtgcatccggatcgcctcagtgtcgtgtgcgtgcgtccatgggtgttcagggtttcggtcgccagtcagaacattgcgaatgtcattgtgactaggggtcctcttgtcttagcttcatccgtgctcatcccgcaccactccatgggttcggcgatgctcgccattgactgcctcgcgaggtcttccgaggttgatgatggtgttttcaatgcaacccaaccacccccgccctgtgcccacgtcgttgtcgcccatcccctctactggggccgtacactgcgagatctccagggatacgatttcgtctga

SEQ ID NO: 39225 - DNA, 1221 bp, Zea mays
  Peptide Sequence Number=SeqID_81004
atgatcagggcgtgctgtgcgaggaggcttgccgatgaggcgttgtcgctcttcaagatgatgctcgcggatggcgtgcggccgaacaggatcacctacaacaccatggtgcagggcttctgccaggccggaaggatggagctggtgaaggaggtgttcgggatggactcatttaagccggacacgtgcacgttcaatacgctgatggccgcgcattgtagagaagggcggatacaggacgcgaagaaggtgtttgatcagacgatggagctccgcgtgaggcgtgactctgcgagttacagcatcgtgacccgggcgttgtgcgagaacggtgagtttggtcgagcagaggagcttgtggacagcctcttggaggagcttgtggacagccactcgttgcatcttacaatccagtttttaagtgagacaatagagctgctgctgcttcctgttcaactggagaagagttgtgaaaatcaaagtcgcgggcacggccttgggggtttgaaaattggaacagcaatccgcccgctcccattgcgccgccgcagcaatccccacaggccacagcacgcgcacatggaggctgcggcgtcgaatatggatcacgcgcccatggaggaggatgcagcgccggcgtcgatggtggagatgaatgcggaggagctggaggtggccgacattctgagcgacctgagcaggctcatccgctcacgggacccgcaggagcggcgtcgggaacggagggagaggcaccgccggcggctggtgcagcgagacgacaatccctccccggaaccagctcccgcggccgcgtccaccgccgtccctagccccgaaacaccgctcgcgtacccgcagagcggcggggacgacgacgcgccgcccaaggacaagggcgaggccgccgccgctgttcgcccacgggaccagagcgcggagcagcagtacggcgaggaggcggcggcgagctcggggcaggccccggaaaacgcgcgtccactaacggtggcgacgaggaagaagaaggacacaccgtggacggtgccgtcgagagacctgactgacgagcgactgctagagtgggcaaagacggtagaggatcggtacctgcaggccatggccaagaagcagaaggcggccgcgcggcggcgccgcgtcggcatcctgcgcgccaagggcctctcgctggtgtctagaaggatgtggcgcgctagctag

SEQ ID NO: 39226 - DNA, 726 bp, Zea mays
  Peptide Sequence Number=SeqID_81005
atggcgcgcctccgccccgaaccaatcgaccgcgagaagacctgtcctctgctgctcagggttttcacgagggttgctggtcaccaccaaaatgaagagtttgctgtgagagggaaggagccaaaggatgaagttcagatttacgcatggaaggatgcgactctccgcgagctcactgatcttgcactggtgggagaagctgcagacaatcttcaggagtacttcagaacaatgtacaagaaagtcacagaggctgacattgaagaatttgaagctaaatatagagggtcagattctgagaaaacggacttgaaggaactctatacaaaatataagggcaacatgaacatgcttttctgcacaatgatttgctcagaaccaaagcttgattctcaccgcttcaaggatataattgatgaggcgattggtgaaggtgagctgaagtcaactaaggtgtatgagaaatgggctaaaaagatctcagggatggagccaccaacaaatccgctagagaggagagcaaagaagaggaagaacagtgaggagaatgatctgatactggctatctcacagcgcaaggctgagcggaaaaaacagttcaactccatcctctcgaacatcatgtccaaatgtgactccaaggcgagcagctcggagcccacggaagaagagtttgagcaggcgcaacagaggccggagagcagaagggccaagaggcgcaagtga

SEQ ID NO: 39227 - DNA, 726 bp, Zea mays
  Peptide Sequence Number=SeqID_81006
atggcgcgcctccgccccgaaccaatcgaccgcgagaagacctgtcctctgctgctcagggttttcacgagggttgctggtcaccaccaaaatgaagagtttgctgtgagagggaaggagccaaaggatgaagttcagatttacgcatggaaggatgcgactctccgcgagctcactgatcttgcactggtgggagaagctgcagacaatcttcaggagtacttcagaacaatgtacaagaaagtcacagaggctgacattgaagaatttgaagctaaatatagagggtcagattctgagaaaacggacttgaaggaactctatacaaaatataagggcaacatgaacatgcttttctgcacaatgatttgctcagaaccaaagcttgattctcaccgcttcaaggatataattgatgaggcgattggtgaaggtgagctgaagtcaactaaggtgtatgagaaaggggctaaaaagatctcagggatggagccaccaacaaatccgctagagaggagagcaaagaagaggaagaacagtgaggagaatgatctgatactggctatctcacagcgcaaggctgagcggaaaaaacagttcaactccatcctctcgaacatcatgtccaaatgtgactccaaggcgagcagctcggagcccacggaagaagagtttgagcaggcgcaacagaggccggagagcagaagggccaagaggcgcaagtga

SEQ ID NO: 39228 - DNA, 261 bp, Zea mays
  Peptide Sequence Number=SeqID_81007
atggccatgatggattcaacagcggaaaagatgtacctctgccagaaagagagtctcggtgtagtgtctccgtctgagtcgattaaggaccgtctcgatgtaggcctgctgaccgaggaccctttaactggtcacatgcctcgtcatgggatccactttagtaagcatttctgcaaaacagagtctttgaatattgaaaagccttaccttgactcccacataaccagcatacccttgagagtcttttctttagtcgggtaa

SEQ ID NO: 39229 - DNA, 528 bp, Zea mays
  Peptide Sequence Number=SeqID_81008
atggccatgatgggtccaacatcggaaaagatgtacctctgtcagaaagagagtctcggtgtagtgtctccgtctgagtcaattaaggaccgtctcgatgtaggcctgctgaccgaggaccctttaactggtcacatgcctcgtcatgggatccactttagtaagcatttctgcaaaacagagtctttgaatattgaaaagccttaccttgactcccacataaccagcatacccttgagagtcttttctttagtcggagtttatgtaattcgcttccgcatttcttcatctccgatgttctgtaatgtctacaagatgggtgagacgttcctggttgggcgaggtggaggctcctccgaggttgaggtcgagtctgtcatccgaggccaaggtcgcgtccgagcccctgggtcgggcgagcggataccatcggctgaggccagggctgagttcgagccctgggtcgggcgaaggagttcgtcgtcttccggggctgagccgagtccgagccctggggtcggcgaatag

SEQ ID NO: 39230 - DNA, 720 bp, Zea mays
  Peptide Sequence Number=SeqID_81009
atgccgccacgtaccaggctaacggcacgcaagtccacgggaccaattggggtgcctcggcatcaattggctccccgacatgaaagtagcagcagtggaagcaacgacccgatcggagaccttgaagctcgtgtgagtcgacttcaagcagcacttcaacataggactgatgcttgggtcgctgacggtgatagaattaacgaactacgaagggacatccgacatctgcaggatcaactcgctgatcgagacttagctctggactgggccgtccagtctcgtttgctaatgtgtgctaaggaggcaagggctcaggcccgagttaaagaacttagctcgactgttgataacctgcaggtttactgcaacactttgcacgaggaagtccatatattatactcacaactacacccaagtgagcctgcaccacctgctgaggcagaagctggaccatctcacgttgcgggacgtgcgctgggtggggagttagacctttttgagcctcctccttccttgagccgtgctcacggttatgagcggccaagggagctccagagattagtgatacttgatcagagatattttggtacaggtggcaatgagactgatggttctggttatgattatggtattggttgtcagcattgcaaccactgctcaggagaagatgaagctgtggaaggagacttccaggagttccaagactacgacgagttctag

SEQ ID NO: 39231 - DNA, 957 bp, Zea mays
  Peptide Sequence Number=SeqID_81010
atggccatgatgggtccaacatcggaaaagatgtacctctgtcagaaagagagtctcggtgtagtgtctccgtctgagtcaattaaggaccgtctcgatgtaggcctgctgaccgaggaccctttaactggtcacatgcctcgtcatgggatccactttagtaagcatttctgcaaaacagagtctttgaatattgaaaagccttaccttgactcccacataaccagcatacccttgagagtcttttctttagtcggagtttatgtaattcgcttccgcatttctttatctccgatgttctgtaatgtctacaagatgggtgagacgttcctggtaagaatcttactaataacattttcccccttagaaaagatgccgccacgtaccaggctaacggcacgcaagtccacgggaccaattggggtgcctcggcatcaattggctccccgacatgaaagtagcagcagtggaagcaacgacccgatcggagaccttgaagctcgtgtgagtcgacttcaagcagcacttcaacataggactgatgcttgggtcgctgacggtgatagaattaacgaactacgaagggacatccgacatctgcaggatcaactcgctgatcgagacttagctctggactgggccgtccagtctcgtttgctaatgtgtgctaaggaggcaagggctcaggcccgagttaaagaacttagctcgactgttgataacctgcaggtttactacaacactttgcacgaggaagtccatatattatactcacaactacacccaagtgagcctgcaccacctgctgaggcagaagctggaccatctcacgttgcgggacgtgcgctgggtggggagttagacctttttgagcctcctccttccttgaggttggtagatgtctggactcccacacctgacgatgaagccgccaagactgatggcaagcaggaataa

SEQ ID NO: 39232 - DNA, 1086 bp, Zea mays
  Peptide Sequence Number=SeqID_81011
atgacgccggtggctctcagccccttacggcagcaaggagacgtcagcaggatccttgccgcactgccagctgtgctcctacagggcttaggcacttctccgacggccacgctaccacgcgtacaggggctcaagctctcccccgacagccacgatggcatgtttttgtctcgcgagaatggaatatctatttgtaggcttgtgtcagaacaagccaaaaaatcggtggcaaccgcaatagttccagaagaagttgacactggaagcccctatgatgttgagatattagacagtccaacaaatcctaagaagagaaaactactccacgtgcttgatgacagcgaagtagtgtttgaagatgaggaagaccctattactcaagcagacttacaaaggtggtttgttgataattgggacaaaagaactcctgtaaaagtctcaaccgatgggtgcactaatgactttttaatgggtggtctttccacaaaggacatgccagtgaccaaagccgatttaatagatgttctatgtgattatatcatggcaatccaagacgatacgacactagaatgttttgacatggccgttcggctgcttaccaataaagaggcacataggctgaaaggagaaatcataaagaatataaaacattatatggacatacgtttttggagaatggttgattttggtaaacttccaaagtaccatcaggaccctacagcagaagagttagccaaaacactcgattgttggccatcaatgaattattatatcacggggtgtagatatgtaagttcttatgccatggaaattcatgaatgtcacaccctttttgtaatagatcatgttaaaaagcacgtgacttttatcgactttacaccgactcaagattggtataagcacatgtcatacaggaggcttaataccagctacctcatgctacaagctatgaccatgtgggggaataatagacgaatagaatttattaggaaagcaaagattcttcgaatgaactttgtgattgatctgttaagttatgaggacaatttgtgtcgatgtatcatccctgcaaacatacaacaatga

SEQ ID NO: 39233 - DNA, 504 bp, Zea mays
  Peptide Sequence Number=SeqID_81012
atgacgggaaaacagcgccgcctgccccgctccgactgccgtgccaaccacccaggcgaagctgacaacaagtcacaatcaaccaccgagttcagtctctggcgcaacaggaagctccgcctcgcccaacctcaagctccggcctcgggaggaggtctccgcctcgcccgacccccggactcggcctcgacctcggcctcgagaggaatcgcgtcctcgcccgaccccagcctcggcctcaagagaagtctccacctcgcccgaccttgggctcggaccgaccgcgctaacaggggatacatcgttaccctatccctagccagctcaggctacaaggaacaagaccgacgtcccatctggcttaccccggcgacgggtaatgatggtgccccacgtgcaaccatgacgtcagtggctctcagccccttacggcagcaaggagacgtcagcaggatccttgccgcgctgccagctgggcttctacagggctcaggagaacgatga

SEQ ID NO: 39234 - DNA, 399 bp, Zea mays
  Peptide Sequence Number=SeqID_81013
atgggcagcgtcgtcgccttcgcgaagctcgacgaggagcgctaccccaaggcggctaccgccgtcggggtcaagggcttccccaccgtactcctgttcgtcaatggcaccgagcacgcctaccatggcctccacaccaagaacgccataattatattcaagaattttgaggatttactaccttacctggataaaggtccgaaggggcaccatgtagctcaacctcaaaagcgcccaaggaaagttgatcaggaagcttctacgggcaagcaaggaaaaattgctatagaggatgaggatgaagaactagcaagggcaatagcagcttcgctagaggtagtcatcgaagcatcagacgccagtgatgatgatatggctgaagctgaacctgaggactaa

SEQ ID NO: 39235 - DNA, 1632 bp, Zea mays
  Peptide Sequence Number=SeqID_81014
atgcatcgtgtctttccacctttcgagcccccagatggggggcgcccgcggttcttccgccttgtcgtcgttgggggaacgcaacttcgcggaagttggtacctttcagccatcatttggcttcaaggattttcatcaggcagcccagctgcatcccctcgccggtggtcacccaagacggtgactaccagttcaatggtggggagaagcaaactgggctgcggcctctgcccctccctcagcttcaaggattttcatcatccttgctggggcggagagcgaggcaagccgaggcgagccggggggttgcctccgcgtgggtcggtaacccttttcttcccccggcgtttgggggagaaaggcatcctccagccccgcggaggcttccttcagccacgccggggaaggcggactgctgctgcccagccagggtgcagcattctgtcctccgtccgggcgatggtcgtgccgcgtgcgggccggccacgtccaggtcttcctcgcgccgacaaccgcgccagagggtcgcccagcacgtcgcgcgccgcgagggcggcgcttattttctggggtggctccggcgagggcgggagcgaggacctgccagtgcgctttggggcgcctggcgcccgctggtgcggtgttgaggtggtggcagccggaaaaggcttctctgccgacgagattgccaactccgcctgcacccccggacctccatcccctgacttgaatggctggttctcgtccttcgtgggcgagagcccttctgccgcagcatccgcccggaagccgttgctgcagctgtttcgccgcccggggcggaggtcgttgtcgctgctgctggagcgggcgtcggcgagtcaccaggggttttgtcgccccgcaggccctccaacgtggggggttgagtccctcggctcggtcggccttgccacccgaggcttctcttgcttagttaaaggaaaccctcgaccgctcttcgatgagcaagagccggaggcagcggtatcagcgtggacagaggcagagttggctcgaaaagaagacttcgtcggccggagcctgaccgggccgtccactggcaggaccggcgccggagtcgagttgccgaggccatgggccgggctgatgtccttgggggacagctggctgaggcttcggagcgaccggccgagccgtctgctcaagccggactcctggaggagaccctggcggcgatggcccgggcgtggtgctgacgtcgtccttcggagcggagatcccccgactgtgttgccgttcgaggctcggtcggacttcgccgaaggtggtgttgacgccaagggtgttgctgctcctcctccatcgagaattgtttgtccgagcgagagttacttttcacggaaggtgatgagtgaggattctgctaacgatgtagtcgagaaggcccgaaaaatcgttttggcagaaaggtctccgagcattaagacttgttcggtcagcggaattgcttatccgagcgtgagttacttatcgcagaaggtgatgagtgaggatcccacttttgaagtagtcaaaaagtacgaaagacgttctggcagaaagactttttccgaggaaaattttgacacaaagggggttccccccttctag

SEQ ID NO: 39236 - DNA, 342 bp, Zea mays
  Peptide Sequence Number=SeqID_81015
atggctgaaaggtaccgacttatgcgaagttgcgttcccccaacgacgaccaggcgggagaaccgcgggcgccccccatctgggggctcgaaaggtcctccccctacgacatgggggctgggccccacgcgtcatgcaagctggcgcacggcagacagggccaaaccgccgctcacggtgcgcgcgactgcccagcggttacgagcattcctccactctcgcccaggccagcgggtgaaagggcgggccgccatgcaggcggcgtgcaaccacacccagggggacgtaccctttcgacttcgacacatccagcatggaggcccaggcccacacgtcatgtaa

SEQ ID NO: 39237 - DNA, 147 bp, Zea mays
  Peptide Sequence Number=SeqID_81016
atggtatgcatgggcgacctaatttcattatgtggcttcgggaccgtgatgccgccaaaatcaaagaagtcagtgaagggtctgttcaagggcttgggcctttttagggcagttcttcgagcagcagcagacgtcgagagctgttga

SEQ ID NO: 39238 - DNA, 516 bp, Zea mays
  Peptide Sequence Number=SeqID_81017
atggtatgcatgggcgacctaatttcattatgtggcttcgggaccgtgatgccgccaaaatcaaagaagtcagtgaaggggttgttcaagggcctgggcctttttcagggcagttcttcgagcagcagcagacgtcgagagctgttgagcatggtacatggagatgaggatgagcagcacactgaggagcagcacattgaggaggaggagcacaatgaggctgagcaacacaatgaggaggtggagcacaatgaggaggtggagcacgtgacatgggaccaggccgcacagcatcaccagccatgggaccagtgggaccaccagagagagcagcaacaggcgtgggagcagtggggccaacagggcgaaccggctgacaacctgatggatgatggctcgggaggctcttcagcgacacgcacacgtcgctcaagaaaaagccactcagtaaagcctcgtcacgcgatagagcgagaggctgataggactttaatcatgccacatggagatcggtga

SEQ ID NO: 39239 - DNA, 2799 bp, Zea mays
  Peptide Sequence Number=SeqID_81018
atggtggtgcagaagcagaggagggtgccggccgaggtgttctggcctaaggtcgtgctcaagaagtggctcaacctcaagagcaaggacctggacttgggcgcctccttggccgccgattacgacgacgacgacgacggtagcgacgttgacggccaaggtacgtacgggcacggctggccgccgagacctcacctccgccgacgtgtttctgttccggggtcgccgtaccttcgtccattccggtgcccggccagagggccagagacagcgtctttctcctctctgtcccctcacttcctgctgcctcgctttgctccgccagagaactgcggctgtgacgacggcggcggcggcggcggcgctcgcaggccggacgatgacggcgacggcgcccagatcaccggtgagtacatcaacaccaaagagctgagggtctgcgtcggcacctggaacgccggcggcaaggcgccgccgaacgacctcgacatcgccgagtggctcggcactggcggcgacgccgagcccgccgacatctacgtgctcgggttccaggaagtggtgccgctgaacgccagcaacgtgttcggcgcggaggacgggcggccggcgcgggcgtgggagtccgtgatccgcggcgcgctgcggcaggcgcagccgccggcgcccaggtacaggtgctacagccaccctccctcgccgtcgcggttcgagcccccgatcggtgccgccgaagagctcctccccggcggcacggacaccgagaccgacaccgacgaggacgtgcccttgggcgaccccgtcgcggcagccactccgaccccgagaaagctgagcaggctcaaccacttcagcgtcgtcgtgggcgagaacgagaacggctcatcggagctcaacggcgacgaactggacgacgggcctgaccagccgccgcagcagctaagccttcagcagcgggcgctgctgaggtccctgagccgggcggacagggtaggggtgctctggccggagcagccgctggacctactccccgcgtcgtcggcgtcggcgtcggcgtcagcgtcgttcagggcgtccaagtcgttcagccgggccgcctacaggtcgtcgttcagggggtcgtcccgcgtggcggccgacgtggtggatgacctgcccatgatcccggacctcgacctggacggcgcgctgcggaagaagggccggtcgccgttcgtgcgcatcgtgagcaagcagatggtggggatcttcctgacggtgtgggtgcggcggggcctccggaagtgcgtgcagagcctcaaggtctccaccgtcggcgtcggcgccatgggctacatcggcaacaagggggccgtgtcggtgagcatgtccgtgtaccagaccatgttctgcttcgtgtgcagccacctcgccgccggcgagaagcccggcgacgtccacaagcgcaacgccgacgtgcacgagatccaccgccgcacgcgcttcgccgccccgggcgacctgcagctgcccagaaacatccacgaccacgaccggatcttctggctgggcgatctgaactaccggctggacgcgtcgtacgagcgagcgcacgagctgatctcggcgggaagctggcgcgagctggccgagacggaccagctgaagcgggagctgaggaaggggcgggcgttcgacgggtggacggagggcgtcctggagttcgcgccgacgtacaagtacgagctcggctcgaggaggtacgtcggcgtcggggaccaccagggccagagccagagccagaggggcggcgggcggcggacgccggcgtggtgcgaccgggtgctgtcgtacggcaaggggctgaggctgctgggctaccggcggtcggagctggcgctgtcggaccaccgtccggtgacggccacgtacgcggcggaggtggaggtgttctccagccggaagctgcagagggcgctgacgctcacggacgccgaggccagccgcatgccccatcaagccctcggagacaccgccatctacccctcgcccacctacctcccgacctcaagcatagacatccatgccaccatcgccaaggccgctgagctccacgcggtgctcctccagggcggcagcgccgccgcatccattgttggggcctacgccagcgctaggcagagcctcgctctcatctgcctacagccggccgcgtcgcgggtgctaacgatcaccaggtcaggcctcctggccatggccatcgaggactaccccgtgtttgccctgattaatccaaaagctgcagagtctctagcagatccttctgaatatccaaatctatttgaagactggcaggttgctctaactgtagaaaaaagtgttgcgtctcagaggggcaattatcttcctgctgaccagtatgatgctagggtccccctggacactgtgttcacagcttcagttatgaagatgtatctcaagtatgaatcaccagaagtgctggcaaatgaatgtcggcgccccttgtgtccagctcccctgttcgatgggcttcatgcccagtttcttctgctgcttccgttctacttgtcgaggcatcacctccaagatgaagctgccaccgttccatgtcgaggcgcacaccttgagtatcaggaacaccacgtgcatccagtaggacaggaatatagggaccgtcagggccattgttgccactgtgaacagcgcctggagcagtatgtacatgacctgccggttccggtcacccagcagtccgctcagcctccaccagatgttgtttgctttctgtgctttctttga

SEQ ID NO: 39240 - DNA, 744 bp, Zea mays
  Peptide Sequence Number=SeqID_81019
atggagactggtattactggatacaaagtcgtaacaatgcttacgctgctctcaagcatcaagggtagtgttgaggccttctccaagttgcttgctggctcccaaccaacaaggaaaaaaaatatagttccttgcattaatgattgtctcatttacattaatgtactttggatggttgagttagattctgaatttgtatacaaaaactcttgtcatggcgttgtgtgccttctgttttgcattttgcccacttgcatttcctgggttcatgagtccttgtttcctactggttcgagtaactgttggtattcccgaatcccgaatatccttgatcccaacatagaaccaaattttccgatgaaaaaacataaaactcaatgtttatcttatgaactatttgtcagagagctctcaaagaaagcacagaaagcaaacaacatctggtggaggctgagcggactgctgggtgaccggaaccggcaggtcatgtacatactgctccaggcgctgttcacagtggcaacaatggccctgacggtccctatattcctgtcctactggatgcacgtggtgttcctgatactcaaggtgtgcgcctcgacatggaacggtggcagcttcatcttggaggtgatgcctcgacaagtagaacggaagcagcagaagaaactgggcatgaagcccatcgaacaggggagctggacacaaggggcgccgacattcatttgccagcacttctggtga

SEQ ID NO: 39241 - DNA, 1296 bp, Zea mays
  Peptide Sequence Number=SeqID_81020
atggaagatgaggccccagtgctggataaggaaggcagtgggatccttggtcctgcatctgggctacgaatggctctcgtctctcccgcccccgccccttcggctcccgacgccccttcccctccccagcaccagcaagcgccggttcccattccggggccggcggccaactcccaggctgctgtcgccgcagcttcctctagccctggcgcgtcggcttccatcccctccttgtctcctcctgtgtcccatgcaaccaaagggcgctccaagtccgttcggtggggtgacctcagtccggcttcttcggatggcgcgacgtcgttcgactcccggccttccttcaaggatgtgctggtgagaacagcgaacccttcgccgcccggccgcgtggcagcccaagggtctgtcccggcagctggaaagtcctcggcgctagggaaggtgtaccgtcagccgcaccccctgtctacaaaacggcggagccccaagcaggccactcaacccacaccggcaatccgcccagctccaggattatctgaccatggatggacgacggtggagtccaagaagggtagaagtcgccggctgaaggcttcgtggctcccgggccgggtcccggctgatcttgttgggcgttgcttcaactgcttgggttgcgatcaccgggctgcagactgcggcagcgaacctcggtgtttcctctgttctgcgcttggccacaagtcctcatcctgccccaaggcttcggtgtggaggaggctcgggtgtcctagacctgtgaagtcggtctgggagcggctttcaccggcggtagagggaagggtccaacgaccggcaaggcgtcgtccggtttggcagcgtattgctccaccagaagtcattccggtcgtcccttctgtcccggtgggcaacatgcttggcgtctcggccgcacagggtaatggcggccctgccagctccaggcgcaaacggtggaggaagaagaagcgcaaggagcgtgaagataagccggctttggagatttcggctccacctcctcccgagcagatgcttccggcgagtgatgagactgcttgtgttattgattggtcggttcagatgtctattgcggaagataatctcaagacggctggggtgatcacagtggttagctctagagacgtcagcgctgacgagatcgcgttggttttggccccacggctagaaatggaggtgggaggattggttctccgtcagttctcccagtccagcttcttggctgtcttacccaaccaagtgcagctcgacacgctg

SEQ ID NO: 39242 - DNA, 2046 bp, Zea mays
  Peptide Sequence Number=SeqID_81021
atggactctgaggtgtctggcaatggtggtggtggtggagggggtggcagggtagatggacctgcttcagactctgacatggaagatgaggccccagtgctggataaggaaggcagtgggatccttggtcctgcatgtcaaccaagaaatggaactgagaaaaggcgtgtgatgattactaactgttttccaggtggtggtgctccagatggatttaaggccgcctctttggtggtgcaagatgactacgaggaaaaagaaaacatattggctgagaaagggctcgccacgcagctgggctacgaatggctctcgtctctcccgccccccgccccttcggctcccgacgccccttcccctccccagcaccagcaagcgccggttcccattccggggccggcggccaactcccaggctgctgtcgccgcagcttcctctagccctggcgcgtcggcttccatcccctccttgtctcctcctgtgtcccatgcaaccaaagggcgctccaagtccgttcggtggggtgacctcagtccggcttcttcggatggcgcgacgtcgttcgactcccggccttccttcaaggatgtgctggtgagaacagcgaacccttcgccgcccggccgcgtggcagcccaagggtctgtcccggcagctggaaagtcctcggcgctagggaaggtgtaccgtcagccgcaccccctgtctacaaaacggcggagccccaagcaggccactcaacccacaccggcaatccgcccagctccaggattatctgaccatggatggacgacggtggagtccaagaagggtagaagtcgccggctgaaggcttcgtggctcccgggccgggtcccggctgatcttgttgggcgttgcttcaactgcttgggttgcgatcaccgggctgcagactgcggcagcgaacctcggtgtttcctctgttctgcgcttggccacaagtcctcatcctgccccaaggcttcggtgtggaggaggctcgggtgtcctagacctgtgaagtcggtctgggagcggctttcaccggcggtagagggaagggtccaacgaccggcaaggcgtcgtccggtttggcagcgtattgctccaccagaagtcattccggtcgtcccttctgtcccggtgggcaacatgcttggcgtctcggccgcacagggtaatggcggccctgccagctccaggcgcaaacggtggaggaagaagaagcgcaaggagcgtgaagataagccggctttggagatttcggctccacctcctcccgagcagatgcttccggcgagtgatgagactgcttgtgttattgattggtcggttcagatgtctattgcggaagataatctcaagacggctggggtgatcacagtggttagctctagagacgtcagcgctgacgagatcgcgttggttttggccccacggctagaaatggaggtgggaggattggttctccgtcagttctcccagtccagcttcttggctgtcttacccaaccaagtgcagctcgacacgctggtggatcgcttccatatcatcagagaagaaaacttcatgctctcctctaggcgttggacgaggttcaggggtgctgttggtaattccttgaagcatctcgtggaacttgagatcagaggtctatcgttgcacgcgtgggagacttcggtggtgcagcatttgatcaacctccatgcttgcatttcccaggttctgcccgacacgctggaaatcaggaatctggaagtctttcgatgccttgcttggtgctgtgatcctgaacatatcccatctaagaaggacctctggatcactgaaccagaccaggcttctgttgctgaagggaagaaggctctggtgtatccggtgcaaattcgttggggccctgctgatttgaatctcatacctggcgctccacagccgccagttggtgctggcgatcaggacaaacctgataccccccttcacggagaagatgtggtgacaaccctccacccactcaacatgctgcagcctttgaagaccccgacataa

SEQ ID NO: 39243 - DNA, 573 bp, Zea mays
  Peptide Sequence Number=SeqID_81022
atggggaagcctgtcccatcactcctcatgctcttcctcagccgaggcagggtcccactcaacagtccaacccggtggttatgcataaaaccggggcttgccttccaaagcagtggcaggcaggtcctctggtgcaggctcgggtgctggatctggggctacctcctgagcagctccttgctccggcacgaggatgtactctccgtcagcaagattacagtctatcgaaatgcaatgaacattccttccccttatgcaaacagtaaccgcgggaaagaaaaggacggcgcggcttaccggcggcgagggaggtccggcgaagggtggggttggctcggggagactctggcggtcacgtcgaggtacggctcgacgtcggagatggccggaatcgcccggtccacgcgtacaggcgggtgtcctcgtcggcggcgagtataccggccaaaccacggcgaactggttcaatccgagggcatggtgagcttcacggggtcacgcagcgactgtgtgcacaaagaatcgaaggatggtggagtggtttacccggtccacgtactccggcgggggtga

SEQ ID NO: 39244 - DNA, 1023 bp, Zea mays
  Peptide Sequence Number=SeqID_81023
atggggaagcctgtcccatcactcctcatgctcctcctcagccgaggcagggtcccactcaacagtccaacccggtggcaaggtggacggccaagttatcccagcaaccatctcctccagagaacctgtaaaaattatgccacaagcaaggctgagtatactaatactcagctagacttacccggtaaaggggctcaccgccttggcgtacaatgcctcactgaccccgactggccgtcgtgcagtgaccgcacttgtacccaccataaccggaatgggagacctcgtctcaggtcgcgtgaggagggcaatctgcgggcaggttcactcaggttatgcataaaaccggggcttgccttccaaagcagtggcaggcaggtcctctggtgcaggctcgggtgctggatctggggctacctcctgagcagctccttgctccggcacgaggatgtactctccgtcagcaagattacagtctatcgaaatgcaatgaacattccttccccttatgcaaacagtaaccgcgggaaagaaaagggtggcgcggcttaccggcggcgagggaggtccggcgaagggtggggttggctcggggagactctggcggtcacgtcgaggtacggctcgatgtcggagatggccggaatcgcccggtccacgcgtgcaggcgggtgtcctcgtcggcggcgagtataccggccaaaccacggcgaactggttcaatccgagggcacggtgagcttcacggggtcacgcagcgactgtgtgcacaaggaatcgaaggatggtggagtggtttacccggtccacgtactccggcgggggcgagagctccggcgagcgtggactggcttctccggcgaagcactctccgattccttgctcggggagcctcacggaggtgtgcacagtcttctccgagggctggacgaggttgggaatggctcaaatggccggtctatggtggcagaggggttgggcggtcgcggactcgctgtgcacgggcaaacggcgacgagctaa

SEQ ID NO: 39245 - DNA, 937 bp, Zea mays
  Peptide Sequence Number=SeqID_81024
atggagagtatgtggccgaggagcgggtggaaggagaagcagtggaggaacccgccggcgacgcagggtggtgactctggctccaaaaggccaaaatttgagcaggatggagcaggggatattgttattgagccacacttaactgaggccaagcctgtccggatagaccaagaatcatcatcatcatctaatagggatgctgaggcaagcacatctactagcatgaagcctgttaaaactgaagaaccagtagcagatcttcttcccaaagaattgaatgatatgacaattagtgacgataaagctgatgaccataatgataaggaaggtgaaggtgttactcttgatgggaatggagccgagacaggacagataattgtgacaacaataggaggtcataatgggaagccaaagcagaaggtctcatacatggcggaacgggttgttggtactggttcgtttggtatagttttccaggcaaaatgcttggaaactggtgagacggtggcgataaaaaaggtgttacaagataagcgctacaagaatagagagctccagactatgcagttgcttgaccacccaaatgtagttcagctgaagcatcacttcttttcaacaactcaaaggggagaagtttacctcaacctagtacttgaattcgtatctgagacagtttatcgtgttgccaaatactacaaccggatgaaccagcgtgtacccatattatatgttaagttatatgcatatcagctttttggtaagcgcatgccacctgaagctgttgatctcgtgtcaaggctacttcagtactcaccaaacctgcgctgcactgctgttgatgcttgtgcccatccattctttgatgagctgcgggaccccaaggtctgcttgccaagtggacgaccgctgccagcgctgttcgacttcacagcagccg

SEQ ID NO: 39246 - DNA, 1269 bp, Zea mays
  Peptide Sequence Number=SeqID_81025
atgggtttgcggggtggtgactctggctccaaaaggccaaaatttgagcaggatggagcaggggatattgttattgagccacacttaactgaggccaagcctgtccggatagaccaagaatcatcatcatcatctaatagggatgctgaggcaagcacatctactagcatgaagcctgttaaaactgaagaaccagtagcagatcttcttcccaaagaattgaatgatatgacaattagtgacgataaagctgatgaccataatgataaggaaggtgaaggtgttactcttgatgggaatggagccgagacaggacagataattgtgacaacaataggaggtcataatgggaagccaaagcagaaggtctcatacatggcggaacgggttgttggtactggttcgtttggtatagttttccaggcaaaatgcttggaaactggtgagacggtggcgataaaaaaggtgttacaagataagcgctacaagaatagagagctccagactatgcagttgcttgaccacccaaatgtagttcagctgaagcatcacttcttttcaacaactcaaaggggagaagtttacctcaacctagtacttgaattcgtatctgagacagtttatcgtgttgccaaatactacaaccggatgaaccagcgtgtacccatattatatgttaagttatatgcatatcagatgtgccgtgcccttgcttacatccatcgtgttgtcggtgtgtgtcaccgtgatattaaacctcaaaatctactggtccctggtgagcctaacatatcgtacatttgctcgcggtattatagggctcctgaactaatatttggagctacggagtataccactgcaatcgatatctggtctgttggctgtgtagtggctgagcttctgattggtcagcctttgtttcctggtgaaagtggtgttgatcaactggtggaaatcataaagattttgggtactccaacaagagaggaaatcaggtgcatgaatccaaattattctgaattcaagttccctcagataaaagcccatccatggcacaagctttttggtaagcgcatgccacctgaagctgttgatctcgtgtcaaggctacttcagtactcaccaaacctgcgctgcactgctgttgatgcttgtgcccatccattctttgatgagctgcgggaccccaaggtctgcttgccaagtggacgaccgctgccagcgctgttcgacttcacagcagccggtaacttttcaatatacacttaa

SEQ ID NO: 39247 - DNA, 231 bp, Zea mays
  Peptide Sequence Number=SeqID_81026
atggtgagagtagcatgtaccctccgtggcaagaggctggacggtggtgtatctgtgctctcggttggcgtgaacccggtgaggaaacaacagacttttgctgtttttgttcaaaggtggtacccaaggatgagccccaacagtgaaatccgtcgtgggaggatgttggcctcccactttaaaaacaatactcttttgagcgggagggtgttttgcctcctgggtctgtaa

SEQ ID NO: 39248 - DNA, 315 bp, Zea mays
  Peptide Sequence Number=SeqID_81027
atggcgagagtagagtgtaccctccatggcaagaggctggacggtggtgtatctgtgctctcggtgaggaaacaacagacttttgctgtttttgttcaaaggtggtacccaaggatgagccccaacagtgaaggctatcgcgggaggatgttggcctcccactttaaaaacaatactcttttgtgtagttattgtaatttgcttccgcttattctttccttcaatgtgatgtataatatatgcgtgacgggtgaagcgctcttgggcgaaatgatgaaggattgtccaaggtccttaggacaaggacaactgtag

SEQ ID NO: 39249 - DNA, 1275 bp, Zea mays
  Peptide Sequence Number=SeqID_81028
atggccgcgcccagcttctgtgctctgtgcgcgcgctgcgtgctcctctctgctcggtttcaagcttctgcgcccagctctgccatggccgcgctgctcctcttcccagccgcgagttcccctgtctcccatggccggcgcttggccttctgctcgccacggatgcgcgccggctgccaggtcttctccctcctccctgcgcgcgctctcccctgccgcgtgttcctccagctcggaccacgtccttcctctctgctcggatccaccgtctcgtccggctccctagtggccgagcatatcccttgcgctcacgccttctccattcaattcctagaacacctaggactcgatcaaagacttcaatcgaaggtcgtcgtcattccgcgcgtcagcaagaaatcccaagaatcgggtgaagacggagccagcagcgtggtgttcaccaagtgcgcgacaaaaagctcgaacaagtcatcgatcgtcatcctcgtctacgccaagccccaagccgtgaagacactctggtgctggccacgcgtcaccagctcgacaaaaaggaatcccacgggtatttggtcaagaatggaaactgtgtgcctcgctcgccagacgtgtgtgatcaatgacgtcaaccagaaaccgtcgtcgtgcttacgactatcgcgtcgaattagtcagggatcagggtggatttgtggtgaattaccatgggacatggtctttgatcttgtggtgtttgtgcaagtccagaacatctacactagaacacctaaaaagaagtccgccaaagatttggcagaggatcgtctcgtttaccctttagctgagaacatgtccatttcaccttcatcgcttggagcatgtccatttcaccttcatcacattagtaatcatgtactatcaggacataatcccttctctgcaaaggaaaggcttggctttactttaccagtctcagatgtgattgttgaaaaagttgcagatcacgctcttgtatggatcaataggctgctggctattgatcatgacattgccatcaagagagataggaaagtttctacaaaggggatattgattttgtgggtggtttcattcattggaatgctcttcaacttccttacgctcatttacattggtgtaatgctctctctgttggttccaccactctatgagaagtaccaggatgagattgatcagaaggttggtgtagcccacagtgtactatcgaggcacatagataccatcattaccaggactcggcaatcaaccaagtag

SEQ ID NO: 39250 - DNA, 612 bp, Zea mays
  Peptide Sequence Number=SeqID_81029
atgggagacaggggaactcgtggctgggaagaggagcggcgcggccatggcagagctgggcgcagaagcttgaaaccgagcagaggggagcacgcggcgcgcgcacagagcacagaagctgggcgcggccatggacaaacgtcagggagcttcggcggctgggcgcgtggcgaagagaaggaacgctcggctgggagcttctgccggcgagcaggaagagtagaggatggacgcgacgtagggtttgggcgtcgagcggccgagctgagcaacagcggccatgggagaccagagaagaaaggcctcggctggggagggaaatctgagctggggcgcggctcaatccgtgctaggcgagcagggatcctaggacgcgcgtggggagcaggggcgcttggaaaggggcctagacgagctggagcttggagcttcgggacggcctgggcgcatggaagaagctccagggagaggggcgcgccaccatgggcgagctggagcgccgatagaggacagcaggagggagatgaagccgaggaaactgcgcagcggccaggcgagttgggcgaccgcggcattggggctggacgcgggaagacgtgcgcggccaggtga

SEQ ID NO: 39251 - DNA, 156 bp, Zea mays
  Peptide Sequence Number=SeqID_81030
atgaaggaaaaagacttccaaggatatgatggcctttgggaatcaagagtgaacggaacagagcgtgactgtgagagcgggatgggaacgaagcggctctatccggttgattttttggagcgaaatggttccggatctgaggagaatattccctaa

SEQ ID NO: 39252 - DNA, 201 bp, Zea mays
  Peptide Sequence Number=SeqID_81031
atgtactactccgcaagacttcagttttctagggctctttgtgcgctcgtaggcatgcgcacttgcctgccagagagtgccaggcatcaaggagtgaacggaacagagcgtgactgtgagagcgggataggaacggagcggctccatccggttgattttttggagcggaatgattccggatctgaggagaatattccctaa

SEQ ID NO: 39253 - DNA, 207 bp, Zea mays
  Peptide Sequence Number=SeqID_81032
atggcccaagggcacatttccctttcacacacccaagagtccaccaagcaattcaaagagatcaccccttcaactccatacttggtgacattcacaagagtgaacggaacagagcgtgactgtgagagcgggatgggaacggagcggctccgtccggttgatgttttggagcggaatggttccggatctgaggagaatattccctaa

SEQ ID NO: 39254 - DNA, 255 bp, Zea mays
  Peptide Sequence Number=SeqID_81033
atgacgttggaacaggctacatctacggcgcacggagacggagccaacgcgctcacgactcacgaggtccaagtccattgcttttgctttgttcgaatatggggttggggtgcttggttccacccaaagttgctcaatttttcgagagtgaacggaacggagtgtgactgtgagagcgggattggaacggagcggctccgtccggttgattttttggagcggaatggttccggatctgaggagaatattctctaa

SEQ ID NO: 39255 - DNA, 255 bp, Zea mays
  Peptide Sequence Number=SeqID_81034
atgacgttggaacaggctacatctacggcgcacggagacggagccaacgcgctcacgactcacaaggtccaagtccattgcttttgctttgttcaaatatggggatggggtgcttggttccacccaaagttgctcaatttttcgagagtgaacggaacggagtgtgactgtgagagcgggattggaacggagcggctccgtccggttgattttttggagcggaatggttccggatctgaggagaatattctctaa

SEQ ID NO: 39256 - DNA, 207 bp, Zea mays
  Peptide Sequence Number=SeqID_81035
atggcgctggcgcccgtgctgctgtattctgctcgcggctcgcgtgcgtttcttctctcttgcctggcagtggcagggggaagagaggggggaggagcagtgaacggaacggagcgtgactgtgagagcgggatgggaacggagcggctccgtccggttgattttttggagcggaatggttccagatctgaggagaatattccctaa

SEQ ID NO: 39257 - DNA, 285 bp, Zea mays
  Peptide Sequence Number=SeqID_81036
atggaggtgggcgtgtgggccgtgtgcctcggcgttggcctcctcgctttccatcggtgtggagccattggggcatcgcgcgtgggagacggaggcgggggcatggccgcgccaggcgcctacactctattcttaattagcagtagggaagaggtgacaatacttcatcagtatagagtgaacggaacggagcgtgactgtgagagcgggatgggaacggagcggctccgtccggttgattttttggagcggaatggttccggatctgaggagaatattccctaa

SEQ ID NO: 39258 - DNA, 192 bp, Zea mays
  Peptide Sequence Number=SeqID_81037
atggcggcgccaccgccgggagagagagctgacgaagatggcccacgtgtaagcgacaacgagcgaggagacgggagcgtgcgagtgaacggaacggagcgtgactgtgagagcgggatgggaacggagcggctccgtccggttgattttttggagcggaatggttccggatctgaggagaatattctctaa

SEQ ID NO: 39259 - DNA, 2133 bp, Zea mays
  Peptide Sequence Number=SeqID_81038
atggcgtcgccgtcgtcgtctccgccgccgaagctgccgatccccggccgccgcaacatactcatcaccagcgccttaccctatgtgaataacgtcccgcacctcgggaacatcatcggatgcgttctgagcgccgacgtgttcgcgcgctactgcaggctacgcgggtacaacgcgctctacatatgcgggacggacgagtacgggacggccacggagaccaaggccatggaggaggagtgctcgcccaaggagatctgtgacaagtaccatgctatccacagtgaggtttacaagtggtttgacatagaatttgacaaatttgggcgtacatcctctcctcaacagacaacaatctgccaagcaattttccataaattgatggaaaacaattggctatcagaaaacaccatgcagcagctttactgtgatacatgtcaaaggtttttggcagatagacttgtagaaggagcatgcccaacagaagggtgtactaataaagctgcgcgaggtgatcaatgtgacaattgcagccacatgttgaatccaactgaactaattgatccaaagtgtaaggtctgtaagaatactcctcatattcgtgaaacggatcacttgttcttggatctccctcgaatagaagacaagttggtaaactacattaatgatacttcagtagctggtatgtggagtcaaaatgccattcaagctacaaatgcatggttaaaggaaggactaaaatcacgctgtatcacaagagatcttaaatggggagttcctgttccaattgagaagtataaagataaggttttctatgtctggttcgatgcaccgattggctacgtgtccatcacatcatcttatacacctgagtgggagaggtggtggaagaatcctgataatgtggaattatttcagttcatgggcaaagataatgtgccatttcatacgatcatgtttccttcaacactactaggaactggtgaaaattggacaatgatgaagaccatttgtgtcaccgaatatctaaattacgaaggaggggctggatatgattcaattatacccgatgctcctggtgctgagtcacatccatcgacaagtgtcattgcagaaaaagttagtaaatcggttgaacaatatcttgatgcaatggaaaaggtaaagctgaaacaaggactgaagagtgcaatgggcatctctactgatggaaatcgttatttgcagaagaaaatatttctttcagtgaagaaaaatggcgaaagtgtgaaggcaaaacccccttgggatcttgtaccagcagggcacaaaatagggaggcctgtacctctgtttgaggaattgaaagatgaaaaggtgagtgagtatagggaaaaatatgcgggcagtcaagctgagaggaactcgaaagcagtggctgacgctgaagccacaaaaattgctaaccaaacccaaagcatagcattatctggaggctcaaaaaaggaacaaaagaaacagtctggtaactcaaaatcaaaggtggctgaggcagaattatccgttgcaaagttggagattcgagtggggcttatcagaaaagcggagaagcatccagacgccgattcgctgtatgtagaggaaatcgatgttggagaggaggctccaagaacggtggttagtggccttgtcaaatacattcctcttgaagaaatacagaaccggaaagtctgtgttctctgcaatctgaaaccggtggtgatgcgtggtataaaatcggatgccatggttttggctgcttctaatgaggaccatactagggttgagctggtcgagccaccagcggatgctgccgtgggggagagggtgacctttgccgggcactccggtgagaccgaggcttctctcagtggcaagagcaaggtgtgggagaagctagcggctgacctgcgtagcaatggcgaccttgtggcctgctaccaagatgtccccttcatgacttcggctggagtctgcaagaattcctcaaaatacagctcgttcatagtgaacggaacggagcgtgactgtgagagcgggatgggaacggagcggctccgtccggttgattttttggagcggaatggttccggatctgagaagaatattccctaa

SEQ ID NO: 39260 - DNA, 411 bp, Zea mays
  Peptide Sequence Number=SeqID_81039
atggaccaatatatcaagttggcaatcgggaatgcaccatggcccattggagtgactatggttggcatccacgagcgttctgcccgagagaagatctacacaaacagcgtcgcccacatcatgaatgacgagaccactcgcaagtaccttcagtcaatcaagaggctcatgacgctttgccagcggcgttaccctgcactgccctcaaaatcagtggagttcaacagccttgcaaatgggagtgacctgcaggcgcttctatcggaagagaatggttcggcgtgcaaatctggaaaccgcgtgcagcaccaccagcagcagatccatcagcctcctgttgaaaatggacaggggcagaccgtccggaccaggggcgcggaccgtccgcggtcggcagaaagggagcaatag

SEQ ID NO: 39261 - DNA, 432 bp, Zea mays
  Peptide Sequence Number=SeqID_81040
atgcctccaccgcccctagctactgccatcaagacagcaccaccgggccccccaggctccagttgggggtccggcggcagcggcgccaacaccaagcggtgccgcagcggtagagggggtccccactaccccgatggctgccacagcctcaacgacgacgatgtcgtcgagtacaccgccctccaagagactaaggcggcgatcctgcgggagtgggaggtgcttgaggccgaacaccagcgcctcagtgactggcgtacccagctggaggagcgcaccaaggcagtgtcccgccagttcgccttcaagcggtccgagcttgagcgggaccgcaaggactacaggaaggacctccagaaggtgttcgcccgggagctggaggtgacccagaaggagaagaggctggccaagaaaagtgcaaaatgtgtttga

SEQ ID NO: 39262 - DNA, 438 bp, Zea mays
  Peptide Sequence Number=SeqID_81041
atgaatccgagaactgagactgttgctgctcacctcagatgcggccacggcggtggcggcgaagacggaggagtggagaaccgggatgctgcggccgaagagcttaatggcggcgtcctatgcacagtcctggtccaggccttcgggcgcggccatggcgcgccgatctcggccccgcggtcaccgggaacaggcggcgccttgtgcggagggcatgcgacgttcccgagggcgtggtgccgaggaatggaagggggagagaagagcgacaggaagacgacggtgatgattgcgtgggtgctcgagcggaaaggcgacctgctggtttggcctggactctggagcgaggttgtgcccgggcgaggagaattcggtggcctttttgcccccttttctgatggctgcaggagaaggaagcgcgaccggggcagtcagtga

SEQ ID NO: 39263 - DNA, 825 bp, Zea mays
  Peptide Sequence Number=SeqID_81042
atggacaccagctccgacaccgactcgcgcagtggctattgcacgtccacaaggacgtttcacatcatgcgcgcaccatcgttttcaccgtcgtcggacgtctcgttcatcttcccgaccttcaccctgtttttcctccccaacctgctacccccgcccacggtcgcagccgtgagccgaccgatgctcgtcgacgcgggtacggcgcgagtcggtcatgctcttggcctttctctgtgtgtgccgtcgaggaggacatggtggcgcctgccacgcttaggttatcttatcgatgaggagttcagggcccgtagcgtggcaacagtcggcatatgctacagagttggtggtggtagtgtgtcgcttcggcgggtccagggctggaagacactcgcattctctcgcccttctcggatggacgccagatgcggccacggcggtggcggcgaagacggaggagtggagaaccgggatgctgcggccgaagagcttaatggcggcgtcctatgcacagtcctggtccaggccttcgggcgcggccatggcgcgccgatctcggccccgcggtcaccgggaacaggcggcgccttgtgcggagggcatgcgacgttcccgagggcgtggtgccgaggaatggaagggggagagaagagcgacaggaagacgacggtgatgattgcgtgggtgctcgagcggaaaggcgacctgctggtttggcctggactctggagcgaggttgtgcccgggcgaggagaattcggtggcctttttgcccccttttctgatggctgcaggagaaggaagcgcgaccggggcagtcagtga

SEQ ID NO: 39264 - DNA, 390 bp, Zea mays
  Peptide Sequence Number=SeqID_81043
ggagtcaagttctctttcgcactctgcaatgagaacagccttccacaccttctattttctggaacactctgccttgtgcacacgatagagagcgacgctgcactgatcatggtattgcagatccatctaactgaacccgaaggagatatcctattgttcttgaccggccaggaagagatcggtcatgcttgtgagcctctccatgagaggatgaagccattcggtggggacatactagagctgataatttttcatgtgtatagtgctcttcctaatgaagttcagtcaaagataattgaaccgactcctgttaagaggaaggtggtcgtggccaccaacaagcagttagctaatgaacttcatgaaatttcaaaactcagcattttgtga

SEQ ID NO: 39265 - DNA, 486 bp, Zea mays
  Peptide Sequence Number=SeqID_81044
atggtggcatctgttatggctcctataatctcgctcagggattttggtacgggcatcgtcccacggctttttcctgagggcggaggtataggtttgggagtcaagttctctttcgcactctgcaatgagaacagccttccacaccttctattttctggaacactctgccttgtgcacacgatagagagcgacgctgcactgatcatggtattgcagatccatctaactgaacccgaaggagatatcctattgttcttgaccggccaggaagagatcggtcatgcttgtgagcctctccatgagaggatgaagccattcggtggggacatactagagctgataatttttcatgtgtatagtgctcttcctaatgaagttcagtcaaagataattgaaccgactcctgttaagaggaaggtggtcgtggccaccaacaagcagttagctaatgaacttcatgaaatttcaaaactcagcattttgtga

SEQ ID NO: 39266 - DNA, 495 bp, Zea mays
  Peptide Sequence Number=SeqID_81045
atggagctacctgttttctgtcgtcctgcactgcaagcgaaactgcttgctgctgcgctgatcaacaactccctgaccaaatccgggcagcttgggactgcattatttggtgccatttcaaaatacagaaacgtttcaagattcatttctcccatctctcaaacatctacgaagaacataggtccatgttgtagcttcagctcgtcttttgatgttgaggtgagaagtggatcagaaggatatgtgataaagatgcgagatggaaataacttgcgttgtgtccatagtaactttcaagggagaaatattccagagagtgcaccacaacctgctattgttttgaggattgaagatggaagcagaactttactcccgatcattgttttggagatgccaagcgttattctgatggcagctattcataatgtccacattgtaattccttctattgtcatcaattatattgtttcatactatctgttctgcttgatgtag

SEQ ID NO: 39267 - DNA, 636 bp, Zea mays
  Peptide Sequence Number=SeqID_81046
atggagctacctgttttctgtcgtcctgcactgcaagtgaaactgcttgctgctgcgctgatcaacaactccctgaccaaatccgggcagcttgggactgcattatttggtgccatttcaaaatacagaaacgtttcaagattcatttctcccatctctcaaacatctacgaagaacataggtccatgttgtagcttcagctcgtcttttgatgttgaggtgagaagtggatcagaaggatatgtgataaagatgcgagatggaaataacttgcgttgtgtccatagtaactttcaagggagaaatattccagagagtgcaccacaacctgctattgttttgaggattgaagatggaagcagaactttactcccgatcattgttttggagatgccaagcgttattctgatggcagctattcataatgtccacattgtaaaacttgttagggtaaacaaaagaattcaagaagcatactgtgccgaactttatttaacaaaggtcaatgatcctacagacaacatcaccttcgatcttcagccttcagattgggactgggaggaggacgaggagatgatttggtgctaccagggtcaggccccatctcctagaaatggaccttcctcctttgcctag

SEQ ID NO: 39268 - DNA, 972 bp, Zea mays
  Peptide Sequence Number=SeqID_81047
atggggagacgaccagttgagttgcagatacaaccactgatccctctgccaacatttgctgttctaaaccaccgatcccccacatatctcccttgttgcagattcagccacggatcccccatctctccccccataaggttgcctagcatttctgtggtcaatgatcctacagacaacatcaccttcgatcttcagccttcagatgccataaacattgctgttcgttgcaagggcaccactgtcagggtggagtatggtgatgctgcaattgcagctgacccggcaggtgctcatgtgatcagccatgcattccctcatacctatgggcagcctattgctcattttctcaggaagacagctgttgtccctgatgctaaggccatatctgaacaccaggtggtcagggttggcattgtcttctgtggcagacaatccccaggaggccacaatgttgtttgggggctctatgaggctatcaaggcccacaaccaaaacagcaaactcattggtttccttgtcagcatgaacaaggtcgaggcattgtacaggttgttcaagaagatctgcaacaccttcattgatgatgggctgattaataagacgaggagaacaatcttgctggccacccaactatccacatgggtgacgaggaaaacatgtcttttggcggacttggaagaggatgatgtgaaatggtgtagttgcaacttgcaaagcgagatatggacttgtgtacaagaaaatgtagaggtcgagattgctcctgaaaagaacagggacaccatgaaaacaggtggctttgttttgcagtcaagttgccggggtgatgccactgttaaagctaccggggtgaagacacagatgttatcgctcgagatatggcagagatatggcagggtgctacgtttcactagcattatcgtttgtaatttgattcacactcttttgtacataaaattcatgatgttataa

SEQ ID NO: 39269 - DNA, 741 bp, Zea mays
  Peptide Sequence Number=SeqID_81048
ggcaccactgtcagggtggagtatggtgatgctgcaattgcagctgacccggcaggtgctcatgtgatcagccatgcattccctcatacctatgggcagcctattgctcattttctcaggaagacagctgttgtccctgatgctaaggccatatctgaacaccaggtggtcagggttggcattgtcttctgtggcagacaatccccaggaggccacaatgttgtttgggggctctatgaggctatcaaggcccacaaccaaaacagcaaactcattggtttccttgtcagcatgaacaaggtcgaggcattgtacaggttgttcaagaagatctgcaacaccttcattgatgatgggctgattaataagacgaggagaacaatcttgctggccacccaactatccacatgggtgacgaggaaaacatgtcttttggcggacttggaagaggatgatgtgaaatggtgtagttgcaacttgcaaagcgagatatggacttgtgtacaagaaaatgtagaggtcgagattgctcctgaaaagaacagggacaccatgaaaacaggtggctttgttttgcagtcaagttgccggggtgatgccactgttaaagctaccggggtgaagacacagatgttatcgctcgagatatggcagagatatggcagggtgctacgtttcactagcattatcgtttgtaatttgattcacactcttttgtacataaaattcatgatgttataa

SEQ ID NO: 39270 - DNA, 1407 bp, Zea mays
  Peptide Sequence Number=SeqID_81049
atgtaccgagaggcgttgtggcagaagagaggtcgtcctcgggagttatatccggacgtatctagtaaggatgctcatgttcctcctgaactccccgtgcctaactgtgactgtggcagactggcttggggacatcagaagtgtttctttttccagtggatcgatggtcctgataaatttgaccctcgatatctgcttttcgttaattggttgagtggaaagaccagtcatgagcgttttaagcgttgggtacctcctcccccgaatcctccaccaatgacggatgcagagaaggaggtagcaacagaaagacggatggactcaccgcctcgatgcgattgtggagaccgtgctgtcatagacgaagactatgacaagcagttctgttgtccgaacattgattatccatacgggtggcgtaagtgtcgtttcagagagtggttgtatggtcctttgtcccattggccagagccagaggtaaaggaaaagagatacatggggtgggcggcagaagaggtcaaatttgatccagtactctgcaaatgcggtattgaagctaagtatggattagttccttcggagcttggtgttggatatttttgtggacatatggtcgattacgatgaggagacgaggaaatgcagttgggagagttacgacgacaaaggagaggtgatgcggacaatagagtccaagagaataatgggacagaagatgcgttgtggatctcagctcgttgattcgtacattaacgatcgcatacgcgacatgcgtagggaagcaaaatctgccttttatgatagcccgaagcgtgcagagtataggaggttgaaggcggcagatgagaagagagcacaggatgcaagggaatgggaagcggctcaagccgagaaacagatgttggataatcttgctgatcgtctaaagggaaagattggaagcggcgtaaactatttggccgatgaggcgcatgcgagatatgttcaggataaaatggcaacggttgagctgatggaggaggaggacgacgacacatctagattgagtgagcttatcgccctcgcagaggcaggattacatgaagaagaggaggacgacatgtcaaggttgagtgagctcatagcactagctgaggcaggattacgtgctcaagaggaagaggatgagtttctgtcacaggccgccgcagaggtagaggcagcttattacaagaagaagtctgatgaggctgaggctgaggatgagctattctcccaagctgcagatgaagcagaagccaattattacaaaagaactggtgacaagtgtgatgcaggacaatgcagcaagtggaatgaggttgttgttgaggattgcgcgacggatgactccgaagatgagttactcatagattatgattcagactga

SEQ ID NO: 39271 - DNA, 258 bp, Zea mays
  Peptide Sequence Number=SeqID_81050
atggctcaccggattgctctgtccacgcgcggaggtgggcgacagaagtccggcgagggtggatccgcctctccagtgaggcaatgcctcggctcaagcttggagaagcttcacggcttcatgaggaagaggtccaggggctggggcgaggctagggcgatgtctgactggcgggttccaccaggcagtgccaaggcgcgtggcatcgcaatgggccggggtgggccgacgtgtgcgataggagttgggatggcgtga

SEQ ID NO: 39272 - DNA, 324 bp, Zea mays
  Peptide Sequence Number=SeqID_81051
atgcctcggctcaagcttggagaagcttcacagcttcacgggaaagcggtccaggggctggggcgaggctgggggtcaatagaaggggctggccacgacggtcgtgctcgggcagagatgagagttgtcacgtcactaaggtggcagtgtcacaaggtcgagtcccgagctgaactgtcaccgctgcccgagccgtacaacactcgagccgatccagttatgaaaaaagcaccggatataatgagcgttgccaactctatcatcgacgaagtcgtcgacaagctgctgaacgaagctgcggagaaaatacttaatgaagattaa

SEQ ID NO: 39273 - DNA, 1324 bp, Zea mays
  Peptide Sequence Number=SeqID_81052
ttggggccagctgttgggccgaggtcgacgacggggtcgacctctccgtggagacagccaaggcggccgtgagccacgccgccacgagccaccacgagcacgacggcgagctcagcgatctggagtcggatctggtggggcggcagaagactggctgctcgtcgtcgccggcggcaacaacgccggctgcagagctgatcgtgccgccagcacagcagatctagcaattccagatccagcaattccaggatttttgccacaccatgtgtggtacaaaagggtttttcatcaacaagtggtcaccaaaagaagaactgaaacatcaagatggtgtttgcttctacgttttaccattgaggatatgatgcaagggagggctatccttggctgcggctaccaaagagcaacaggggaggctagccccatcgggtggtgctcacccagggattctaggaagcagggattacactccctgggtgctgactcccctgggctcccttcccccagctgccaaaggaagcctaatagaggaattccccacggggaatcggggatcgggtccccattgccatctctagtccagagtccgtgtccgagctcctgttccacgcggtgtccgtgttcgtgttcgagtccgagctcctgttccaagcggtttttggccgttgagcagagcactcgccgctgggtcctggcgcgttgtgcagttcagtcttgtggttgtggggaacagtatttgtcggaggcccatcctcgcgcggtgctcccgtgcaagggcaggttctctcctgcgggctgcggtgctgtgcggcggtcgccaaactcgtcgtgctgcggcggtcgccatcctcgtcatgctgcggcggtcgccaaactcgtcgtgcctgcagtcggatttggctccacgggtgagctgccggttcgagcgtcgtggttctgggtgttccatgtcgtcaatgctctgctccgtgctttggccatgcaggttatgtgcagattcttagaaaacagtgaagttggaaatattgggagagttatgttgccaatagcagatgcctacactcggcgcagttggcggaaagaaaatgtgaagcatctttggccattggaacgtgatcgtgcggccaggaaaaagatccaagcgccgcctctccctcccacagctattgatccaaacgcgctcggcctctggaagcatcgcgacgtcgacgtgcggagttgccgagaggctatacaggataatgtccactcgatgttcatcgtttgggtgccaaaaaatagcgacgtggatactctagccggcgagctttgctcctggctgtaa

SEQ ID NO: 39274 - DNA, 294 bp, Zea mays
  Peptide Sequence Number=SeqID_81053
atgcaggttatgtgcagattcttagaaaacagtgaagttggaaatattgggagagttatgttgccaatagcagatgcctacactcggcgcagttggcggaaaaagatccaagcgccgcctctccctcccacagctattgatccaaacgcgctcggcctctggaagcatcgcgacgtcgacgtgcggagttgccgagaggctatacaggataatgtccactcgatgttcatcgtttgggtgccaaaaaatagcgacgtggatactctagccggcgagctttgctcctggctgtaa

SEQ ID NO: 39275 - DNA, 222 bp, Zea mays
  Peptide Sequence Number=SeqID_81054
atgcccaaaccagacaaaactttccccttccttatcctcccggtgctccccagccttcttaaccctggggttggaccgcacgagttcggatcgagtgactgcccacacagtctcgagtggttgtacgataaaggagtacagaagatctacttccggaagttcgggctctggtccctctcccagggctacgggttccggattaacggtccccgcttcctctag

SEQ ID NO: 39276 - DNA, 231 bp, Zea mays
  Peptide Sequence Number=SeqID_81055
atgacgactggggagcacaaggaggataaggaaggggaatgttttgtctggtttgggcatggtggtggccttgttcctttcggtataatcgttaaggtgggctactgggtacagaatgagattgttgattggcctcctgggactagtaattgtatcacatttgagtcccagaggattgggacgcttcatgagcagaggatgagaaggagggtagggaggaggttttgctga

SEQ ID NO: 39277 - DNA, 270 bp, Zea mays
  Peptide Sequence Number=SeqID_81056
atggccttcaacaccgtgtgcagctacattggtaccagagatttggtccaggaacacattgcttttaagaagaatgttgaggagcttcgtgaggtgaaggagtgctacaatgttgttatgctgtcacacccggttttagaaggcaaaccgaatgcgaaccatctaagggcgtcccactccaccctcatggttgcactgtttttccaggcagtcatccaacgaacaggtccttacggagaggcactcgagaaaccgctcgagcccccttaa

SEQ ID NO: 39278 - DNA, 1056 bp, Zea mays
  Peptide Sequence Number=SeqID_81057
atggcgcttcctgtcgacgtggctggcctgtgccctaggttgggtgacgtggaggctcctccgaagccggggtcgagtctgtcttccatggccgaggccgagtccgagcccctgggtcgggcgaggcggaattcgtcagcagaggccgagtccgagcccctgggtcaggcgaggcggaggtcgtcagcagaggccgagtccgagcccctgggtcgggcgaggcagaggtcgtttgcagaggccgagtccgagcccctgggggtcgggcgaagcggaggtcgtcagcagaggccgagtccgagcccctgggtcgggcgaggcgaaggtttgttaatgggttcaaatgaaaacccagcggtgggtatgggaaacccgttgggtacccgaaacccgcatgggtatgggtttgggcaaaattttatacccgtcatgggtatgggttttttagcgggcgtattttttcttcgcgggtatgggtttgggcaggtgaggatccagttgggtgagggctctgctggtcaggtcacgaggaacgtgcttgcaaacgagggtgtccgttccttttacaagggttgttttgttttccttggtgcttgtttgtctgctggtttgctaaggcaagcgacctacacaactgctcgtcttggatccttcagaaagctttttattggtctgactgctggagcaattggtgcttgtgttggtagtcctgctgatttggcacttattaggatgcaagccgattcgaccctgccagctgcacaacgacgcaactataagaatgctttccatgcactctatcgtatcactgctgatgagggagagggagtccttgccctttggaagggtgcaggtccaactgtggtgagagctatggcactcaatatgggcatgcttgcttcctatgaccaattcttcgcctcagcatgcagtttgccctttgactatgtgaagacacagattcagaagatgcaacctgatgcgaatgcatattcatccaatgataattcgaatgcaaatgacctggatattcttgaatcagatccagaagtttga

SEQ ID NO: 39279 - DNA, 570 bp, Zea mays
  Peptide Sequence Number=SeqID_81058
atggggtgtgtggagtttcgcagctcggtgactggcgttgccctctccgtggtggcgaagtcgccggagacgaggcagacgcagtcgtcgggggatctgaggtcacgcgatgagggctggaacgggctaggaatagagatggcaatgggtacccgctacccgaaacccgtgggtatgggaaacccgttgggtaccctaaacccgcatgggtatgggtttgggcaaaattttatacccgtcatgggtatgggttttttagcgggcgtattttttcttcgcgggtatgggtttgggcaactaggaaggtccagcgaactcattggcgggactccggtcgcgagaacgggactggagggcgggtcgggtgactccggcgaggaatctcgaccacggggagggggtttcgggagcgctaaggcctggactggcttcggcagggtaaggggaactccactgaccaacacaggggcacgacgcgaggctaaattggccagtcaccccgcggggcgcggggaactggcgcagccaaactccggcgaggccaaattggctaagaccaagcggaaataa

SEQ ID NO: 39280 - DNA, 270 bp, Zea mays
  Peptide Sequence Number=SeqID_81059
atgccacgccacgtcatgtgggaggcgggcgtggcattccagttccagccgaccaggctgagggagaaatgggcgagtgagcggagggaggaggccaagagcttggtggagcttgggacgcccgtaacgaggcctggggcacggaagccatggcttgccatggtgttcggtgacctgtatcccagcgcaatgcagcttcagatggttagcgtcgcttcagttctggaggccatgggctacgaaatgaagaggccagaggttttgaactag

SEQ ID NO: 39281 - DNA, 297 bp, Zea mays
  Peptide Sequence Number=SeqID_81060
atgccacgccacgtcatgtgggaggcgggcgtggcattccagttccagccgaccaggctgagggagaaatgggcgagtgagcggagggaggaggccaagagcttggtggagcttgggacgcccgtaacgaggcctggggcacggaagccatggcttgccatggtgttcggtgacctgtatcccagcgcaatgcagcttcagatggttagcgtcgcttcagttctggaggccatgggctacgaaatgaaggtttgtgtcagcgcagtttctgtggtatggaaaaaaatcacgggctaa

SEQ ID NO: 39282 - DNA, 663 bp, Zea mays
  Peptide Sequence Number=SeqID_81061
atgcccgtcgctgagggcccgtcaccgacctcttcgcatggctctgtcaacaagcttgcttttggacccaaatcattcgttgttgtctttgacccctcgttgctaaacacatcctccgggagaacactttctattatgataagtcgctacttgagcagtaaatttacacaagacgcacaccctcacctaggaggagttcaagaagaagcagaagtgcactctcatttatcatgcaaatttgtgttctcccaggaggtaaaagaatgcgccatatcttgcatgagtttggtggtctctacttttggtgatggtcttgaaagagaattaccagcatgccttcccatactcgttgacaggatgggtaatgaaattataagacttacagctgtcaagaggcaggcaaccaaggatgctggtgtcattgccggcctcaatgttgctaggatcatcaatgagccaactgctgctgctattgcctatggtttggacaagaagggtggcgagaagaacatccttgtctttgaccttggtggtgatatcctcctccttgatgtggctcctctcaccatgggtattgagaccgttggtggagtcatgaccaagttgatcctgaggaacactgtcatcccgaccaagaagtcacaggtgttcaccacctactag

SEQ ID NO: 39283 - DNA, 720 bp, Zea mays
  Peptide Sequence Number=SeqID_81062
atgcccgtcgctgagggcccgtcaccgacctcttcgcatggctctgtcaacaagcttgcttttggacccaaatcattcgttgttgtctttgacccctcgttgctaaacacatcctccgggagaacactttctattatgataagtcgctacttgagcagtaaatttacacaagacgcacaccctcacctaggaggagttcaagaagaagcagaagtgcactctcatttatcatgcaaatttgtgttctcccaggaggtaaaagaatgcgccatatcttgcatgagtttggtggtctctacttttggtgatggtcttgaaagagaattaccagcatgccttcccatactcgttgacaggacgggtaatgaaattataagacttacagctgtcaagaggcaggcaaccaaggatgctggtgtcattgccggcctcaatgttgctaggatcatcaatgagccaactgctgctgctattgcctatggtttggacaagaagggtggcgagaagaacatccttgtctttgaccttggtggtggttattttgatgtcagtatcttgaccattgataacggtgtctttgaccttgatgcagatatcctcctccttgatgtggctcctctcaccatgggtattgagaccgttggtggagtcatgaccaagttgatcctgaggaacactgtcatcccgaccaagaagtcacaggtgttcaccacctactag

SEQ ID NO: 39284 - DNA, 402 bp, Zea mays
  Peptide Sequence Number=SeqID_81063
atggcgttgaaatacctcaaggtcttagaggtgaacttgaaaaacgtcgtcttcctctacttcctccatagctccctcacaacatcgagcaagactgaacatcactatgttcgacatatttaccttgggaactccaatcagaaggctgaagaaaacattcctcataattgcagtgttagagcaattccaagagaagagggcggcaggggacaggggacaggggagaacctggggccagaggcgagccttcttggagatggcggtgagaacagcccagacgtcgggctccgtctcctagataggctggtccgcgaacttgcgcgccaccgcgcgcacctcgtcgggagtgaccttgggcggcgtgggcagaggaaccccgtagcggaggcggttgaaagctag

SEQ ID NO: 39285 - DNA, 1196 bp, Zea mays
  Peptide Sequence Number=SeqID_81064
tcctgagtgtgaaagatgtggtgagcagggccggtcctgagggcgggcaaccggagcggccgcaccgggccccaaaattccaggagccccaccacaggcgtgcacactgtgttctgccatcgcgcgctacgcctccctccccgcgcccgcagtccccgccgccgccccgcaggcagccgccccgcagtccccgccgccgcgccagctactcccgcaattccgccgcgcccgcaatccccgcgccagcaagcccgcagtccgcattccctgccgcgccctcaaagctccgcgccagcaacgccccgtatcccctgcgccaccaaatcccctgcgccaccaaatctccaaatggccgccatgatcgaccagctccagatccgcgacgcgccgccaccctgcgtgcccggagatggaattgtgctcgcgcgatgcccacccatccactcctcctcgcccgcccgtcacttcctcctcgccttccacgcctcgtgttgtcccttctcggccgtcgtgcacctctagctttcggccgcctccgctacggggttcctctgcccacgccgcccaaggtcactcccgacgaggtgcgcgcggtggcgcgcaagttcgcggaccagcctatccaggagacggagcccgacgtctccgctgttctcaccgccatctccaagaaggctcgcctccggccccagaaagtatactaccattgtggcggacttctgctgaacccggacctgtacgagagcgagaaaggcctcgtgctgaatgacaggccatacttcaatgagccaggatacaagaactcggctgaaacgacaggtggtgagaggtgttccttggcttacaatcagacggccttcgtcagatcatgcaagacgatgctgtattcactccggaagcctccaatgcattttgagacccttgtgttgtggcacttccacgagcatgagcgtgccatcctcgacgcttgcagggcttacatgtctgggacagtcgttgggtcgtctgctgggactgggagcaaccgcagatacgtccatgacaagtgctttgcagaattccacaagtcgttgacgctctacactgaacatctcagggctgagtttgctgcaaacagaagacgagtgattgagctggaaacaaatcgagcggttacacttatggtggagcagcaaaatctggctcacaacaaatga

SEQ ID NO: 39286 - DNA, 432 bp, Zea mays
  Peptide Sequence Number=SeqID_81065
atggggtggcagttctatgaccattcgtgccccaaggcaaaggagattgtgcagtccattgtggcacaggctatggccaacgggaccaggatggcggcatctttagtcagagtgtcagactgcattttccgtgactgctttgtcaagtgtatcggcaaagccttctttgtcgagtgtcagagagcactcggcaaagaaaaacagtcgttacggcgccgggtgacggagacggcggctttgccgagtgtacctggtgacactcggcaaagaaggctcggcaaacagtgcattggcaaagccttctttgccgagtgccagagagcactcggcaaagaaaagcagccgttacggcgccgggtgacggagacggcggctttgccgagtgtccctggtgacactcgggaaaggagttatcatagagtttcaatgtga

SEQ ID NO: 39287 - DNA, 486 bp, Zea mays
  Peptide Sequence Number=SeqID_81066
atgaagaaggatatcttggacaacgcgaatgtcgacattatcttcaatgattttgcattaagaagggtaaaaggatttaagtgttatgtcgatgacactcggcaaagaggttggctttgccgagtgccgcacagaacactcggcaaagagcctgacatggggaccctctctggcgggctctttgccgagtgtcccaagcggcactcggcaaagatggattctttgccgagtgctgccgggcagacactcggcaaagataactcctttgccgagtgtcaccagggacactcgacaaagccgccgtctccgtcacccggcgccgtaacggctgcttttctttgccgagtgctgtctggcactcggcaaacctatttgccgagtgcccgagaaaaagcactcgacaaagaaggctttgccgatgcactgtttgtcgagccttctttgccgagtgccacactcggcaaagcctttgccgagtgtttttaa

SEQ ID NO: 39288 - DNA, 1077 bp, Zea mays
  Peptide Sequence Number=SeqID_81067
atggcggcagcaggcgagcggaagcggcggtcaaatcgtctgcaggctcacgtcccctcctggagcagcaggagagccctctcccacggtggtaggcgacacctttggcaggcgaagcgggcgacgcttcacctccgccataatgaccgcgtcaaagaaagggaccgggaaaggggatactcttgcgaaggaagcgggctccgagccctcctactgatcagaggttcgaaggctggcccctcgaaagggttcgacagccgcctcagagcactcgggctccgcgcccactactggtcagaggttcgaaggctggcccctcggaagggttcgacagtcgcctcaggccacttgggctccgcgcccactactgatcaggggttcgtaggctggccccccgaagggttcgacagccgcctcagaacacgcagagcaagggatgactctgggtacgtccgatacatggccgaggcttgggctacgctcccgaggagcattcaatgcaaggatcgcctgacaccttatcctgacgcgcgctcctcagtcgacaaggccgaacagccaagtccagccttgggcgccataggaagctccgcctcgctcgaccccagggctcggactcaacctcgacctcggacgatggtctccgcctcgcccgaccccagtgctcggactcaacctcgaccccgaaagacggtctccgcctcgcccgaccccagggctcggactcaacctcgacctcggaggacggtctccgcctcgcccgaccccagggctcggactcaacctcgacctcggaggagcctccgcctcgcccgtccttgggctcagaccgaccacgtcgcaggggggtacatcattaccctacccctagctagctcagggtacggtgaacaagaccggcgtcccatctggctcgccccggtaaaacaagtaatgatgacaccccgcgtgctccatgacgacggcggttctcagccccctacggaagcaaggagacgtcagcaaggtcccgacagctctgacagctgtgcttctacagggtttaagcgctcctccgacggccacgacatcacatga

SEQ ID NO: 39289 - DNA, 237 bp, Zea mays
  Peptide Sequence Number=SeqID_81068
atggcgacaacaggcgagcggaagcggcggtcaaatcgtctgcaggctcacgtcccctcgtggggcagcaggagagccctctcccacgggaccgagaaagaggatactccgaaagggatccttctctgcgaaggaagcgggcctcgagccctcctactgatcaggggttcgaaggctggcccctcggaagggttcgacagccgcctcagagcactcaggctccgcgcccactactaa

SEQ ID NO: 39290 - DNA, 450 bp, Zea mays
  Peptide Sequence Number=SeqID_81069
atgacaacaaattttccaccgccaccacaatggagccagtttgcaaacacaccagctctgccaccacagttcaacacccctccgacacatatacctgcacttggagatagggttacgcccgaagcgggtggtagtgggtctgatcccgcagcagggactagatttgttgactccctcttcgcgttccctcctcctagtggtggtggcggcagcggtcaaagctctaaccacccaagtggtggggcgccgtcggggggatcagaggggggcgccggcggcatgtggaaggggaagaagagcgggcctctggcgccgtggggctggaagcgagagttccccattcgcgcggaggactacgagctgctcgagcccatcggcgacggcgccaccaccgtcatgcgccgggcgcgctgcctgccgcacgggaggttgtcgccgtcaaggtcatga

SEQ ID NO: 39291 - DNA, 164 bp, Zea mays
  Peptide Sequence Number=SeqID_81070
atgtggaaggggaagaagagcgggcctctggcgccgtggggctggaagcgagagttccccattcgcgcggaggactacgagctgctcgagcccatcggcgacggcgccaccaccgtcatgcgccgggcgcgctgcctgccgcacgggaggttgtcgccgtcaag

SEQ ID NO: 39292 - DNA, 414 bp, Zea mays
  Peptide Sequence Number=SeqID_81071
atgaatggacaaagtgcaaatcaagagcaaagaaacagaaagaagaagagaagagaagagttggctgtgtacagccaagaggctgtttcggatgcaaacatacttgatgtgtttgtccctagggtgcggcaaacatttgatacaagggaagaagcctacctcttttaccttaactatgcaaagttggctagttttagtgtcagtacaaagaggactagtaaagaaaccaaccactgggaagtgaaaaggttctgtcgggagcgtgcgggagggacgaagacgaagcgttggttcggtctgggtggggcggttggctcggaccaggtgctcctggcgcgtaggttcgacctgggtgcattctctatattgaatgcacccaggaagccccgaccagaaaccgaccaggtgctctga

SEQ ID NO: 39293 - DNA, 189 bp, Zea mays
  Peptide Sequence Number=SeqID_81072
atgaagcgtcggttcggcctgggtggggcggttggctcggaccaggtgctcctggcgcgtaggttcgacctgggtgcattctctatattgaatgcacccaggtataatgggagccctgggcttcggatattaaaggaagcccagtttgacaaagatgtcgccataatatcgggacggtttcggaaataa

SEQ ID NO: 39294 - DNA, 189 bp, Zea mays
  Peptide Sequence Number=SeqID_81073
atgaagcgtcggttcggcctgggtggggcggttggctcggaccaggtgctcctggcgcgtaggttcgacctgggtgcattctctatattggatgcacccaggtataatgggagccctgggcttcggatattaaaggaagcccagtttgacaaagatgtcgccataatatcgggacggtttcggaaataa

SEQ ID NO: 39295 - DNA, 150 bp, Zea mays
  Peptide Sequence Number=SeqID_81074
atgaagcgtcggttcggcctgggtggggcggttggctcggaccaggtgctcctggcgcgtaggttcgacctgggtgcattctcttatattgaatgcacccagggcaggtataatgggagccctgggcttcggatattaaaggaagcccag

SEQ ID NO: 39296 - DNA, 300 bp, Zea mays
  Peptide Sequence Number=SeqID_81075
atgcctcaggaccttaaccacgtcgcattagctcaggctcgccggagctcggttctccgtcgtgcgacgtcgtggaccttggtatgtgaaggaatagaagtgcaggggtgtatttgcaaagaaaacgaggaagagatagaagttgaagaagcgaggactacaccaccaccacctgaagaacctcaggcaggaaactgcttttactttgatatctatggagcagagcctgactcacctatcacacaaggtgataggagttgtgtgctaaaccagttgctgcatttccttccttggttttga

SEQ ID NO: 39297 - DNA, 246 bp, Zea mays
  Peptide Sequence Number=SeqID_81076
atggtcaggcacatcctggtccggattaatcaaattagagcttgttctagggtcgcctctgaaaacgaggaagaaatagaagttgaagaagcgaggactacaccaccaccacctgaagaacctcaggcaggaaactgcttttactttgatatctatagagcagagcctgattcacctatcacacaaggcaagccccgatgcatttgccacctccttgctattttaaaatctttctcacttacttga

SEQ ID NO: 39298 - DNA, 1255 bp, Zea mays
  Peptide Sequence Number=SeqID_81077
ccccaccaccagacccgccaccttcgcgctccacggcagcggcatgtccgtcgcctcctcccaccgcctgcgaccgtcgccgtcgggcccggcgcggcgcccgggatccgcggcgccgcgcgtagcgttctggccagccggtgcctcgcccccgtatcgcggccgctgcaccgtcgtggcggcggcggctgccgctggcgccggcggcgaggcatcttcggcccccgtggctgtgtcggctgtcgcccccgcgggcgctgccagggacaaggtgcggcgccacacgatttcggtgttcgtcggggacgagagcggcatgatcaaccggatcgcaggggtgttcgccaggagaggctacaacatcgagtcgctcgccgtggggctcaacaaggacaaggccctcttcaccattgtcgtctccgggaccgacagggtgctcaaccaagtcatcgagcagctcaataagcttgtcaacgtcctgagtgtggaagatctatctaaagaacctcaggttgaaagagagctgatgcttataaaactaaatgttgaacctgatcagcgtcctgaggtcatggttttagttgatattttcagagcaaaagttgttgatatatctgagaaaacacttaccatggagggtgatgtttatcctgtggaatcttacgagagcttatcagtgaaccatgtacttgatgctcattggggtgttctggatgatgatgatgcgactggacttcgctcgcatactctctccatccttgtgaatgactgtcctggtgtcctcaacattgtaacaggagtctttgctcgcaggggctacaatatacagagccttgctgttggcccagctgagaaggaaggcatttcgcggattacaacagttgttcctggtactgttgaatccattgagaagttagttcagcagctttacaagcttattgatgtgcacgaagttcatgacattacccactcaccttttgctgaaagggaacttatgcttattaaggtttctgtcaacactgctgctcggaaggaaatcctagatattgctgaaatcttccgagcaaaacctgttgatgtttctgaccacacagtaacgcttcagcttactggagatcttgacaagatggttgcactacaaaggttattggagccatatggcatctgtgaggtcgccagaactggacgagtagcactggtccgcgaatcgaaggtggactccaagtacctccgcggctactctcttccactgtag

SEQ ID NO: 39299 - DNA, 771 bp, Zea mays
  Peptide Sequence Number=SeqID_81078
gtggaagatctatctaaagaacctcaggttgaaagagagctgatgcttataaaactaaatgttgaacctgatcagcgtcctgaggtcatggttttagttgatattttcagagcaaaagttgttgatatatctgagaaaacacttaccatggagggtgatgtttatcctgtggaatcttacgagagcttatcagtgaaccatgtacttgatgctcattggggtgttctggatgatgatgatgcgactggacttcgctcgcatactctctccatccttgtgaatgactgtcctggtgtcctcaacattgtaacaggagtctttgctcgcaggggctacaatatacagagccttgctgttggcccagctgagaaggaaggcatttcgcggattacaacagttgttcctggtactgttgaatccattgagaagttagttcagcagctttacaagcttattgatgtgcacgaagttcatgacattacccactcaccttttgctgaaagggaacttatgcttattaaggtttctgtcaacactgctgctcggaaggaaatcctagatattgctgaaatcttccgagcaaaacctgttgatgtttctgaccacacagtaacgcttcagcttactggagatcttgacaagatggttgcactacaaaggttattggagccatatggcatctgtgaggtcgccagaactggacgagtagcactggtccgcgaatcgaaggtggactccaagtacctccgcggctactctcttccactgtag

SEQ ID NO: 39300 - DNA, 630 bp, Zea mays
  Peptide Sequence Number=SeqID_81079
atggctcgtgacttgagggtgtttccttacggacggaatattgttgttgttgtgtcagcagtgatgaacaaggaccgtcaagatgctgcgcagaagcgccgagcggtcgtcaggatggtcgatcccgtgcgcgaggcgaagagggcgcgggggagcgcggaggctgcagcctccggcagtagcaagccggtgccggctgcgaaaccggctgcgcccggagccagcaaggcgtcgacgggcgagaaggctacagccgctggcggaaccaagcctccccaggcggaccttcgcccgcgaagctgccttcgccggggaagcgtgttgctgacttcggcacgaatatcagtgtcgaggattatctggttggtaagtattttttttgaccggaggcatgttgcagggtcgggcaagggacaattggttgttgtcccgccttcggtggcagccacctcgccatcggtggtggtaaaggcgaagggggccacgcaggacccgtgggccgccttttgcgcgagcggcgagattctgacagccgctgccgctaaggacgtggcgggcaccatgtcccagcagctgagggaagtgtctcagcagctgtcgcagcagctgacgcaacagcgaagcaagtaa

SEQ ID NO: 39301 - DNA, 1437 bp, Zea mays
  Peptide Sequence Number=SeqID_81080
atggctcgtgacttgagggtgtttccttacggacggaatattgttgttgttgtgtcagcagtgatgaacaaggaccgtcaagatgctgcgcagaagcgccgagcggtcgtcaggatggtcgatcccgtgcgcgaggcgaagagggcgcgggggagcgcggaggctgcagcctccggcagtagcaagccggtgccggctgcgaaaccggctgcgcccggagccagcaaggcgtcgacgggcgagaaggctacagccgctggcggaaccaagcctccccaggcggaccttcgcccgcgaagctgccttcgccggggaagcgtgttgctgacttcggcacgaatatcagtgtcgaggattatctggttggtaagtattttttttgaccggaggcatgttgcagggtcgggcaagggacaattggttgttgtcccgccttcggtggcagccacctcgccatcggtggtggtaaaggcgaagggggccacgcaggacccgtgggccgccttttgcgcgagcggcgagattctgacagccgctgccgctaaggacgtggcgggcaccatgtcccagcagctgagggaagtgtctcagcagctgtcgcagcagctgacgcaacagctgaagcaacatgcggatgctgtccgggataagtcggctgcggaaagcaaaaaccgcaggctggcggagaaggtggccaccctggaggccgagaagacggacctccggcgccggctggcgaaggagaggagggaggctaaccaggccgtcgctgaagcacaggctgcgcaagcggaggctaaggtggcgctggcgaagggtagcctcgccagccaacgcgtcgaggagtgggaggcgaggttcaacaccctgcgcagtcgcgtggacaaggccgagacctcagaggagctggtggtgctctcgactattgtgcagggcttcatgtcctacgcctcccttgtcacatgcgagggggccatgaatgcgttgtcccgcgaggggtgcaaacactatgaggtcttcgaccaatcagatgaaaactttgagcatgaaatttttaaggccgaaaaccctgtggtaaagcagtccacgggggcactcttcgatcggatgtggggtcctcatggccgggaggcggttagggagcagtctgaccgggcgagagagcagatggcgcgtgccgaggatgtcgaagaccttggagatctaaatggcgcgtggcccgaggctgaggtcaacccagtgctgcccgaggctgaggtcaacctggcactgccctcggaagtcggtgaaggctcctccgctacacctgtgtctactgtgtccggtgaaggctctttgccagcccctgcgccgacgacggaggaccccccgaaggcggtggcggagccggcagctgaggatcccatggcggcggccgggccttcgcaggtggcttag

SEQ ID NO: 39302 - DNA, 402 bp, Zea mays
  Peptide Sequence Number=SeqID_81081
atggacaaaaatcagaacttagcctatgctccatacattatggctctcattaaagccaagaccagatttgaggggccctgtgaaataattcacacatcttttaggcccttcaagaatgagattgggttcctcaccaggcctctcactcccttcctagatgatgaggaagaagctggttatgatgcaggagacgctcctgaagctgatgctgagcagatgcctcctcctccacctcctcctcagcctcagcagtactggcagccttgtccaggctattttgacccgtactttcagaacatgcagcaagggcttcagacccacatggatagccgcttccagggaatgatgacccatatggaccagcgcatggatgctatgcaatctcgctttgatgataactag

SEQ ID NO: 39303 - DNA, 297 bp, Zea mays
  Peptide Sequence Number=SeqID_81082
atgcagcaagggctccagacccatatggatggccgcttccagggaatgatgacccatatggaccagcgcatggatgccatgcaatctcaatttgatgataacttggatgcgatcaactctgagctttctcaatttcgcagtcacatccaagaccatgtcacagatcccatcatgaccagactaaacaacatgcatcagagttttcaggacaatatgggggctctttccagtcagtttgacaatctatctaccaatgaaagcattcaagatataagccagaggcagcagcagctctag

SEQ ID NO: 39304 - DNA, 618 bp, Zea mays
  Peptide Sequence Number=SeqID_81083
atggggaagcctgtcccatcactcctcatgctcctcctcagccgaggcagggggcatggatcaagcagtctcattagatgtgagaagcagacgattcgaatcgagtttttatccttgcaagtgaccgcacttgtacccaccacaaccggaatgggagaccacgtctcaggtcgcgtgaggggatatgtctgtgggcaggttcactcagtacccgcggaaaggaaaagggcggcgcggcttaccggcggcgagagaggtccggcgaggggcggggttggcttcgggaggtcgtggcggtcacagcgaggctatgtgcgcaaggaatcaaagaatgggacagagatttacccggtctacgttcaccagcggtcgggtgaagtccagcaaccgtggactggcttctccggcgaagcaaagtccgattccttgctcgaggagcttcaccgaggcatgcacggtctcttccgagggtcgggcgtggatgggaagggctctgctggccggtctacggtggcaggggctcgggtggccgcgggcacgccgtttgcagggcaaacgccggtggtctctggctccggagaggtcgagcatgcgcggaggagtacggtcgacgcctaa

SEQ ID NO: 39305 - DNA, 723 bp, Zea mays
  Peptide Sequence Number=SeqID_81084
atggggactcacatacaagagatagccctaggtgcccggaggaggccctgcgcccggatttttgccaaagattcgcacgcttgcggtctcgacgagctgttgaacatgggcagaagaacacttccacgtgttcgacgcgctctgagcgcgccacagcacgccccgcgccccgacccccgcgcgccccgcgcccgcgtcgagccgtgccccgtgtcccctgctcgcgccccgcgccctataaagccgcctttaggcgtcgaccgtactcctccgcgcatgctcgacctctccggagccagagaccaccggcgtttgccctgcaaacggcgtgcccgcggccacccgagcccctgccaccgtagaccggccagcagagcccttcccatccacgcccgaccctcggaagagaccgtgcatgcctcggtgaagctcctcgagcaaggaatcggactttgcttcgccggagaagccagtccacggttgctggacttcacccgaccgctggtgaacgtagaccggcatacatattcttattcattgcattcgatagattgcaacctcgctgacggagagtacgtcctcgtgccggagcaaggagttgctcaagaggtagcctcggatccagcaccagagcctacaccagaggatctgcctgccccagctttggaaggcaagccccggtttatgcataacccgttctatatgttattttactgcacttaa

SEQ ID NO: 39306 - DNA, 222 bp, Zea mays
  Peptide Sequence Number=SeqID_81085
atgggggtatggacgatgttcatgtccttcacctatgacgtcatggagagtcacaggaacaggaggcctgacgaagctgaaacaaccaacaatcttactctccagtaccaccgtgtcctcatggatgatgagcagccggcaacctgggccttggatactcatgtcacccccggcgacgacaaatcttctctagcgttgtcttcgatggagcatcgcaactag

SEQ ID NO: 39307 - DNA, 681 bp, Zea mays
  Peptide Sequence Number=SeqID_81086
atgactctgggtacgtccgatacatggccgaggctcgggctacgctccagaggtaccctaggacatttccgagaccagcaggagcgattttgtaacagaatcccatcagagggaggcatcgagccctcggaccctatcgaacgggaccgggtccggcagatcacctgcagggtgaggctaacagcagctaagtccaacctcaggcgcaacaggaagctccgcctcgcccgaccttgggcctcggcctcaggaggaagtctccgcctcgcccgaccccagggctcggcccccgcctcggcctcggaaggtggtctctacctcgcccgaccccagggctcggcctcaacctcgacctcggaaggtggtctccgcctcgcccgaccccagggcccggcctcaacctcgacctcgggaggaatcgcgtcctcgcccgacctcggcctcaggaggagtctccgcctcgcccgaccttgggctcggaccgaccacgccgcaggggtcatggagagtcacaggaacaggaggcctgaggaagctgaaacaaccaacaatcttactctccagtaccaccgtgtcctcatggatgatgagcagtcggcaacctgggccttggatactcatgtcacccccggcaacgacgaatcttctctagcgttgtcttcgatggagcatcgcaactag

SEQ ID NO: 39308 - DNA, 411 bp, Zea mays
  Peptide Sequence Number=SeqID_81087
atggccctagctacaactgcaaatagtacaagggacagcagtagagaaaacaaatgcggtgagaatgagaatcaaggattgtttgatttctcttgtgggattttggtggtgtcgatgctggagagtgaattcgaggaacgatgggccaatggagaaatacctggatggggaaataaaggtgcagaaaaaggctttatctgctcaaggtacttgaatgctatacagacaaatgcacaccatcttattaggtatctagctactacagttgttgtcaacaaaaggagaaggaatatgcttaaagagttgattaagaaactcatagagtgtgagcagggtgttttggacaaagaaagcttgtaccttaaaacaggaggatacaagaagctggagtggttgtctgaaggcttttga

SEQ ID NO: 39309 - DNA, 765 bp, Zea mays
  Peptide Sequence Number=SeqID_81088
atggcgtttgggccaaagttccttatccccttcacgccggccgtccttgttcagccatggtcacatggtggtggaacacctagccttgaccagcctgaacgactggcacacagcacagggaacaacacgccgtgcacgcacgccccgcatgaggggaaagaaccgattcagatcggtcctgaccagattgaagctctgtatcagtatgccaaatttcagtttgagtgtggtaactactcaggggctgctgattacctttaccagtatggtgctttgtgcacaaacagtgagcgaaatgtgagtgccctctggggaaagctggcagcagaaatcctaatgcaaaactgggacctagctttggaggaactcaaccgcttgaaggaaataattgattcaaaggttctaacttcaatgttttgttttgtgttctttgttctttgtgtacactatatcaccaacccatgttccttcctgatatttgggcagaacttctcatcacctctgaatcagctccagaataggatatggctgatgcattgggctctgttcatcttctttaaccatatcaggtacttgaatgctatacagacaaatgcacaccatcttattaggtatctagctactgcagttgttgtcaacaaaaggagaaggaatatgcttaaagagttgattaaggtcattcaacaggagcaccatacctacaaggatcccataactgaatttctggaatgcttatatgttaactatgtagttgtgggcttttga

SEQ ID NO: 39310 - DNA, 840 bp, Zea mays
  Peptide Sequence Number=SeqID_81089
atgacagcggcgtggaggttcgccagaccgatggtcgggaccccctccgcgggatccggatctccgatgcaccggctggaggtccccagcccgccggtgtggctcccaggcgccaatcccgccatggcccccagccccttggacaagggcaaaggggctacaagtagtgcctccgccccaggtagcttcggggggtcggaggaggagaggcgacgcaggctgcgtcacactgatggtcgttcgttttggagccccccagaagcgccagaggactgtgggtggggccgaggaggccagctctcaggcccacggcgcacagaggcgcgtcagtccttcggtcccgccgccaccaccaccatctggggggcttcttcctccgctgctcccaaggccacgcctcctccgccagataccaggcccaccgacgggtctggctctcagcagcaggaatctgctgagggtggtgccagtgatccacccctagttgctgccaaaacagcgccagtggcttcccatgccccagccggggatccggcggcagcggcgccagcgtcaagcggcgtcgtagtggcggatgtcacacccggtttgaaggcaaaccgaatgcgaactatgtacgtgccaggatcagaactcacggccgtccgatctaagctggacgacggaaatttggcggccggcttctgtcttcccctccggctagcagaggcggcgacgcccgttcccgcaacggagtactcgccggagacgaggggcgcgggggctctgcgggtcccttggggcgacctggatggccgaggaggttggggagggcgcggggaaccttccggtggggactag

SEQ ID NO: 39311 - DNA, 3408 bp, Zea mays
  Peptide Sequence Number=SeqID_81090
atggggaaagggggtatttcgaaaaaggacccttcccagcgaaggaaaagggccccgagccctcctactaatcaggggggttcgaagactggcccctcagaagggttcgacagccgccccagagcatgcagagtcagggatgaccctgggtacgtccgttacatggccgaggctcgggctacgctcccgaggagttcggcctcgggcgcaacaaggagctccgcctcgcccgaccccaagcctcggcctcggcctcagccccagcctcggaagaagatctccgcctcgcccgagcccagcctcggcctcaagagaagcctccgcctcgcccgagcccagcctcggcctcaggagaaggctcaaggcacttctccgacagccacgttagctcgtgtacagggctcaaggcgcttctccgacggccacgctcagacagcggcagggggaagagcgacaccctcggtgtcgttctcaccctcggcagaatctggcccggccccaggcggcgacacgggcggaaggacctccacctcgaaggaggaagccagcgccgcacttggaccctcgacagccgcgtcaagcctctggacctcggctaaggcagcctcctcatcgtcggatgagaagctgcacgcgatgccccagcaagcagtattagttgggttgacggcgggcatggtggcggcggaggggaaggcagctgggaacaagacgatgatgcagaagcagcaggcgagcagctgctgctcggaccgtgaccaggacatggcggacctggagctggcgcttgaggcggttgttccggtgagcgtgcagcggcaggactcgctgtacagggacgcgacgagggcgggcggcggcgggcagcagcagcacgaagggtgggctcggactctgaggctggccttccagtgcgtgggcgtcctctacggcgacatcgggacgtcgccgctgtacgtctactcgagcaccttcgccggcggcatccgggacaccgacgacctcctgggcgtgctctccctcatcatctacagcttcctcctcttcaccatcatcaagtacgtctacatcgcgctcagagcaaacgacgacggggacggtatgtatgtgctgctgtcgtcgatccatccatatatggcggatgcatcatctcattctcatctgaatgtgctggcatatggcaacttaggcggcacgttggcgctctactcgctcatctctcgccacgccaaggtgagcctggtgcccaaccaccagcccgaggacgagctgcagacgacggacgccgccgccgccgtgctgggcaagcacgggagcgtgcggcgccggaccgtgcagctggcggcgtcgcacgggcgggagcagcgggcggtgtgggtgaaggagctgctagagacgagcaagcccgtgcgcatctccctcttcttcctgaccatcgtggccaccgccatggtcatcagcgacgcctgcctcacgcccgccatctccgtcctctccgccgtaggggggctcaaggagaaagcgccaaacctcaccacagcgcttcggcacccacaaggtgggctacctgttcgcccccgtctcctcctgtggctgctcctcatcggcggcgtgggcgtgtacaacctgctcaggcacgacgtcaccgtcctccgcgccttcaaccccaagtacatcctggactacttccggcgcaacggcagggacgcctgggtctccctcggcggcgtcctcctctgcttcaccggcaccgaggcgctgttcgccgacctcggctacttcagcatccgctccatccagctcagcttcggcttcggcctcgtccccgccgtgctgctcgcctacatcggccaggccgccttcctccgccggtacccggagcaggtgtccaacgccttctaccagtccacgcccgagtccatcttctggcccaccttcgtgctggcgctggcggcgtcggtcatcggcagccaggccatgatctcctgcgccttcgccaccatctcccactcgcaggcgctgggctgcttcccgagggtcaaggtgctccacacgtcgcgccagtaccggggccagctctacatcccggaggtgaacttgctgctcgccctcgtcgcctgcgtcgtcacgctcgcgtccaagaccacggccgtcatcgccgaggcgcacggcatctgcgtcgtcctcgtcatgctcatcaccacgctgctgctcaccctggtcatgctcctggtgtggcgcgtcaacgccgcctgcgtcgcgctcttcttcgccgtcttcgccgccgccgagtccgtctacctctcctccgtgctctaccggttcgcgcacggcgggtacatccccgtcgccatgtccgcggtgctggtggccgtcatggtgctgtggcactacgtgcacgtgaagcggtacaagtacgagctggagcgcacggtgtcgcacgagagcgtggtgcgggacctgctgccgcgctgccgcaccgtccccggcgtcggcctcttctacacggacctggtgcagggcatcccgcccgtgttcccgcacctggtggacaagatcccgtccatccacgccgtcctgctcttcgtctccgtcaagcacctgccggtgccgcacgtggacgcaacggagcgcttcctcttcaggcaggtggcatcgtcgtcggagtcggacacagctgcaggcccacgggtgttccggtgcgtggcgcgctacggctaccgggacctgctggaggaggccagtgacttcgcgggcagcctggtggagcgcctccagtactacatccgcgacgtcaacctctacggcgtggagcaccagcagccgggcgccaaggtgagctacccgagctcgcgctgcgacagcatgatattgatggcgcggcagaggtcgtcggtcatgatgctgcggcagtcgtcggcggcatcctactactcgtcgtacgcagcggcagcggagacccagcagctgcagctggcgagggccaggtccacgtccggggcggggggcatcctcctccactcggcgtcggagagggccgagcagctggcccgcgccaggtccacgggcatcttcgcggaggagatgctgacgccggcggagtcgttctcggagctgtcgaggatggggagcatcggcggcggaggaatgcaggcggtgaagatcagcctggaggagatggcgcggatcgaggaggagcagcggtttatcgagcgggagatggaaaagggggtggtgtacatcctcggggagagcgaggtggtggcgcggccccactcgtcgctgctcaagaagctgctcgtcaactacgcctacgccttcctgcggaacaactgccggcagggggagaagatgctcgccatccccaagtcgcagctgctcaaggtcggcatgtcctacgagatctga

SEQ ID NO: 39312 - DNA, 645 bp, Zea mays
  Peptide Sequence Number=SeqID_81091
atggaggcccgagcccacatgtcatgtaaccggcgcaacggttactgcgtgcaaggaaaccgcaccgccactcgcgccaatgccgtgtcttctcgactgcggaaccagtaccacgacccgagggcaagcgacaccttcggcaggagaagcgggtgccgtttcacctccgtcattatgaccgtgtcaaaaaaggctggcccctcggaagggttcgacagccgccccagagcatgcagagtcagggatgaccctgtgtacgtcctttacatggccgaggctcgggctacgctcccgagtcggcaaggtcgaagtgaccgcagtcacttcgcccctttactgaccgatctaacaggaaaacagcgttgttcaccccgctccggctaccgtgccaaccaccaggataaaactgagtcacgatctcccatgagtctgacctcaggccccggcctcagcctcagcctcagaagaagatctctgcctcgcccgaccccaggcctcggcctcagcctcggcctcgggaggagtcacaacctcgcccgagcccagcctcggcctcaggagaaggctcaaggtgcttcttcgatggccacgttagctcgtgtacagggctcaaggcgcctctccggcagccatgatagcacatag

SEQ ID NO: 39313 - DNA, 414 bp, Zea mays
  Peptide Sequence Number=SeqID_81092
atggggcgacggtgggcccactgctcgagttcggacccggaaaaaactgctctgcgtgctggagcccagggaaaggggatcgctgtgcagggccggacggccatggggatcgcagagagggaggaggtcgggtgggagatggaggcactggttggaggagcacggcgtcacgccatgggagagagggcgacgtccatggaagaggaggagcagagctccttgctgctttgctgtggagaccagggaggaagaaaaggtgcgccggctgctcgcctgcagggagcgagcgccagggaggagggcgccatggtgaggagtggagctcgagcgccggccatggaggagagtagggcgtcgacggccatgggaggagctcctgcgcgcagccgtgaggagaagggctccctgccctag

SEQ ID NO: 39314 - DNA, 312 bp, Zea mays
  Peptide Sequence Number=SeqID_81093
atggggatcgcagagagggaggaggtcgggtgggagatggaggcactggttggaggagcacggcgtcacgccatgggagagagggcgacatccatggaagaggaggagcagagctccttgctgctttgctgtggagaccagggaggaagaaaaggtgcgccggctgctcgcctgcagggagcgagcgccagggaggagggcgccatggtgaggagtggagctcgagcgtcggccatggaggagagtagggcgtcggcggccatgggaggagctcctgcgcgcagccgtgaggagaagggctccctgccctag

SEQ ID NO: 39315 - DNA, 414 bp, Zea mays
  Peptide Sequence Number=SeqID_81094
atggctgggagcagagggtcaaggggcactggccatagtgctccctgcgcgcaggggaacagcaggggaacaaagaaatggagcagggagggcgccgaggcagaggggaaactgcagggggtggcgccatggggaggagtggagctcgagcgccggccatggaggagagtagggcgtcggcggccatgggaggagctcctgccggtaaccccacacatgcagcgaagacagcgaccaaggggaaggggcgcctgcaccaggggacttggccatggagaagagcagggcgccggcgtgctcccaaggagctcggccatggctgcatccgctgggcgccatggaaaagcagggggcatgggcgccatggctgctggtggctctctgctgctgccggccatggagagaaaggagtag

SEQ ID NO: 39316 - DNA, 1065 bp, Zea mays
  Peptide Sequence Number=SeqID_81095
atggagaagagcagggcgccggcgtgctcccaaggagctcggccatggctgcatctgctggggcgccatggaaaagcagggggcatgggcgccatggctgggaggaaactcctgcgcgcaaccgtgaggaagacaggaacagggagctcgcagggaggagcggcgaccggaaggggagctcggctggcgtccagcttggaggaaggagctcgccgcaagggaaggctggcggccatgggaggcccctgcgcgccggcgtgctgctgccgtgaagaagagaggcgcctgctgctgcgcgaaaataatgtcgatgcggaatcgaacacggagcgtcgcggtctcaccggggtgaacgatgacgacgatgggctgtccccaaacaccaacgcgacggcgtgggtcgggactgcgcagatcggatcaatgcaagcgacaccgacgggatctcatggctgctgctcgctgcgtcatttcgacgagcacgccgagggcgcgacgcagagggaacccatgtggctgcgcgaactgccgtcgcggctgctgcgcgaggtcgacggcgcactgctcgcctgggcgcgcgggggaacagagatgggagcagagagctcgcggcttgccctgggcgcctgcacttggggattttctgctggcgaggtgcgcctgggagaaggagcggctggagcttggtggcgtcggcccatggagagaaggggaggacacgccgtggatgggggagagggacatcgcgccatggacctgatggggaaggggcgcctgcaccagggggcttggccatggagaagagcagggcgccggcgtgctcccaaggagctcggccatggctgcatctgctgggcgccatggaaaagcagggggcatgggtgccatggctgggaggaaactcctgcgcgcagccgtgaggaagacaggaacagggagctcgcagggaggagcggtgaccggaaggggagctcggctggtgtccagcttggaggaaggagctcaccgcaagggaaggctggcggccatgggaggcccctgcgcgccggcgtgctgctgccgtga

SEQ ID NO: 39317 - DNA, 306 bp, Zea mays
  Peptide Sequence Number=SeqID_81096
atggcggcggccaaggcgccgagcggcaaggggaaaggggagggggggaatggggaagggaggagagggggagggggctcaccggcgacggggacggggcggggcggggcggccgagcggggcgaccgatcggcgacggggaggggcggtgctagggcagggggtaggggcggcggcggcttaggcaatcaaaagaaatgcaaggttcggcatggtgcatcaaacaacataaagtatttagggtttttcttacacgggaaatccaaaccgaatcccgctagaactttggaaaaggtcaaggtgtag

SEQ ID NO: 39318 - DNA, 522 bp, Zea mays
  Peptide Sequence Number=SeqID_81097
atgaagctcaccctcagcgaggttagagaaataatcaactgcaattatggccgtggatcagcatccggccgatacggcgtgatcctgccctctgccgtccagaacatgggcaccaacgtcgaaaggaataataaggtggtcaatcgtacgctcaagaaaagaggatgtggagtcttcctggcgacgcggatcgacggcaggttgcgaagggtttcaggaggcggcactgcaaacagggggcggcagccactacatagcaatcaaaagaaatgcaaggttcggcatggtgcatcaaacaacataaagtacttagggttttcttacacgggaaatccaaaccgaatcccgctagaactttggaaaaggtcaaggtttagcgaggggaaaaagaaaaagaaaagattcttgaaagggaaatgtgcccttgggccatttctaagtattttggtgattgagtgccaacacaaagtgcttaaatgtgaatttatgctcatggatggacaaagtgcaaatcaagagtaa

SEQ ID NO: 39319 - DNA, 210 bp, Zea mays
  Peptide Sequence Number=SeqID_81098
atggaacgcggctccgcggcggcgcagtggttccggggagaaattctccgcttcctggaccccgatcatgttgatcctagggcaatagatcttgccatgagaatcgtcgaaaggatgttcctcaaaatgaaggaagatgaggcgaagaacgagattgaagaagaagaaaatgatcgatggagaccaaacgacgaatccacctcttcataa

SEQ ID NO: 39320 - DNA, 507 bp, Zea mays
  Peptide Sequence Number=SeqID_81099
atggattcaggcgcagagacgaacgctcacgatggaacgcggctccgcggcggcgcagtggttccggggagaaattctccgcttcctggaccccgatcgtacgcgcgacaaccacaatcacgcttcgcgatcatcacgagacttcccccgaccaccccgcgcgatggtggcggcgccaggcacgggatagctgcagacgagggggagggtcacggcgacggcggcttatatacccgtggtgaggcgcaacggccccgaccgaagcgggcgggacgaaccgcgttggtcacgcagggcagcggcgcaagaatcgcggacggttggaggaggatgagtccgactagatggtcccaggcgcggagcgatttccttggctctctctcactccgtgctctcgagttcgtgctatcactgcatggcggcggtggtttcgcgctgcagatgggagctccgtaccacgcgcgcaggcaaggacccggcggcagcgtgaattttggtttctgttga

SEQ ID NO: 39321 - DNA, 507 bp, Zea mays
  Peptide Sequence Number=SeqID_81100
atggattcaggcgcagagacgaacgctcacgatggaacgcggctccgcggcggcgcagtggttccggggagaaattctccgcttcctggaccccgatcgtacgcgcggcaaccacaatcacgcttcgcgatcatcacgagacttcccccgaccaccccgcgcgatggtggcggcgccaggcacgggatagctgcagacgagggggagggtcacggcgacggcggcttatatacccgtggtgaggcgcaacggccccgaccgaagcgggcgggacgaaccgcgttggtcacgcagggcagcggtgcaagaatcgcggacggttggaggaggatgagtccgactagatggtcccaggcgcggagcgatttccttggctctctctcactccgtgctctcgagttcgtgctatcactgcatggcggcggtggtttcgcgctgcagatgggagctccgtaccacgcgcgcaggcaaggacccggcggcagcgtgaattttggtttctgttga

SEQ ID NO: 39322 - DNA, 516 bp, Zea mays
  Peptide Sequence Number=SeqID_81101
atgggcaacggcgtaggcgttctgtatttatcccaagcgaggaagatccagaatccgacgatcacggcgttcaaccgcggattccgcacacgattgccacagttcgatccgaacctcacggacgtgagcgagagacgagagatttgcggcgtcagttggaggaggatgagtccgactaggtggtcccaggcgcggagcgatttcctcggctctctctcactccgtgctctcgagttcgtgctatcactgcatggcggcggtggtttcgcgcggcagatgggagcttcgtactacccggcgtctgatacggcacgaagcgcccgagatccctggattcgtttgatacgcagagtccgcgtccgctctggccgcgaggtagaagacccagccgcatggtgggcccacccgctggctgtagagaggttgaaaggagggtcccagaagtcagagcggggcacaggagagccaagcgcgcgatgcagagcgagggcgcggagcggctgtaggaattcgtga

SEQ ID NO: 39323 - DNA, 933 bp, Zea mays
  Peptide Sequence Number=SeqID_81102
atgaataccagcgccgggtcactgcctagcgggccatcttggtcagctccatacccatcaactgaaccaccgaaatccggggtgactgcatccgagtgggccccctacctcatccagatccacctgcgatcacgaaattactacctccgccaggagcttcaactcgtcaccgggatggtgctcgtggcctcgccgaactcgattagcatgcgtcacactgggaatttctcgacgaagtcgcgggtcgccgtggacccacacttagctatgggcagggttctgtgctacctaatcggtggcagcgtcaaggtcatccagcaggcggcgcgcctgctgagtctgctggcaaacagtgtgcccatgccgagcggcgcgctatactcatcttctcttccggcgggtgcaatccgccacccggccggggagatttcctccccgacatttggcgcgccagcagcacacgccagcgcaggcgtcccagactccgtcgagggcagcgcctacggtgctgtctgcggccagagagttgctatgccaccccctagctccacggcatcaccgggggccatgaagcagtggcgcgacgatgtcgatcggctgctcggcatggcgcattctacttcgaccaggtcgaggccttggtcatcccggcgccaacacgaggcgacgacgtctgtgcgctcgccctccataaggggtgcacagaccgacgacctccaggcggagctcaaccgtaggcgtacggaagaatacgcccgggtctctttggaaagggcgcgtgagcgccgacagaacattgagggtcgcaacctcgaccgagatttcgctgcggaggcaccgcagacaccagtgggcgcctggtcccaaacgggtgtccccttggccggcatgggctgcgccgccctcgcagaccatcttcgcatggcgtcctag

SEQ ID NO: 39324 - DNA, 933 bp, Zea mays
  Peptide Sequence Number=SeqID_81103
atgaataccagcgccgggtcactgcctagcgggccatcttggtcagctccatacccatcaactgaaccaccgaaatccggggtgactgcatccgagtgggccccctacctcatccagatccacctgcgatcacgaaattactacctccgccaggagcttcaactcgtcaccgggatggtgctcgtggcctcgccggactcgattagcatgcgtcacactgggaatttctcgacgaagtcgcgggtcgccgtggacccacacttagctatgggcagggttctgtgctacctaatcggtggcagcgtcaaggtcatccagcaggcggcgcgcctgctgagtctgctggcaaacagtgtgcccatgccgagcggcgcgctatactcatcttctcttccggcgggtgcaatccgccacccggccggggagatttcctccccgacatttggcgcgccagcagcacacgccagcgcaggcgtcccagactccgtcgagggcagcgcctacggtgctgtctgcggccagagagttgctatgccaccccctagctccacggcatcaccgggggccatgaagcagtggcgcgacgatgtcgatcggctgctcggcatggcgcattctacttcgaccaggtcgaggccttggtcatcccggcgccaacacgaggcgacgacgtctgtgcgctcgccctccataaggggtgcacagaccgacgacctccaggcggagctcaaccgtaggcgtacggaagaatacgcccgggtctctttggaaagggcgcgtgagcgccgacagaacattgagggtcgcaacctcgaccgagatttcgctgcggaggcaccgcagacaccagtgggcgcctggtcccaaacgggtgtccccttggccggcatgggctgcgccgccctcgcagaccatcttcgcatggcgtcctag

SEQ ID NO: 39325 - DNA, 327 bp, Zea mays
  Peptide Sequence Number=SeqID_81104
atgaaggggtctagaaggacgtgggagaacctggaacagttgtggagaagatataatgcggactacactacctgggcttatttcatcgcctttgctataactcaggggcacattatggaaggtgatcctaaacttattgatgattctgagttttatcaacaacttctcaaggagttccttgagtcatgtgatagaggggcatcagatcatagtgttgacaccaatactcgagaaatactagaaatccctgtactgtggtttttcttcaacctgctttggtggcagggtgccattttaggagcatatgaggtggctgaagttttttga

SEQ ID NO: 39326 - DNA, 705 bp, Zea mays
  Peptide Sequence Number=SeqID_81105
atggaatcccaaacagaggcactcggccagttagcaactgatgatttattagaagaaaagttagcactgcttgagacttcatctgttgatgatgatctttcacaactgaaaaaggaattgtctggaagctctttggacatgggagaacctggaacagctgtggagaatgctactatttgtacaaatagaagatataatgcggactacactacctgggcttatttcatcgcctttgctataactcaggggcacattatggaagatcatagtgttgacaccaatactcgagaaatactagaaatccctgtactgtggtttttcttcaacctgctttggtggcagggtgccattttaggagcatatgagattgtgagtaggattaagaaagagtgccctaatgtaccccttgtgttgtatataaatggaaatggaggtttgcttgagcgcatgaagaacacaggagttgatgttattgggcttgactggacagtggacatgactgatggaaggaggcgccttggtaatggcattagtgtacaagggaatgttgatccagcatttttgttctcaccattaccagtactgactgatgaaattcataggttagtaaaggctcaaagatttccatttaatttatgttattttgtgtttttgcttaatgctcatatgcaattcattaatgagatcacctcaagtgctgcttga

SEQ ID NO: 39327 - DNA, 807 bp, Zea mays
  Peptide Sequence Number=SeqID_81106
atggggtcgcgtcccttggtagacgaggccttgacttcaaccgcgctttatcagtcgtgtatggtttgttctgaagatgttttccagccaggccccgtcttcctctacgacctcccttcgtctcgagaaccagaggtccgagctccgcaggctgcaagccccttcttcctccacgccctcccctcactggcgcgggggagcaccgcctcagcccggccctgctctccgccctccgcttccgcccgccgcgcctccccgggtgcgctcgtcctggcctccgagggcaagttcttcagcaacggctacgacctcgtgtgggcgcgcgcggggccggccccggcgctggggcaccgcctcttcgcgatacgcgccgcgttccgcggcctcgtcgccgacctgctcgcgctccccgtgccaacggtcacgaccgtcacgggccacgccgcgggcgccggctgcgcgctggcgcacgacgccgtccccatgcgcgcctcccgcgggttctccctactggcgcgggcgacgacgtggccggcgggagaaccggcgcggtgggcgccctgctgcggcggtggcaacccaggacctgctggaccgcatggggactggaggcagttcgaccgctacgaggagtacaggtacatcgtttccatcggcccgctggacttcatctacacgacgctgcagctcctccggcacggcgtccgcctcactggcggccaggacctggagcccaagaccggcctcctcgtcgacttcaccggagaccagacttgtatcgcattgccatacctcattgggggttaa

SEQ ID NO: 39328 - DNA, 297 bp, Zea mays
  Peptide Sequence Number=SeqID_81107
atgccgcgtcttctcgactgtggaaccagtgccgtgactcgaggcagccctgcgtgtgacccaacagtgccaattgagtgcaacgatcacgggtcagtcagccgcggggagaggcgctacggtcgatatgaccagaggcggaccgacagggtacccccaatacttctaaacgcggccgaaaaacatcttcagaacaaaccatacacggctgataaagcgcagttcaagtcaaggccacatctaccgagggacgcgacctcatccgagcccggcctcggcctcgggcggggacagtag

SEQ ID NO: 39329 - DNA, 1137 bp, Zea mays
  Peptide Sequence Number=SeqID_81108
atgctggaccgccggatgcgacgaagccgaaagggtgcacaactgtggtgtggttgcatgcttcttgcgtggcggtccgccctttcgttcgctggtttcgacgaggatgagggaatgcctataacccgcggggcggttacatgcttcgcgtgcggcgggtgggaaccctggagcacgtcggtggagactttgcctgtgacgcttgggggtgcgagtgaggagatcgggtgcacctgtgttgccctcttcttgctgctgttggaggggcgcgacctcatgggggatgatgaccgtaggcctcgtggtggggaagagcgagccgggctgtggcctccccctgccctcagcttcaaggatgttcatcatccgtgctggggaggagggtgcgccgagtcggggcccgcctccgcttgggcagcgggccgctccttccctcagtgttggggggagaagggcgttcgccgtccgtggcgctgtcagctgccgcgtgtctggctccctggcctgagcggctttggtgctgcttccggtgccgcctcctaccgctggggcgaagcgtggctgcccgtccgccgcacaggtgtcggtcgcgccgtgcgtgggccggccacgcctaggtctttcccgcgccgtcggctgcaccggggggtcgcatatctcgtcgtacgccgcgagggcggcgttcgtgttctgggacggtctcgccctcacccttgtggtgaggacgggagtgaggacctaccggtgcgcactggggcggccgccattcgccagtgtggcgttggcgcgcaggtggccgctgtcgtcggtgctgaggtgggggacgtgggcgagggccttttcgcagtagcatttgccctgaagcaatcgctgcagctgtctagccgcccgaagcggaggtcgttgtcgctgctggtgcagtggtcgccggcgagccgcctggagtttgttatcccgcatgccttctggtcggtaaaaccgctgagggcgctgccgacgtctaagtctagataccatagttatcccaagtatgaccttcggccgctctgtgatgagctgaagccggaggcagcggtggcacggacagaggcggtgttggctcgaacagaggcttcatcggcccgggagtcgggctga

SEQ ID NO: 39330 - DNA, 714 bp, Zea mays
  Peptide Sequence Number=SeqID_81109
atggcggtgcttcggcgcggcgatgacccggcgtggcggctgcgctggcgagcgtgccaggcgcgcacgacgagcagcggcaaggcgagagcaaggcgtggctgtgcatgcgcgagcgcggcggctgcgaagcgaagaggagttgaggctatacaaatgagcgctaggcttgaacatgggtcgtgtaggtggcagttgccgagatccttgcgagggcgcgtgctgagtgggagaaaatggaggaggtggtttagagttagaggagatgaagcggctaacccccttaacaagagcattgatacacacttgatgaagatgttgccgactctgatcttgactgatttggaggagttggaggttgccaaaaggacaggtgcaagaggaaagaataacgagaaaagggaaactactctaaggccaacaaaaggcaaggggaataataagacatggagggtagggggagagaatgcaaccaaggtcaggataggtaaaacaccattctcaaatcgagatggaaaagatgatatttcaaaaggtaggcataagataacatcatggaaagatctagagattacaaaggtgctagataagcatcatggtaaagatcaagggatgacaagggttaaggtgataacagacaaacacaaccaaggatgtattttagacaaaatttgtgaggcatcaaagaaggggaagcaatcaatggtgaagtag

SEQ ID NO: 39331 - DNA, 375 bp, Zea mays
  Peptide Sequence Number=SeqID_81110
atggggcgagcggttccgaggggcagggatggctccagggcggctgcgggcgctagggagaaggggaggggcgttgggcgacgtgagagagagaagggaggaggcgcgcgggtgcgcgtgggcccaccagacagtggcggcggcggtaaaaccgcccgcgcgctcctgccgactggcaaggcggctgatgggggagagggggcgccgagctgggccgcgggccgcgcaagggggaagcgggcggctaacccccttaacaagagcattgatacacacttgatgaagatgcagccgactctgatcttgactgatttggaggagttggaggttgcaaaatggacaggtgcaagaggaaagaatagcgagaaaaggtaa

SEQ ID NO: 39332 - DNA, 177 bp, Zea mays
  Peptide Sequence Number=SeqID_81111
atgggcgttgatatgcacttggtgaagatgttgccgactctgatcttgactgatttggaggagttggaggttgccaaatggacaggtgcaagaggaaagaatagcgagaaaagggaaactactctaaggccaacaaaaggcaaggggaataataagacatggagggtaggggcatga

SEQ ID NO: 39333 - DNA, 444 bp, Zea mays
  Peptide Sequence Number=SeqID_81112
atggccggcccagcccaaccgcgccgagccgctgtgccgccgcaggggccgcgcccgcaggggccgcgcgcgcacgggccaggggctgggcgccgcaccgccggggcaagggtgcgggggaacgaggtgctacctctccaaaccctagaaattgaagaaaacgaagaacaagaatggagtagctcaccggggaagaagaccctcgccagagccgaagtcaaatccgtcgattaccggagattcgagggtccaatcgacgaaccgaacgcgctgcgacgaagccctcgacgagacgaacgcatagggttagcggctaacccccttaacaagagcattgatacacacttgatgaagatgttgccgactctgatcttgactgatttggaggagttggaggttgccaaaaggacaggtgcaagaggaaagaataacaagaaaaagtaa

SEQ ID NO: 39334 - DNA, 2967 bp, Zea mays
  Peptide Sequence Number=SeqID_81113
atggcgctccacaagctctgtgacgacggcgggcccccagctctcttacggaagcagggcgacgtcagcaaggactcgaccgctccaacagctgtccctccgccagggctccgtcgcacctccgacagccacgacatcacgccagcaaggaagccccgatcagacaccgaccagagacccgccctcgccttctccgccgcacgccctcgccttctccgccgcacacaggctgtggccttgttcttcgtctccggcaagggccccggaatcgaggaggcggttgtgccgcccctgcgttctcctactcgtcagagaccgagacctcgatcttctccaccgcggcggccgaacgccgagtcccctaccccgtcgcgaggtgtctcggattcagccgccctccaggcccatccatattccggaacatcagtgatgaagaacgtagaccgaccaccttccaatccaaaacagatcataatccagtctactcaggagtgcttcagcgttgacataccgcgtgctccggcggggactgttagacccgagacaaggcatgctgctgatgaggatgatgactttatgccattatccaagaagcgtaaattggacgacagccctgggaaagttttgaagaagcagaagctgaatgtcagatacaacccccaagatgtgttagtaagcatacagatattaaatgacagacagcaacaagcaattgcacgtaggggattttctagtattcttgatatgagactggacgcactcggcagcagatcacacttagcttggctgatggaaaagctcgaccacaatgacatgacaattcgagctggccctggaaaggagctgaaaattacaaaggatacggtgcacctaattttgggtttaccgaatgctgggggaggaactgcattgggcatcgatgaagctgttgttgccaacaatttgagagttgaacttgggctatcgaaagaagattttggggttacagctctacaagatcgtttgaggaaaggttctgacgatgatttaagcatcagatgctttttcttgatattgttcaataggttgttgttccctactgccagctggggaataacgaaccatgaggttcttttaaccgagcagatggatcgtttccaccagattgactggtgccagcttattttcaatgatttatgccaagctgccaagaagtggcataacaggagcgttacgaacgtttctacaaccatctatggatgttccatcgttattcttctgtattatttggatcatttgcatgactcagcggcaccccagaacaaacgtggaacaccacgaatcaaatactttgataggaatattattcaagccctgacaagagctgacaagggcaagatacgcaaaggagaagaagcatttggacattgctcgcataagaccaggaccaaaacttttgatgttcctcgtcctgacccatctggacagcactcaatttacatcgaactcccgctcatcagggatttgatatcaagcaagcttaatcagcttccatcccgccaccgcatgggtttcatagagaagctgtcacattttgatgcggaggttggtaaggcgtgtacagttattaaacagactcttcagcagattgttgagaaacaattcaatctatctgatgtttttggcgagttaattgatgaggtcctccgtgccgaggcgggtgacaacaaagatgcttatgatgtgcagaaaaccacatcaaaatcagatgatattcttccccagacagctgaaggatgtacgtgtctggcccccccaactgtacccgatatgtctactccagtttctcagctggatacgcagtttacagacacacagggtaaacatggtgacggtggcaagaacatgccgaccaatacaaacgtcactcctaaagcaacaccacacatggatcctgacgcgccgatatttgatgcgactccgcaaatcaagtctactggcggcgtacaacaagtggcagaaacagacttgcctgacagtggtccatgctttgatcagactccatctgaacatgtttatgttgaaaccgatccagctacaaacactccacaggttggccagacttctcttgattcggagatgcaaactgtgttagctctacgcgaatatttgtgtggtctgcaatctgacaccggcaggaccataatagattatggtgaatattcagcgacatgttctgacatatatgaatcttttgccgatgggaagtgtctcgacaatggattcatgcagtgtttcatccaatgtgttattcatgatgcaaaaaatcagcagacttccatgggttcgaacagtttggttcttgatgttaatgttgggtcaatactcaactttgaggaacaggaacgacacagtcgcaatcctcaaccttttgatgaatctgtacttcacacacttctagacaattcattgcctgagacagatgagttggaccaatgcaaagcgatcatggtccccatggtaagcagggggcattggacattgtatgttgtcaacaaggtcaagaagtgcattcatattttagattccaacccatatggaccaacacttggtggaactacatggaaggactatcattttgcacatttgggctcaggtggcagaaagttaccctgggctaaggttattatgagcagattaaacaaagcaatacaacatgtgcggcccagttcatgctttcccaagtttggtaacttcacaattgacttgtgccaaaattgtcctaacatggcagctggatcaaatgactgtgggttttatgtcatgggttacattctattttatcaatgcgacgaaggatctttgcggtcagacatagaagcaggcaacaccagtgagatacggtctcttgcgctgcattacatcacattccacccgaagaacaaagcattatcgctgctccaagacatccaaagattcaaggtctaa

SEQ ID NO: 39335 - DNA, 684 bp, Zea mays
  Peptide Sequence Number=SeqID_81114
atggctgaaaggtaccaactcccacagagttgcgttcctccaacgacaaggcggaaagactgcgggcgtcccccatccgggggctcggaaggtggaaagacacgatgcataagggagcgcgaagacatggtcgcctttcaagggggtcaccctccttttaaaggcgactctccctacttgcgtccccagccgtcacgggctgagtcttctccagcacgctccaaggtcctcccctacggcgcgggggctaggccccacgcatcatgcaagccggcccagggcggaagaagccaaaccgccgcggaccgggaaagggggataccccgaaaaaggatccttctctgtgaaggaaccaggctccgagcctccctactgatcagaggttcgaaggctggcccctcgaagggttcaacagccgcctcagagcgcgtgggctccacacccactactggtcagaggttcgaaggccggcccctcggaagggttcaacgaccgcctcaggctactcgggctccgcgcccactactgatcaggggttcgaaggctggccctcgaagggttcacagccgcctcagacacagagcgagggatgaccatgggtacgttcgatacataaccaaggctcgggctgcgctcccgaggtaccctaggacatttccgagaccagcgggagcgatcttgtaa

SEQ ID NO: 39336 - DNA, 813 bp, Zea mays
  Peptide Sequence Number=SeqID_81115
atgcatcgcgtctttccaccttccgagcccccggatggggggcgcccgcggcagcccgaccgcatcccctcgcggtggtcacccaaggcggtgaccaccagctcgatggtggggagaagcaagccgggctgcgacctctgccccgccctcagcttcaaggatcttcatcatccttgctggggcggagagcgaggtgagccggagctctacctcccgcacgagtcggctggccacctcttcttccagcttctgggggtggaaaccatcctccaactctgcggaggaggcgtcctccagccatgccggggaaggcgaactgttgctgcccagctaggatgcaacattccgtcctctgtcctcgctttcgtggcgaggacgggagtgaggacctaccggtgcgctttggggcggccggcgctcgctggtgcggcgctggtggacagttcgcgtcccttgagtggggacgcgaacgggagccttccagctgcagcgtccgtcctgggaccatcgctgctgctgcagaggtcgctggcgagtcgcccggagcttgtcgccccgcaggctctccggagtccctcggttcggtcggccttgctgcccgaggcttctcttgttcagttaaaggaaaacccttggtcgctctgcgatgagccggagccggaggcagcggtgtcagcatggacaaaggcagagttggctcgaaaagaagacttcgtcggccggagcctggccgggccgtccactagcgggaccgacgccggagtcaagttgccgaggccacgagccgggctggtgtcctcggaggacggctag

SEQ ID NO: 39337 - DNA, 393 bp, Zea mays
  Peptide Sequence Number=SeqID_81116
atggaccatgatagctggtatcagaaccaggttatcctcaccaccaccagccgcccatccctcaccaccaccagccgccgcgccatcagccgccgcaacgccctcccacccgccctctccaactccagatgcattcactcggctcgaagagagttttcgccgtttcgcagagcagtgggatcagttcgttgtgatgttccaccgctacaaggagaagacagagaagaaactccaagcagcggtgtggcttcagacggtagcgcgagggttcctggcacgccgccagaagtcgagatctgggtatgcagcccccctgcacggccaaagagggtcgtctccttcattcgggcacctgccttggtgctggacagacccaacataagaacgggctag

SEQ ID NO: 39338 - DNA, 1161 bp, Zea mays
  Peptide Sequence Number=SeqID_81117
atggaggcgaggattatggcggagcgggaggctagcctggcggctgatcagaggatggcggagatgttccagtacatgcagagccttggcgccgcacagggcatcgctccgccacctccattgttccctccagttgacccagctctcttccatactcctgccataacactcggcaaagaaccaagacctgggcaccggtataggttctttgccgagtgtaatgtctttgacactcggcaaagaagcacgctttgtcgagtgccggacctagcattcggcaaagaacctgacatggggaccctccctgacgggttctttaccgagtgtcccaggtggcactcggcaaagatggatcctttgtcgagtgttgccgggcagacactcggcaaagataactccgttgtcgagtgtcaccagggacactcggcaaagccaccgtctccgtcactcggcgccgtaacggctgcttttctttgccgagtgcccgagaaaaagtactcggcaaagaaggctttgccgatgcactatgcagttttgttcagcaggaaggcgtcggcttcagcggccgtcgtcgtcctcgcggtagcggtggtgacaatggcgtgccttgcggctccggtcgccgcgctggtaccgtacgggcgccctggtggcgggctgtgggacctgatgctcctcgacgacccattccgggtgctggagcagtcgccgctggcggcgtcatcggtgcccagagccagcctcgactctacgtcggcggccggggtggcgctggcacggtgcgactggaaggagacccccgatgcgcacgtcatctcggtggacgtgcctggggtgcggcgggaggacgtgaaggtggaggtggaggagaacagccgcgtcctgcgggtctcaggcgagcggcgggccgacgaagagaaggaaggcgatcggtggcatcgcgccgagcgcgcggccggacggttctggcgccggttccggatgcccgccggcgccgacgtcgaccgcgtgtccgccagattggagaacggtgtgctcaccgtcaccgtgcctaaggtggccgggcaccgcggccgggagccgcgcgtcatcagcatcgccggcggcgatatgggcggcgtggacgtggcggaggtcatggcgtccaaggctgagatgtga

SEQ ID NO: 39339 - DNA, 1059 bp, Zea mays
  Peptide Sequence Number=SeqID_81118
atggaggcgaggattatggcggagcgggaggctagcctggcggctgatcagaggatggcggagatgttccagtacatgcagagccttggcgccgcacagggcatcgctccgccacctccattgttccctccagttgacccagctctcttccatactcctgccataacactcggcaaagaaccaagacctgggcaccggtataggttctttgccgagtgtaatgtctttgacactcggcaaagaagcacgctttgtcgagtgccggacctagcattcggcaaagaacctgacatggggaccctccctgacgggttctttaccgagtgtcccaggtggcactcggcaaagatggatcctttgtcgagtgttgccgggcagacactcggcaaagataactccgttgtcgagtgtcaccagggacactcggcaaagccaccgtctccgtcactcggcgccgtaacggctgcttttctttgccgagtgcccgagaaaaagtactcggcaaagaaggctttgccgatgcactatgcagttttgttcagcaggaaggcgtcggcttcagcggccgtcgtcgtcctcgcggtagcggtggtgacaatggcgtgccttgcggctccggtcgccgcgctggtaccgtacgggcgccctggtggcgggctgtgggacctgatgctcctcgacgacccattccgggtgctggagcagtcgccgctggcggcgtcatcggtgcccagagccagcctcgactctacgtcggcggccggggtggcgctggcacggtgcgactggaaggagacccccgatgcgcacgtcatctcggtggacgtgcctggggtgcggcgggaggacgtgaaggtggaggtggaggagaacagccgcgtcctgcgggtctcaggcgagcggcgggccgacgaagagaaagaaaggcgatcggtggcatcgcgccgagcgcgcgggccggacggttctggcgccggttcccggatgcccgccggcgccgacgtcgaccgcgtgtccgccagattggagaacggtgtgctcaccgtcaccgtgcctaag

SEQ ID NO: 39340 - DNA, 342 bp, Zea mays
  Peptide Sequence Number=SeqID_81119
atgccaatgcttatgatgccatgctcaagttttagttacagtaacaccaggggtgttacataccgcttctccgcctaccacgccgcctttgcactcctctttgcctaccacgtcgtcgtcgtgctcgtcttcgtcggcctcctagtcgctgcagagcatggctccgccctcatgggcctactcgccttcctcgtctgcgcccgtgaggcccaccacggcaccatcggcaacaccaccatcccccacacccaactccacctgcgccacggagcatggcggcacggagagatggagcttgggcgcaaccacgacaacaaggtgaagctttgggtgtgcccgtga

SEQ ID NO: 39341 - DNA, 351 bp, Zea mays
  Peptide Sequence Number=SeqID_81120
atgccaatgcttatgatgccatgctcaagttttagttacagtaacaccaggggtgttacattaaaagggggcattccgagaattgaactcgggacctctcgcaccccaagcgagaatcataccgtgatggattcaacatcggaaaagatgtacctctgccagaagagtctcggtgtagtgtctccgtctgagtcgattaaggaccgtgtcaatgtaggcctgctgaccgaggaccctttaactggtcacatgcctcgtcatgggatccactttagtaagcatttctgcaaaacagagtctttgattattgaaaagccttaccttgactcccttaagccagcatacccttga

SEQ ID NO: 39342 - DNA, 324 bp, Zea mays
  Peptide Sequence Number=SeqID_81121
atggcgggcggaaatacgctcgccggagctaaggaacggtggctggccgatgagggtgagtgcggggcgaagagaggaagtaatggctcttggtgtggctttttaagagaaaccctaggtgacactggggtgtcacagccttccccccttaaaggaatctcgtcccgagattcaggccagagtcctcccggggtgaagcgaaggattcgaaaggcaggaggaggggttgggggtgattacataccagcttccttaggtaggcaatcggggaagttggatcttaagaattcctcggtttcccaagtagcttcctcctctgagtga

SEQ ID NO: 39343 - DNA, 228 bp, Zea mays
  Peptide Sequence Number=SeqID_81122
atggcgggcggaaatacgctcgccggagctaaggaacggtggctggccgatgagggtgagtgcggggcgaagagaggaagtaatggctcttggtgtggctttttaagagaaaccctaggtgacactggggtgtcacagccttccccccttaaaggaatctcgtcccgagattcaggccagagtcctcccggggtgaagcgaagggtgagactgataggaaaagggtga

SEQ ID NO: 39344 - DNA, 255 bp, Zea mays
  Peptide Sequence Number=SeqID_81123
atggcgggcggaaatacgctcgccggagctaaggaacggtggctggccgatgagggtgagtgcggggcgaagagaggaagtaatggctcttggtgtggctttttaagagaaaccctaggtgacactggggtgtcacagccttccccccttaaaggaatctcgtcccgagattcaggccagagtcctcccggggtgaagcgaaggattcgaaaggcaggaggaggggttgggggtgatacataccagcttccttag

SEQ ID NO: 39345 - DNA, 219 bp, Zea mays
  Peptide Sequence Number=SeqID_81124
atggcgggcggaaatacgctcgccggagctaaggaacggtggctggccgatgagggtgagtgcggggcgaagagaggaagtaatggctcttggtgtggctttttaagagaaaccctaggtgacactggggtgtcacagccttccccccttaaaggaatctcgtcccgagattcaggccagagtcctcccggggtgaagcgaaggaaggaagtcctttaa

SEQ ID NO: 39346 - DNA, 912 bp, Zea mays
  Peptide Sequence Number=SeqID_81125
atggcagacagcgtgaccgaaggcaggttggcggcgactacgtcagcaaatgcctggaatcagcgcgccaatctccagtcagactttggccccacccgtaggctcatatcctcccctaaggtgggcccaggggccactgttggtaccctgaaactagggtaccctctgctactgtacaaaggcgaggaacccacgtggctatcccttagtcgtgtggcagaagtgtcatgcgtgggtccaagcacggctcgccccgaacacgggcagctactcaaggcccacggcaacacccgactccgccgcgtggatagccccaaggacgccacatggccagaagaggtgatatactccaggatactatcggtgagtccggacccccacgagaaagcgtcgaaccccggaacgcacaacccgaacccctttgagtacggtctaggactcccaagtgagcaagccggaccccttgatgaggtccggacccctctgagtgaggtccgggtcacccgcagcaaggtcccgggacagggaatactctggcctaaatcatggccagacgagggtctggtactgacacgtgtctgggctttgtcatgcggcgaccaggccgtctcgcaggcggcgtgcctatctgttccgctggcaggcagtgcgcccatgctgtggcgcgcactgtgctcatcatcactcgtacgtggccagagaagcttcccctgcacgccaatactacgcgcgctgcggatatcagggcgcaaggagattgcactggcgactagcattagttgctccaagcattacatccgttatgtccctgggcctgtatgtcggggctcagcacccatgtacgtgtccccttcagcaataaaaggggaggcacgcaacgttacagacccagactcacttagacacacttag

SEQ ID NO: 39347 - DNA, 645 bp, Zea mays
  Peptide Sequence Number=SeqID_81126
atggcagacagcgtgaccgaaggcaggttggcggcgactacgtcagcaaatgcctggaatcagcgcgccaatctccagtcagactttggccccacccgtaggctcatatcctcccctaaggtgggcccaggggccactgttggtaccctgaaactagggtaccctctgctactgtacaaaggcgaggaacccacgtggctatcccttagtcgtgtggcagaagtgtcatgcgtgggtccaagcacggctcgccccgaacacgggcagctactcaaggcccacggcaacacccgactccgccgcgtggatagccccaaggacgccacatggccagaagaggtgatatactccaggatactatcggtgagtccggacccccacgagaaagcgtcgaaccccggaacgcacaacccgaacccctttgagtacggtctaggactcccaagtgagcaagccggaccccttgatgaggtccggacccctctgagtgaggtccgggtcacccgcagcaaggtcccgggacagggaatactctggcctaaatcatggccagacgagggtctggtactgacacgtgtctgggctttgtcatgtgcgcttccgctccccgctcaggcggaggcccgttgctgccacgtggcctag

SEQ ID NO: 39348 - DNA, 450 bp, Zea mays
  Peptide Sequence Number=SeqID_81127
gaacctcccccaagttctattccttcaccgcccgaggtccacgacgacgaacagcgcggggacgaactccgtgaccgtagaccatgcggacagctgaacgcgttcccggcgattggtggcggactagttcaatcggatgggtcgacgagcatcacggcgggtcacggcgacacgatggaggtgccagggcacgtggcacaaggccggaaggcggcagtcaccggcgggcttatccaaagcgaccgtggtaacctgtacggtggccggagttgtttactggccggacttatcaacgacggcgatatttacatgaccccgagcgttatccaagcactggtgagcacaaatcacttcaccggcgggaatcgtggcgcgagggtcgtcgacggcgaggggatgaacctgagactcttcttcagttactgtaccatggcattccacttcagttaa

SEQ ID NO: 39349 - DNA, 744 bp, Zea mays
  Peptide Sequence Number=SeqID_81128
atgggacaaagccctgagtacaaagtgtactttcgcaagtcttatccgactaaggaaaaagactctcaaggatatgctggatttaggaatcaaggaaaggcttttagcaagaatcaacttagatacttttgcagaaatagattactaaaaagtatctataaaggtatggatatcaaggaaggcaatgcatcaaagggtttccaaatctccgagaacttagggtttccggagtcaatagtgaagttcaaaaggcaggggcccaggcgacctaactatgggcagaagcgcgcccgcgccggcgaagaccccccaggttctattctcttccaagtcgaggtccccgacggtgcaccgcacagggagccaagctccggcgagctagactggccggagggagccaaggtcggtgctcccgagtggcagacaccgaatcggaccctgcccgcgcatttcccccaacacaatttcaccaaaggctacttggtttgctctggcagcagtgaccgtataccatgtggacagttgaacgcgttcccggcgattggtggcggtctagttcaatcggatgggtcgacgagcatcacgggatgctcgagcggtggtgatcaatttgggcaagttgtgctggcagctggaggggaaaaggagctctgtgcttggaacaggtggctttcaccgtggcaatcactctggcggtcaccggacatgcaccccatggttcatcacgatgcggctaaagcttaa

SEQ ID NO: 39350 - DNA, 213 bp, Zea mays
  Peptide Sequence Number=SeqID_81129
atggagaggacgaagggcgaccgcgccagccgtcacacgttcgtgatgcgggactggccgacttcgtcagggtctagcctttgtcttgtgatggagaggacgaagggcgaccgcgccagccgtcacgcgttcgttgatgtggcgacgcgacgaaggcttcgcgcgaagggtagcgtcttcgccttcgccccaacactaattatgtttgtctaa

SEQ ID NO: 39351 - DNA, 1238 bp, Zea mays
  Peptide Sequence Number=SeqID_81130
atggagaggacgaagggcgaccgcgccaaccatcacacgttcgttgatgtggcgacgcgacgaaggcttcgcgcgaagggtagcgtcttcaccttcgccccaacactacgcgcgcgcttgccgctctaccagccggacatcgagcaggagatcgcgcggctacgcgaggagaacatcaacatgctcaccgacgatgatggctgcaccaacaccaatgccagcctcccaccgccgccggacctcccgcgcctctacgactctggctaccagttagtgctgccgcccacgacgtcgcactcgtcgctgatcaaccaggacttcctgctccagcaccagatgcaggtgttccaccacattggcaacctgagccagcagccggcgttccaccaggacgtcagtgcggcggtgttcagcagcactatctcctccgtcctgccgctgctgccgaccgtcagaacgcaggcggatctccctccgacgaaccaattcaagacctgcagcggtggcactggtgggctactggagccgatgctgatgatcagcgatgaacaactgctgatgtggcccaacctgagcatggtcaaggtcccttccatgcccgcgctctcctatcgccagccggctgtgtccgggctactgcccgcttatggcgccgggagcgacgacgacgtcaccccgcactgccctccaggagaggacatccaccatggcgcgacatgggacttcaccttcgaagagtttgtgaagccagcgaagaggaggaggacgagcgaggtggggatcgtcaacatgttccccgttgccctgccagaggatctactacggtgtgtctacggcaccatcatggtcgcccgtcaccgacgactagttcaccgtcgccacgccgtggggttggttcggcacctgtggtgggtcgacgacaccgtcgatggggctgtcgtcggtcgtcgccgacgacgagttcaccgttgccccgccagggcattgcttcggcacatgcggtgggtcaatggtaccgttgacggggccatcgtcgaaaataagttctacaggtgccaaaggttcacaacaaaccaatacaagtcaaaagaaagggttcaaaacaaaggagcaaagtataccgaaggcagccctggtctggcgcaccggactgtccgcaccggactgtccggtgtgccagcgaagcaacgactacttcgcaccaacggtcgtctgcagaagacattaaatgcgctaca

SEQ ID NO: 39352 - DNA, 453 bp, Zea mays
  Peptide Sequence Number=SeqID_81131
atgggtcagaggacacttgccttcaccaagttgctgctcagggaagtctcttgcaacacactcggaaacctcggactgcccgttgtccacgcaaagcaatctttcattcatcacacttggagaatgacaaaagaacagtacaccaaacatatgaaacagagtgaacataggttcaataaaagaggttgcacactttacccacgagttgtgatccctttccagcctgggttgtacagacccgatcttcactaccaaggtgaatggccagggatacactacatagcttttacaaatactcccctggtgcatagctgctcgttaggtttcaccagtcgtacaaacgcagtatacctccccaaggtccttacggagaggtactcaggaaaaaggcctgagccccctagagtgtcacaagatcatcaacataatcaggataacaatatcgtatcataa

SEQ ID NO: 39353 - DNA, 369 bp, Zea mays
  Peptide Sequence Number=SeqID_81132
atggacctcacctgtcagacccgtccctcccgaaccgcccgcgcacacgacccgcgcgtcgccgtggtctccacgcccacgacgcacgccaaggccgtgtccgcccccaacccgccgaaggccgccgccgtcgacccgaggcttcgtcgtgtccccaccgccgttcaagcatcccagggccctctctcaaggtctcaagataacgagcagcctgaggtttccgagtgtgttgtaggagacttccctgagcagcaacctggtgaaggcaaagtgttagaaactgttatatcagccatgctcacggttaagagcagccttgggatcctctttgattatattaactttggatacttttatgatgatggttaa

SEQ ID NO: 39354 - DNA, 189 bp, Zea mays
  Peptide Sequence Number=SeqID_81133
atgggcgggggcctcctagcagcagcacccgccctgaggtcagtgctgccgctgtttggccccccggagcagaagtcgtcgtcgtcgctgctgctggagcagtgtttttgttcattacggctgtcgaggcctgaacatgtatgtaattttggcacggagccgtgttttttcctcattttcgagcactaa

SEQ ID NO: 39355 - DNA, 774 bp, Zea mays
  Peptide Sequence Number=SeqID_81134
atgtcttcgtgctcccttatgcatcgtgtctttccaccttccaagcccccggatgggggatacccgccgtcttttcgcctcatcgttggaggaacgcaactccgtgggagttggtacctttcagccatcgttcggcttcaaggattttcatcatgcagcccggctgcacacctccgccggcggtcacccaagatggtgacctccagcttgatggtgggggaaagcgagccgggctgcggcctctgcccctccctcagcctcaaggattttcatcaccagggctggggaggggactgcaccgtgcctggctctcggacgcgagtggcttcggagccgctcgcggcgccggcgtctgccacggcagctggaagaggttcttccgccggcgagacagccagggccggccacggaccgacctccaactctacggccttctgcccgtccttgcctcacgagtttgggcatgggcgggggcctcctggcagcagcatccgccctgaggtcagtgctgccgctgttcggccccccggagcagaagtcgtcgtcgtcgctgctgctggagcgggtgacggcgcgccgttcgtcggtcttctgttgctccgcaggccctcccctatcgagtggggttgttcgtacctgcggagggggaaccggagttccgtttgtaatggcactttgaatgccagtgtttttgttcattatggctgtcgaggcctgaacatgtatgtaattttggcacggagccgtgtttttttcctcattttcgagcactaa

SEQ ID NO: 39356 - DNA, 330 bp, Zea mays
  Peptide Sequence Number=SeqID_81135
atgattgctgtcggtgccgaacatactgctgcagtaactgaagacggtgacctctatggatggggttggggtcgatatggaaacttaggtcttggtgaccgtaatgaccgtttgcttcctgaaaaagtatcttctgtggagatgtttacacagcagcaacgctgcagagatgaaaatcctgttaaaagaaacgctgcagataagatagctacagtagcaagctatgaaaccttgcagctatactgctataggacaaaagttgagaatcatactaagagacttaagaactataccaagagacatttcaatcttctcaaagtacaactgtaa

SEQ ID NO: 39357 - DNA, 288 bp, Zea mays
  Peptide Sequence Number=SeqID_81136
atgccgtcaagtaaaatctcccaggttgcatgcggattgaggcacactctagccctctccgagaagaaaaatgtcttctcctgggggaggggcactagcggacagctcggcaacggtgaaatagttgacaggaacacgcctgtgctaatcgatgccctgagctcagacggttctgcctgcaagaagctggagtcatccacggcagccccgttcgcaggtggtgatagacagattatgcaatccatcatgacactgttggttggattagctctttttgctcttggttga

SEQ ID NO: 39358 - DNA, 255 bp, Zea mays
  Peptide Sequence Number=SeqID_81137
atgccgtcaagtaaaatctcccaggttgcatgcggattgaggcacactctagccctctccgagaagaaaaatgtcttctcctgggggaggggcactagcggacagctcgacaacggtgaaatagttgacaggaacacgcctgtgctgatcgatgccctgagctcagacggttctgcctgcaagaagctggagtcatccacggcagccccgttcgcagtatattatacctatgtcctcgtgttcacagaatgttaa

SEQ ID NO: 39359 - DNA, 858 bp, Zea mays
  Peptide Sequence Number=SeqID_81138
atggccggagaagtgcagagttggggccgtaaccaaaacggacagctaggccttggaaccactgaagactcgctgctcccacaaaagattcaggcttttgagagtgtttgcgtgaaaatgattgctgccggtgccgaacatactgctgcagtaactgaagacggtgacctctacggatggggttggggtcgatatggaaacttaggtcttggtgaccgtaatgaccgtttgcttcctgaaaaagtatcttctgtggagggtgagaagatggtgcttgtggcatgtggatggcgccatacaattacggtttctgactctggtaatctgtacacttatggttggagcaaatatggtcagctagggcatggtgattttgaagatcatttagttccacataaagtagaagctttgaaagatagcactatatcccagttcggacaagtcggagtcggcaacaacgacgaccacagctcccccggacaagtcagttttccagaggatcagaaaatctcccaggttgcatgcggatggaggcatactctggccctctccgagaagaaaaatgtcttctcctgggggaggggcactagcggacagctcggcaacggtgaaatagtcgacaggaacacgcctgtgctgatcgatgccctgagctcagacggttctgcctgcaagaagctggagtcatccacggcagccccattcgcagccaaagtttgggtgtcgccgtcagaacgatacgccatagtccctgacgagaacgtccgtaaagcaggcggaggcacggcacgaggcaacggcgccgacgcgaacgtgccggagaacgacgtgaagaggatgcgcgtgcagtcgtcgtag

SEQ ID NO: 39360 - DNA, 402 bp, Zea mays
  Peptide Sequence Number=SeqID_81139
atggcggtccacgggcgacggctattgcgcggtgaagagcgcgccggtgagaagttcccggagcaccagcaggtcgcccaccgattaaatcctcacacagcaccgctggatcacgaccaccctcccgctggcacaattggcgccctacttcccctatcggtggcgaatcgtggcggcgacaccctcacccttacacggctctctcggttcacgggaatagcagcgagatggagggatgtgcagcggccgagaaggagaaggtatttatcttccacacggacgagtctggaggtggccacggaatacccgagcgagattcacgcgcgcggcgcggtcacggcgcccgccatgcgcgcgattctggtgaaggtgggtctgacacccggaccccacgcgtcatag

SEQ ID NO: 39361 - DNA, 402 bp, Zea mays
  Peptide Sequence Number=SeqID_81140
atggcggtccacgagcgacggctattgcgcggtgaagagcgcgccggtgagaagttcccggagcaccagcaggtcgcccaccgattaaatcctcacacagcaccgctggatcacgaccaccctcccgctggcacaattggcgccctacttcccctatcggtggcgaatcgtggcggcgacaccctcacccttacacggctctctcggttcacgggaatagcagcgagatggagggatgtgcagcggccgagaaggagaaggtatttatcttccacacggacgagtctggaggtggccacggaatacccgagcgagattcacgcgcgcggcgcggtcacggcgcccgccatgcgcgcgattctggtgaaggtgggtctgacacccggaccccacgcgtcatag

SEQ ID NO: 39362 - DNA, 354 bp, Zea mays
  Peptide Sequence Number=SeqID_81141
atggcccaagggcacatttccctttcagtactcgatggcccggtacatgttgggttccgaagcgacaacgtggcggtgacgttgaaggagatggtggagttagacgccgggtcggcgggcgccagcgcgaaccgctgcagcatggcgtcgtcaaccgtggccttgggcgggaacaccatgccgaaggcgagcaccaggacggtgatgaggctagggttttttggatccgaacaagagaggaaaaacaaggatcgcgagcgggtgtgcatcggggggagagtgtacgcatcggacgacagagggcttctaaggcgtatcggacggtccagatcggtggaaggcagaacatgttag

SEQ ID NO: 39363 - DNA, 804 bp, Zea mays
  Peptide Sequence Number=SeqID_81142
atgaagattcagaggacgattgaagtgaaccggctggagctagagctaggaagcagctctgcagcaaatgatgctgccttgtggcaggcaatggcgtcaagtccacaagcaatcccctttctagcagctacaccgagccgagcttctttgctgctttcacactacaccttcaccttgcactggctgaacaattcggatccaaaaaaccctagcctcatcaccgtcctggtgctcgccttcggcatggtgttcccgcccaaggccacggccgacgacgccgtgctgcagcggttcgcgctggcgcccgccgacccggcgtctaactccaccatctccttcaacgtcaccgccacggtgtcgcttcggaaccccaacatgtaccggtccatcgagtacggcgtgctcgccgtgaccttctccttcaacggcacctgcttcgacgactctgcgtccgtgccgggcttcggcgtggagatgcggctggacacggtgctccagtacaagggccggtcccaccccaccttcacgcctcctcgcgtcgtcgcaaccgccccccgaccgatcgacccctccccctcggcgcggcgaggcgcaggccgacctagaccagtggtccgccgtcatgcagtttcgccaacgcgcatcgtgcagttgcgccagcaccatgcccaggcaaagaaagatcccattaatgagccttacaatgtcggtgatgattataatagtgacactgatgaagattcaaaagaaatggagatgttgatatttgtaaaggatgtgcaatctgcaatgatcaacgcctag

SEQ ID NO: 39364 - DNA, 1803 bp, Zea mays
  Peptide Sequence Number=SeqID_81143
atgggattcggatggcagccgggcaggcggcgcggcgtcgcggggaggagtgtcagttgcccaacgccgtgcgcgaaggcgaagcctgggcgccgcaagaaccagtaccgcggcatccggcagcggccgtggggcaagtgggtggcggagatccgcgaccccgtgaaggacgttcgcgtctggctcggcacctaccccaccgccgaggccgccacgcgcgcatacgaccgcgccgcgaggcgcatcaggggagccaaagccaaggtaaagtttttacccagcgacacctcctccagcgtcaccgtgccgacggcggcgtcgaggtctgttgctgcttgcttcatgggcctcttgtgtttcgcctcgcacctcgctctgttcgctctggttcattttcctctcgtcaagctcactacacacagcttcacctttgccatgggagggggggatttattcagctctccatcacgtggttcagtaagatccgaatttggaaccgttgtatctcctggtgactctaacttaggctcgctgttaacctgtgcagattatttatcagattcagattcaaattcatctaaagaagggatcgcctggactaggaatcgaacgtgggtgacaatcctggccactgccagcggtaaatcagtttttgccattcttgcctgctgcagttgctcatggttgatggaaatggattgctccatccgcgaggtaaaacacaaatcgctcgcttgcaggagtacaggacgccagttgccaggtcgccgcgccggtgctagcagagactgcggagtagcagtagcagccacgcgggacagcgggacaacgaccgaccgccgacgggccgagccgccgaggcatagagcacagcgtgaacgcgagagaaagaagaaggggcaggggagggggcttacctgtggcctatggggcagtctggcggtggcgcggtgggatgtggggactcggacggcggtcgacgaagtcatggaagacctcctgagtcttgagagctgcctcctgggtgaacagcaaatgggtcgtgggccgtggcagctggacgggtggctcagtggctggacggaagacctcccattgaaggttggacagaaacatggaagattgcttgcagatctagaagaagatgaacaacctaaaaagaatgttagattagggagcccagcgactcaatggatttcagtttataatgctagacggcccatgaagcagagcaagcatggatggacggaccctgtgaagttcagtatatccactcttgaagcatggcaacagagtctgaaatgcaagaaaaccgcattaaagacagtcatgctgctagctgaaaggttacctatagttcggtggcctctactgtctctgccgggaaagcatatatcttcctcctgggttttgctccgtccaggaggaacgggtacgcatgttaaatgcatcttcagggtcaaaggaaaatacaaattacggcctgcaatattagaaaccaacatcatattttgtgttgtgagtttaaattcctgctttgatggttttcattttctgaacactaaatccaagtcggtgttttctgttcttatcaagggtccgccatcagcgctcgcctggctgctcgacgcattcgccagcgccaccttcgaccagatcgactccgcctaccgtgaggccggaggggaccctttcgtggctaccgcggctatgttcttgcatcttttcgggcggttcgtgattcagttcttctttgttggttctgttaccacagatctgcagacaggtggcctagactcgtag

SEQ ID NO: 39365 - DNA, 1596 bp, Zea mays
  Peptide Sequence Number=SeqID_81144
atgggattcggatggcagccgggcaggcggcgcggcgtcgcggggaggagtgtcagttgcccaacgccgtgcgcgaaggcgaagcctgggcgccgcaagaaccagtaccgcggcatccggcagcggccgtggggcaagtgggtggcggagatccgcgaccccgtgaaggacgttcgcgtctggctcggcacctaccccaccgccgaggccgccacgcgcgcatacgaccgcgccgcgaggcgcatcaggggagccaaagccaaggtaaagtttttacccagcgacacctcctccagcgtcaccgtgccgacggcggcgtcgaggtctgttgctgcttgcttcatgggcctcttgtgtttcgcctcgcacctcgctctgttcgctctggttcattttcctctcgtcaagctcactacacacagcttcacctttgccatgggagggggggatttattcagctctccatcacgtggttcagtaagatccgaatttggaaccgttgtatctcctggtgactctaacttaggctcgctgttaacctgtgcagattatttatcagattcagattcaaattcatctaaagaagggatcgcctggactaggaatcgaacgtgggtgacaatcctggccactgccagcggtaaatcagtttttgccattcttgcctgctgcagttgctcatggttgatggaaatggattgctccatccgcgaggtaaaacacaaatcgctcgcttgcaggagtacaggacgccagttgccaggtcgccgcgccggtgctagcagagactgcggagtagcagtagcagccacgcgggacagcgggacaacgaccgaccgccgacgggccgagccgccgaggcatagagcacagcgtgaacgcgagagaaagaagaaggggcaggggagggggcttacctgtggcctatggggcagtctggcggtggcgcggtgggatgtggggactcggacggcggtcgacgaagtcatggaagacctcctgagtcttgagagctgcctcctgggtgaacagcaaatgggtcgtgggccgtggcagctggacgggtggctcagtggctggacggaagacctcccattgaaggttggacagaaacatggaagattgcttgcagatctagaagaagatgaacaacctaaaaagaatgttagattagggagcccagcgactcaatggatttcagtttataatgctagacggcccatgaagcagagcaagcatggatggacggaccctgtgaagttcagtatatccactcttgaagcatggcaacagagtctgaaatgcaagaaaaccgcattaaagacagtcatgctgctagctgaaaggttacctatagttcggtggcctctactgtctctgccgggaaagcatatatcttcctcctgggttttgctccgtccaggaggaacgggtacgcatgttaaatgcatcttcagggtcaaaggaaaatacaaattacggcctgcaatattagaaaccaacatcatattttgtgttgtgagtttaaattcctgctttgatggttttcattttctgaacactaaatccaagtcggtgttttctgttcttatcaag

SEQ ID NO: 39366 - DNA, 165 bp, Zea mays
  Peptide Sequence Number=SeqID_81145
atgaacgtatgtgagctcactcttgctgtctcacatacaccacaggtcaagaccagaactcctgttatatataaagatgtgacattcgatcctgtgccactatacatcatatgtatgagacttggtcccagcatacctggtgtttatgttaaccccgggttttag

SEQ ID NO: 39367 - DNA, 174 bp, Zea mays
  Peptide Sequence Number=SeqID_81146
atgaacgtatgtgagctcactcttgctgtctcacatacaccacaggtcaagaccagaactcctgttatatataaagttgtgacattcgatcctgtgccactatacatcatatgtgtgagacttggtcccagcatacctggtgtttatgttagcacccgggttttggacccctaa

SEQ ID NO: 39368 - DNA, 234 bp, Zea mays
  Peptide Sequence Number=SeqID_81147
atgaacgtatgtgagctcactcttgctgtctcacatacaccacaggtcaagaccagaactcctgttatatataaagttgtgacattcgatcctgtgccactatacatcatatgtttgagacttggtcccagcatacctggtgtttatgttaaccccgggttttggacccctaaaatccgggtgttacagaagtggtatcagaggaatgttgactgtaggacgaaacctagatag

SEQ ID NO: 39369 - DNA, 207 bp, Zea mays
  Peptide Sequence Number=SeqID_81148
atgaacgtatgtgagctcactcttgctgtctcacatacaccacaggtcaagaccagaactcctgttatatataaagatgtgacattcgatcctgtgccactatacatcatatgtatgagacttggtcccagcatacctgatgtttatgttaaccccgggttttggacccctaaaatccgggtgttacaacaaccaccgaatcgctaa

SEQ ID NO: 39370 - DNA, 234 bp, Zea mays
  Peptide Sequence Number=SeqID_81149
atgaacgtatgtgagctcactcttgctgtctcacatacaccacaggtcaagaccagaactcctgttatatataaagttgtgacattcgatcctgtgccactatacatcatatgtatgagacttggtcccagcatacctggtgtttatgttaaccccgggttttggacccctaaaatccgggtgttacagaagtggtatcagaggaatgttgactgtaggacgaaacctagatag

SEQ ID NO: 39371 - DNA, 216 bp, Zea mays
  Peptide Sequence Number=SeqID_81150
atgaacgtatgtgagctcactcttgctgtctcacatacaccacaggtcaagaccagaactcctgttatatataaagttgtgacattcgatcctgtgccactatacatcatatgtttgagacttggtcccagcatacctggtgtttatgttaaccccgggttttggacccctaaaatccgggtgttacagagggaccgttcgtggttggattcctag

SEQ ID NO: 39372 - DNA, 282 bp, Zea mays
  Peptide Sequence Number=SeqID_81151
atgaacgtatgtgagctcactcttgctgtctcacatacaccacaggtcaagaccagaactcctgttatatataaagttgtgacattcgatcctgtgccactatacatcatatgtttgagacttggtcccagcatacctggtgtttatgttaaccccgggttttggacccctaaaatccgggtgttacaaggaccaaatacagtctttttaagatgtaattgtggacattactccacaacccatcacactcaatcaaagatccaaatcagacagatatcataa

SEQ ID NO: 39373 - DNA, 831 bp, Zea mays
  Peptide Sequence Number=SeqID_81152
atggctcaccagagtttctccggcctgctcgagaccttctcactgccgctctcccctctctgctcgtggattcgtggcctcttccccgccattgagttcgtcgtggcgccctcttcctgtctgcccaactccgtcgaccccgaagccaacatagctcacgcctgcctcaactccggtgacctcaccgccacggaagaagtgcccgagcttcgcggcgccattccacccaccacccgcacaggaatcggcgaagagactaggagagaagacgagggtgaacctgactgcgagggcccacctgccagcgccagtggaagaagtgccaagcgcgtcgacgcgctccagtccagaaaaatagtagtttggatgtgggataagaactacacctggggtcaattagaccctatcattcctcctaacatagtatcataccaaatactaactaaacttggtggagctggtggtggtggtggaggtagtggacgattgggagagcataggtatccaactactatttatgtgggatataaacgtaacaggttgaggtggggcatagagacaagggtacaacaggctttagctattagatgcctttatctaagttggaataacaatgcggttacatggggtaggtcagaatctctgtcggtaaaaatagaggggttatgcaactatcgggtggtgaaggtagttgcatatggccagagtaggtctcctattcctaaaggtcactttaggcacaagatttcaaaaagtgtgaaatccacatttgtctttagaaggaacatgtttcgtcctacagtcaacattcctctgataccacttctgtaa

SEQ ID NO: 39374 - DNA, 591 bp, Zea mays
  Peptide Sequence Number=SeqID_81153
atggctcaccagagtttctccggcctgctcgagaccttctcactgccgctctcccctctctgctcgtggattcgtggcctcttccccgccattgagttcgtcgtggcgccctcttcctgtctgcccaactccgtcgaccccgaagccaacatagctcacgcctgcctcaactccggtgacctcaccgccacggaagaagtgcccgagcttcgcggcgccattccacccaccacccgcacaggaatcggcgaagagactaggagagaagacgagggtgaacctgactgcgagggcccacctgccagcgccagtggaagaagtgccaagcgcgtcgacgcgctccagtccagaaaaatagtagtttggatgtgggataagaactacacctggggtcaattagaccctatcattcctcctaacatagtatcataccaaatactaactaaacttggtggagctggtggtggtggtggaggtagtggacgattgggagagcataggtatccaactactatttatgtgggatataaacgtaacaggttgaggtggggcatagagacaagggtacaacaggctttagctattaggtga

SEQ ID NO: 39375 - DNA, 675 bp, Zea mays
  Peptide Sequence Number=SeqID_81154
atgtacatggctgcatatgattggaggttatctttccagaacactgaggtactcttcttggatggccttatacaagttcatgatcaaactttgagcagaataaagagcaatattgaactcatggtagcaacaaatggtggaaatggggtggtcgtgatcccacactccatgggggtcctctattttctgcattttatgaaatgggtcgaagcacctcctcccatggggggcggtggtggtccgaactggtgtgagaaccatattaaagctgtaatgaatattggaggacctttcttaggagttcccaaggctgttgctgggcttttcacatctgaagccaaagatgttgccgttgctagggagtgcctgcctctgatcctcatcattaggaacaagctcaagtatgcactgacgtaccgtgaggtcatttctatcctgatgcaacgccatgtacttgttgatggcaaggtcaggactgacaagacctaccctgctgggtttatggggatgaggatgccaaggttaggccattgtctgatgtttgacgtcggcaacgtggtcatggtgaccggcgggaggaacaccgggcgtgtaggagtgatcaagaacagggagaagcagaagggcagcttcgagaccatccacgtgctggttggagctttttgctatgtctag

SEQ ID NO: 39376 - DNA, 675 bp, Zea mays
  Peptide Sequence Number=SeqID_81155
atgtacatggctgcatatgattggaggttatctttccagaacactgaggtactcttcttggatggccttatacaagttcgtgatcaaactttgagcagaataaagagcaatattgaactcatggtagcaacaaatggtggaaatggggtggtcgtgatcccacactccatgggggtcctctattttctgcattttatgaaatgggtcgaagcacctcctcccatggggggcggtggtggtccgaactggtgtgagaaccatattaaagctgtaatgaatattggaggacctttcttaggagttcccaaggctgttgctgggcttttcacatctgaagccaaagatgttgccgttgctagggagtgcctgcctctgatcctcatcattaggaacaagctcaagtatgcactgacgtaccgtgaggtcatttctatcctgatgcaacgccatgtacttgttgatggcaaggtcaggactgacaagacctaccctgctgggtttatggggatgaggatgccaaggttaggccattgtctgatgtttgacgtcggcaacgtggtcatggtgaccggcgggaggaacaccgggcgtgtaggagtgatcaagaacagggagaagcagaagggcagcttcgagaccatccacgtgctggttggagctttttgctatgtctag

SEQ ID NO: 39377 - DNA, 378 bp, Zea mays
  Peptide Sequence Number=SeqID_81156
atggagcttcgttcgattatgacaaacaagcttcggcgacgtgccgcagcatttgagaacaagtccccaacagtgcgtactgttcagaccacccgtgtgaacaccaactatatccctccgccacgacaggctcctatctacctagtggtagtagaggaagtccctgtggatcttcaccaccttcgtgtggagaatggagttattctagaggatagctcagaggagattttggcaacgcccaccctgttgtcagagtcccaagcctttgcagctggagcttcatcttcagcaccgccaacaccaatagctcaagcccctgctcctggaggcgacgatctggatgattttggtgatggtggagaagatgatgaagaatag

SEQ ID NO: 39378 - DNA, 390 bp, Zea mays
  Peptide Sequence Number=SeqID_81157
gtaagaaggtttatcgaaagaaggggacaccaggcggacacccgctcgcactctccgtacgcatttgagaacaagtccccaacagtgcgtactgttcagaccacccgtgtgaacaccaactatatccctccgccacgacaggctcctatctacctagtggtagtagaggaagtccctgtggatcttcaccaccttcgtgtggagaatggagttattctagaggatagctcagaggagattttggcaacgcccaccctgttgtcagagtcccaagcctttgcagctggagcttcatcttcagcaccgccaacaccaatagctcaagcccctgctcctggaggcgacgatctggatgattttggtgatggtggagaagatgatgaagaatag

SEQ ID NO: 39379 - DNA, 216 bp, Zea mays
  Peptide Sequence Number=SeqID_81158
atggcgcagagacgactgcccacggtgaagcgcggtccagctgcaagaattgggcgtcggccaccaatcgagggcttcaccgacccaggctccgcccaccgaaactccgtgcaggttcacgacaaccaggcggagctccccatcatctgttccttcggcgaacagacacggcgggagcccgtcgcccgcggtggcgccatggtcggtaccgcctga

SEQ ID NO: 39380 - DNA, 474 bp, Zea mays
  Peptide Sequence Number=SeqID_81159
atggtcattggatcccgggtggatggctcggattcaaaatcgcccagagtgagtcgcggccgccagatccggatcagacgacccgaaatcgccgtccgcaaattactacggtctaacccatctccaccacacaaattacatctaacggctcgaggcgaaatccccaaactcacagccgtggccggaacacgcgacggcgcagccaccacacggcggcgggttcaccggagctcgcgaaatccggtcctcccgagcgccaaacccaaattgaaaggcgccgcacgatctagagggcaatgcgaaccgcatggaggaaaactcaccatcaataatggcgcagagacgactgcccacggtgaagcgcggtccagctgcaagaattgggcgtcggccaccaatcgagggcttcaccgacctaggctccgcccaccgaaactccgtgcaggttcacgacaaccaggcggagctccttaa

SEQ ID NO: 39381 - DNA, 417 bp, Zea mays
  Peptide Sequence Number=SeqID_81160
atgagcaggagagggaagaatcccaggtccctggggttgattgaggcaagtgccaatatcatggtggaggagaaaaccgtgaagtgcaacaaactcaatagacccaatatgctcctcctcaagcaggcacttcagcttgacatgttgctcctaatacctccacaaataggtcatgtttcaagtgtggggcaggctggacactacgccaactactgtcccaacagggctgcttatactactccggctccgatgaagcaaggtcaggcctcgggaggcaagagtcagcccttatctgtcaatcggggtcaagtcaaccacgtggaagcagaagctgagcctggtgaacccgaaaaccgggaagaagtgctagttgaaggtgaagaagttggtgaagaaggcaatgaacaaccggattag

SEQ ID NO: 39382 - DNA, 273 bp, Zea mays
  Peptide Sequence Number=SeqID_81161
atgagcaggagagggaagaatcccaggtcatgtttcaagtgtgggcaggctggacactacgccaactactgtcccaacagggctgcttatactactccggctccgatgaagcaaggtcaggcctcgggaggcaagagtcagcccttatctgtcaatcggggtcaagtcaaccacgtggaagcagaagctgagcctggtgaacccgaaaaccgggaagaagtgctagttgaaggtgaagaagttggtgaagaaggcaatgaacaaccggattag

SEQ ID NO: 39383 - DNA, 693 bp, Zea mays
  Peptide Sequence Number=SeqID_81162
atggtgctctcagtggcagaattacatcctcaatctaccaatgctgtcataagagtgcgtgtgatcagaaaatgggaattccgaggcgcaacaaatgatggtcctctgcaacacattaatttggttctagctgacgagcagggtacgcccatccacgctgagattgtagccgctctggcagttgacaaaggctcactgatagaaattgaaaaagtatatgagctcaaacgctttcgtgtcacgccttccagaaactattttaaacctgttgacaacaacttcatgatacaattcactctgtacactcaagccaaagttgtcaaagatccaccacaagtgtttccaagatatatctacaagctcacatgctttgaaaacatagaagataacattgacaatagaacttacttgattggtcaaccatacctaagcagtactacagcaagttcatggtacttcaatcctggaattcctgaggcacagacctactacaacaagttgcaaaacaatgacctccagctaatacaacccacaacagctgaagaagaaattctgctttctcaaccaccaaatttggaaaaaaagactgttgaagagctgctcaacatagatctggacatgtttcccccagaaggctacagatgcactgttactatctcacgcattgtgcaaaatagcaaatggtggtactga

SEQ ID NO: 39384 - DNA, 2337 bp, Zea mays
  Peptide Sequence Number=SeqID_81163
atgcacacattattttctgggtttccaccaacactgcgcaaccaactactagactcttttatcactgctgagataccagatccaggcattgatcccttaggatacgctttgattgcggagcatatggttcatgggccatgtggatcttacaatcagaactcaccttgcatgaaaaagggtcaatgttcaaaacactatcccaaaaaatttcaaaatgatactgtagtagatacaaatggatttgctgtctacaaaagatcgaaaaataatagatttgtcatgaagtctaacatcaaactagataacagatggattgttccatataacttgacattgctcaagaaatatcaagcacacatcaatgtagaatggtgtaataaaagcatattcatcaaatatttgttcaagtatgtgacaaaaggtccggaccggagcaaactatacctacaacgagttttagatggtcaagacactcctattgatgaggagacaaacacaaggaatgaggtcaaagaatacttagatgctagattcatatgcccatatgattcatgttggagaattcttggttacgaaatccataggcactttcctcctgttactagattgccagttcatttgcctaatgagaattacattacatatcatgccagcgccaacatgtcacaaatcttgtcacaagaatttctacgccgaacaatgttaacagagtggtttgttgctaaccaattacatgaaagtgctaggtctctaacttaccctgattttccatccgagtggagcttcaagaaacgtgtagagctcatgggctcctcgaggatgaccaagagtggtataatgcctttgatgaggccgcttcgtgggcaacgtcccagtcaacttcgagatctatttgtcacaatgcttcttttctgtgaagtaggtgatgaatttactttctttgaaaaagtatggacgttactggctgatgatattcagtacaacgcgagacaaatactaaatcatccaacttatcaaatgagtgacgacgccctaaaaaatcagttgatagaagaactcactacattattcagcagaagaggaagtcgaatacaagatttcaatttaccaactagatctgactcaccttgtttagtgaattcaaatcgctttattgacgatgaactatcatatgacatttccattatgcaaactgagtctgaaatgatgacatcaaggttaaataatgaccagttgcacgcattcaagattattacagaaactgttttggcaaacaaagcaggcttctatttcgtgtcgggttatggcggtacagggaaaacatatttatggaattgcatcataacattcctacgtagtcgcaaacaaatagttctatctgtagcttcatctggtgtggcctctttacttctaccaggaggacgaacagcacactctcgtttcaaaattccatgtgaattagaagaaacaacgaatatgagacttctaatgccatcattgtcacaagaagaacgacaagaactatctcaatttagcaagtggatgctcgatgttggagaaggcaaaatagacgccacatcacaagaaggtgaagacgagccaacatggatagagattccacaagaattgctcctaatgcctcaaggtgataaaatcgcttgtatagttcatacaatttatgaaaaactcaatgaaaattatatgagacttgagtatctaaaaagtcgtgccatattgactccaacaaatgatatagttgactcaataaatgagtacattgtctctcttaatcctgaggacgcaagagagtatctaagttgtgacaagataatcaaagcaccaaacactcatgaatcctatgatcttttatatcctgttgaatttttgaatacattgaacggaaacagctttccacaacatcgaataattctcaaaaaaggtacaccagtcatgcttctcagaaatttgaaccaatcagaaggtctatgcaatggtacaagattgctcataacttccttatgtgacaaagtgattgaaggtcaaattatgacaggtattcataagtcaaaaaatgtgcttattcctcgtatatcattaacactgaagaatacaaaatggccatttgttcttcagagacgtcaataccctataaagatataccaagtaacaatgttattcacacctgtggcagaattacatcctcaatctaccaatgttgtcataagagtgcgtgtgatcagaaaatgggaattccgaggtgctacaaatgacggccctctgcaacacattaatttggttctagctgatgaacaggctttcttttcaatgattgaataa

SEQ ID NO: 39385 - DNA, 222 bp, Zea mays
  Peptide Sequence Number=SeqID_81164
atggcccgcttgtcagcggtcgcccgcgcgtcagcgcgcgatcgcgtgctcagatctgatcgtggtcgttcgtctgcgatcggatggatgagattaccctgtaccccttcgtgtgacaacgagcagtccgtggttcctgagtgtgttgctggagacttccctgagcagcaacctggtgaaggcaagtgtcctccgacccattatgtcctacttactttataa

SEQ ID NO: 39386 - DNA, 366 bp, Zea mays
  Peptide Sequence Number=SeqID_81165
accaggcggcccaggcccacgcggaatcgcgcgcgcccacgcccgcactgggggaagtccacgacggcgtcgcgcgtagccgagctccggcgaacacctttggtgagctaccaagctctgtccacgtgaaccgagggggtggcggacagatgagtgtgttcccgcgagcggtggctggtgaattgggcgagacgcgccgcggccagaggaagaagaaggcactggcacaagcgctaggtggcttcaaccgtggcggtatctccggcgatcaccggacgctcctagcccgcaaggcagaggggaagtacggtgggggggtcaccggagtggcgtccagcgcatggcttttaccgacggccttatctg

SEQ ID NO: 39387 - DNA, 441 bp, Zea mays
  Peptide Sequence Number=SeqID_81166
atgggggaggtctgcactctgcagcagccgagaagtggaaccaggcaaccggccaacctgctgcagtgctgctgctccctgccgtgtgctgtccttgataggagatggaggtggccaggtgcccaggctggcagcccaggcgacggcctgtactgcctgggcactcggtccgccactgctcctagcgtaactatccgcgacgtggtaaagcgtccggacacacggcgcaagaccgagcgacggcggttcaccggcgttcttatcggttccagccgcaaggcagaggggaagtacggtgggggggtcactagagtggcgtccagcgcatggcttttaccgacggccttatctggtcaccggcgacgtgaatcgcaacaatggtggcacgaatcacggcgaggagcggtcgtcagcgatgaagcggctgcgctggcggtctga

SEQ ID NO: 39388 - DNA, 642 bp, Zea mays
  Peptide Sequence Number=SeqID_81167
atggcagcctctgaagcctgctcctggtcctcctcttggacagaatttacaactttagaggtgtatgatctacttgagttaaacaaggttaactttacttatgtaagacccttgggtggtatacttggtaaattgggtcaaactttatctaagggcagaaggggtgctttgaactacaactattatttaacagtagtggggctctggtggtttaactgcggcggaagaaaggacggaggggcttaccggcggcgagattgctccggtgaagtggtcgaggacgtaggggaggtctcggggatcacaacggtgtgcgggtcgccgtcggggatggccggagttggccggtccacgtgcgcaggcggggatgctcgtcggcggcgaggagtccggcctgctcacggtgagatagttcaattggatgggtcagagaggttcacgggatgccagagaagatatggctgcaaggaattgggcggagactcaccggttagctctgtccacgcgcgacggcgaagaccgaagtccggtgaggtcgatctcgggcctccggtgaagtccggcctggtccgagggcttggcaagcttcacggaccactagtggagctagccgaagcactggctcgacttgggggtggctag

SEQ ID NO: 39389 - DNA, 432 bp, Zea mays
  Peptide Sequence Number=SeqID_81168
atggtggctctacgaagtcttattgtttgggtgcttgcggtgggtggatgtggtgcggagggtttgggttatgcggaggcggtggaggtagaatctgtacctcttgatggtgctggtaagcgtggttgggtggatgttgtatttgttcgttgtggtatggttgttggtgatgtacaaggggtcaagcagtctcattacctgcgagaagcagacgattcgaatcgagttttaaccttgcaagtgaccgcacttgtacccaccataactagcatgggagacccagtctcaggtcgcatgagggataaagtctgcgcccggcttcactcagaaattacaactttggaggtgtatgatcttcttgagttaaacaaggttaactttgcttatataagtcccttgggtggtatacttggtaaattgggtcaaacttag

SEQ ID NO: 39390 - DNA, 2118 bp, Zea mays
  Peptide Sequence Number=SeqID_81169
atggtggagggcaagggcgggtgggtgaggatcgacgtgacgctgataccaggttgtcaagcgcctcgacgcccaacgtcgctggaccgcggctacgcagttcgtagtcgcgctccagaccttcaccccactgattgtggcgcctgccttggctgcgcgatctgcagccctcctggcgtcacgacggcgcctctaaagattgggtataggcctggtgaaaaattcagtctacgagatttccaccatgccgtaaataacctacctatggatggctttcttgctgatcaacatggtggatctttgcctattagagatgtatcactgacaagcttttttagcaacaaagccatctactcttgggctactgatgacatctccaaaaaagtgattgctatatgtatgtctgcacaaaatacagaagctctccgaagaactcttatggatgcagcagaacagtgtgttgccgtggattttataatgttggaagcagaagctgcattcatgtacggccgtgcttcagaaaatgccaattcttttgtgaacagaatctgtgatcttgaaaactgtgtggtacggagatacaatcctgagacccaagttttgcatggcctagttaagaggtggttagaagagctaaaggatgacaaagaggatacactgcaagctgtatttgtgttcagtgatcccatcattgattctgttaaacacatatattgcaacctgtatgcatcagcaaaccagataactgatggttttccaccttgccaggcatgcaagtgccatggtcaccctattgaccttttcaccccaagtaaggcaaaatggacgtgtccaacaactaatcgacagcttgtagtttctgatattgttgatactgctgtaaggattggagaacaaacagtattgtttctacctactttggaaggtagctcaaacttgcggcgtgtctctacttccatttcttttgttgtaattgagcgcactgaattggcctcaatgaatgaaggagtcataatggggaggtcttatgttgtgattcccagttcaaatgatgttgaagcttctctagctgatgagagaacagatcagaacaccaaaattttctatggtctatgtgaaactcttttcaagcttgaccagggacttgtttgttcctcatcatgcaatattgaaacaatgaaaattggaactcttcagtgttattatcttcttcaaccttctgaaaaaggaccaatgcttctgaggagactcgctgcatctgaagagatattgcctctcccagacatgactcgagattgcagctctaagattaccatggaaatcaggaattcaatcgaaacctctttatctaagattatgctcaaggattacaaccctctacatcatgaaagaggctttcattcagaactgaatcgcctgaattcagatacatggtttcgtgtatttgtttttgtatgttgcttttatcatgatcgatcctggaaacattcgccaaataagatgtccattactggaccgacttcattttgcagatcaattgctccgtcctgtgccccgaaggaccctcacaacattggttcgttcagcgaacctcaggtaccaacatgtcaggacctggaagaaagcatgtccctgaacgaacatgaggatgcggctggaggtctcaacgaccatccgtactcgttcagcgagcctcaacctcaaacatcagcattcataactccgagcaagaacaaggcatcgatccagtccaagaaagggaaggcctctcccagcatcagtgaggagtgggagaagctcatcatcatcgacgacctcgacgacgactttgccagccccgcacatcccagaaccgctgttcacaaacctccccgccccaagccaccgtccccagtgaagccgctggacgagaagacttcaaggatcctggagaggctggagccccccagggcgaagaagcagagagcgaacattgttagcaaggccagcactggcgcagcaccggcacctgccagtaaacagatcaagaagccgttgctgctgccgcgtgagccgagcgcaagccagccgctgcgaccttccttcagcaggcttaggagagttccctacctgacctga

SEQ ID NO: 39391 - DNA, 327 bp, Zea mays
  Peptide Sequence Number=SeqID_81170
atggtggagggcaagggtgggtgggtgaggatcgacgtgacgctgataccaggttgtcaagcgcctcgacgcccaacgtcgctggaccgcggctacacagttcgtagtcgcgctccagaccttcaccccactgattgtggcgcctgccttggctgcgcgatctgcagccctcctggcgtcaccacggcgcctaatctagatctaaggttgagacgacgccgtttaaatacagtggtctggtctggtctggtcgaggtcgtgcctgacaaaaatgctgctttcctagagcgagctgcatgcctgacagaagacagagtaccactgtag

SEQ ID NO: 39392 - DNA, 426 bp, Zea mays
  Peptide Sequence Number=SeqID_81171
atggtgactattgggtgttcaatggcaattcctgcacttgtgcagctattgagtaatggaagtcaacggggtaaaaaggatgcagcaacaacactgtttaaattatgtagtatttaccagggcaacaaggggaaggctgttagagccggattagtacctatactactagaactgctgatggagactgaaagtgggatggtagacgaggcccttgcaatactggcaatcctctcaggccatcctgaggggaaggcagctaatggcgctgcttctgcagtgcctgtacttgttggagttgtcagaaatggatctccaaggagcaaggaaaatgctgctgctgctatggtgcatctatacaatgggctcaggctggcaggtggaagattgcctgcaattgttgttgtggaggtttctggtttctattga

SEQ ID NO: 39393 - DNA, 1842 bp, Zea mays
  Peptide Sequence Number=SeqID_81172
atgcagcgaatgccatcgagctgcgcttttacatgtttatcatcagattccattttgcggggcacgacccgaacaaaggtagcaggcaactggcgactggtgaaaccacagactggtgccaccaaagtggaagaaattcactcaaagaaccatcctgtcagtctccttatcatagagtattcaccttttcttgcagttgtggagtccaaggacagaaggatctcagttgctttagcatttgctggtcatcaagaaggatattcactttatatgccctttacacaaaaggtgaacagagatagatataatgatggtagcatcaaacattcactcttgaagcagtcatcattggatctattgacgattgagactcctggtttgaagaaaaatgacagcttttcaagatggatgagtaaagaacttgaagaggttgttgatttgggtattaaatccacttctgattctttctggagtagcattgagacagtgaaggtgcctcatggttctaatgttctgactaatgaacagctggatgcttatgtagtgaacccttcactttctcaagaccaactattcagcattctcgatgtttcaccaggttgtgcatatattggtacaaatacaaaggtgtctgcacagtttagtcaaggaaacctgtgtaaacgatttgtaacaggtgcaggaatagctgaagcagactcttgcgcctcaggtgcaggaatatccttaggtagaattccgaacttcattttcagcaaaatgtgtacaagcaagcagcattctgccttagctttctttcattgtttactaccttgtgaagtttctgttctgtgctgtaagattccaaccattctcccgcaatacggtatgacatcaatcatagaaggcattgatgcaattgcgacaacttgggttgttgtcactagagatatgagcaacaacagacgctgcagcggtaggggaggaggaggcagaggcggcggtcccggcaacgttgccctggcaggggtgcgcttctggatcctcatggcccccgtcttcatgccctggctcaggattaagaaccatgcattattgcttcagacacaatatacttcttttggtttctactgggcgctgctatttatacctgcttacaagttttttgctttctacatggagggtccatgggcagctatgaccacaacaggcatcttccttgctgtcgcagtcactgattggctagatggttatattgctagaaagatgcagctaggaacaccttttggtgcatttcttgataactccaacaagtacaggcactgcagaagcatcaccaatattgcaagggcctcatctaccatcccactttcagtctccatgagcagttctggtagtataggtaccaatccagctctaacagccttccccttgttgccctgcacatttaatcaccagcttcatggggtatttgaggttgccagtttcggtgggtctaatatagatcccactgcatgggaggataagaagtgtaaaggtgaatctagattcccagcgcaggtgaggatccgcgttaggaagctttgcaagccgttatgtccagttttacaccactatgatggcccaaagtttcgccttgagctctccatcgcggaggaccgtcgaggattgatcgggcggcgccgccgtcgggcagaagcggtcatcggcggacaaggcgcacagaaggagaaggacgacgatttccttgcgatgaagggcaccaagctgccccagcggcccaagaaaagggccaagaacgtggacaagaccctccaagtattaaacacctggcctgagatcgatttgatcctctatttctaa

SEQ ID NO: 39394 - DNA, 360 bp, Zea mays
  Peptide Sequence Number=SeqID_81173
atgcagtctaatctgaaatatagtttttcaggctcaagcgatagccactgtagtctgtcaccactgccagcatatgagcccgcatttgattgggagaatgagatgtctttgatatttggccaaagggtgccagaaacatcctccccgttcgcgattggctcgagcggcaccgatggagcgacgactctgtttcccagaaggcgaaaggccgatgagatcgacagacgattcgtgtcgatcgcacaccgggaccacgacgtccgcgccgatgcacacctctacaacgcgctgatgaaggcgaacgtcgcggcggacgactccggggccgtcctcagggtgttccggcaggtttcagtttga

SEQ ID NO: 39395 - DNA, 723 bp, Zea mays
  Peptide Sequence Number=SeqID_81174
atgaaggcgaacgtcgcggcagacgaccccggggccgtcctcagggtgttccggcaggtttcagttactggtacattcttggtgaataaagaacatgtggaaagtcacaggtggtcatgtatgtttggggatgttgaagtaccagctgaggttttgaccgatggcacgctacgctgctatgcaccagcacaccaatcaggaagagttccattttatgtgacctgttcaaacatggtggcttgtagtgaagtgcgagaatttgagtatcgtgattctgaagctcattacatggatacttctcgttcccaagccaatggtgtaaatgaaatgcatctacacatttgtcttgagaagctactcactttggggccagatgaccatcaaatgcttgctataaattccttaatgcttgatgggaaatggtcaaatcaagaatcttctgtcaaggaagtagtttccactgctagggtccaaagtttaaagaaactggtgaaagagaagctgcatcaatggctcatctgcaaagtaaacgatgatggaaagggtcccaatgttatgtgcaaggaaggacagggtgtgattcatttagtagcagcactgggttatgattgggctataagaccgataataattgctggtgtcaatgtgaacttccgagatgctcatggatggactgcactccactgggctgcgtctttgggaaggtatgctcgcacacattaa

SEQ ID NO: 39396 - DNA, 594 bp, Zea mays
  Peptide Sequence Number=SeqID_81175
atggaatctctatttgtaggcttgtctcataacaagccaaaaaattcggtggcaaccgcaatagttcgagaagttttatctcatgactggttgctcctagactatatttgcacgcaaggtgatcttgctctcatcgattttattaaggaaatcccttgtgaaccaagggtagaagtcgtgcttattgatgatgcctttgttgaaaggaagtggatggagtgtttatttcagccgaacgcatatttaggtgacgaggttatagactgttacataaatttgataaaagctcaaaagcatctaaagtgccgatctagaggtcgcgttcacatagaaaatgctttccagttcaatttcctgaagcgagatggtgatgttgaaattaaaacagaagagctatatccaaataaagacatgacacaaatatgtagcgttgaacgaagggttttactttacttagaccatgacatggtgtttattccgataaacatccgagagacgcactgctatcttgttgtgatccatgcaagaaatatggagatacaagtgctcgattcacttggtacttcacaagaccacaaagacctcactgactct

SEQ ID NO: 39397 - DNA, 918 bp, Zea mays
  Peptide Sequence Number=SeqID_81176
atggagatacaagtgctcgattcacttggtacttcacaagaccgtaaagacctcaatgactctattaaaggactgcaaagacaaattgatatgatatctcaacgtaaggagttaaaagactacaggtggccagacctccaagttgcttcttggtcgctcagagaaatagacatgggatatgcaaagcagacagatagctcttcatttagccactttcttttgaactatatcgaatactggataggggatgaactgtctgacagttttacccaggctgacatgtcacactttaggaaaaaaatggatgctatattactatcttcagacctgaataagacaagggggtgtctgttatacaaaaatgaaaaagaagttgactctggaagcccattagatgttgagatattagaaaacccaacagattctaagaagaggaaactactccatgtgcttgatgatagcgaagtagtgtatgaagatgagaatggccctattactcaagcagacttgcaaaggtggtttgttgatgattgggataaaagagctcctgtaaaagtctctaatgatgggtgcaccaatgactttttaatggttcttatgccatggaaattcaacggaagtcatgcccttttcgtaatagatcatgttaaaaagcatgtgacttttatcgactttacaccgactcaagattggtgtaaacacatgccatacaagaggttcgcaaaagcgattatcatggcctcaaaaaatataagattgcttacagcaacaaacattctggatgggcagaggatatctttaagtgggaacatacattatcctgggtggtcactcaacgaacaagtccttacggagaggttgttgctcaggaaggcctttggcaacacactcaggaaccacgagccgctcgttgtctaa

SEQ ID NO: 39398 - DNA, 240 bp, Zea mays
  Peptide Sequence Number=SeqID_81177
atggccttagctaatgttggaggtactaggggtggattaggagttgcttccctcccacaggagcttcttatcacttttggtagcctcgctgtcgggtgtaggagaccattcgtcgaccagattcatggaaggaggaggcctgaaaaggtccagttcccctccaagggcttcacccgctgctccagaaggtccggcttccatctcgacaggatccgcaggtacattagggtgcagttgtga

SEQ ID NO: 39399 - DNA, 588 bp, Zea mays
  Peptide Sequence Number=SeqID_81178
atggagatatgccgccgcgcacaagaaaaaccgcgcacaagaaaaaccgcgcacaagtctaccggaccaattggcgtgcctcgccatcaactagccccaaggcatgaggacaatagtagtggtagcaatgatccaatcggggatctgaaagctcaagtagaacaacttcgaacagagctccgtcacaggaatgatatatgggtcgaggatggtgagagaataaacgaattaagaactgacatccgccacctgcaagaccaacttgctgaacgagatttagcactcgattgggctgttaactcacgttcacttgcttgggccaaggaagccaaagctcgagcccgcgtggaggagcttagcacaaccgtggacaacttgcaggtttactgtaatacactacatgaggaagtgcatgtattgtattcacaactgcaccctaacgtacctgcggatcctgtcgggatggaagccggaccttctggagcaccgggtgaagcccttggaggggaactggaccttttcaaacctcctccttccatgaatctggtcgacgaatggtctcctacacccgacaggacgaatctctag

SEQ ID NO: 39400 - DNA, 786 bp, Zea mays
  Peptide Sequence Number=SeqID_81179
atggcccagtctctgacacggggcccgggcccacgtgtcatactccttgggcgtcagttcctaggtacagaaagagcgaaccgccgcttgagcaagtactgcgcctcctcggggccaccgcagaagacagagaagtcagccgcggggacagacttggcagttggcgtgaccaaaggcggactggcagtgattacgtcagcaagcacacggaagcgggccgccacatggccagagaagacaatatcctccaaggtattaacagtgggtccggacccccatgggaaagtgctggacccctgcatatacggaccgggcctccgggcaagggtcccgggattccgggacaaagaatacccggaccttaatcaagaccaagcgggggtccggagccgacacgtgttcggaccatgtcgtgtacgcttctgctccccgctcaggcggagacccgatgctaccacgtggcccactgcccgtgatgtaagccagcgggccgagcctgacgtaaggcctctaggccgcgcggcctctgcatttattgcggataagccgcaccgcctgtccattccactggcaggtgatgtgccgcctcggcacttaatgggccctatccactccactggcaggcgatgtgccacctcagcatttaatgagcatgtccactccgctggcgggcggcgaccaggccatcctgcaggcggtgtgcctgtccattccattggtaggcagtacacccgtgctgtggcatacactatgttcatcatcactcacgtgttaccaaggaagtag

SEQ ID NO: 39401 - DNA, 573 bp, Zea mays
  Peptide Sequence Number=SeqID_81180
atggcaacatgtattgctcttgttacatgggtctcattgccattagatgttcattttgtccggcattgtctgctcaagggaggcacatacaaggatactgagccccgacatgtaggcccaggggcaaaacggaaggaagtaactaacgcttataacgcctgggcgatctccgagcgccataatgtccgtagtgcatatagtattgatatgccgcgctgcttcctcggtaacacgcgagtgatgatgagcatagtgtacgccgcagcacgggtgtactgcctgccaatggaatggacagaattccgggaccttgctgtgagtggctcggaccccacacagaggggtccgggacccgtcccaggggttcggttcgcgcccgtggaggtcctggaccttacccggagagctattagtaacttttctaccctttgcaaaaggaaggttccttcaccaggccaggttacgttcaaaactgcaacaaaacagatgcataatgagaccgaggaacccataccattaccgatgggaggcccacaaaagaaagctatgattaggaatccgggagtggtttaa

SEQ ID NO: 39402 - DNA, 426 bp, Zea mays
  Peptide Sequence Number=SeqID_81181
atggccttagggcaaacgctactgcgaaaaagccctcgctcacatcccctcacgagggacgagaaccagccattaaagccaaagagccggaggtccgaagcgcaggtggcactgacggtctcgtcggtggaggcaaccgcttcggcagaggaagcctcacctatggcgaccaccacctcagcaccgacgacagcggccacctgcccaccaacaccgcaccggcaggtcctcactcccgtcctcgccacaggaacgaggacgggaccgtcccagaacacgagcgccgccctcgcggcgtacgacgtgttgccccccccccccggtgcagcccggcggcgcagggaggacctggacgtggccggcccgcgcacggcgcgaccgacgcccgtgcggcggacgggcagccacgctccaccccagcggtag

SEQ ID NO: 39403 - DNA, 345 bp, Zea mays
  Peptide Sequence Number=SeqID_81182
atgggcgtgcctgccatctgcgcacgcagagcccgcattaaatgcgcggcagagagccgttggcgcgaagatagccgttgctctggagtcgcaccggacagtccggtgcttatagtggacgagccgttggcttttcccgaagctggcgagttcctgaggccgaccacccttggcgcaccggacactgtccggctgagccggatactcagggaaaagcaaattgggattgagatgagccggatacaaggtctaccaggtgggaagagaatcaagagctacagccgtgatttgttcatgtttctgtacattcttctcatcatagccagtggcgaatctaggatttaa

SEQ ID NO: 39404 - DNA, 234 bp, Zea mays
  Peptide Sequence Number=SeqID_81183
atggagagccggcgtgagggatggatgaacgcgagcgacggtgatgaagaccgggcgtcgaaaagctccagcagtggctggtttcagggaataaacagcgaaggatacttaggagatgtgggcaactgcatgggcgtgagtgcgtggcgaaatttcaaggatccacgcccaactctgaagtacagcaaagcaatgaccaaggcagatttttaccacggcaagggatacagataa

SEQ ID NO: 39405 - DNA, 639 bp, Zea mays
  Peptide Sequence Number=SeqID_81184
atgatgcgaggtcggacgagggatcgatggccgacgaccaacaacaagtgtgcagcgacacacagcacggaccgggaagagccggagataacgtgcgtgaaccccaggggattcgcggcgtggactacacgccagggcgaggtccgagaacgccaacgaaattctggacgtctagaacggtggatcagggacgagcgccggggagctcacgcgtgtgaagaagctcgacaccaatatgatgctgttctggcgtcgagaggcgaggcgatggagagccggcgtgagggatggatgaacacgagcgacggtgatgaagaccgggcgtcggtgcagacgagccatctcatgcacacgctgcccctcccctctatcctccaatccaacttctctgtcgtcgacggccttgccagctccgccgcgggtaaccctgatgagaccaagctcttccccaacctgttgggccagccctcggtgtcaatggtgtcgctgagccggatactcagggaaaagcaatttgggattgagatgagccggatacaaggtctaccaggtgggaagagaatcaagagctacagccgtgatttgttcatgtttctgtacattcttctcatcatagccagtggcgaatctaggatttaa

SEQ ID NO: 39406 - DNA, 507 bp, Zea mays
  Peptide Sequence Number=SeqID_81185
atgatgcgaggtcggacgagggatcgatggccgacgaccaacaacaagtgtgcagcgacacacagcacggaccgggaagagccggagataacgtgcgtgaaccccaggggattcgcggcgtggactacacgccagggcgaggtccgagaacgccaacgaaattctggacgtctagaacggtggatcagggacgagcgccggggagctcacgcgtgtgaagaagctcgacaccaatatgatgctgttctggcgtcgagaggcgaggcgatggagagccggcgtgagggatggatgaacacgagcgacggtgatgaagaccgggcgtcgtgtgcacttaactgccctgaacttcttcagtttactgcagaagcaaatgcagtcctctatttctcaaatttctccacacaaacaaagctaccctcccacagcaaacctgtttactggacattagtctttcactttgttgtaaacttccagggtcaatacctcacaggtttcgagttatag

SEQ ID NO: 39407 - DNA, 336 bp, Zea mays
  Peptide Sequence Number=SeqID_81186
atggatctcagtttttgttgtcaacgacgtgcgctgcatagaggatggctccggctctggagcagcgactgttgctggtggcgtcgcaacgccaacagtaggggacaacaggttggccggccggacggacgttgtcacataatgacatacgacagcgtcgtccccgccgcggcgcacttcagccacctccttgatcttgcggagcttgcgctcgacgatgcggcgacgaaatcaatgctgacggaggtggactcggcgtcctcctcggcgcgcaggacgccgtcgagcttattgaggaccgtgatctcgcagcgcgacgtcttgagcgccgcctga

SEQ ID NO: 39408 - DNA, 181 bp, Zea mays
  Peptide Sequence Number=SeqID_81187
cgtcgtccccgccgcggcgcacttcagccacctccttgatcttgcggagcttgcgctcgacgatgcggcgacgaaatcaatgctgacggaggtggactcggcgtcctcctcggcgcgcaggacgccgtcgagcttattgaggaccgtgatctcgcagcgcgacgtcttgagcgccgcctga

SEQ ID NO: 39409 - DNA, 390 bp, Zea mays
  Peptide Sequence Number=SeqID_81188
atgcaggcggcatgcaaccgcgccaagtgggcgcgcccctccgacttccaatgcacccagcatgggggcccacacccacgcgtcatgcaactggcgcaccggtcgctacgtgcaagcaactgcaccgccactcgcatcactgccacgcctcctcgactgcggaaccagtaccacgactcgaggcaaccctcgcgcacgcgcaacggccgccccgcgaaccactcgccccgtcgcattaactccgcggcatgcggcgcctctggcaggggaagcgagcgacgcttcgccttcgccataatgaccgcgtcaaaaaaaagggaccgggaaagggggataccccaaaaaggacccttctccgtgaaggaaacaggctccgagcctccctactga

SEQ ID NO: 39410 - DNA, 354 bp, Zea mays
  Peptide Sequence Number=SeqID_81189
atgactggaggacgcctcctccgtagagctgggggatggtttccaccaccagaagctggaagaggaggtggccagccgacccgtgcgggaggtagagccccggctcgcctcgctctctgcctcagcaaggatggcggcgcctctggcaggggaagcgagcgacgcttcgccttcgccataatgaccgcgtcaaaaaaggggccgggaaagggggataccccgaaaaggatccttctccgtgaaggaaacaggctccgagcctccctactgatcagaggttcgaaggctgaccccacgggggggttcaacagccgcctcagagcgcgtgggttctgcaccctgaaagtcgcctag

SEQ ID NO: 39411 - DNA, 1101 bp, Zea mays
  Peptide Sequence Number=SeqID_81190
atggatgaaaggtaccaactcccacggagttgcgttcctccaatgacgaggcggaaagacggcgagtatcccccatccgggggcttggaaggtggaaagacacgatgcacaagggagcgcgaagacatggtcgccttccaagggggtcaccctccttttaaaggcggctctccctacttgcgtccccagccgtcgcgggctgagtcttctccaacacgctccaaggtcttcccctacggcgcgggggctgggtcccacacgtcatgcaagccggctcaaagcagaagaagccaaatcgccgtgcgcggtgcgtacaaccgcccagtggcccacgcgtcatgcaaccggcgtgccgagtgcttcgtgcatgcaactgcaccgccacttgcgccaccaccgcgcctcctcgactacggaaccgataccgcgactcgaggcgacccagagcacgacccagaggcgccagcctggcgcgacgatcaatgcggccaaaaatgggtcggcagcggcgcctctggcaggagaagcgaacgacgcttcgccttcgccataatgaccgcgacaaaaaaggctggcccctcggaagggttcgacagccgcctcagatcacgtgggccctacacccactactggtcagaggttcgaaggccggcccctcggaagggttcaacgaccgcctcaggctactcgggctccgcgcccactactgatcagggcgggaacgatcttgtaacggaatcccatcaaagggaggcatcgagccctcggaccccgtcgccaggggaccgggtccggcagatcacccgcagctcaccggaaacaccatgttcggcgcccatcaagggcaacatggcgctttcccccctcctccttgcggaaaggcgacgcaggggcatatgtaaaaaagtcgagtctgtccctgatcgccctctcaccctgtgcagaggctcgggggctgccctcgcaaacctggctccggtcgaactgttgacagcgtcaacataccagcccgagaacttgggacccgaccgtacacccgggctacggccagctcgcatgagggaacgaccagaccagccgaagcattacgcgaggcattaa

SEQ ID NO: 39412 - DNA, 714 bp, Zea mays
  Peptide Sequence Number=SeqID_81191
atggcggaggtaaagcgtcgcctgcttcgcctgccaaaggtgccgtctgtcctaccgcagagtttccatgctggacgcgtcgaagtcgaaagggtgtgccctcttggtgcagttgcatgccgcctgcatggtggtcggccctttcacccgctggtctgggcgaaagtggaggagtgcttcccggctgcatccccttgccgatggtcacccaagacggtgaccaccagtttgaaggtggggagaagcaagccgggctgcggcctctgccccgccctcagcttcaaggatcttcatcatccttgctggggaggagggcgaggcgagccggagctctaccttccgcacgggtcggcgggccacctcttcttccaccttctgggggtggcaaccatcctccagctctgcggaggaggcgccctccagccatgccggggaaggactgaggacctgccggtgcgctttggggcggccgacgctcgctggtgcggtgttggtggacaggtggacgccgccgtcggtgctgaggtggtggcagctggagaaagcttctccgccgacgagaccgtcagcgctacccgcggaccgacctccggctctttggctttaatgtctggttctcgtcccttgagtggggacgcgaatgagagcctttcggcggcagcgtccgtccagggaccatcgctgctgctgaagaggtcgctggcgagtcactag

SEQ ID NO: 39413 - DNA, 588 bp, Zea mays
  Peptide Sequence Number=SeqID_81192
atgaagcgggcgacgtttcacctccgtcatgatgaccgcttcaaaaaaggggttcgaaggctgcgccttgcggggtccaatagccgccccagagcactcgggcccccgagccctcctactgatcaggggttcaaaggttgcgccctgcggggtccagcagccgcccgagagcactcgggctccacgcccattactgatcagggttcgaaggctggcccctcgaaagggttcgacagccgccccagatcacgcagagtgagggatgaccctaggtacgtccgttacatggccgaggctcgggctacgctcccgaggtatcctaggacatttccgagaccagcaggaacgatctgtaatggaatcccaccggagggaggcaccgagcccttagaccctatcgaaatgggtccgggtctagcaaatcccctgcagaggctcgggggctgccctcgtacctggttgtggccaaaactgttgacaacgtcaacaaaccagctcaaaagctcggagcctgaccgtgcacccgggctacggccaggccgcatgagggaacaaccaggccgaccgaggcatcacaacaagaattaa

SEQ ID NO: 39414 - DNA, 810 bp, Zea mays
  Peptide Sequence Number=SeqID_81193
atgaaggaaacgggcccccgagccctcctactaatcaggggttcgaaggctgcgccctgcggggtccagcagccgccccagagcactcgagccccgagccctcctactgatcaggggttcgaaaggctgcgccctacggggtccagcagccaccccagagcactcgggcccccgagccctcctactgatcaggggttcgaaggatgcgccctgcggggtccagcaaccgccccagagcacacgggcccccgagccctcctactgatcaggggggttcgaaggctgcgccttgcggggtccaatagccgccccagagcactcgggcccccgagccctcctactgatcaggggttcaaaggttgcgccctgcggggtccagcagccgcccgagagcactcgggctccacgcccattactgatcagggttcgaaggctggcccctcgaaagggttcgacagccgccccagatcacgcagagtgagggatgaccctaggtacgtccgttacatggccgaggctcgggctacgctcccgaggtatcctaggacatttccgagaccagcaggaacgatctgtaatggaatcccaccggagggaggcaccgagcccttagaccctatcgaaatgggtccgggtctagcaaatcccctgcagaggctcgggggctgccctcgtacctggttgtggccaaaactgttgacaacgtcaacaaaccagctcaaaagctcggagcctgaccgtgcacccgggctacggccaggccgcatgagggaacaaccaggccgaccgaggcatcacaacaagaattaa

SEQ ID NO: 39415 - DNA, 639 bp, Zea mays
  Peptide Sequence Number=SeqID_81194
atgaagactctgacgactttctgtggctaccatcccctagagatggtgatgcaccctttgggactcttcactgttgagaagaaggatgatcccatgtggtgtaacccgtgtgagccatgtgaaggatgtgtgggcaatgcccttcagagcgacactatgacacatcttgctaacatcgctcaaaccaccaagctcactcttgacagtcgagaagattttgtggtcaatttatcctccgagttggtagagaatgatctgcaggtggaaaggctgagccagcgcattgccaccttggagcagcaggtggagatccgagacaactgtaacaccctgaatttggggcgtaaacctagtggaatgagccctagaggcactttggttgttgcattcatgccgttgcatgatcgcgattcgcttctgagcttcgaggaatcgacgatcaagcatggcgaccaagtgatcgaactcttcgagttctacgagatcgaagatcctgagcatctgtttggtgaaggcaaagatgtatggtttacaggtggtgatgaggaggatggttatgattatgcttatggtaatggtaaagaaggcgtcgaggcggatctccaggagttccaggacttcgacgagttcgaggattag

SEQ ID NO: 39416 - DNA, 1149 bp, Zea mays
  Peptide Sequence Number=SeqID_81195
atggacgtccactcggattacccgcttgcagctcaccggagacaccatgttcggtgcccatcgaggaggctcgggggctgctctcgcaaacccggctccggccgaaccgttgacagcgtcaacataccagcccaagaacttgggccccgaccgtacacccgggctacggccagctcgcatgagggaacaaccagaccagccgaagcattacgcaaggcattaagacctcgaaggagtgaaaccactcctccgaggcctcgggggctacacccggcgggtgcgctcgcgcgcacccaccggaaccaaatgcaaccgagaaaggctggtccccttgcaaaaaagtgcgacgaaagcctccaagcgagtgctaacactccctttgaggctcgggggctactgtcggggaccataattaggggtaccctcaagacacctaattctcagctggtaacccccatcagcataaagctgcagaggcctgatggggctcggactcgggctaagccccggaagacgacgaactccgcttcgcccgacccagggctcggactcgggctaaggcctcggaagacgacgaactccgattcgcccaaccccaggggctcggactcggcctctgcggacgacctccgcctcgcccgacccaggggctcggactcggcctctgctgacgacctccgcctcgcccgacccaggggctcggactcggcctctgctgacgacctccgcctcgcccgacccaggagctcggactcggcctctgctgacgacctccgcctcgcccgacccaggggctcggactcggcctctgctgacgacctccgcctcgcccgacccaggggatcggactcggcctcggccatggaagacagactcgaccccggcttcggaggagcctccacgtcgcccaacctagggcaccggccagccacgtcgacaggaagcaccatcatcaccctaccccgagccgactcgggccgcagagaacaagaccgggcgacgtcagcaaggacacaaccgttccaacagctgtccctctgccagactccgtcgctcctccgacagccacgacatcacgccagcagggtgccaagatctctccggctgccacattggcatgtacttagggcactagctctcccccgctag

SEQ ID NO: 39417 - DNA, 108 bp, Zea mays
  Peptide Sequence Number=SeqID_81196
atgggcaccgaacatggtgtctccggtgagctgcaagcggggctcgatgcctccctccgatgggattccgttacaagatcgttcccgctggtctcggaaatgtcctag

SEQ ID NO: 39418 - DNA, 402 bp, Zea mays
  Peptide Sequence Number=SeqID_81197
atgaggctggccatttatgacgaacgtgtttattccatttatcgtcttctgcaccaggacaatgttatttctaccccagcaataaaaggaacaatattacctggtatcacaaggaaaagtataattgacgttgctttgagtaaaggcttccaggttgaggagcggcttgtttcagtggatgaactgcttgatgctgatgagacttatttagcaatgatatcattacatgtaagggagttcactttgcagagtggaatacggccaccaaggtgttggcgttgtgtcccagcagctgtacacttcactgacgagtcttcagatgggtcaaaccgaggattggatgggctggactgtgcaactgaattagttggccgtggttcgtggatcattcccaacagatga

SEQ ID NO: 39419 - DNA, 1062 bp, Zea mays
  Peptide Sequence Number=SeqID_81198
atggaatacggcgccgtcctcgccgccgcgccgctcgtcgcacggccgaactggctcctcctctcgccgccgccactggcgccgtctattcagattcagaatcgtctttattcgatctcgtcattcccactaaaggctggacctgtaagggcatgcagagctttagcaagcaactacacgcaaacatctgaaacagttgatttggactgggagaacctgggttttgggattgtgcaaactgattatatgtatattgctaagtgcgggacagacgggaatttttctgagggtgaaatggtgccttttggacctatagcgctgagtccatcttctggagtcctaaattatggacaggaaaatgctgagaggatgcggacaggtgctgagaggatgtgcatgcctgcaccctctgtcgagcagtttattgatgcagtaaaacaaaccgttcttgcaaataagagatggattcctcctactggtaaaggttctctgtatattaggcccttacttatgggaagtggggctgttcttggtcttgcacctgctcctgagtatacattcattatatttgtctctcctgttggaaactactttaaggaaggtttagcaccaataaatttgatagttgaagacaagttccatcgtgctactcctggtggtactgggggtgtgaagaccataggaaattatgcttcggtgttgatggcacagaaaattgcaaaggaaaagggttattctgatgtcctctacttggacgctgttcacaagaagtaccttgaagaagtttcttcatgcaatgtttttgttgtcaaggttgaggagcggcttgtttcagtggatgaactgcttgatgctgatgagacttatttagcaatgatatcattacatgtaagggagttcactttgcagagtggaatacggccaccaaggtgttggcgttgtgtcccagcagctgtacacttcactgacgagtcttcagatgggtcaaaccgaggattggatgggctggactgtgcaactgaattagttggccgtggttcgtggatcattcccaacagatga

SEQ ID NO: 39420 - DNA, 465 bp, Zea mays
  Peptide Sequence Number=SeqID_81199
atgccgacctcctcttcttctgctgccgctacgccgccggccgacgcctcgtccgaggagatgctgagtactttggtggcggaggagttgcgcgccgacgatacggtggattttggtgtgtcgaggatgtcgccggtccgcgtgcaagatatgcagcggttgggttactttggcggcggagttgctcgtgtcccgaggacggaggaagtccctgagccggagggcgagttggttgtgtttgaggcgttcttcgccgccggtctccgcctgactgcgcaccgatttgttggagaagtcctgcgcagatttaatgttcagatacatcagctgactccgaatgccgtggtggctctgtcgaaaagaattgatgaggacatgtgcggccccggggggaaggatgtcttcgcccgagctccaggagtcttcggcgcggatgatgagggttaccgggggttggtggcctag

SEQ ID NO: 39421 - DNA, 483 bp, Zea mays
  Peptide Sequence Number=SeqID_81200
atgcttgtgtttggctatgccactaaggaagcggatgaggcaatgttgtttagacacatggtgccatcaaagctatggaaggtcctgtcgtggctcaatgtcgggacagagaagaagcttgctaatgttaaggttgtggtcgatcagttcatctacaaggagatttacaagcggaaggcatgggggagcaacaaaagccaggcagatgtactatccatgtacacgaaattgagcttggatcccagtatgagcgagcagcaaaagacagacttcctccgtgaaatggttgtggggttcatcattgctaggaaggacctcattgtcgtcaagctcacatggttcttttacatgatgtgcaagcacccaaaagttgaggcgatgatactcgaggagctcaaagacttgcagagctgtaggtggcctgggttctggacacacaacaggacctctctagggtcatccaaattattatggaggacataa

SEQ ID NO: 39422 - DNA, 678 bp, Zea mays
  Peptide Sequence Number=SeqID_81201
atggtgccatcaaagctgtggaaggtcctgtcgtggctcaatgtcgggacagagaagaagcttgctaatgttaaggttgtggtcgatcagttcatctacgaggagatttacaagcggaaggcatgggggagcaacaaaagccaggcagatgtactatccatgtacacgaaattgagctgggatcccagtatgagcgagcagcaaaagacagacttcctccgtgaaatggttgtggggttcatcattgctgggaaggacctcattgtcgtcaagctcacatggttcttttacatgatgtgcaagcacccaaaagttgaggcgatgatactcgaggagctcaaagacttgcagagctgtatcactgtgatgtggctgaagcaagtatctcttttgttcttgtcaaatcagattagttcactccctgcctctgtgttcgagtgggcgcggctttctcggttgcaggtacaccggacaacagtgtggcttgctgagcctgcagtgagaatgcgcctaatggctcttctggttgatggatgccggggactgagcagtggtgctatggatggtgtgatccatgggcaagcacacacggagatccaatgtttcaggagtttgcgggccgattactgcgctgggtgtgctcgtcgttgtttgagatggtcaggagctgggtgctag

SEQ ID NO: 39423 - DNA, 597 bp, Zea mays
  Peptide Sequence Number=SeqID_81202
atgagatggactggtgccagcttattttcaatgatttatgccaagctgccaagaagtggcaatactaggagcgttacgaacgtttctacaaccatttacggatgttccatcgtcattcttctgtattatttggatcatcttcatgactcagcggcacctcagaacaaacgtggaacaccacgaatcaaatattttgataggaatattattcaagcactgacaagagctgacaagggcaagatacgcaaaggagaagaaccatttggacattgttcgcataagaccaggacaaacacttttgatgtacctcgtcctgacccatctggacagcacacaattcacatcgaactcccgctcatatgggatttgatatcaagcaagctgaatcagcttccattccgccaccgcctgggtttcatagagaagttgtcacattttgatacggagattgttgagaaacaatacaatctatctgatgtttttggtgagttaattgatgaggtcctccgtgctgagtcgggggacaatgaagatggttatgatgtgcagaaaacaacttcaaaatcagatgatattcttccccagacagtaggttag

SEQ ID NO: 39424 - DNA, 1254 bp, Zea mays
  Peptide Sequence Number=SeqID_81203
atgaagaacgtagaccgacctccttctaatccaaaacggattataatccagtctactcaagagtgctttagcgttgacataccccgtgttccggcggagactgttagacacgaaacaaggcaggctgctgatgaggacgatgactttatgccattatccaagaagcgtaacttcgacgacagtcctgggaaagtcttgaagaaggtagtcacaaagcggaggaaagtagtggaccccccccgacagcagaggcttaacgtgagatgcaacccccaagatgtattagtaagcatccagatattaaatgacagacagcgccaagcaattgcacggaggggattttcgagaattcttgatatcagacttgacgcactcggcagcagatcacatttagcttggctgatggaaaagctcgaccacaatgacatgacaattcgagctggcccagggaaggagctgaaaattacaaaggatacggtgcaccttattttggggttaccaaatgctggtggaggaactgcattgggcatcgatgaagctgttgctgccaacaatttaagagctgaacttggtttatcgaaagaagattttggggttgcagctcttcaagatcgtctgaggaaagggtctgacgatgatttaagcatcagatcctttttcctgatactgttcaataggttgttgttccctactgccagttggggaataaccaaccatgaggttcttttaactgaggagatggatcgtttcgaccagatggactggtgccagcttattttcaatgatttatgccaagctgccaagaagtggcatactaggagcgttacgaacgtttctacaaccatttacggatgttccatcgtcattcttggtaaacatggtgacggtggcaagaacatgccgaccaacacaaacgtcactcctaaagcaacaccacatatggaacctgacgcaccgatatttgatgcgactccgcaaatcaagccactcttcaatttggaggaacaggaaggacccagtggcaaccctcaacctttggaggaatctgtattccacacatttttgacaaattcattgcctgagacaggaggaatgggaccaatgcaaagcgatcatggttcccatggtaagcagggggcattggacattggcaacactagtgagatatggtctcttgcgctgcattatatcacattccacccgaagaacaaagcattatcgctgctcgaagacatccaaagattcaaggtctaa

SEQ ID NO: 39425 - DNA, 206 bp, Zea mays
  Peptide Sequence Number=SeqID_81204
atgaagaacgtagaccgacctccttctaatccaaaacggattataatccagtctactcaagagtgctttagcgttgacataccccgtgttccggcggagactgttagacacgaaacaaggcaggctgctgatgaggacgatgactttatgccattatccaagaagcgtaacttcgacgacagtcctgggaaaagtcttgaagaaag

SEQ ID NO: 39426 - DNA, 1107 bp, Zea mays
  Peptide Sequence Number=SeqID_81205
atggtgaagaaaaacataatctctactactacttatgtttctaatgtaggcgtgcacacaatacggttctgccgatctctcacgcacgcgcatggaagcagcaggcaacacccttctccgccgccccagatctcgcccctcgcggatctcatgccaacccccgccctacccccgcctgcccttccactcttcccccgccgcctcgccgcggatctcgaccccgcgaatctcgcgctagccacaaccgcgcacgctcccacgcgcgatggaagcagcccgccatgcccctcccaccacaaccgcgcagcaccgtcccccgcggagccggagacgagcgaattggcggtggaggcgatgccactgggcgacggcgcggaggtggcggacttcatgctgccggacgagctcctggtggcgctgacgtgggacccctacaagcagctagatctgacatgccgcatcaccgcgctggcggtgtccgggcgggtgtccggcctagagcgggagacggggcgcctgcgggcggaggccgcggggaaggaccgcgagaacaccgagctccgggagcgagtggtgctgctcgataccgcgctgcaggagaccaacgccaggctccacccccccatgctcacgatggcagaccttcccacggggacgagggacctcgcgcgcgaattccgatttcctccggggtggttcctggaaggaagcaagccgggcgacgcgtccgcggtggccttgtccggaagtgagaggtacccgtttgtcggcagcaactcgacggtgccgctggccaccggcatgaccgacaccgccaccgtgctgccgctgccggacatcgggatcaaggacgccaccaccaaggcggtggggttggcagcgtccgttcatgctctcgtctccaccatgattgggcttggggtttcccctgccaccctattcatggaacctaaaggatttgggttcatccaatactttgatcctgaggatgcttctgatgcaaagtaccatatggatgggaagatgctgcttggaagggaaattgctgttgtttttgcagaggaaaacaggaagaagccttctgacatgagggccagggaaaaataa

SEQ ID NO: 39427 - DNA, 396 bp, Zea mays
  Peptide Sequence Number=SeqID_81206
atgctgcttggaagggaaattaatgttgtttttgcagaggaaaacaggaagaagccttctgacatgagggccagggaaaaaataagtggcagaggctgttcttatgatcggaggttgcgctcaaggtcacctgggttgaacgattctcctaggggtagatcacggtcccaaagccgaagctactcgccagcacttaagcaaaagcactgttcaagcaccctcgtgtgtactctaggatatctgaacgtgtactatgtattgggtattccaaaatctctaatgagtgaagtgggttgtgaaccaatgaaccttgatgttggacgtgctgaccaggctgataggagttatagctcagttggttgtagaagtctggtagccttgctattatcaagatga

SEQ ID NO: 39428 - DNA, 414 bp, Zea mays
  Peptide Sequence Number=SeqID_81207
atggaattaccactagacgcgcagagcagcggaagacgtctcgatgtagatgaacacgtcgagcagtgccgtgcagtcgacgacgtccttcacgtcctcgcacggttcgtcctagtgctccagatgcagcacctccgaggagaactgcgcgtcatttcatttaaggaagaaaagaggtacaagggtcaagaagtcctcaatgacgaggcaaactatggcagacaaattgtgaccatatccagcattgatggaaaaataatacgttatgctaggccaaatcacccaactagaaaagggagtgatgcatctgccgagtctggatctgaagtggaagatgtaacatctcctactgcatcaaggaacctgattacacatcctattttgacccctgttcacgaggaggcaagtggctaa

SEQ ID NO: 39429 - DNA, 1518 bp, Zea mays
  Peptide Sequence Number=SeqID_81208
atgttcactctacgccgcgctggagctctgccaagccgctgtcgtgacattttccgtccgttccgagcgctcgcctggctgctcgacgcattcgctagcgccaccttcgaccagattgactccgcctaccgcgaggccggaggggaccctttcgtggctgccactccccctcgcgctttcatcgtcgccgtgaaccgctcgctggcgctgacctctcccaagcgcgacacggtggtgcgggtgccgtacaaggtctccatcccgctgggcagggtcaagacagccacaccgggtgggaacaagggccggccggagcagaagtacgtgcaggcttcgagttcttgttcatgggcttcgttaggtaccaggtgtccctgcacgaactggagaaggccatcgagcaggcaaacgttcggggctggatccaccgactcccacgtcccgttcggcgtcctgctctccggtgggctggactcgtcgctggtggctgccgtcgccgttcgccacctcgctgagacagaggccgccaggcgcgggggcaccaagctccactccttctgcgtgggcctggaggggtcccctaacctcaaggcggccaggacacgcacctgccgcagcccctgccgccaccggatctctcgccaaggacaggctgctccccctcacgctttcgtcgtcgtcgtggaccgctcgctggcgctgacctctcccaagcgtgacacggtggtgcgggtgccgtacaaggtctccatcccgctgggcagggtcaagacagccacgccgggcttcgagttctggttcatgggcttcgtcaggtaccaggtgtccctgcacgaactggagaaggccatcgagcaggcgaaccttcggggctggatccaccgactctcgttcggtggcctcacgttgtgcttttgtgtggctattcgttcactggagaaggccattgaactattgaataagaggaaagttcaggggagaattcttttgtgtggctattcgttcaattacatttctgggacagcttcaataaagaaagatcttatagactactacaattcttccaccataagagattgggctggaagggctacagccttcaaagcaacagcagattttagctttcaagacgctgatgtccttaaacttaaactagacatacttgctcctagcaatctcatatgggctgcatgggcgcctaatggaacggatgaatcaaactatgctgtgaactgccagaatttcttggtggcaaatgcaattgtattgaaggttgccaaagatctgacaaagagagtcctcaatgacgaggcaaactacgacagacaaattgtgaccatatccagcattgatggaaaaataatacgttatgctaggccagatcacccaactagaaaagggagtgatgcatctaccgagtctggatctgaagtggaagatgtaacatctcctactgcatcaaggaacctgattacacatcctattttgacccctgttcacgaggaggcaagtggctaa

SEQ ID NO: 39430 - DNA, 519 bp, Zea mays
  Peptide Sequence Number=SeqID_81209
atggagctttgtgaaggtggagaactattggatagaatcttgtccagaggtggaagatacaatgaaggggatgcaaaaattattgttgaacagatattaaaagtagttgccttttgccatcttcagggtgttgttcaccgtgatctgaagccagagggtgatcagggggtaaatgccacacagtggctgcataacgaacctgtacttgttactgtaagtggtgatagcagtgttggaatgtgggacgttactttaggtcaaccttgtgtcagacatatcgttgcccatactcgatgtgctaatgcggttgctgtggcccctaatgacaaatacctctgcacaggaggaagcgatcagaaagttgctgtggcccctaatgacaaatacctctgcataggaggaagcgatcagaaagttgtgagttgcttatttgtccttttagtttcttatgtggcttatgttatgtcgtactggaaaagggaagggccgcaactgtcagaaattcctgttttcctgtga

SEQ ID NO: 39431 - DNA, 651 bp, Zea mays
  Peptide Sequence Number=SeqID_81210
atggagctttgtgaaggtggagaactattggatagaatcttgtccaagtattacattttcttgagaaatcattttgcgaacaccactacaagaggtggaagatacaatgaaggggatgcaaaaattattgttgaacagatattaaaagtagttgccttttgccatcttcagggtgttgttcaccgtgatctgaagccagagggtgatcagggggtaaatgccacacagtggctgcataacgaacctgtacttgttactgtaagtggtgatggcagtgttggaatgtgggacgttactttaggtcaaccttgtgtcagacatatcgttgcccatactcgatgtgctaatgtggttgttgtggcccctaatgacaaatacctctgcacaggaggaagcgatcagaaagttgttgtggcccctaatgacaaatacctctgcacaggaggaagcgatcagaaagttgtgagttgcttatttgtccttttagtttcttatgtggcttatgttatgtcgtactggaaaagggataagaacgtgggtacccacgttcttaaagttaagaacgtgggtaccgtcgaacttaatgtgcagcccacgcagacccacgtaggccacataagttcgacggccacgcgtccccgtcgaacttaa

SEQ ID NO: 39432 - DNA, 228 bp, Zea mays
  Peptide Sequence Number=SeqID_81211
atgagggtgatatgggatgcccttggccaagtaattagggaagtcttatgttgggtgctggtttttggtcattgggaaacggaggcatctgttatggctcctatattctcgctcagggatctgggtacgggcatcgtcccacggctttttcctgagggcagaggtaaagaagaaggtgtcgaggcggatctccaggagttccaggacttcgacgagttcaaggcttag

SEQ ID NO: 39433 - DNA, 228 bp, Zea mays
  Peptide Sequence Number=SeqID_81212
atgagggtgatatgggatgcccttggccaagtaattagggaagtcttatgttgggtgctggtttttggtcattgggaaacagaggcatctgttatggctcctatattctcgctcagggatctgggtacgggcatcgtcccacagctttttcctgagggcagaggtaaagaagaaggtgtcgaggcggacctccaggagttccaggacttcgacgagttcaaggcttag

SEQ ID NO: 39434 - DNA, 234 bp, Zea mays
  Peptide Sequence Number=SeqID_81213
atgaacgtatgtgagctcactcttgctgtctcacatacaccacaggtcaagaccagaactcctgttatatataaagatgtgacattcgatcctgtgccactatacatcatatgtgtgagacttggtcccagcatacctggtgtttatgttaaccccgggttttggacccctaaaatccgggtgttacagaagtggtatcagaggaatgttgattgtaggacgaaacctagatag

SEQ ID NO: 39435 - DNA, 234 bp, Zea mays
  Peptide Sequence Number=SeqID_81214
atgaacgtatgtgagctcactcttgctgtctcacatacaccacaggtcaagaccagaactcctgttgtatataaagatgtgacattcgatcctgtgccactatacatcatatgtgtgagacttggtcccagcatacctggtgtttatgttaaccccgggttttggacccctaaaatccgggtgttacagaagtggtatcagaggaatgttgactgtaggacgaaacctagatag

SEQ ID NO: 39436 - DNA, 576 bp, Zea mays
  Peptide Sequence Number=SeqID_81215
atgggctgcgcgatgtatttcctttggtgggccgaattcagatactgcagcccagatgcaattgtggacattactccacaactcattacactcaatcaaagatccaaatcagacaagtatcgtaaggacaaacattcgagttcacagatatctataaaaatagttttgtttttgttcctaagagtaggactcctattcctaaaggtcatcttagggataggatttcaaagtgtgaaatccaattttgtctttagaagaaaaaggtttcgtcctacaatcaacattcctctgataccacttctgtcacacccggattttaggggtccaaaacccgggcacgaacataatcaccaggagacaacggtccagcaacccaaagttgactgggagacgacggcctataccactcatgaatttatcacatcatcctccatgcgcctcatcctgcggtacctgttcttggcctgtggggggtgtgagacagcaagagtgagctcacatacgttcatcgctcaacaagttgtggggaataatgtgcatgaactcgccaaatatgggagctcacgtgaagtgtaa

SEQ ID NO: 39437 - DNA, 387 bp, Zea mays
  Peptide Sequence Number=SeqID_81216
atggaccgggcgattccggccatccccgacgtcaagccgtacctcgacgtgaccgccagagtctccccgagccaaccccacccttcaccggacctccctcgccgccgggataacttagaaaaaccctacaaaaataaccccaaggtaaaaacacccccaccccttgggataacaaatgttttattggatacaagggcaatacaaattacctatgtttattctcagcaaaaacctaagcttaaagactgtaacctcgctgacggagagtacatcctcgtgccggagcaaggagctgctcaggaggtagtcccagatccagcaccagagtctgcaccagaggacctgtctgccactgctttggaaggcaagccccggttttatgcataa

SEQ ID NO: 39438 - DNA, 855 bp, Zea mays
  Peptide Sequence Number=SeqID_81217
atggaagaaactcacctccacgtgttcgacgccttctgcccgcaccagagcacgcccgcgcgcgcccccgcatgcctagcaccgcgcccgagccaacccaacgccgtggcccgctcccgagcttataaaccctcccaggcttcggctacactcttccgcgcaccctcaaaacctcaccggagtttagctcgtcgccgtttgcccgtgcgcagcgagtccgcggccgcccaatccctctgtcaccgtagaccggccaatagagccattcccaaccccgtccagccctcggagaagattgtgcgcccctccgtgaagctccccgagcgaggaatcggagtttgcttcgccggagaggccagtccacgctcgtcggagctctcaaccccgccggagtacgtagaccgggtaaaccactcaaccatccttcgattccttgtgcacacagtcgctacgttacaccgtgaagctcaccgtgcccttggattgaaccagttcgccgtagtttggccggtacactcgccgccgacgagcacacccgtctgcgctcgtggaccgggcgattccggccatcctcgacgtcaagccgtacctcgacgtgaccgccagagtctccccgagccaaccccacccttcaccggacctccctcgctgccggatacaagggcaatacaaattacctatgtttattctcagcaaaaacctaagcttaaagactgtaacctcgctgacggagagtacatcctcgtgccggagcaaggagctgctcaggaggtagtcccagatccagcaccagagtctgcaccagaggacctgcctgccactgctttggaaggcaagccccggttttatgcataa

SEQ ID NO: 39439 - DNA, 234 bp, Zea mays
  Peptide Sequence Number=SeqID_81218
atggagaaggatcgccaagttgcgcagcggaagaagcgcagggctcaggtcaggttggcggacccgaggcgggaggtgaagatgacgcggccgagcatgaagacctctagcctcgacgccggggcggagtctgggcagctggctgttgttccagcggcgctgtatgccgacccgatggccgtggcgaccagaacgaagggtgacacgggggcccctgggggacccatggtctaa

SEQ ID NO: 39440 - DNA, 1476 bp, Zea mays
  Peptide Sequence Number=SeqID_81219
atgggccaaattgcacacgggcccctccctgtgctaagggggacaaggtcttatggtcttcgcggggtcttcgtcttggcttgtcggagcgaagaggggcgcataggcctccgtatggacggtgtccgcagcctgtccggtggggcctgcaggagcggccttcgttctgtgcagttccgagaaaccctagcttttacaattgctcgcctgccctccttgctcgttctgcgccggagatctggcccgtatcaagcaaaccacgtgccgccgccgacgcccaaccacaccatggagtttgagacctcaaggatttttttgggccacgtgctggagatgcagcggctgagttactttggtaacggtgtcgggcgggccccaggtggagaagaggtccctgagccagagggcgagttgattgtttttgaggcctttttcactgccggtctttgcctcccgacgcatcggttcgtagtggaggtgttgcgaatgttcaagaagagaaagataggtgataagatagccaaatttggatcgtgcaccttcacgccaaggactgcgaggacctcggatgaggttgtcgagatagtcctctatgctaggaataagtggggcaactggtgggacttttggttctatgtagccccgggggatgtcaaaggcttgtcgagtctgcctcctgccatcctgtgctcacattgttatgtggcatttccacgatttgaggtggcgaaagaagacgaggacgaaggggccctccgatatgcagcctgcctaagtagcgagcgcaacctggtggaggaattcattgactacgggatggtgcgaagtccagtcttcaccgtggatcttcgcggtcgcgatgcaagcgcgtttgtgcatgaggtcgaggccgaggccgtgaagattgttgggaagaaaaggaaattaggtacagcggctgaggattttgggttgagggcttttgatcattttgttgtggatttgttggagacgtgcgcagctctaggaatcttcggcgagaatgctaaagtgatggagaaggatcgccaagttgcgcagcggaagaagcgcagggctcaggtcaggttggcggacccgaggcgggaggtgaagatgacgcggccgagcatgaagacctctagcctcgacgccggggcggagtctgggcagctggctgttgttccagcggcgctgtatgccgacccgatggccgtggcgaccagaacgaagggtgacacgggggcccctgggggacccatggcggccgctttcgctgaacgcattgcttcgggggcattgaccttggagttttcttctgagaggcagcgacttgagggaagaatcgagcacctccggacgccacatacggaggcagtcagggacaagtcaactgcagagaataagagccgcaactttcttgagaatctgacgacgacaaagatagagaaagaaaaccccagccgtcggcttgcggag

SEQ ID NO: 39441 - DNA, 1119 bp, Zea mays
  Peptide Sequence Number=SeqID_81220
atggcctcagggcaaacgctactgctgaaaggccctcgttcacgtcccctcacgggggacgagaaccagccattaaagccaaagagccagagcctcacctatggcgaccaccacctccgcaccgacgacagcggccacctgcccaccaacaccgcaccggcgaaagggcagaccgccacgcaagaaacatgcgaccgcaccacggttgtgcaccctggcggcttcgtcgcatccggcggtccagcatggaggcccgggcccacacgtcatggcaagcgacacctccggcaggcgaagtgggcgccgtttcacctccgtcatgatgaccgcgtcaaaaaaaggccccgagccctcctactgatcaggggttcgaaggttgcgccctccggggttcggcgaccgccccagagcactcgggctccgagccctttactgatcaggggttcgaaggctggcccctcggaagggttcgacagccgccccagagcacgcagagtcagggatgaccctgggtacgtccgttacatggccgaggctcaggctacgctcccaagaggctcgagggctgctcttgcaccaggctacggccaaactgttgaccatgtcaacaaatcagccctcggcctcgggagaaggtctccacctcacccgaccccaggcctcagcctcagcctcagcctcgggaggagtcacaacctcacccgacctcagcctcggcctcaggagaagtctccgcctcacccgacctgggcctcggaccgactacgctacagaggatacatcattaccctacccctagctagccgcctcaggctacgaaggaacaagaccggtgtcccatctaaggttactccggtaacaggtaatgatggttccccgcgtgcgcccatgacgtcggttgctctcaaccccctacggaagcaaggaaacgtcagcaggattcatgccgcaccgccagctatgcttcaacagagctcaaggcacttctccgatagccatgttagcacacgtatagggctcaaggcgcttctccaccagccacgatcaggaagagtacctccaagcataggtccgaaggttcctgcgacagagagcccaggcacctacagtgcccaatga

SEQ ID NO: 39442 - DNA, 509 bp, Zea mays
  Peptide Sequence Number=SeqID_81221
gcctcagcctcggcctcgggagaaggtctccacctcacccgaccccaggcctcagcctcagcctcagcctcgggaggagtcacaacctcacccgacctcagcctcggcctcaggagaagtctccgcctcacccgacctgggcctcggaccgactacgctacagaggatacatcattaccctacccctagctagccgcctcaggctacgaaggaacaagaccggtgtcccatctaaggttactccggtaacaggtaatgatggttccccgcgtgcgcccatgacgtcggttgctctcaaccccctacggaagcaaggaaacgtcagcaggattcatgccgcaccgccagctatgcttcaacagagctcaaggcacttctccgatagccatgttagcacacgtatagggctcaaggcgcttctccaccagccacgatcaggaagagtacctccaagcataggtccgaaggttcctgcgacagagagcccaggcacctacagtgcccaatga

SEQ ID NO: 39443 - DNA, 1968 bp, Zea mays
  Peptide Sequence Number=SeqID_81222
atgaccgttgaacaaaaaaacgataaaagtagaaagcgtcgtgaagtaatccatcttggtccagttagtctttcagatggctgtagcacaattgatttcacaaactttgcaacacaagatggaaacgaaaaaataaatgtgaatcaagatgatgatagcgattggttgcataggaatgagacattcaaggcaaacgatgttttcacaacgagagaccttctgacaccaggcggtgagcatgaaacggttggtaacacgtctaaccataatttggaaaaggccgcctactttagagagcggtacaaaaacttaactcccgccgagagggagtttaggcgtgaacgccttaggttgtacaatagtacaccaaagcggaaagggtcaaagatagagtacatacgaaaacgtagagcactgttggctgacacattgagtcatgagtccatcgccatggagtccccaacatatacccctgaggttgtacaccctacaacagatgcaattgaacctgatggatccgcagttaccccctgcgactgggttatccctgaaatcgccagtaacccgttcctgccagcttcaacacagactgaggatgccaattcactgcatatgtctattggaccactaagacgtaaacaacatgtgccacatggtgaaagacaatctatcttagcccgtcgaaaccggcaatttgaagcatccatttcaaggaacatggctactgcgactgatgataccatcaatgacgctggggaaggggatgattggacacaaccccatatgactgcaaagatcaacaacaatgtacaatgtaggagtcaatgccatggtgctatcgtggcaacaaatgagagtgcaagtatgcccgaacaaggaagtggggttgatcatacccagtcgaagccaagggtcatttccaatgttgatgacgatgacggtgtcgtatttgaagacgacgctgatgagaacgagggatacctattcgctgggcaatatgaggataccgatgaggatatagaggtcgatggtagtcaagatgaatcgactgccactgatgttcctgacccgtacgacaaggtgtacagcaacatccctgaagaaacacatatgctcaagactgttcccaactgcggttattgcaccgcgaagaagtttgagtatgagacacctggtttttgttgtcgtggtgggaaggttgagctagccccactggagacccctccccaactcaagaggttgtgggatagtgcagactctgatgctaggcactttcgtgataacattaggttttttaatggccatttctctttcacttccctatactgttgcctcgatagtatgacaactaatgtaagggattctggtatatacacgttccgagcacagggcatgatgtatcacaatatcaagtcatttggtagggatggtggggcagagcataaacaccttgagctttacttttatgatgatgatcccactctcgagcatcggtaccgtaagtgtcgcgaagagcatcaacagaaagacaaagaggttattcgacagatagtcgacatactacgtggaaacccgtactccgagcaccttaggaccatgggtcacgttgagaaccttgatgactatcgtattgcgttgaacctagaccagacgttgaaccagaagacatataacacacctctcacttcggaggtggccgctatctggatcgaagggagcgaagggcgaggccagttcagcaagagtgttatgcttcatgggaaggacagttcaagccactgcatccgctcataccatggatgctacgatgcactatcatatccattgttcttccctagaggcgaacttggctggcacgcaaatatcccaaaggtcggagtatccatggacgaagtggatgcataccgtgcgacacataggggtgggcaaaatgaaattgataccgaaaaaccaaaccgaaccaaataa

SEQ ID NO: 39444 - DNA, 6549 bp, Zea mays
  Peptide Sequence Number=SeqID_81223
atggagtccccaacatatacccctgaggttgtacaccctacaacagatgcaattgaacctgatggatccgcagttaccccctgcgactgggttatccctgaaatcgccagtaacccgttcctgccagcttcaacacagactgaggatgccaattcactgcatatgtctactggaccactaagacgtaaacaacatgtgccacatggtgaaagacaatctatcttagcccgtcgaaaccggcaatttgaagcatccatttcaaggaacatggctactgcgactgatgataccatcaatgacgctggtgaaggggatgattggacacaaccccatatgactgcaaagatcaacaacaatgtacaatgtaggagtcaatgccatggtgctatcgtggcaacaaatgagagtgcaagtatgcccgaacaaggaagtggggttgatcatacccagtcgaagccaagggtcatttccaatgttgatgacgatgacggtgtcgtatttgaagacgacgctgatgagaacgagggatacctattcgctgggcaatatgaggataccgatgaggatatagaggtcgatggtagtcaagatgaatcgactgccactgatgttcctgacccgtacgacaaggtgtacagcaacatccctgaagaaacacatatgctcaagactgttcccaactgcggttattgcaccgcgaagaagtttgagtatgagacacctggtttttgttgtcgtggtgggaaggttgagctagccccactggagacccctccccaactcaagaggttgtgggatagtgcagactctgatgctaggcactttcgtgataacattaggttttttaatggccatttctctttcacttccctatactgttgcctcgatagtatgacaactaatgtaagggattctggtatatacacgttccgagcacagggcatgatgtatcacaatatcaagtcatttggtagggatggtggggcagagcataaacaccttgagctttacttttatgatgatgatcccactctcgagcatcggtaccgtaagtgtcgcgaagagcatcaacagaaagacaaagaggttattcgacagatagtcgacatactacatggaaacccgtactccgagcaccttaggaccatgggtcacgttgagaaccttgatgactatcgtatcgcgttgaacctagaccagacgttgaaccagaagacatataacacacctctcacttcggaggtggccgctatctggatcgaagggagcgaagggcgaggccagttcagcaagagtgttatgctccatgggaaggacagttcaagccactgcatccgctcataccatggatgctacgatgcactatcatatccattgttcttccctagaggcgaacttggttggcacgcaaatatcccaaaggtcggagtatccatggacgaagtggatgcataccgtgcgacacatagggcaagtaatgcaaatgatgaagatgcggaatctcctagccatttatgtgtgtctgtacgtgactactactgctacaaattccagattcgccccggggtattcaatcctatacttcatggaaagcggctttttcagcagttcgcggtcgacacgtacataaagattgagaactctcgtttagattacatacgcaagaatcaggatcggttaagggcagacctgtaccagggcttggtggatagcatgctagatggagatattagaggagagaaggtcggcaagcgaactgtgctgtcgacgtcgtttatcggcggtcctcgtgacatgagacgtcggtatatggatgctatggctctggtgcggaagtttggtaaaccagacatatttcttaccatgacatgtaaccctaactgggatgagataaggagggagcttctccctgggcagacaccgcaagatcgttcagatcttgtagtgcgtgtctttcatgcgaagctacaagagttaaagcatcggctgactaaacaggatattcttggtaaggtccgagcctacgtctatgtcgtggagtttcagaagcggggtttgccgcatgcccattttctactcataatgcagaggaagtacaagctcacatgtcctgagcagtacgaccttttgatctcagccgagatcccaagcaacaagtaccctgaactacgaaagatggttatcaagcatatgatgcatggcccgtgtgggtcgctaaaccctaactgcccatgcactaagggtcgtaaatcgtgcaagaatcattaccctcggcctttcagtgacacaaccttgcaagggaaggattcgtaccctatttatagacgtcgtgacgatgaccgtaaagaaaaggtccgagggtgcgaactagacaatagatgggttgccccttataacccatacctccttcgtctcttcaactgccacatcaatgtcgaggcatgtgggagcatcaaggctgttaaatacctgttcaaatacatatacaaaggccatgatcgtgcgtctgttgttatgagagatgcgagcaaggcagatgatgatgttgatgagatcaagcagtatagagatgcaaggtgggtgactcctccggaagccttgtggaggatatacggctttgagcttagtcagatatctccacctgttatgcagcttcaactccatcttccaaacatgcacatggtggcgtttcacgagcggcaaatggtcgagcgagtcgtcaaccgtccaggtgttgataggtcgatgctcacatcatattttgaggcgaataggctacacgaggaggctcgtggcatcctatatcgtgacttccctgagtggtacacttggcagagtggtaagggaaaagtatggcaacagaggaaacgagatacaggtggacaagtcggtaggatagtctctgctcatccggctgagggggagcgctactatcttcgtgttctcctaaaccacgtgactggcgccgcctcctatgtggatctaaggacagttgatggtgtcaccctaccgacttttcgtgaggcagcagagagaaggggactacttgagtcggacaacacactggatgagtgtctcactgaacgtgctcttttccagatgccatcgtcgctgcgacggctttttgccacaatactggtttactgtgagccaagtgatgtggctgtactctggcagaaacacaaagattctatgtccgaggactatcaacacaagagtcagaacaaaactcatgttgagcagatggtattgattgatattaggaacatgctgcagtcaatgggaaaggacataaagacattccctctacctcctatgatcgacgcgtatgacgatgctattggtactgctcgggaggtttacgaggaggaaagtatccaaccgacagtggaagatgtggctcttaaagactctcttaacgaggaacagagggccgcctatgataagattatgtctgccgttgacaccgatcagggcggattattctttgtggatggacctggtggcaccgggaagacttatctatacagagtgctgctcgcgacgctacgcaaccagggcaagattgcagtggcaacagctacatctggcgttgcggcttccataatgcctggaggaagaaccgcccattcacgcttcaagataccactcactattgacgatggcgctgtatgtagcttcacgaagcagagtggaacaacagagttgctacggaaagcatctctcattatctgggacgaggcttctatgactaagagacaagccgtggaggcactggacaatagcatgcgcgatataatgggtcgccccgcactgccatttggtggtaaaaccattgtcttcggtggagatttcagacaggtcttgcctgttgttcgtaaagggtcaagggctcaagtggtcgcatcttctctacggatgtcttacctatgggagtccatgtcccacttaaagcttgttagcaacatgagagcaaaaaacaacccttggtttgcggagtttttgctgcgcgtaggcggtggaactgaggaaacaaatagtgacggcgacattcgtcttcctgatgatgtgtgtgtgccttacagtgggagtgacaacgatcttgacaacctaatagactttgctttcccaaatctcaacgaaaatatgtctgattctacctacatcacttcaagggcaatactgtcaacacggaacgactgggttgatatgataaatgttaagatgattgatcgttttcaaggggagcatatggtgtaccatagtttcgatagcgccatggatgatccccacaactactacccacccgagttcctaaacacattgacgcctaatgggctaccacctcatgttttgaagctcaagattggatgtcctgttatattgctccggaatatagaccctgcaaatggactttgcaatggcaccaggctggtcgttcgtggcttccaaagaaatagcattgacgcagagattgtactgggtcaacacgttggaaaacggattttcctaccgcgtataccgctgtgtccctccgatgaagagatgttccctttccagttcaaaagaaagcagtttcctgtacggcttagctttgcaatgacggttaacaaagcacagggtcagactattcccaatgttggtgtatacttgcctgaaccagtgttctctcatggccaactatatgttgctctatctagagcgacagcccgatcgaacataaagattcttgtcatcccagctgtcgatgggaggaaaaagtcaaggaagggtgtaaagaaaacccccaccgtagattgtggaacatataccaagaacatcgtctacaaagaggaaatcccttgtgaaccaagggtagaagtcgttcttattgatgatgcctttgttgaaaggaagtggatggagtgtttatttcagccgagcgcatatttaggtgacgaggttatagactgttacataaatttgataaaagctcaaaagcatctaaagtgccgatctggaggtcgcgttcacatagaaaatgctttccagttcaatttcctgaagcgagatggtgatcttgaaattaaaacagaggagctatatccaattaaagacatggcacacatatgtagcgctgaacgaagggtgttactttacctagaccatgacatgattaaaggactgcaaagacaaatagatatgatatctcaatgtaaggagttaaaagaccacaggtggccagacctccaagttgcttcttggccgctcagagaaatagacatgggatatgcaaagcagacagatagctcttcatgtggcctctttcttttgaactatatcgaatactggacaggggatgaactgtctgacagttttacccaggatgacatgtcacactttagggaaaaaatggctgctatattactatcttcagacctgaataagagaagggggtgtctgttatacaaaaatgaaaaagaagttgactctggaagcccatctgatgttgagatattagaaaacccaacagattctaataagaggaaactactccacgtgcttgatgatagcgaagtagtgtatgaagatgaggaaggccctattactcaagcagacttgcaaaggtggtttgttgatgattgggataaaagagctcctgtaaaagtctctaccgatggttgcaccaatgactttttaatggttggtctttccacaaaggacatgccagtgaccaaagccgattcaatagatgttttatgtgattatatcatggcaatagaagacgatacgacactagagagaacatgggtgcgaagtttcaatccttttaagatagaaatatctgtcaaagacctgcaaaacatattaacgacaactcaagatatgattctaagatgttttgacatggctgttcggctgcttgccaataaagagtcacgtaggccgaaagaagaaatcataaataatagaaagcattatatggacatgcgtttttggagaatggttggttttggtaaacttccaaagtaccatcaggatcctacaacagaagagttagccaaaacactcgattgttggccatcaatgaattattatatcacaggttgtagatatgttctcatgccatggaaattcaatggttgtcacgcccttttcgtaatagatcatgttaaaaagcatgtgacttttatcgattttacaccgactcaagattggtgtaaacacatgccatacaagaggttcgcggaagcgattatcatggcctcaaaaaaatataagattgcttacagcaagaaacgttctggatgggcggaggatatctttaagtgggaacatacaattcagactggtgttccaattgacttaagagggtttaataccagctacctcgttctacaagctatggccatgtgggggaatgacagacgactgaaatttgttggggatgcaaagactcttcgaaggaactttgtgattgatcttttaagttatgaggacaattcgtgccgatatgccatccctgcaaacatacaacaaagacttatcgatatcgctaaaaaagattag

SEQ ID NO: 39445 - DNA, 597 bp, Zea mays
  Peptide Sequence Number=SeqID_81224
atggtccacatcgtcgagcaccatgatttcttgcccgaggatttcgtggtggaagaggcggctgcctcttccacaccgcgggccaccaacctcccggcgcctggtgcggccactgctgtgcactatgcgcgggtcgcgcggcagcatactcccacgcaaacgtccaggacgtctagagctgcgcctggggcattgtcagcggccacagagttgctgtgccaccctcctagctccacggcctccccaggggccatgaagcagtggcgcgacgacgtcgaccgcctgcttggcatgacacactctgcctcaaccaggccaaggccttggtcatcccggcgccaacatgaggcgtcagcatcggtgcgctctccctcggtgagggccgcgccgacagaggacctgcgggcggagctcaaccgccggcgagcgggcgaggacgccccagtctatatggagaggtctgatgacctgcggatggaactcaaccgcaggcgtgtgggtgaggatgcccgcgtctctatagagaggacgcgtgagcgccgacaaaatgtcgagggtcgcaaccttgactacgacttcgctgcggttgcaccgtag

SEQ ID NO: 39446 - DNA, 597 bp, Zea mays
  Peptide Sequence Number=SeqID_81225
atggtccacatcgtcgagcaccatgatttcttgcccgaggatttcgtggtggaagaggcggctgtctcttccacaccgcgggccaccaacctcccggcgcctggtgcggccactgctgtgcactatgcgcgggtcgcgcggcagcatactcccacgcaaacgtccaggacgtctagagctgcgcctggggcattgtcagcggccacagagttgctgtgccaccctcctagctccacggcctccccaggggccatgaagcagtggcgcgacgacgtcgaccgcctgcttggcatgacacactctgcctcaaccaggccaaggccttggtcatcccggcgccaacatgaggcgtcagcatcggtgcgctctccctcggtgagggccgcgccgacagaggacctgcgggcggagctcaaccgccggcgagcgggcgaggacgccccagtctatatggagaggtctgatgacctgcggatggaactcaaccgcaggcgtgtgggtgaggatgcccgcgtctctatagagaggacgcgtgagcgccgacaaaatgtcgagggtcgcaaccttgactacgacttcgctgcggttgcaccgtag

SEQ ID NO: 39447 - DNA, 1191 bp, Zea mays
  Peptide Sequence Number=SeqID_81226
atgccatccccgccgaccccgcaggaaacgtccccaagcgccgaagtaggcccgtccccgagcgccgaagcagccccgtccccgagcgtcgatgagccctccctgagctcggacctcgcggccgtgcccagaaatttcatccccataaatcgcccgccattccccgttgaacaacctcccatgcatgatgcaacccttgtgccgtcggactcccaacaaacctccgtgcatgccgctcgtcaccccgacccaaccgccctccggatctgcccctctcctatatcaagggtttcatctcccacccatccttttcctatttggctgctcgcggcgattccctgcagctttgcgacgagactgctcgagataaggtccaaagagttgtccctccacgtgctgcttcatgctgggaacccagtgacactgcatatggaacaaaaagaatgcttgcaccgtgatcctgctgtggagattggattggttttggacatcgtaggcgagagcaccctcatcgacaccttcttctgctatcttggtggcaacgcaaggttgttcgacgactatcgcgatgaatattattatgtgctaccacggaagttcagtattgtcgctcgagtagaagttaaattccccattgaaccacgttatcgtgacagacaacatttcattttgtctgacatcaatggagccaagatcgaggcaatgacaagttcgtacgagacagtcaagcacttcaacaatttgctacatgaaaagcatgttttcaagatgcacaatgtagatttcagtattagtatgggtgcacatcagtttcgacatataagtggtccaatggaattatatctcaccagacaaactgtcgtggagccgtacacagttccatttcaaatgccgccattcccaaaacatatattcttgagtcttgcagataatgccgaactaccaaataggactttagttgacattatggctattgtagtccacttagatgtaattcatcgcacaatgtggggtccattcaggaagattgttgtcatggatgccaggtggtctctacatgccattaaagtttggggtgacttgctaaacaaaaatgcacttcgctgggtgttggctaaggagaattgtagcataataattgggactatgtttcgacgatttagaaaggcaagagtgcctcgagtcatctga

SEQ ID NO: 39448 - DNA, 810 bp, Zea mays
  Peptide Sequence Number=SeqID_81227
atggaaccgactgtactgaaccgtgaaagaaatgcagcggaccgccaaaaaaggatgcctatgttgttcgacgactatcgcgatgaagattattatgtgctaccacggaagttcagtattgtcgctcgagtagaagttaaattccccattgaaccacgttatcgtgacagaaaacatttcattttgtctgacatcaatggagccaagatcgaggcaatgacaagttcgtacgagacagtcaagcacttcaacaatttgctacatgaaaagcatgttttcaagatgcacaatgtagatttcagtattagtatgggtgcacatcagtttcgacatataagtggtccaatggaattatatctcaccagacaaactgtcgtggagccgtacacagttccatttcaaatgccgccattcccaaaacatatattcttgagtcttgcagatattgccgaactaccaaataggactttagttgacattatggctattgtagtccacttagatataattcatcgcacaatgtggggtccattcaggaagattgttgtcatggatgccaggtggtctctacatgccattaaagtttggggtgacttgctaaacaaaaatgcacttcgctgggtgttggctaaggagaattgtagcataataattgggactatgtttcgacgatttagaaggcaagagtgcctcgagtcatctgattatacaacaatacacttcaatcctttcaatcacaataaccatcactttgaaccaattcagaaagctttgatggcgtggaatgatcaacaaacacacaagaactga

SEQ ID NO: 39449 - DNA, 834 bp, Zea mays
  Peptide Sequence Number=SeqID_81228
atggaaccgactatactgaaccgtgaaagaaatgcagcggaccgccaaaaaaggatgcctatgttgttcgacgactatcgcgatgaagattattatgtgctaccacggaagttcagtattgtcgctcgagtagaagttaaattccccattgaaccatgttatcgtgacagacaacatttcattttgtctgacatcaatggagccaagatcgaggcaatgacaagttcgtacgagacagtcaagcacttcaacaatttgctacatgaaaagcatgttttcaagatgcacaatgtagatttcagtattagtatgggtgcacatcagtttcgacatataagtggtccaatggaattatatctcaccagacaaactgtcgtggagccgtacatagttccatttcaaatgccgccattcccaaaacatatattcttgagtcttgcagatattgccgaactaccaaataggactttagttgacattatggctattgtagtccacttagatataattcatcgcacaatgtggggtccattcaggaagattgttgtcatggatgccaggtggtctctacatgccattaaagtttggggtgacttgctaaacaaaaatgcacttcgctgggtgttggctaaggagaattgtagcataataattgggactatgtttcgacgatttagaaggcaagagtgcctcgagtcatctgattatacaacaatacacttcaatcctttccatcacaataaccatcactttgaaccaattcagaaagctttgatggcgtggaatgatcgtcaatttgctgttagatttcttgaagaacaaaggcgtagatag

SEQ ID NO: 39450 - DNA, 966 bp, Zea mays
  Peptide Sequence Number=SeqID_81229
atgggcaacaagggtaccattcttttaacaagcaggggaactgtgtattattatattagaacaaagaggtttacaacccttaaaaacatcacccgcactgacaccattgcaaaaaagattcgattggttttggacatcgtcgacgagatcaacctcatcgacaccttcttctgctatctcggtggcaacgcacggttgttcgacgactatcgcgatgaagattattatgtgctaccacggaagttcagtattgtcgctcgagtagaagttaaattccccattgaaccacgttatcgtgacagacaacatttcattttgtctgacatcaatggagccaagatcgagacaatgacaagttcgtacgagacagtcaagcacttcaacaatttgctacatgaaaagcatgttttcaagatgcacaatgtagatttcagtattagtatgggtgcacatcagtttcgacatataagtggtccaatggaattatatctcaccagacaaactgtcgtggagccgtacacagttccatttcaaatgccgccattcccaaaacatatattcttgagtcttgcagatattgctgaactaccaaataggactttagttgacattatggctattgtagtccacttagatataattcatcgcacaatgtggggtccattcaggaagattgttgtcatggatgccaggtggtctctacatgccattaaagtttggggtgacttgctaaacaaaaatgcacttcgctgggtgttggctaaggagaattgtagcataataattgggactatgtttcgacgatttagaaggcaagagtgcctcgagtcatctgattatacaacaatacacttcaatcctttccatcacaataaccatcactttgaaccaattcagaaagctttgatggcgtggaatgatcgtcaatttgctgttagatttcttgaagaacaaaggcgtagatag

SEQ ID NO: 39451 - DNA, 402 bp, Zea mays
  Peptide Sequence Number=SeqID_81230
atgctggtgtttcataagatgaccgtgcagctcatgaaaatccaggtaaaatatgtagctgactatggaaatccagtgatgatgcatgacaaatcaaagagggtggagtcgagcgagacgacgtggccggcgcggcgccaggtcgtggcgtgcgccgctgtttgctggtcgtggcgtgaggtcaccaaggaggtggtgaagacgctcaaggagtgcggcaggatcaccttccccatgtcccttaagcaggtcttcacctttgcagaggcttatgattttgaagatctagaatctatggttgaagaaatagccaaagcattcaagacaaagaaaaccttgcaaaaaccattcctcactctttatggcattgaatcagaaaaggcctactggtccagttcttga

SEQ ID NO: 39452 - DNA, 1713 bp, Zea mays
  Peptide Sequence Number=SeqID_81231
atgggcaaggcgccccgcgcggggcgctccttggcctcgacgaagaggggctcgacgaaggccgcggaggggagcggcgagaaggagatgagcagcgcgcgggaggagaagaagagcaacacgaagatgaggagcgatgagagcaggaccgaggccagcaacaacgccgcccaccgccagtgcccaagaccgtggagaacttccacgcgctgtgccgtgacaaacccgttccacgccgtgctcttccgggtggacaccgcgggtgctgactgcgtcgagcgcctccaggacgcccttgccgccatcaccgacgaggacggccgctcgccttgcgtgctccacagggacgtggccgtctactccaagctgtaccagctcagcttctccgacagggacttcctcgccgacttcagcaacgcaccagaatgggtcgacgtcacgaacccgggccccgtgccgctcgccgtggccacacggttcgacgagtgggtcacgaagctgctgagcgagctcgctgacgcggcggcggggcaaacgggcagggagtgtccttttgatcttaaagaagcaatatcaagtatctgttttgctgctccaagatgtgcagatctacatgaactgttacaacttaaaatgatctttgcaactaaatatgggaaggaatttgttgttgcagcttcagagttgatgcctgattgcgagggagcagaccatgcagaatttgtgaaggcagcaaccacagacaatgaggtacactttgtagaaaccagtgatacaagtgttgccgaagttctatttctaggtattacgtctgaggagaaatttgtgggcctcgttaaaagcgagccagagaagtttgaaaagttcgatgggaaatttgaagaaaaggaaattttgcggtctgtggagctcaacaagtttcctctaattactgtattcactgagctcaattccggtaaagtatattcaagccctattaagctgcaggtcttcacctttgcagaggcttatggttttgaagatctggaatctatggttgaagaaatagccagagcattcaagacaaagataatgtttatatatgttgacactgctgaagaaaaccttgcaaaaccattcctcactgtttatggccttgaatcagaaaaaagcctactgagaagcttactcaagcccttcgacacttcaaggatttcatcttttgatttattttcttatattcatcttgagtccatggagttcggcagagcacacgttattcaaacattctttgccagtgataggaataaggagctagcaacaaactaccttcttgagcatgctgggagtactgcttattacataacatgtataactctttcacttgtggagcaatgggccaccgagaagaagtccattgagagctgcaagctcatcttcacccaagcaaaacagtatgctaaggaatacgatgcccagggttgggatcgagatgcccacgatcaagactcggagaccttggacgagattgtatcttctgtaagacaaatattaagtattgatgatgaaaaaagaagcagttcaactcttgggaaatggaggggtgtcttacctaatgaatttcagctggatgaatttgagataatatttagaggtgaagtctctaagattttacatttatatgctaaggagtttcggtttattatgtgcctacaagatttattatgtgcctga

SEQ ID NO: 39453 - DNA, 372 bp, Zea mays
  Peptide Sequence Number=SeqID_81232
atggccaaaccactcccgcccacctccgctcgatccaagccctcggatagcttcctcgagaggccgtgccgccgacgacctccgccgcctgcgctcgtggccagagcagctccagccacctccgacaccgacccacacaccgacgtgacctctccgacgtcaccgaccaccccaccggagctctactgccaccgcatacaaatatcttattcattgcattcgatagattgcaacctcgctgacagagagtacgtgctcatctctgagcaaggagttgatcgggaaggagtccaggagccagcaccagagcctgccaccgaggatctccccacagccccagctttggaaggcaagccccagttttatgcataa

SEQ ID NO: 39454 - DNA, 789 bp, Zea mays
  Peptide Sequence Number=SeqID_81233
atgcacctagtgctcgcagtgatccagtccccgacatgggggctcgggcccacatgcggcgacagtaagacgccccacgcgcggcccgacgaaaccgtcgggcgtgggggccacgtacctgccagctacgggggaaggcgtggcaggcagcgtgaccaaaggcgggttggcggtggctacgtcagcaagtgcccaaaaatggcacgccaattaggttttggccccacctgcaggctcgcatcctcccctgaggtgggcccgggggccactgtcggtaccctgaaacaggggtaccccttgctacagtatgaagacgctatactcgcgcaactacctctagttgcatggcaaacaactctctgccccgccacatggatgaccccgggatcgccacatggccagggaaagtgcgacccgggcctccgggacgggtcccagacctctctgcgtaggaccggactacccacagccgggccccgggactctgaggcagagataaccggggcaaagatcacggcggcgtggcttaccgacggcagtagagctctggcggcggaggtcgtcagcggcacctgctttggccaaaccacggcggtgggattcaatcaaagtgtacgaggagctccactgggtgatgtagaggctatgcgcgcaaggaatcgagaaatggttcagtggtttacccggtccacgtgctccggcgggttcacgaactccggcgagcgtgattgcactgttccggtgggctggtcctcggctcaagcttgggaaagcttcacggcctcttga

SEQ ID NO: 39455 - DNA, 450 bp, Zea mays
  Peptide Sequence Number=SeqID_81234
atggttcagtggtttacccggtccacgtgctccggtgggttcacgaactccggcgagcgtgattgcactgttccggtgtggttggtcctcggctcaagctcgggcaagcttcacggcctcttgaggaagctatccgagggctcggatcgagcggaggtgggcgggaatggtttggtcacggtgggtgccctcgggcggctctggcgggtcgcggggaggtcgccggagctgcgggcgagctcgggaaagttaggcgcggtgcagagggggcgacagggaaggtggtcatgcatgagggtgggctttatagccactcgcgggcacgacacgggcatgggcacgggggcgaccgagggcgcgcaggggtgcgtgcggacgtgctctgggcgcgttctcgagtgcctgcccacgtcgaacacgtggtggtttacttctaccagtgttcaatag

SEQ ID NO: 39456 - DNA, 222 bp, Zea mays
  Peptide Sequence Number=SeqID_81235
atggcgtatcaaatgctgttgctgtgggttcctatttatatgcataacgctttgcaacttggcgggccctgtttgtcattgactttcgctattctagcgaagggaagggaccttcggccttgggatgaagctgtacatgatatgaaaagcgcggtttgggagaaggatgaaccagttccgaagctacctgtggagaagcttcggcttagtggtggaaaatga

SEQ ID NO: 39457 - DNA, 264 bp, Zea mays
  Peptide Sequence Number=SeqID_81236
atggagagggagtgggggaagaggaagaggaaggggcgtgaccgtttcttggcgtggggaggagaggggcctgcatgggggtgcatggggctgggccaggcgtggccgagcgcggctgaggaccttcaaccttgggatgaagctatacacgatatgaaaagcgcggttcgggagaaggatgaaccagtttcgaagctacctgtggagaagcttcggcttagcagtgaaaaatggaaccgacttaaaggggaaaaggttgtctag

SEQ ID NO: 39458 - DNA, 429 bp, Zea mays
  Peptide Sequence Number=SeqID_81237
atggggaagcctgtcccatcactccccatgctcctcctcagccgaggcagggtcccactcgacagtccatcccggtggcaaggtggacggccaagttattccagcaaccatttcctccagagaacctgtaaaaattatgccacaagcaaggctgagtatactaatactcagctagacttacccggttacaatggatcaagcagtctcattagctgcgagaagcagacgattcgaatcgagtttttatccttgcaagggctcaccgccttggcgtacaatgcctcactgaccccgactggccgtcgtgcagtgaccgcacttgtacccaccataaccggaatgggagacctcgtctcaggtcgcgtgaggggatatgtctgcgggcaggttcactcaggatttaataacattatgctaaaaagaaactaa

SEQ ID NO: 39459 - DNA, 282 bp, Zea mays
  Peptide Sequence Number=SeqID_81238
atggggaagcctgtcccatcactcctcatgctcctcctcagccgaggcagggggcactccgtccccacacacaccaaccgtccccatcgattccctggcaacagatcagggctcaccgccttggcgtacaatgcctcactgaccccgactggccgtcgtgcagtgaccgcacttgtacccaccataaccggaatgggagacctcgtctcaggtcgcgtgaggggatatgtctgcgggcaggttcactcaggatttaataacattatgctaaaaagaaactaa

SEQ ID NO: 39460 - DNA, 264 bp, Zea mays
  Peptide Sequence Number=SeqID_81239
atgaccgcgtcaaaaaaggctggcccctcagaagggttcggcagccgcctcaaagcactcgggctccgtgcccactactggctggcccccgaagggttcgacagccgcctcagagcacgtagagcgagggatgactctgggtacgtccgatacatggctgaggctcgggatacgctcccgaggctcgggggctgctctcgcaaacccggctccggccaaaccgttgacagcgtcaacataccagcccaagaacttggaacctga

SEQ ID NO: 39461 - DNA, 909 bp, Zea mays
  Peptide Sequence Number=SeqID_81240
atgtcgaccgagcacatcggtcacgggtcagccagccgcgggagaaggcgcgacgttcgatacggccagaaatgggtcggcagtaatggcggcggcaggcgggcggaagcagcggacaggcggcacctttggcaggcgaagcaggcgacgcttcacctccgccatgatgaccgcgtcaaaaaggctggcccctcggaagggttcgacagccgcctcagagcactcgggctccgagccctcctacagatcagaggttcgaaggctggcccctcggaagggttcgacagccgcctcagagcactcaggctccgcaccccccccactggccagaggctggcccttgaagggttcgacagccgcctcagagcacgcagagcgagggatgactctggaatcccatcagagggaggcatcgagccctcggaccctatcaaacggtaccgggtccggcaaatcacctgtaggtcaaggctcagtccactcaagggacacgatctcgcctcgcccaagcccagcctcgggcaaaggcagccgaccctggaggattcacggctcgcccgaggtcacttcgccgctccactgaccgacctgacaggaaaacagcgccgcctgcgctgctccgactgctgtgccactcgacagaggctcggactctacctcaacctcggacgacggtctccacctcgcccgaccccagggctcggactctacctcgacctcggaagatggtctccgcctcgcccgaccctagggctcggactctacctcgacctcggacgacggtctccgcctcgcccgaacccagggctcgagctcaacctcgacctcggaggagtcaccgcctcgcccgaccctgggcttggaccgaacacgtcacaggggggccatcattaccctacccctagctag

SEQ ID NO: 39462 - DNA, 264 bp, Zea mays
  Peptide Sequence Number=SeqID_81241
atggtgctggtaagtggtattctttccgtttggaaagggtacatctggttaataacttgggttaatgctaaaacttggctttctactactagtccaccacagccaaacaggatacttgctgagtatgttgatgtgtactcacccttgctctacacaccaaacccccccccatccccaggttgtcagcattgcaaccactgctcaggcgaagatgaagctgtggaaggagacttccaggagtttcaagactatgacgagttctag

SEQ ID NO: 39463 - DNA, 264 bp, Zea mays
  Peptide Sequence Number=SeqID_81242
atggtgctggtaagtggtattctttccgtttggaaagggtacatcgggttaagaacttgggttaatgctaaaacttggctttctactactagtccactacagccaaacaggatacttgctgagtatgttgatgtgtactcacccttgctctacacaccaaacccccccccatccccaggttgtcagcattgcaaccactgctcaggcgaagatgaagctgtggaaggagacttccaggagttccaagactacgacgagttctag

SEQ ID NO: 39464 - DNA, 258 bp, Zea mays
  Peptide Sequence Number=SeqID_81243
atgatgggcgacgattgcaaactgaacttaaatcaaatacttcagtattggtctctagagaggaagctctgccaaccattactaataactgagaagtatgtcagtttaacaaccttttccccttatgttgtgcgggagacagcattacaatgtttagtagccttttcgacgtttcctcacacaaagatttatcctgtgcggcgaaaggtaatgacatatgtaatcagctatttgaattggttaaggattttagtgtag

SEQ ID NO: 39465 - DNA, 1128 bp, Zea mays
  Peptide Sequence Number=SeqID_81244
atggagcacagggaggctccgcccccacaactcggaggacgtgcggaggccggagggcatgggcgaactcgtgttgaggtctatgcatcaacatcttcttcaaggttgctggggttcaatgtcggctgggctggggatggtgggggcggccaggtgacggaagccatactcgctttcggcctcctccagcatcgctgcgaagacaaggtgctcgaggtggcccagcgggaccacgaattggtgacggaacctgctcaacaaccacgcacacttgacctagaccccaccggagacccttgctgtggcctcctgagccggatcacgcctcaccttgaactgcatcgacgcctcgacctgccggggcaaggtcacgtgccttgcgaaggctataagaatgctagggggttgtacaactccatagcctcctcccgcagaaggcctaccagcttgttcgccatggacctcaaccacagcaggctcgatcttctactgactgctgagatatatgaggccttggaatcgaggaatggtggatctgattattttggcaagggtgttcttaagggtcgaatagaattttcagattgcgaactgtacttaaatcaaatacttcactattggtctctagagaggaagctctgccaaccattactaataactgagaagcccaaccaatgtgcctctaagcatattcccaacaggttgaagaagggtcacgagcaaagagggcatttactatacgaatcaatcttcaccgttggaagacgctcctttctattggtctactacagcacgaatgtgctactgacaataacccattctaaaaagaacttgagctatgcgcttgcttttggacttagcagacccggttgctccactgttattttggggagattttcaattatactaaatgatgatgcaagtgcctcctactcaaactggtgttctgaaggcttcagaatgactgatggctgtttgaaaaggttcttcgtcaaacactcactgcatacgaatcacattaatgagaaaattggagcatttgttcgatcctcattggaactcaagctcgggggcatcatttcttctagcttctggaagccaaacaagcacaaggtgcagagactgtaa

SEQ ID NO: 39466 - DNA, 171 bp, Zea mays
  Peptide Sequence Number=SeqID_81245
atggagtgggaggaagctgggcgcatgccgcccaatatgtattgctgcttcactggcctatgcgaggctgcctcgcagggaggcgccataccgaccgatgtgccgggggcaataataaggtcaaagttctcggaggcgatgggaaggtgtggttcgcagacgaatctctag

SEQ ID NO: 39467 - DNA, 378 bp, Zea mays
  Peptide Sequence Number=SeqID_81246
atggagtgggaggaagctgggcgcatgccgcccaatatgtattgctgcttcactggcctatgcgaggctgcctcgcagggaggcgccataccgaccgatgctgccgggggcaataataaggtcaaagttctcggaggcgatgggaaggtgtggttcgcagcgtatggcccattgtacaggctctttggcttgtgtgttgcgacaatcgtgatggctactgcgcaagtcaccaaacatgatggcacggtttttcgttgtaccgttgatgttgaagctgattctattgcgttccagaagagaggttattttgatgatacgaagctgtgctccaatttcaagtctaatgatgacttagacttggttgatattcaaatttag

SEQ ID NO: 39468 - DNA, 552 bp, Zea mays
  Peptide Sequence Number=SeqID_81247
atggaaaaagagccacttgacatggttgagagctcagttcgagtcatcgagacacatgttgacatcattcgcagtctagtgactgacggggttgtggatactagtgaaccggaatcagtgtacacacttaagaccactttgtttcaaattggagatgtatgcgacatgcttgagaagtgtgctctgtccatcaaaaagtatgctgactccaagagggctaaaattattcaagatgaagccctgcaatatgctgaagatgatgaagctgcagatgatttggaggaactcccaagcccagatctccttactcaagccgacgaccccaagaagagattaagtcctgtagtctaccacctcccgttatttgtgggcttcaccgatggctggaaacatttggtgatagcaaacgaccttcgggctgaagacgtctgcgagcttgttaaggggccagaagatgttgagccggtgtactatgtccggatgtgtggtcaaaaaattaaaatccgccccggctgcatgtgtgtgcttctcttctcttcggtggggtgctaa

SEQ ID NO: 39469 - DNA, 972 bp, Zea mays
  Peptide Sequence Number=SeqID_81248
ggtttagttttcgcccggagctgatactacgccgccaggctgctgcgccgccgttcccgtccccgtctccgagccgtgagcgcccgccacgccgtcgccgagcccgagcccaaccgccaccgtctccgagctgggccccgtccccgagcgccaccgtctccgaggccaagcgccgccgtccccgtccccgagcccgagcgccgccgagcccatctccgagtgcgccaccgtccccttccccgtccctgagcccgagcgccgccgagcccatctccgagtgcgccaccgtccccttccccgtccccgagcccgagcgcgccgccgtgcccatctccgagtgcgccaccgtccccttccccgtccccgagcccaagcgccaccgtctccgaggccaagcgccgccgtccccgtcctcgagcccgagcgccgccgagcccgagcgccgagtgcgccgccgtgcccatctccgagccctcgagatggaaaaagagccacttgacatggttgagagctcagttcgagtcatcgagacacatgttgacatcattcgcagtctagtgactgatggggttgtggatactagtgaaccggaatcagtgtacacacttaagaccactttgtttcaaattggagatgtatgcgacatgcttgagaagtgtgctctgtccatcaaaaagtatgctgactccaagagggctaaaattattcaagatgaagccctgcaatatgctgaagatgatgaagctgcagatgatttggaggaactcccaagcccagatctccttactcaagccgacatattggaaaaatattttggaattgatgatatcgatgaccccaagaagagattaagtcctgtagtctaccacctcccgttatttgtgggcttcaccgatggctggaaacatttggtgatagcaaacgaccttcgggttgaagacgtctgcgagcttgttaaggggccagacgatg

SEQ ID NO: 39470 - DNA, 525 bp, Zea mays
  Peptide Sequence Number=SeqID_81249
agatggaaaaagagccacttgacatggttgagagctcagttcgagtcatcgagacacatgttgacatcattcgcagtctagtgactgatggggttgtggatactagtgaaccggaatcagtgtacacacttaagaccactttgtttcaaattggagatgtatgcgacatgcttgagaagtgtgctctgtccatcaaaaagtatgctgactccaagagggctaaaattattcaagatgaagccctgcaatatgctgaagatgatgaagctgcagatgatttggaggaactcccaagcccagatctccttactcaagccgacatattggaaaaatattttggaattgaacagagaaggcatcgctgtgatgttataatgctgaaggacaccaagaagagattatggcctgtcatccaccaccactgctcgttatttgtgggcttcaccgagggctggaaacatttggtgacagcaaacgaccttcaggctggggacgtctgcgagcttgttaaggggccagacgatg

SEQ ID NO: 39471 - DNA, 493 bp, Zea mays
  Peptide Sequence Number=SeqID_81250
atggaaaaagagccacttgacatggttgagagctcagttcgagtcatcgagacacatgttgacatcattcgcagtctagtgactgatggggttgtggatactagtgaaccagaatcagtgtacacacttaagaccactttgtttcaaattggagatgtatgcgacatgcttgagaagtgtgctctgtccatcaaaaagtatgctgactccaagagggctaaaattattcaagatgaagccctgcaatatgctgaagatgatgaagctgcagatgatttggaggaactcccaagcccagatctccttactcaagccgacatattggaaaaatattttggaattgatgatatcgatgaccccaagaagagattaagtcctgtagtctaccacctcccgttatttgtgggcttcaccgatggctggaaacatttggtgatagcaaacgaccttcgggttgaagacgtctgcgagcttgttaaggggccagacgatg

SEQ ID NO: 39472 - DNA, 493 bp, Zea mays
  Peptide Sequence Number=SeqID_81251
atggaaaaagagccacttgacatggttgagagctcagttcgagtcatcgagacacatgttgacatcattcgcagtctagtgactgatggggttgtggatactagtgaaccggaatcagtgtacacacttaagaccactttgtttcaaattggagatgtatgcgacatgcttgagaagtgtgctctgtccatcaaaaagtatgctgactccaagagggctaaaattattcaagatgaagccctgcaatatgctgaagatgatgaagctgcagatgatttggaggaactcccaagcccagatctccttactcaagccgacatattggaaaaatattttggaattgatgatatcgatgaccccaagaagagattaagtcctgtagtctaccacctcccgttatttgtgggcttcaccgatggctggaaacatttggtgatagcaaacgaccttcgggttgaagacgtctgcgagcttgttaaggggccagacgatg

SEQ ID NO: 39473 - DNA, 624 bp, Zea mays
  Peptide Sequence Number=SeqID_81252
atggaaaaagagccacttgacatggttgagagctcagttcgagtcatcgagacacatgttgacatcatttgcagtctaatgactgatggggttgtggatactagtgaaccagaatcagtgtacacacttaagaccactttgtttcaaattggagatgtatgcgacatgcttgagaagtgtgctctgtccatcaaaaagtatgctgactccaagagggctaaaattattcaagatgaagccctgcaatatgctgaagatgatgaagctgcagatgatttggaggaactcccaagcccagatctccttactcaagccgacatattggaaaaatattttggaattgaagataatgtattttgtatgaacctcttagagagtgtcaagtcaatgaactatcttcgagtactattgggaagtaatggcatcggcggaatgcctgaatcggcagaccccaagaagagattaagtcctgtagtctaccacctcccgttatttgtgggcttcaccgatggctggaaacatttggtgatagcaaacgaccttcgggttgaagacgtctgcgtgcttgttaaggggccagacgatggtgagccggtgtactatgtccggatgacgaatctctag

SEQ ID NO: 39474 - DNA, 1079 bp, Zea mays
  Peptide Sequence Number=SeqID_81253
atggaaaaagagccacttgacatggttgagagctcagttcgagtcatcgagacacatgttgacatcattcgcagtctagtgactgatggggttgtggatactagtgaaccggaatcagtgtacacacttaagaccactttgtttcaaattggagatgtatgcgacatgcttgagaagtgtgctctgtccatcaaaaagtatgctgactccaagagggctaaaattattcaagatgaagccctgcaatatgctgaagatgatgaagctgcagatgatttggaggaactcccaagcccagatctccttactcaagccgacatattggaaaaatattttggaattgaagataatgtattttgtatgaacctcttagagagtgtcaagtcaatgaactatcttcgagtactattgggaagtaatggcatcggcggaatgcctgaatcggcagaccccaagaagagattaagtcctgtagtctaccacctcccgttatttgtgggcttcaccgatggctggaaacatttggtgatagcaaacgaccttcgggttgaagacgtctgcgagcttgttaaggggccagacgatgccgacataagagaagagaagcgcacagatgaaacaatcatatcgcctcttgcgaaggaactcgacgagggggacgtagacaaaattgttcctcagaatgtcgacgtcaacatcaaaaaggaaccaaaggttggcaccaatgttgaagggccaactatttcaaagaagattcataagcgaatcgccacagacgatgtcaagaaaccgtcagaatcagtggcacgctacctgcataaattgcagagagttatgactaatcaatcaaaagcggtatcagcatctcatggagtaggcacacggccggcccaaatagacaatttcgaagtatgggaagaagatggaatgattcatactcgagaatcattacgtcttaaaaccaatatctcggtatacaagaaggaggatgttcctcctaaatttgtgaatgggaggccgttcttaacgacgatgcaactttctaagttgtcgactccggagattagaatgcatgagtg

SEQ ID NO: 39475 - DNA, 162 bp, Zea mays
  Peptide Sequence Number=SeqID_81254
atgccgctatgctcaccaccacacaatggcctgatgctccacagcagtatcctggaaacacccttctatgatgagtggaagaataatttcccagaccaggaaacagaggaagatcaacccatcataggccatctatcatccatggtgtggtacaaactgtaa

SEQ ID NO: 39476 - DNA, 360 bp, Zea mays
  Peptide Sequence Number=SeqID_81255
atggcgtgctcgttcgcgctcgtcgcgcgcgctgtttcgtgtgtcgtcatcgtgcaatgccgcgtctgtccgcgcgtcgttcgcacgctgtcgtgttgtttcgtgctcttcgagttctacaaggttgaagaacctgagcatctgtttggtgaaggcaatgataccctgccaggccacctaggtagtggtcaatggggattagctctccccgggcagaaagggaatcatgactcgtgggtaaaagatggttggtttacaggtggtgacaaggatgatggttatgactatggtaatggtaaagaagaaggcgtcgaggcaaatctccaggagttccaggacttcgacgagttcgaggattag

SEQ ID NO: 39477 - DNA, 178 bp, Zea mays
  Peptide Sequence Number=SeqID_81256
tgataccctgccaggccacctaggtagtggtcaatggggattagctctccccgggcagaaagggaatcatgactcgtgggtaaaagatggttggtttacaggtggtgacaaggatgatggttatgactatggtaatggtaaagaagaaggtgtcgaggcagatctccaggagttctag

SEQ ID NO: 39478 - DNA, 567 bp, Zea mays
  Peptide Sequence Number=SeqID_81257
atggtgagagaacgaagaacacaaacaaacacaatgagcaagaacacaagagacacaagatttatcccgaggttcggtcacaccaccaaggtgccctacttcctcgttgaggcgcccacaaagagccgggtctctttcaaccctaatcctccctttgccaaccacagaggtcaagcccacacaataatctttgctcaaacaagcggagtgtgggaggtgtatataaaggtgcccccaaaagctggtggccgttggggaaagttggccaaaaaccggttgaaccggtttgtaaaccggttgaaccggtttccaccaggaagaactcggttcactgacctactcagccggagagtcaaccggactcaaaaccggttgagccgggctcaaatccggttgaaccggttttcccaaaatctgcacacgactttttctgacaggactgactggcagactggcagtgacagagcggaacagtgcagaaaccggttgaaccggtttaaggtccggttgaaccgatttttgaactgctgcacagattttgagaaaacagacgtgaaactagggtaa

SEQ ID NO: 39479 - DNA, 501 bp, Zea mays
  Peptide Sequence Number=SeqID_81258
atggtgagagaacgaagaacacaaacaaacacaatgagcaagaacacaaaagacacaagatttatcccaaggttcggtcacaccaccaaggtgccctacttcctcgttgaggcgcccacaaagagccgggtctctttcaaccctaatcctccctttgccaaccacagaggtcaagcccacacaataatctttgctcaaacgagcggagtgtgggaggtgtatataaaggtgcccacaaaagcaggtggccgttggggaaagttggctaaaaaccggttgaaccggtttgtaaaccggttgaaccggtttccaccaggaagaactcggttcactgacctactcagccggagagtcaaccggactcaaaaccggttgagccgggctcaaatccggttgaaccggttttcccaaaatctgcacacgactttttctgacaggactgactggcagactggcagtgacagagcggaacagtgcagaaaccggttgaaccggttttag

SEQ ID NO: 39480 - DNA, 1011 bp, Zea mays
  Peptide Sequence Number=SeqID_81259
atggatcctggcacacatatgatggttcgcaccctccaaactacccgcatcaacaccagctacgcccctcagccccggcaggtcccggtctacccagtggtagtcgaggaagctccagcggatctccctcccatccaagtggagaacgtgatcaacctggaggacagctcggaggagcaactgccgacccccaccccgttggccgagtccctggccttcgcagctgggtcagcgacgtcagcaccagccttccaagcacctgcaccgggaggcgacgaccccgacgactccggagacggctatgacgacgacgacgatggagaggatgagcacgtccacgaggaagctgactacgcccagcaggaccccttcatggggattggtccagttgtcgaacattacacatcaatgttcgagacaggacgcttccccaacctactgcaagcagtgctgtacgagctaggagcttacgcccgccccctgtacgagacgaggcgagtgagcgagcctccccgggcttgctattacatcactcgcatccatgtcagggtgatggatgcaggtgacaggggattgaggactctgtctgctcacgagtccctgataccgctgtccacctacgctgcctctgtcagcgacgctgcccgtcggaccctgtggtcgcttagccacacctaccgacagcagctgcagaacacaaggttcaggcatctccctcagcgcctgcgaggagagaaccagaccaacattgtcccaggagagcctggtgaggatcgcctcaacaccctagctggtgtagtggccggtctcaacaccgacctggacagtgccactctggacctctacagtgtgcacttggagctggagaatgcccacgccaggatttcagccctggaagcccaactgcaaggactggatccgccagaagctcaggtccccgccgtggcgctatctcctccccgcaagaggatgcgctatggagagcccggatcagtcactaggctgctttag

SEQ ID NO: 39481 - DNA, 1011 bp, Zea mays
  Peptide Sequence Number=SeqID_81260
atggatcctggcacacatatgatggttcgcaccctccaaactacccgcatcaacaccagctacgcccctcagccccggcaggtcccggtctacccagtggtagtcgaggaagctccagcggatctccctcccatccaagtggagaacgtgatcaacctggaggacagctcggaggagcaactgccgacccccaccccgttggccgagtccctggccttcgcagctgggtcagcgacgtcagcaccagccttccaagcacctgcaccgggaggcgacgaccccgacgactccggagacggctatgacgacgacgacgatggagaggatgagcacgtccacgaggaagctgactacgcccagcaggaccccttcatggggattggtccagttgtcgaacattacacatcaatgttcgagacaggacgcttccccaacctactgcaagcagtgctgtacgagctaggagcctacgcccgccccctgtacgagacgaggcgagtgagcgagcctccccgggcttgctattacatcactcgcatccatgtcagggtgatggatgcaggtgacaggggattgaggactctgtctactcacgagtccctgataccgctgtccacctacgctgcctctgtcagcgacgctgcccgtcggaccctgtggtcgcttagccacacctaccggcagcagctgcagaacacaaggttcaggcatctccctcagcgcctgcgaggagagaaccagaccaacattgtcccaggagagcctggtgaggatcgcctcaacaccctagctggtgtagtggccggtctcaacaccgacctggacagtgccactctggacctctacagtgtgcacttggagctggagaatgcccacgccaggatttcagccctggaagcccaactgcaaggactggatccgccagaagctcaggtccccgccgtggcgctatctcctccccgcaagaggatgcgctatggagagcccggatcagtcactaggctgctttag

SEQ ID NO: 39482 - DNA, 522 bp, Zea mays
  Peptide Sequence Number=SeqID_81261
ccaagtgaagctaataccttcgctgacatagaggctacatacaagtgccttgtggatgtttatggaaccagggaagaagacattgttctgtatggccagtctgttggtagcggaccaacccttaatctagctgttcgtttagatcgcaacatcgacaaaatcactcatgttaagtgcccagttttggtaatccatggcataaaagatgacgtcgtggactgctcccattggaagtggctctacaagttgtgccagcacaagtacgaacctccgtggatcgagggaggtgaccatggcaacctgaagaaattcccagtgtacatacgacatctgaagaagttcttactgaccataaagaagttgccatctaaaaaagatgtcgtgactgaccacgagccatgggtcactgagaacataacacaccctagcggtggagccatcttcgaggctcctacctcgtggaggctagagtcgtcgaaaaagagcatgatccatgaagtgcaggcgaagcacgggccatag

SEQ ID NO: 39483 - DNA, 750 bp, Zea mays
  Peptide Sequence Number=SeqID_81262
atggcgcagtcgaccgttggcagcctgagagtcgttggcgcaccggacatgtccggtgcacaccggacagtccggtgcacccttctagccgttggctcggcccacgtgtctcgcgcagattgcgcggcccgaccgttggcccggcccgaccgttggctcaccggacagtccggtgcacaccggacagtccggtatgattactctggttatgggcagtcatcaggtaagccaagtgaagctaataccttcgctgacatagaggctacatacaagtgccttgtggatgtttatggaaccagggaagaagacattgttctgtatggccagtctgttggtagcggaccaacccttaatctagctgttcgtttagatcgcaacatcgacaaaatcactcatgttaagtgcccagttttggtaatccatggcataaaagatgacgtcgtggactgctcccattggaagtggctctacaagttgtgccagcacaagtacgaacctccgtggatcgagggaggtgaccatggcaacctgaagaaattcccagtgtacatacgacatctgaagaagttcttactgaccataaagaagttgccatctaaaaaagatgtcgtgactgaccacgagccatgggtcactgagaacataacacaccctagcggtggagccatcttcgaggctcctacctcgtggaggctagagtcgtcgaaaaagagcatgatccatgaagtgcaggcgaagcacgggccatag

SEQ ID NO: 39484 - DNA, 243 bp, Zea mays
  Peptide Sequence Number=SeqID_81263
atgaatcccggccgccacagggtcaatccttccctatccggccacgggtgttccaccggccagcacatgaagcttctggactcatcgcagacccccaaacgtcagtcgtggacggggacgatgctgacggcgtccctgctctcaactctctcttctgctcaggcgctggcggccgagaagtgcgtcgcgggtggattcgatcgtggaggcccccccgtctttgacaggacggatcgatttgag

SEQ ID NO: 39485 - DNA, 612 bp, Zea mays
  Peptide Sequence Number=SeqID_81264
atggggaggttgctcaccgtgattccaagagtgccccgggccatccacggggagcggcggatcccagcgttcgacgatgaatcccggccgccacagggtcaatccttccctatccggccacgggtgttccaccggccagcacatgaagcttctggactcatcgcagacccccaaacgtcagtcgtggacgaggacgatgctgacggcgtgtggcggatcctgagatcgagcggcgctccgatgaacgattgcagagaagtggcccgccccagagccgcacaagctatgaaccggcaattccccaaccagcgcacctttccgactcctttgcccaaggttttactggcagtagcggcggaattacgaaggtggctcgtccagcggggatttctcgctctggagcctagcgcggtaggcgacttcaccgggattgcggcatctcggctgtgggttaacagggcggttcccaggctcccatttatcctcccagttccgggtcagaggaggggaacggagctgagccacgttcccggtcatggcggcggaattcttgccttccgttgcgatgtaggcgaacgcactgacgcgcgggcccgagctccagagggctga

SEQ ID NO: 39486 - DNA, 636 bp, Zea mays
  Peptide Sequence Number=SeqID_81265
atggggaggttgctcaccgtgattccaagagtgccccgggccatccacggggagcggcggatcccagcgttcgacgatgaatcccggccgccacagggtcaatccttccctatccggccacgggtgttccaccggccagcacatgaagcttctggactcatcgcagacccccaaacgtcagtcgtggacgaggacgatgctgacggcgtgtggcggatcctgagatcgagcggcgctccgatgaacgattgcagagaagtggcccgccccagagccgcacaagctatgaaccggcaattccccaaccagcgcacctttccgactcctttgcccaaggttttactggcagtagcggcggaattacgaaggtggctcgtccagcggggatttctcgctctggagcctagcgcggtaggcgacttcaccgggattgcggcatctcggctgtgggttaacagggcggcgaacgcactgacgcgcgggcccgagctccagagggctgagcgatcggcagccgagaggaaaggcgctgtccagtgggacccacggccagagaaggcgctgaagatgaccagcgcatcgttagattcagtattcatcaaagtctccatcaaagtcttcttcatcaccctctga

SEQ ID NO: 39487 - DNA, 633 bp, Zea mays
  Peptide Sequence Number=SeqID_81266
atggggaggttgctcaccgtgattccaagagtgccccgggccatccacggggagcggcggatcccagcgttcgacgatgaatcccggccgccacagggtcaatccttccctatccggccacgggtgttccaccggccagcacatgaagcttctggactcatcgcagacccccaaacgtcagtcgtggacggggacgatgctgacggcgtgtggcggatcctgagatcgagcggcgctccgatgaacgattgcagagaagtggcccgccccagagccgcacaagctatgaaccggcaattccccaaccagcgcacctttccgactcctttgcccaaggttttactggcagtagcggtggaattacgaaggcggctcgtccagcggggatttctcgctctggagcctagcgcggtaggcgacttcaccgggattgcggcatctcggctgtgggttaacagggcggcgaacgcactgacgcgcgggcccgagctccagagggctgagcgatcggcagccgagaggaaaggcgctgtccagtgggacccacggccagagaaggcgctgcaccctgagacatttcttcagctgagatacatgaaatacatcatgaacatccgcaagatgatccggtaa

SEQ ID NO: 39488 - DNA, 444 bp, Zea mays
  Peptide Sequence Number=SeqID_81267
atggagcagaggattacccggcctatgctcgccggcggtcgggtggagtccggcgaccgtggactggcctctccggcgaagcaaactccgattcctcgctcggggagcttcaccgaggtgtgctcagtcttctccaagggttgtacggggttgggaagggtccggttggccggtctacggtggcagggggatcggggcggccgcgggcacgccgggcacgggcaaacgccggtggtttggggctccggtgaggtcaagcgcgtgcggaggggtacggtcaaggtccctgggggctttatagggcgctggcgcggggccatggcgccggctgggctttggcgcgacgcggggcacgcggggggcgcgcacgggcatgctctggcgagctcagagcgcgtcgaacacgtggctctttgcttctgcccgtgttcttccctctgctga

SEQ ID NO: 39489 - DNA, 402 bp, Zea mays
  Peptide Sequence Number=SeqID_81268
atggtggaggcacagggacgcgacggggcgatggtggcggagctcaggctgcgcaagaaccactccagtgagtgcgggccggctgaaccagggagggaaggggcacaccgaaggatgtcccgagaagctgacggcaaggcgaagctcaccatggcactggacggggcgcgggcgcaacggcgaccacagaacaggcggtggacgtcggcgggcggtggcgggggttctctgttcgtgtgggcagagcgagagagagagcaagagagctgggcagagggtgcaaatggaagaggggaggtgggcgagcagggcgcagggttcaaaaggggtgcgggggctcggtcgtggccggagaatgcgcggacgtgggcgcgtccacggcggggagatcgtgggcgatag

SEQ ID NO: 39490 - DNA, 271 bp, Zea mays
  Peptide Sequence Number=SeqID_81269
ttcttccaaggcagtagaagtattggaggcatacgagggaacactggaagatgattatcctccagagaatgagcgatacgaacacaatgaaatgctgctgtataagtacgaccgccacttcgccgccaagtacgagctagggaaggaggtgggccgcggccatttcggccacacctgctcgcacgctgtcacacccggttttagaaggcaaaccgaatgcgaaccatgtacgtgccaggatcagttattcacgtacacagcagttacataa

SEQ ID NO: 39491 - DNA, 1989 bp, Zea mays
  Peptide Sequence Number=SeqID_81270
atggggtcctcgctcccgcccaaggaagccaacctcttcaaagtcatcgtcaaatcctacgagactaagcaatataagaaagggcttaaggctgcagattccatattaaaaaagtttccagagcatggtgaaacactatcaatgaaaggtttgacgctaaactgcatggaccgaaaatctgaagcgtacgagcttgttcgacgaggcctgaaggcacagatgagggacttgtctggctttgttgagactaggcaacaacttttgtcgttaaagccaaatcaccgcatgaactggattggttttgcggttgctcatcatttgaattctaattcttccaaggcagtagaagtattggaggcatacgagggaacactggaagatgattatcctccagagaatgagcgatatgaacacaatgaaatgctgctgtataagatatcattgtttgaagaatgtgggatgctagacagagcccttgaggaaatgcagaagaaggagagcaaaattgttgacaagctatcattcaaagaacaaatggcatccgtcttgttcaaacttggccgctttgatgaatctgagagcatatacagatccctgctttttatgaatcctgataactacaaatacttcattgctgtgcaaaagtgccttggcttatactctgataatggtcaatattctgctgctgatgttgagcgcttaagtgcattgtacaactcacttaaagagaagtatgcttggtcatctgctgtgaagcgtatccctcttgattttctggaaggtgagaagttccaggaggcagcagacaactatgtcagacctctattaacaaagggtgtgccctcactattttccgatttaagcccactgtatgaacatcctggcaaggcaaacatactggagcagttatttcttaaactagaagattcaattagggattctggatgctttcctggatgtccacagaaggagcctccttccacactgttgtggaccctgtttttgatttctcagcactacgacagaagagggcaatatgacattgctttgaataaaatcgatgaggctatctcacatacaccgactgtcatcgatctatattcagtaaagggaaagatattgcaacatgctggaaatttcacagcagcagccgcattagcagatgaagctaggtccatggatcttgctgatcgttatttaaacagcgagtgtgttatgcagatgcttcaggctgaccaggttggccttgccgagaagactgctgtcttgtttacaaaagatggtgatcaacacaataatcttcatgacatgcagtgcatgtggtatgagcttgcttctggggagagctattaccgtcaaggtgatcttggccgggccctaaaaaatttcttggcagttgaaaagcattacgctgatatgactgaagatcaatttgacttccattcatattgcttgcggaaaatgacacttcgagcatatgtttctatgctgaagtttcaggatcgtttgcatgctcatgaatacttccacaaggctgctgctggagctatcaggatagttggtgatgctgctggcacaaactgcaggtgctatatgaaactacatgattctccaacaaaatcttctaaggaagagaatgatgagatatcaaaactgccacctgctcagaggaagaagttgaggcaaaagcagaagaaagcagaagcgcgtgctaaaagggaggctgaagagaaacaagaggatgaaacagcttcatctaacagttcaaaatctggcaagaaacaacatgcaagaccagttgatctggatccacatggtgaaaaattaatccagattgaagacccgcttgcagaagccacaaaatacttgaagcttctgcagaataactcgtcagactcattagagacccatatactttcatttgagctaagcatgagaaagcaaaaggttttacttgctttccaggctgtggcatacatatctatgtaa

SEQ ID NO: 39492 - DNA, 1230 bp, Zea mays
  Peptide Sequence Number=SeqID_81271
atgggcgtgtttggagtcgaaggggtgcgcccactttggcgcggttgcatgccgactgcatggctgtccgccctttcacccgctggtctgggcgaaagtggaggaatgcttgtaaccgctgggcagttgcatgcaccgcacgcggcggtttggcttcttctgccctgggccagcttgcatgacgcgtgggacccagcccccgtgtcgcagggggaggaccttggagcgtgttggagaagactcagcccgcgatggctgaggatgcaggtgggaagagtcgcctttaaaaggagggtgatccccttgaaaggcgaccatgtctttgcgctcccttatgcatcgcgtctttccaccttccgagcccccggatggggaacacccgcaatcctttcgtcttgtcgtcggaggaacgcaacttcatgggagttggtgcctttcagccatcgttcgacttcaaggattttcatcaagcggcccggccgcatcccctcgctggtggtcacccaagacggtgaccaccagcccctggatggggagaagcaagccgggttgcggcccccgcccctccctcagcttcaaggatgttcatcatccttgctggggcagagagcgaggcgagccggggctctacctcctgcactggatgcaacattcaatcctcttcctcgctttcatggcgaggacggaagcgaggacctgctggtgcgctttggagcggcccgcgttcgccggtgcggcgttggtggagaggcggacgccgccgtcggtgctgacgtggtggcagccgggggaagcctccccaccgtcgaggccatcagcgccgcctacgggccggcctccggctctttggctttgatgtctgactcgcctgtcggctatctgaaccgcttcaccaagcgtgggtcgcctcgtgcaaaggtgacgagtgagagtggagatcctccgaccgcgtcgccatccgaggctaggtcggacctcgccgaaggtgtagttgacgcgaggggttctgtcaccgacgtagtcgagaaggcccaaaaaatcgtttcggcagaggagctttctagcgtgaagacttgttcggtccgcggaatcacctatccgagcgcgagttacttatcgcagaaggtgatgagtgagccgaagcaccaggtcgcccacctggaggtctcagcaccgaacccctcgggcgtgctagcgtcgcagggactgctggtaccgcgccgagtgtag

SEQ ID NO: 39493 - DNA, 303 bp, Zea mays
  Peptide Sequence Number=SeqID_81272
atggcgacgatagcgcagcagcccagacatcgaggggagggcgcgtgttgccctgcgcacgcgcgtagcagccgtggctgcaggcgccggagcgttgatacacacttgatgaagatgctaccgactctgatcttgactgatttgaaggagttgggggatgccgaccggacaggtgcaagaggaaagggtagcgagaaaaggggccacaacacaccaacactcatcacaaagaagcaaatcagtcataacacaaagacaaacaacacaagcatacaacaacaaacatctcgttgctatacgtaa

SEQ ID NO: 39494 - DNA, 252 bp, Zea mays
  Peptide Sequence Number=SeqID_81273
atgaagcgcgacagtcgaagttacagtcgagaagttatcgcgtttacgttgaacaggagcgttgatacacacttgatgaagatgttaccgactctgatcttgactgatttgaaggggttggaggatgccgaccggacaggtgcaagaggaaagggtagcgagaaaaggttgtcgaaggacgaggagaagaacaagacgtgtaggatagggacacgagcacaattaaggatggagcttaagcaaggattgtaa

SEQ ID NO: 39495 - DNA, 702 bp, Zea mays
  Peptide Sequence Number=SeqID_81274
atgcaggcctgccaggctccaggggctcggccgcggactcgccatgcgagggcactgaccgtcgcgttcgccgacctgcaggaccccggggcgcgacgcgagagagagaatagcggagggggcagtgcttgccggcgccttcactacgccgcacggcttcgaccaggcagcgctgagcaccgggcaccggctaggggctgcagggagggtccgtcgaggaggggagagaggatggggaagggaagagaggagagaggactcaccgggaatcgccatgtgcagggacgacagcttctgcgtgatttggatctggggaaggagactagaggttatgtgacggctgggtggttgtataaaagggaacacgagaggaggttgccaaactcgccatcaactgtgttgcgaccgagcgagagaggcgattgcgaatacgacgaggcggctaacccccttaacaggagcgttgatacacacttgatgaagatgctaccgactctgatcttgactgatttgaaggagttggaggatgccgaccggacaggtgcaagaggaaagggtagcgagaaaaaggtaggcataggagaagcatcatggaaagatctagatattaggaaggtacatgacaagcatcaaagtaatgatcgaaggatgacaagggttaaggtgataacggacaaacacgtaataaaggatgtattttaa

SEQ ID NO: 39496 - DNA, 627 bp, Zea mays
  Peptide Sequence Number=SeqID_81275
atgaaattccccaaccgccatggctactgtccatggagcttgcgcgcggggggtggggcctcggccggcggctacgggcgctcgacggcggccaccacagccgggcaggccgcgaccttggggaagaatggcgccacgaacagaggaacagggacgcggctgggaattggactaaatccgagcaaaggagatggcgcatgggagcgttgggtgccgagcgccataggcgaacaggacacgatagggaggagccggagagagtgtcgcgcgcagggagccgaagagagtgccgcgcgcagggagccggacacggctgggctgaatctgagctgcgcagagggagcaccgagcttggtcgacgctgaagacgacggagcagagggcgcggcttgggaacaggcgcgcgctgggctgcgcactggccggtggggaggccgcggcaggggcgagccgccgcgcagggccccctggacgcgacgccgggcggggctgccgggagggtccgtcgagggggagagaggatggggaagggaagagaggggagaggactcaccgggaaccgccatgtgcagggacgacagcttctgcgtgagttggatctggggaaggagactagaggttatgtga

SEQ ID NO: 39497 - DNA, 594 bp, Zea mays
  Peptide Sequence Number=SeqID_81276
atgcagtttgagcagggtattgcggccacggatcgaacgggaggcaactcaccgtccgtagctcccttgtctcctccgcctgcagccgccgccgtcggggcgcgggtggcggaggaggaggaggcacagggtggggagcagcgcgaggagctgcggcgagagggtctcgtggaagaggcgcaagacggggcggcacacgacggcgtcgcgcagttgcaggtggagcagcacgttgtggagcgcgtccggcggcaggtggtggatcggcggcgggggctgcgcttccgcgggcggggcggggtcagagccggcggccatggtggattcagggtggggttaggtggggaacgcaccgggggcgtggagaagatgacgaggccaggggtgagaggcccggatgtcagtgagaagaaggcggatggccttggtgtaatggtcggcgtcggccgttctaagccaccacaacgtgagacagcctccggcggcggcgattcttggggttcggagtccatgattattgggcgggggcggtcgttcccgagggaggcattgggtgtgtatggtgagaaggcatcgcggatggaaacaaaatga

SEQ ID NO: 39498 - DNA, 1410 bp, Zea mays
  Peptide Sequence Number=SeqID_81277
ctcctcgcgctgctccccaccctgcgcctcctcctcctccaccacccacgccccaacggcggcggctgcctccacgccttcaaccccgcgcgccgcacctggctccgcctccccttcgcccaattcctcccctaccagtccttctcccccatcgcctcatccacgtccctcctctacctctgggtcgagacctcctcctccacctcgcccctggcactccccccgtccacctcctccgcgtcttccgcctcgcccgtgcacccgcccaaatcgctcgctgtctgcaaccccttctccgacacgtaccgcctcttgccccagctcggatccgcctgggcatgccacgacaccgtcctcaccggccccgccggcacggtgctcatccgcaccgagctcgccgcgctatcctacaccccctccagatccgccaagtggatgaagcatcccctctctctgccgtccaagccgcggagccccatactggcctccgacgccgtcttcgcgctctgcgacgtcggcacgccgtggcgcagccagtggaagctcttctcctgcccgcttgccatactcacggggggctgcgcgcccgtggagcgagcagtgtggggagacgtcttcgaggtcctcaagcgtccccggctcctggctagggccggcggccgccgggtccttatgatcggcgggctcaggtcctccttcgccatggcggggaccaggcggggggctggtggccgacggatgcggagggcggaggagacaagggagctacgaacgataaacaagtggggcgagatgatgtacgagaagatcaagaaattggataaggagctggccaggtatgttcacaacaatattttctttagttttgctgtcgactccgactatgaagacatttcaaaggaccacaagccagattgccaaaatgggtccagtagaagcaccaaggtttcctccccagatgtgatcactaaaccagatgcaaaccatggcaaatctgctgaggtagttgattcaaaatctgaagaggcacaactcacagatagagagcaagcgacatatgcttctacaaacaatgacttaaaaggaactaaggcttatcaagaagctgatgtttctggccttcacaatcttgcgatggcaatagttgattacagaggtcatagggttgtagctcagagtataatacctggtattcttcaaggagacaagtctgattcccttctgtatggttctgttgataatggcaagaagatatcttggaacgaaacgttccattctaaggttgttgaggctgcaaagcagctccatttgaaggaacatgtggtattggatggttctggcaatcctgtaaaattagctgctacagtcgaatgcaagggtattgttgggagtgatgataggaaaagatga

SEQ ID NO: 39499 - DNA, 645 bp, Zea mays
  Peptide Sequence Number=SeqID_81278
atgaaggaggcgaggaaccactaccacacgcggggctcctcgcgtggcggcggtggcaccgctaccgagcacgacctggtgttacagtggggcaaccggaagcgcctgtgctgtgtcaaggtgcagcgccgcgatgaggccgccgccatcgcggccgccgagaaggccgccatcagccagcgccgcgccgcggctgcagctgcccagcaccacccaaccggccacacccaccagcaccactgtgttctcagattaattcaagtgaacaattttaatgtgcataagttcagctacaactattctaagtcgattgttcggaataccgtagattattctagacaggagaagctttttggaaaaacacctatgcgcggactgtccgggcccttgcggcggaccgtccgcgacaccagggtgaccctgggacaggaacactgcaaaaacacaaggttacactacggagcgtccgatggagaagcgaacaccgtccgagaccaagcgcggaccgtccggcctcaggcgcggaccgtccggccggtgaaaacccagaaaaacccgaagccgttactgctgaccgttgcgatttcagccgttgatatgcaggggcggaccgtccgcgttcggcaggaaaggaccaacggctag

SEQ ID NO: 39500 - DNA, 234 bp, Zea mays
  Peptide Sequence Number=SeqID_81279
atggctgccgacctcctctgcccccttgctgtcccaccccttctccctcaagccagcgccttccccgaccacatctccatgaccgagcagcagctctactcgcccccctccttctttttcccttgcgcagcagcaagaagcccctgctcgcagccttggcgtccaacttcgctgcgcagcgttatgcgcatcggtaggatcgcgtttgagattggagaacaaaaggttatgtga

SEQ ID NO: 39501 - DNA, 645 bp, Zea mays
  Peptide Sequence Number=SeqID_81280
atggccgacggcctccgcagcgcagcagccatggacgagcttcttttctcccctgctgttcccctgcgtgcagggagcaccaaggccagcgcccccttctccaatggcgtccttgctgcaggatgcgcagaaacttctccatggcgccccctgcttcttcctcccgcagcacggcagcaagcagccattcccatggccgagcttacctccctgccgcgagctctctctggctccttccccaagtccgactggagcttgcctcctccatggccggcgcccagcaacagtagcagccgggtcttcgtcctccctctgctgtccgcggcatgcagcaaacagggagctcgagtttcttccatggctgccaacctcctctgcccccttgctgtcccaccccttctccctcaagccagcaccttccccgaccacatctccatgaccgagcagcagctctgctcgcccccctccttctttttcccttgcgcagcagcaagaagcccctgctcgcagccttggcgtccaacttcgctgcgcagtggtgccgatccaaaacagcggccccggatcacctccgcactgcgtgcttcaccggatctgcgcagccccaacatcgacgccgttcacctcgagaagaaaaagaagtag

SEQ ID NO: 39502 - DNA, 639 bp, Zea mays
  Peptide Sequence Number=SeqID_81281
atggcgcatcgaacagtccggtacccatcttgctcaaggtgccacaaatcttcatctcaaacttcaactggatatcactgcacatcatgtggctgcacagatattaactttagatacaagctcagcttcattgctactgatgggacatgtgaagcagagttcttttgttttgatagcatagccagaaaaatagtaggaaaaccttgtgacaaccttgttacagcagttacaacttctcagggtcccccagcagccctagtcgctattgtgtgtctgaaatttacccttgcagttaccatcaatatgtcagcctactcggtcacaaatagagtattctctattctgtctattttaacaaatcatggaagacaggccttcataccatctaacatgcctagccatcctcaacaagagttggatacacaagatgaaatacctagccttccgacaacacaagactctccagcaacatcaatggcgaaactatctacctgtagcaacgaaagaaacgagggtgatgcccagcgcataagtgaactcaacaatgaagagttatcgtcgccaccgaaaaggataaaacatggccacagtagcaaaggaataccagatcttacagaccccaaaaagaagagctcctag

SEQ ID NO: 39503 - DNA, 619 bp, Zea mays
  Peptide Sequence Number=SeqID_81282
gtacccatcttgctcaaggtgccacaaatcttcatctcaaacttcaactggatatcactgcacatcatgtggctgcacagatattaactttagatacaagctcagcttcattgctactgatgggacatgtgaagcagagttcttttgttttgatagcatagccagaaaaatagtaggaaaaccttgtgacaaccttgttacagcagttacaacttctcagggtcccccagcagccctagtcgctattgtgtgtctgaaatttacccttgcagttaccatcaatatgtcagcctactcggtcacaaatagagtattctctattctgtctattttaacaaatcatggaagacaggccttcataccatctaacatgcctagccatcctcaacaagagttggatacacaagatgaaatacctagccttccgacaacacaagactctccagcaacatcaatggcgaaactatctacctgtagcaacgaaagaaacgagggtgatgcccagcgcataagtgaactcaacaatgaagagttatcgtcgccaccgaaaaggataaaacatggccacagtagcaaaggaataccagatcttacagaccccaaaaagaagagctcctag

SEQ ID NO: 39504 - DNA, 231 bp, Zea mays
  Peptide Sequence Number=SeqID_81283
atggcacaacatcttcttctggaagtttacgcacatagagatttagcaaacagattgcatactattgcaaggatgatatcaggaacttcacctctactcacttctaggatatacgaggggaagcttcttatagaagggataacacagtgtgctgcttggcacgggcgcactgttcgccagcagacccagcaggcgcgccgcctgctggatgaccttgacgccgcctgctag

SEQ ID NO: 39505 - DNA, 579 bp, Zea mays
  Peptide Sequence Number=SeqID_81284
atgccgttaagtacgacggtcatgggtcagccagccgtaagaataggcacgacagttggcgtggtcataagcgggctggcagtaattgcagcaacaggcgcatggaagcagcggtccaaccaccagacggactctggtcccacctgcaggctcgcaccctcccctaaggcgggaccaggggccactgtcggtaccctaaatcaggggtaccctctcctacagcataaaggcatcgcacccatgcgacgtctcctggccgcgtggaggaccgcgtctaactccaccggatgggcgggccaaagggcgccacgtggcgaggaaaggcaccatgcctcagtaagaccggacccccacagagggtcaccgggaccctatatacatatagtttcggagccccagggcggcgtcaaggtcatccagccggcggcgcgcctgctgggtctgctggcgaacagtgcacccgtgccaagcagcacactgtgttatcccttctacaagaagcttccccagcacgccgaagatacacagatctcggacgacaggacacaaggggattgccccggcagcaaatatttatag

SEQ ID NO: 39506 - DNA, 456 bp, Zea mays
  Peptide Sequence Number=SeqID_81285
atggcctcagctaatgttggaggtactgggggtggattacgggttgcttccctcccacgggagcttcctatcacttttggtagcctcgctgtcgggtgtaggagaccattcatcaaccagcttcatagagggaggaggcctgaaaaggtccagttcaccaccaagtgcttctcccgctactccagaaggtccggcttccatcccgacaggatccacagccagggattctcggatatcatcggtcagcatcccggcgcccacctgccggatgctggaatgatggccaagaagggcaaggcactgcaactcatcgtcgagagcctggttttgggcattcgatgcccgaaaccaactcccgcccaatggtccgaagattacttcgatctttacggagttgaccccagcatgtggattcaggtgtctgtgcagcatttctccagcccagctgcccattga

SEQ ID NO: 39507 - DNA, 390 bp, Zea mays
  Peptide Sequence Number=SeqID_81286
atggcatcggctaatgttggagcctcgctgtcaggcgtaggagaccattcatcaaccagcttcatagagggaggaggcctgaaaaggaccagttcaccaccaagtgcttctcccgctactccagaaggtccggcttccatcccgacaggatccgcagagatgggcttggctctgataccagatgtgacagaaccttccaagtcattaggcccacctacagttgtccttgtcccacagactttagacaaccctgcatgtgcacctgatcacttgataagttcggtatctgaattccttaccttcccaagagcgtttcacccatcacgcaaacattacaattcatcggagatacgaaagtgcggaagcagttataataacttactttattga

SEQ ID NO: 39508 - DNA, 756 bp, Zea mays
  Peptide Sequence Number=SeqID_81287
atgtcggacgaccttgttgttcctgtccactttgaagttggccaagaactttgctttcgcctcctggatcatccgctccttgtgctcctcaaactgggagctgctccgtcagcccgacaagaaatatcagaagctatccctttgaaccggccatttgagggccgatttgataagcttagatatgttttccccagcggagtcgccaaaaagtatgttgacgccttttcggagcgccaaacactcaacaagaaccgtggcggtgccctctgcacaggggcggatggtccacgcgcaggggccgggacggtccgcgggcctgggtgcgaggcgcggtgggtgctctctgcacaaggggcgggactgtccgcggcctggggccggacggtccgcgggcctggtgcgcggctagggctcctgcctgacggtcggacgatccgcgccctggggccggacggtccgcacggaactgggaagcgctgcctcggcctgggcttcctcgcagtcctgacttcggcctcccgaatctcgaaccctaacctcatcggcgacgaggggagccccgcctccgcctcctgcttctctgttatgaacaacttccatgtctacgaggacattgggcgcggcaagcactcggtaaatctcctcacttcctctccggatgcgaagacggtgtataaggggcggaagaagaagaccatcgagtacttcgctgttaagagcgttgacaagtcgcagcgctccaaggtcctcaacgag

SEQ ID NO: 39509 - DNA, 420 bp, Zea mays
  Peptide Sequence Number=SeqID_81288
atggtttcagttccgcttttccctctctcccgccctggatccgctgggatcggggcggcccgggctccagcgggagatttgtgcctttctgtgtctttttccctggttcgttgtgtgatttggtgctgctggtgcttgtgtggagcgaagacggtgtataaggggcggaagaagaagaccatcgagtacttcgctgttaagagcgttgacaagtcgcagcgctccaaggtcctcaacgaggttcgaatgctccattccttagaccatgccaatgtcctgaaattttactcttggtatgagacctccgcacatttctggttagtgttggagtattgcgttggtggagacctgaagggcttgcttgaacagaataatagtaatcaaggtgaaatgtggaaatttagagctatgaaattatag

SEQ ID NO: 39510 - DNA, 1155 bp, Zea mays
  Peptide Sequence Number=SeqID_81289
atgaagaggttgctggagactacccatctggaactcaacgggaagttgttcatcaacacgcagcaggcccctacctggcgcgccaactgtcggcgtttcgacccaggggagtgggtgcgcttgcagtgggggttacaagcgttcgcgagggagagagagtgtgagccggttcgtcagcccgtcctcccgcgcgaccacccttcccgtatgagggccctggaccttccttttatagatgcaaggagagggtccaggtgtacaatggggagaccaccttccgaggctgaggctgaggccgagccctggggtcgggcgaggcggagaccaccttccgaggtcgaggcgggggccgagcccagaggtcaggcgaggcggagtttcctgttgcgcctgaggctggacttagatgttgtcagcctcaccctggcgggtggcacagtagtcgaagcggggcaggcggcgctatttttctgtcaggtgatcctcgcattgaatgctcctgcgatatggtcggttggcgaggcgatctggccaaggttgcttcactgcgaagcctgcccgagctgggcctcgggcgagtcgagggtgctgatgtctatcccaatgcccacggggttcattggtgctgatccatacaagattcgtgctggcgtcgctagcggtcgtgaccttgagatcggggagctcgcccggggctccaaccagtccatggacgtgacggagagactagcactggaggagctgttcccgaacccgtcatccctggaggagactgctggttttgcatatttgaatcttcaggaagcatgtccaccgttctcggatcccatgtcccgctcccctagtcaagcagtcgcggatgatgggcaatcgactgcggagatggtgtgcgagagctcggacgcggaaaggtttgcggtttgctgcgtgacctatgttggcatggagctgaggcagaggagcgtctctgggggcaggagggtggtggcagcgtccgcggatgatggggccaacagcttcggaagcagcatgcgggagagtgccgcagctgctgtggttgtggcggatgtggcggccatggcgtggtggcctgaggcaaatggcggcacgaagaagaagctggagaaggagtcgtcgttggactacaattgttag

SEQ ID NO: 39511 - DNA, 474 bp, Zea mays
  Peptide Sequence Number=SeqID_81290
atggtgtgcgagagctcggacgcggaaaggtttgcggtttgctgcgtgacctatgttggcatggagctgaggcagaggagcgtctctgggggcaggagggtggtggcagcgtccgcggatgatggggccaacagcttcggaagcagcatgcgggagagtgccgcagctgctgtggttgtggcggattggcggccatggcgtggcggcctgaggcaaatggcggcacgaagaagaagctggagaaggagtcgtcgttggactacaatttgctcatgcgctgacaaggccatatatttccaatgtgctatagagaatacatgggccactgttgatgtcttcttgaaggcagctggatacatagactgcgcaattcggcatgtacttgcgaagatgccactggaactaaggagacaacttccagtcgacctggccgaaggaaatctcaaagctctaagcctgcaagccttgggttag

SEQ ID NO: 39512 - DNA, 1389 bp, Zea mays
  Peptide Sequence Number=SeqID_81291
atgcgcgacgacgccacgctcgcctcctccctctccgcctcggcctcgtggcgccgcaccatgctaatgacatcacattaccaaaattctggggacccatggatgccttgtgtcaacggtaggctgactcgatcagagttgccaccctcaaatggctatctcatgatagaagcaaatggcggtctaaatcaacaacggctttctgtctgtgatgctgttgctgtggccagcttgcttaatgcaactcttgtgatcccaacatttcatctgaacagtgtctggcgtgatcctagcaaatttggtgatatatttgacgaagatcatttcattgagacactcaaagaacatgtaagagttgtgaagaaacttcctgaagatgttttgctgcgcttcaatcataatatcagtagcataccaaatatgagaactaaagcctactcatctccaaaccactatgtgcaaaatgttcttccaaaactgcttgagttaggggctgtacgcatagccccattctcaaacagattagcccagtcagttccattgaacatccaggccttgaggtgtttggtaaactaccatgcattaagatttgctgaaccaataagaattctatctgatgaattggttggtcgaatgacaaaaaagagtttgttgactggtgggaagtatgtctcggtgcatcttcgcttcgaagagccttttcatgctgtacatatgatggtggctggagggaaaaaactgaaatggacaatgctcgtgaaaggagctggagagctagcaagtcaggttggcatgatgctaaggggcatgggattcgataatacaacctccctatatgttgcttcgggtaaaatatacaactctgaaaaatatatggctcctcttcgccagatgttccctcttttaacgacaaaggattctcttgctttgcctgaagaacttgctcaattcaaggggcattcgtctcagctagcagcgttagattacactgtctgcgtgcacagtgaagtgtttgtgacaactcaaggggggaacttccctcactttctgatggggcacaggcgctatatgtttgggggtaatgcaaagacaataaaaccagacaaacggaagctggtcttatcttttgatgatccaaatatcagatgggatcagttcaagcagaacatgcaggaaatactgcagcatagtgacatgaggagcattgcattgagaaaaccaaacgattcagtatatacattcccaatgcctgattgcatgtggcccatggctgctgctaccgcaacccctccatgggcctccttaggccctgacactacacctctcctggacaagcagctcgccctcgagctgcagcatgacggatgctcaaagaccgagtctacttga

SEQ ID NO: 39513 - DNA, 699 bp, Zea mays
  Peptide Sequence Number=SeqID_81292
atgggggacctgtgggccaacataagggctgatctcacaaagatgcaagcaacgctccagaaggttgagcaagggctgctgcaaatcaaggcagcagtgcaacatgagcaacaccagctggcgttgtccgcacggctccagacgtcggcaactgtgggcatacaagctgctgctcgtggcttccttgcacgacggagagtgcgggagatgcgccggcaaatgctcgaggcagccttggtgacggttgacctcgacacacgggggcacgacctcgccctgttggacggccatcagcagcggcaccgggccgctatctcaaagtgtgagcatggtacgtgtcccgctcacgacgaacttcaactctacggcagcagcgctagggaaggcactcccctcgtcatcggcaagggcgcactattttgcgccaccacattccgctaccggccgccacgagggcgcctccgctggttattgttgagacctactccaggtgctcgtccatgtgcttccctttcgtccagatggcgtccatgggatctaggtggctgcacacgtgcaagtccaatgcgcagagggtgtccgccttatcttatggggtgtctggttttgggtcaagtagactcggtctttgagcacccgccattgttgcagctcgaggacgagctgcttgtccaggaggggtgtagtgtcagggcctaa

SEQ ID NO: 39514 - DNA, 300 bp, Zea mays
  Peptide Sequence Number=SeqID_81293
atgggcccagctaggcagttcggccgggcgagtgaccccagccagcggcggcggcgacgctggggttgggcgagcgcgcctacacggggctgcagtgtacgcgcgaggtgggccggggtgtgcgatgggcctcaggcgcgcggcacgctgggcaagcgcggtggtgggccgctggggaggaaaggcgcgtgggccgcgcgggagaagcaggctgcaaggaggggcgctggccgagtgggccgctggggagctgcgctgggccgacccacgcggactgagggaaggaggccggattggtga

SEQ ID NO: 39515 - DNA, 294 bp, Zea mays
  Peptide Sequence Number=SeqID_81294
atggtctcccattccggttatggtgggtacaagtgcggtcactgcacgacggcagtcggggtcagtgaggcattgtacgccaaggcggtactccttaggatgattggttgctggtgtgacttggccttcgtccctgccactgggacagacggtcgagtgggttactgcttccgcaggagaggaccaggaggagtagcgtggccagacttcgccatgttactcgggttttctccgttagttatttccgctgcattaaaatttatggttattatttctgaaactccgataacctaa

SEQ ID NO: 39516 - DNA, 444 bp, Zea mays
  Peptide Sequence Number=SeqID_81295
atgccgagaaatatggtaaatcgtgggtacaagtgcggtcactgcacgacggcagttggggtcagtgaggcattgtacgccaaggcggtactccttaggatgattggttgctggtgtgacttggccttcatccctgccactgggatagaaggacctataagaaatgccttacctcgtgttagattgatcctgtctcgaatcttcacaacctttctggtgctcgtcctaaacgatctcatgcgactacctctcttttcacctggatctgctcgacaacctattttggtctcatggtcggttcatcctcatatcaaatctcatgctagtctcttgccggataaccttcgtggtgatcatgacaagttcgaggagtcgaagattctcatgtgttgctcttttgccaacaatctctgcttcaactccggtcacattcttactttctga

SEQ ID NO: 39517 - DNA, 162 bp, Zea mays
  Peptide Sequence Number=SeqID_81296
atggggattggttgtctacgggatgaaaatttgaataaggattatggtgtggtaccgtacctccttgatttgtttgatagtgtgacttggccttcgtccctaccaccgggacagacggtcgagtgggttattgcttccgcaggagaggaccaggaggagtag

SEQ ID NO: 39518 - DNA, 378 bp, Zea mays
  Peptide Sequence Number=SeqID_81297
atggtctcccattccggttatggtgggtacaagtgcggtcactgcacgacggcagtcggggtcagtgaggcattgtacgccaaggcgactcagctagtgtttttggcaaaccaaacccctcagccaaacagctgcatgtctagaggtagaggagtagactcctcacaccgggtacttcttaggatgattggttgctggtgtgacttggccttcgtccctgccaccgggacagacggtcgagtgggttactgcttccgcaggagaggaccaggaggagtagcgtggccaggcttcgccatgttactcgggttttctccgttagttatttccgctgcattaaaatttatggttattatttctgaaactccgataatgtaa

SEQ ID NO: 39519 - DNA, 1311 bp, Zea mays
  Peptide Sequence Number=SeqID_81298
atggaggctctagagctgcgctaccggatgaaacgaatccttgtgatctggttggtgccgcctagccgctggccattgcgcgtggaggtggtggactggacgacgaggaggttggaaggattcggggagcggtggatggtggggcgatgtaatcaagaattggaatgggctggagacgacgacgaaggaagaagtcttctcttctttgttaatctatactacttcttaagactccatgtagatgttcacagaagtaatatattggcatctaaagagaatggtcatctgcacaccaacagggactgtgacaatgtgtggaccttcattctaacagatgcaaccttcaagagcgctgagattcaagaaacactgagcaagatatataacaaaaactatacatttgaatatagtaacaacaaagagtcaaagactctgaagctttggtgcctggcggtaagacttctgaaagaaatgtggaagagaaaatacggtttaagtgatgatacagtggatttcgttggacatgcacttgctcttcatagagatgatcgttatctcgatgaaccggcacttgatacagtgaaaaggatgaaattatatttacctattgtgtgcctttacctatatgcagactctcttgcacgctttcaaggaggatcaccttatatctatccactatatgggctgggtgagctaccacagggttttgcacgactgagtgttgtttatggtggtacttacatgttaaacaagccagattgcaagatcttctttttcacctcgtttcacataaatttgaataacaagaaaatgctctcatttttttcctgtgttgcctcattttctcaactactctatgttagcagtgtaggcgtccacactgccgcgttctaccacccgcagccgccccacgccgcaacccgcagccgtcccgtaggcaaccgcccgcatccgcggcttccatcaatcgccagcgcgccctccacactcctgccatccgaggaaagccttccatccatggcgccgttgctgcaattcccccagcgatccgcgctacctccattgcccacgcgatccacgctccctccattgccaccgcgatgttgccttcccaggaacccatccatccatggcgtcgttgctgcaagtgccccgcaatcaactccattgccaccgcgatccccttccaccgacggcactcaccttccatcgacaaaactgctcttcctccattccaccgacggcactcacctctcagatcccgtgctcatcaccatcctgcccctcgctcgccgccccatctcactctga

SEQ ID NO: 39520 - DNA, 735 bp, Zea mays
  Peptide Sequence Number=SeqID_81299
atggaggcgatcggcaacaccatgccagccctcgggatcctggcggacgacgacgtggttgagtacactggagacgaggttctagcgcagcgcctgccacgtggcgccgtagagggaggagcagacgttgcgaccaccgttagtgagcacgtcgacagaggccgtggagggcaggtgggaggcgaatgccacactgcgttgcacgacgtgcgcccaacagcgacgaggatcgccgttcgtaagatgggcgaggtggcaccgctgataccagccacctggaggaggacgatgtctcgcaaggccgcgggggcagtggaggcggaccgacccgctgaagatgtatctgaggagaagacattgaagattacgatagctttgaatcaggaagctgaggtggtggcaatcgcatcaaaggaggagaaggggctgcaagacgaaccgaaaggtgagaaggtatatgccttgcgtgttctcgatgaactctccaggcttcggatggccgaccacgacgtcgatcggacccctgaaatgacgatctgttttaggaacctcaactttgtcttcgatggcgaagaggaaatgtcagggccccagaagcctggtcccttctgcctaggagtctcggcactaccacgagggcccacgcacggcccctgtattgttcacacccctagagcgaccatctgctttgggggcctcgacttcatcattggcgaagagggcgagatgccctag

SEQ ID NO: 39521 - DNA, 495 bp, Zea mays
  Peptide Sequence Number=SeqID_81300
atgggcgaggtggcaccgctgatcccagccacccggaggaggacgatgtctcgcaaggccgcggtggcagtggaggcggaccgacccgctgaagatgtatctgaggagaagacattgaagattacgatagctttgaatcaggaagctgaggcggtggcaatcgcatcaaaggaggagaaggggctgcaagacgaaccgaaaggtgagaaggaagacaagaagactcttgtagaacggtacatcgtgaaggaaacccagattactattactacaatgaattgtagcatttccagatctgaagctgacataggtgttaagagaaaaaaaccaaatgaaagcctctatgagaagaagcctgaagaaccaactctcgtcctgacatcattggtgattgagatactacaaccaggagcaaaccccatagttaccaatttgaatatgtcaaaaatgcacctcctcctaagactgggaacaactcagaaggcaaacagatga

SEQ ID NO: 39522 - DNA, 384 bp, Zea mays
  Peptide Sequence Number=SeqID_81301
atgaggctttcacaaaatgcacttaatacaaagcaacccgctaaggtttctaaaatcggtgtggaggccctctgggtgaggtaccttagccaagaatatgtccccatgtcaaccacagtgggcagatggggcacaacgacgtcgaggcgagtcgaggggctggcagtgttcgtacgggcagcgcacggcttcctgggcggcgcgacggggttgcgggtcgcggcttcgctgcacggcaggtgcggacagtggtgcggcgagaagaagagcttgaacgaatgggcagagaggcgaggtgagggaaagcgaggggcgccgagggacttcatgaatgtcggcgggtcttcaagtgtcgtcaatggcgtcggttaccaaagcgaataa

SEQ ID NO: 39523 - DNA, 333 bp, Zea mays
  Peptide Sequence Number=SeqID_81302
atgaggctttcacaaaatgcacttaatacaaagcaactcgctaaggtttctaaattcggtgtggaggccctctgggtgaggtaccttagccaagaatacatccccatgtcaacggtgcagggcgtggtggggttgcgggtcgcggcttcgctgcacggcaggcgcgaacagtggtgcggcaagaagaatagcttgagcgaatggccagagaggcgaggtgaggtgcagctgcgttttataggacaagaaggagagcgaggggcgccgagggacttcatgaacgtcggcgggtcttcaagtgtcgtcaatggcgtcggttaccaaagagaataa

SEQ ID NO: 39524 - DNA, 327 bp, Zea mays
  Peptide Sequence Number=SeqID_81303
atggtccttaatcgactcagacggagacactacaccgagactctcttctcgtgcaagtcacccgcccggtctcagcttaatcatttcaacccaaaaacttggtacctggcagagcaagcaagtgagaaagattttaaaaacatcaagggaggtggcaaatgcaccgggacttgccttcgttcacagatttctaagcttgctagaaatagaaaagaaaacaatgacaggctcgggccgaaatcagcccagtcggccactacagcagaaacacatccacacgcgcgcgcccgtggtgactttcaaaaagacccccgacagtcaggataa

SEQ ID NO: 39525 - DNA, 561 bp, Zea mays
  Peptide Sequence Number=SeqID_81304
atgaggttctacaaaacgagaagccgacctctaaggcacaagtgtgaggcaaaactacagatttcgagtgaagcaaagcagaagaagacagatctttgggccgattatctcaaaatcaacccaaagatcgggggcttgtgggggacagatatcccccgagtccactggaagggtaaaagacctcacgaaaggcccaagggcccagtaaatcgtaagtgtccctcgtgcatctggcatgaaccattttgctacagtcggcgacaccatcctactcctaaaaacacctcgaggggcaaccccgggtgtgcggtcggacccaaaacaccgacagcatcaccacctttggaatctcaggccttgatgggttcaacatccggaaaagatgtacctctgccaggtaccaaactttgggttgaaatgattaagctgagaccgggcgggtgccttgcacgagaagagagtctcggtgtagtgtctccgtctgagtcgattaaggaccgtctcgatgtaggcttgctgaccgaggaccctttaactggtcacatgcctcgtcatgggtaa

SEQ ID NO: 39526 - DNA, 516 bp, Zea mays
  Peptide Sequence Number=SeqID_81305
atggcctgtacaaaccgcttcaaagaaaggagtctcggtgtagtgtctccgtctgagtcgattaaggaccgtgtcgatgtaggcctgctgaccgaggaccctttaactggtcacatgcctcgtcatgggatccactttagtaagcatttctgcaaaacagagtctttgattattgaaaaaccttaccttgactcccttaaccagcatacccttgagagtcttttctttagtcgggtgaggaagcaacaaatttttgttgcttttgctccaaggtggttcccaatgaagaaaaacaagagtgaagctgcgggaggacatggtcctccattagaactttataaaaactatcgggaggagtttttgcctcccttgatgggtgaaacgttcctggaaaggacaactgtaggtgggcctaattacttgggaggttccgtcacagctggtatcagagcgaagcccttctttgcagatattatgaggcatcttcaaaaggattttctaaaaagacttatctag

SEQ ID NO: 39527 - DNA, 600 bp, Zea mays
  Peptide Sequence Number=SeqID_81306
atggcgagagtagcatgtaccctccgtgaggctggacggtggtgtatctgtgctctcgggttgtctgaggtccgttggacaaagacaactgtaggtgggcctaatatcttgggaggttccgtcacagctggtatcagagtgaagcccttctctgcagatattatgaggcatcttcaaaaggattttctaaagacctatctaaaaaaattccattcttacccattatatctgaagaatctatatgaaagaccagataggaagggtgcaatgtatagaaggcatattgcaataccctacatgaagaagttcatgtactgtattcacaattgcaccccagcgtacctgcaaatcctgtcgggacagaagccggaccttctcacgaagcgggagaagcttttggtgatgtcgtccaagacccgatcacaggatgcagccggaacctccagtgggagggagtccaccccgaatccacctccagtccctcccacacttgccaaggctatcgccgccttggtaaatgcgacagcggataatacccgtttcctacggaaaatggcgggtcagcaatttcaacaacaaggcggacggggctatccgtaa

SEQ ID NO: 39528 - DNA, 357 bp, Zea mays
  Peptide Sequence Number=SeqID_81307
atggaggtgcaatccactcttattggtaggaagcaagttttgtcaaatagcggtattgcaagtatctcggttgtgttgatagcattagtcatcggagggacagataggtgtttagattcaaaagagtcaactcttgttactgctcttattgatggtgttattggacattatgcttgctacaatggagatacatggtcatctgagctcgacattctttgtaaagctgagccacgaattatcacaacattcaaggtggtgggagtagatggtccaatattaacctttaaaatggtaaagccaacaaagttcaatatttacaataactcgatgtgtccagggtttgcaagacaagattaa

SEQ ID NO: 39529 - DNA, 906 bp, Zea mays
  Peptide Sequence Number=SeqID_81308
atgcctaggctctccctcaccgtcactgacgacgccgctgccatgccctttgtgcttcggcttggtggttccccagcgctccgccctggctcgcagtccccatcgtggctgcgctttggcggcagggccggggcgcggaaggcgctgttctgctccgccgaggacgctaggcggtgtggctcggacgatgatgcggaggcggaggagtgtcggaggagaggcgggagccgcgtgccatcagataggaggataaggggcaggaatgcggctgccacggtaggtgatctgcagtcaggtgataacgtccagataacaggaccagtcggcaaagaaatgttgatgcccaaagaccccaacgctaccattataatgcttgccaccggtacagttcaaaggtctgggctagctcttcctgggtgttccaacgagcagctcgttgctctacaaggaggtcagtacatcgatctgtacaaggaggagttcaggaagatgaaggagagagcgtcggagaacttccgggtcgactacgccgtcagccgggagcagacgaacgcggcgggggagaggatgtacatccagacccggatggcggagtacaaagaggaattgtgggagctcctgaagaaggacaacacctacgtctacatgtgtgggctgaaaggcatggagaacggtatcgatgacattatggtatcgctggctgaaaaagacgtttggattcgatgcacccgaaatttttgcaatgattctaccgagactttgggggccttatttgggagcaacaacgcatgcgattttcgggtaaagccaacaaagttcaatatttacaataactcgatgtgtccagggtttggatgcgactggaagaagatcgaggagcatgtcggcaccaagacgacggtccag

SEQ ID NO: 39530 - DNA, 285 bp, Zea mays
  Peptide Sequence Number=SeqID_81309
atgagattgatggttttggttatggctatggtgctggtaagtggtattctttccgtttggaaagggtacatcgggttaataacttgggtaatgataaaacttggctttctactagttgtcagcattgcaaccactgctcaggcgaagatgaagctgtggaaggagacttccaggagttccaagactacgacgagttctaggtgtgggttagcggcaacccccagtcggctgcctgtgaaggccgcgtttatctacgtttcttttccgcactttgatttattgtaa

SEQ ID NO: 39531 - DNA, 408 bp, Zea mays
  Peptide Sequence Number=SeqID_81310
atgccgaactatgcattctttgaaagcttaagaatggggctcgagcggtttctcgagtgcctctccgtaaggacctgttctatggatgaccgcccgggaaaacagtgcaaccatgagggtggctatgagatcgatggtttggttatggctatggtgctggtaagtggtattctttccgtttggaaagggtacatcgggttaataacttgggtaatgctaaaacttggctttctactagttgtcagcattgcaaccactgctcaggcgaagatgaagctgtggaaggagacttccaggagttccaagactacgacgagttctaggtgtgggttagcggcaacccccagtcggctgcctgtgaaggccgcggttatctacgtttcttttccgcactttgatttattgtaa

SEQ ID NO: 39532 - DNA, 255 bp, Zea mays
  Peptide Sequence Number=SeqID_81311
atgagggtaagtggtattctttccgtttggaaagggtacatcgggttaataacttgggtaatgctaaaacttggctttctactagttgtcagcattgcaaccaccgctcaggcgaagatgaagctgtggaaggagacttccaggagttccaagactatgacgagttctaggcgtgggttagcggcaacccccagtcggctgcctgtgaaggccgcagttatctacgtttcttttccgcactttgatttattgtaa

SEQ ID NO: 39533 - DNA, 336 bp, Zea mays
  Peptide Sequence Number=SeqID_81312
atggggagtagctctctccgggcagaaagggaatcacgacttgtgggtggctatgagatcgatggtttggttatggctatggtgctggtaagtggtattctttccgtttggaaagggtacatcgggttaataacttgggtaatgctaaaacttggctttctactagttgtcagcattgcaaccactgctcaggcgaagatgaagctgtggaaggagacttccaggagttccaagactacgacgagttctaggtgtgggttagcggcaacccccagtcggctgcctgtgaaggccgcggttatctacgtttcttttccgcactttgatttattgtaa

SEQ ID NO: 39534 - DNA, 585 bp, Zea mays
  Peptide Sequence Number=SeqID_81313
atggcgaagatctcggcgagggagaccacgtggagcggcgtggaggcgcggatcttctcccgcccaccgccgcatcaggtacaccagcgacgcggcgaacatcaccgagaagatgaggttcgtgtgccggatcggcagcggcagcgcgtccccagcgccgagaagatgaggttcgtgtgccggatcggcagcgcgtcccccgcctgcacacgcacctgctgcccctcgccgtcggtcgcctgctggcgccgtagggagctcccgtgcggcggcggaaccctgcgacggacctccatagccatagggtgcgtcgggcttgctcgtcggcgctcaaccgcacggcggcaaggaggaggagcggagcagtggcccggggtttggagatttgatttgggaggaggatcgatctcgacccgtggagggggaggcggggcggcggcggctcacgcggggtgggggagggggaggcggggggacaaacgtgggcgtgagcgggcagacggtgtagatttacggaagcgagcggacggtgcagatttaccgaaggcagaaccaggggaggcagcctaccccttacagccttaa

SEQ ID NO: 39535 - DNA, 420 bp, Zea mays
  Peptide Sequence Number=SeqID_81314
atgaggttcgtgtgccggatcggcagcgcgtcccccgcctgcacacgcacctgctgcccctcgccgtcggtcgcctgctggcgccgtagggagctcccgtgcggcggcggaaccctgcgacggacctccatagccatagggtgcgtcgggcttgctcgtcggcgctcaaccgcacggcggcaaggaggaggagcggagcagtggcccggggtttggagatttgatttgggaggaggatcgatctcgacccgtggagggggaggcggggcggcggcggctcacgcggggtgggggagggggaggcggggggacaaacgtgggcgtgagcgggcagacggtgtagatttacggaagcgagcggacggtgcagatttaccgaaggcagaaccaggggaggcagcctaccccttacagccttaa

SEQ ID NO: 39536 - DNA, 645 bp, Zea mays
  Peptide Sequence Number=SeqID_81315
atgagcagcccgtggttcctgagtgtgttaccgaagatcttcctgagcaacaacctgatgaaggcaactactggaggagaccctgacggagatggagacgacgactacaacgatggcagtttgagccacaacacggagctctcagaggagaaggagccggaaggatggatcgcccgacccatcactcgtgatgtcgctcgtggttgtcatttccacgacgctctcgacacattgttgtgctgggcgttcgaccgacacacttggtccattgagtaccattgtgtagtctaccagcatcgtcgcggtggggtagctgacggcctcgacctgaagtactaccctcgccgttcgaccgttagtgctggtggtgtgattgtctcaccggttggtgagggcaatcctaggctgaacagcatggtcaacctggccgtcgtgctcaacatcgagttggaccacgcccttgacgagttgggcaaggctcaggcggagattgcggaactgcgtgctgagcgcgcggcatgccactatcgagatgatggttcccccactcctgtcgtgattcagcacccttaccactcgccgccccgtggtcgttatgcttatggcacccctaactgtaggatccagatagatttggagccatag

SEQ ID NO: 39537 - DNA, 300 bp, Zea mays
  Peptide Sequence Number=SeqID_81316
atgcacggtctcttccgagggtcgggcttggctgggaagggctctgctggccgatctacggtggcgggggatcgggtggccgcgggcatgctgtctgcagggcaaacgccggtggtttctggctctgacgacgagcagctcgtggttcctgagtgtgtttccaaagatcttcctgagcaacaacctggtgaagacgacgagcagctcgtggttcctgagtgtgttgccaaagatcttcctgagcaacaacctggtgaaggcaagtgtcctctgacctattatgtcctacatactttataa

SEQ ID NO: 39538 - DNA, 786 bp, Zea mays
  Peptide Sequence Number=SeqID_81317
atgtcgacaaaagaatcctacagacgagtaagagtacacgtaagcggcaaggctgaccgagccgagggactcctacgcctccgggatacggatacctcactcatcaccttccgtgagaagctcagatgtcgatggagagggagcagcagcaccctcggcgtcaactccaccttcggcgaagtccgaccgagcctcagacagcaacacgggcgaaggatctccgctccgaaggacgacgtcagcaccacgctcgggccatcgccgctagggtctcctccacgaacccggcccgagcagacggctcggtcggccgccccgaagcctcagccagctgtcccccgaggacaccagcccggctcgtggccttggcaactcgactccgacgttggtcccgaccaagccccggccgacgaagctcccttcttcgagccaactctgcctctgtccgtgctggcaccgctgcctccggctccggctcatcgaagagcggccgagggcctcgacagccacaatgaacaaacaccgacactcaaggtgccattacaaacggaactccggttccgcccccgcgggtataaacaacctctataccaggaggcccacgggacgacgaactccaagcggctcaccgccgcccgctccgacagcagcggcaacgacctccgtctcgggcggcaagacagctgcagcaacggctttcgggcggacgctgcggcagaaaggctctcgcccacgaaggacgagaaccagccattcaagccgggggacggaggtccaggggtgtag

SEQ ID NO: 39539 - DNA, 393 bp, Zea mays
  Peptide Sequence Number=SeqID_81318
atggcctcggcaacccgactccagtgccggtcccgccagtggacggcccggccaggctccggccgacgaagctccctttttcgagccaacttcgcctctatccgtgctgacaccgctacctccggctccggccttgacagccacaatgaacatacactggcactcaaggtgccattacaaacgaaactccggttccgcccccacgggtataaacaacctccacatcggagagcctgcgggacgacgaactccaagcggctcactgctgcccgctccgacagctgcagcaacggcttccgggtggacgctgcggcagaaaggctctcgcccacgaaggacgagaaccagccattcaagccgggggacggaggtccaggggtgcaggcggagtag

SEQ ID NO: 39540 - DNA, 496 bp, Zea mays
  Peptide Sequence Number=SeqID_81319
caagggcaccgagttgggctggaagcagccgcggagggagctcgcccatgccatggatagcagggggaaacgctggggagctcgaccaacgaggttgctggtcgaccatggagacaccctgctgccgagcgccatggatccagggagggaggtgctgctgccctgcgctcacttgaacttgagaagggtggcgtccagggtcagcagagagaggaagggcgccatggagcaggggaaaatggagaggggcgccggccatggagagcctgctggcggccatggacagagaggggcgagctgcagaggggcgtcgctggggaagggcgccatggttgtgggggtgctcggctactgcagagatggagctcgcccctgcaggaaggagccgaggggagaagggaggccagccgagggaggagcaggcctgggcgccatgggaggaagggaggaagctccctgcgcgttggggaagaaggcgtgggggagaaaaggctga

SEQ ID NO: 39541 - DNA, 561 bp, Zea mays
  Peptide Sequence Number=SeqID_81320
atgggagcttggctgctcgagcttcaccggcgccatggatctagggagctgctactcgccggcagcaagggcaccgagttgggctggaagcagccgcggagggagctcgcccatgccatggatagcagggggaaacgctggggagctcgaccaacgaggttgctggtcgaccatggagacaccctgctgccgagcgccatggatccagggagggaggtgctgctgccctgcgctcacttgaacttgagaagggtggcgtccagggtcagcagagagaggaagggcaccatggagcaggggaaaatggagaggggcgccggccatggagagcctgctggcggccatggacagagaggggcgagctgcagaggggcgtcgctggggaagggcgccatggctgtgggggtgctcggctactgcagagatggagctcgcccctgcaggaaggagccgaggggagaagggaggccagccgagggaggagcaggcctgggcgccatgggaggaagggaggaagctccctgcgcgttggggaagaaggcgtgggggagaaaaggctga

SEQ ID NO: 39542 - DNA, 744 bp, Zea mays
  Peptide Sequence Number=SeqID_81321
atgacgcggcatggagctgtcccaaacaccaacacgacgatgtgggtcgggactgcacagatcgaacgaagcacgcgatgtggaggggatccggggctgctgttttgtgggggaagagaggaggttgttgctgctgcattttctgggcgccggcaaggggaagctacagggggggtggcgcccatgggagcttggctgctcgagcttcaccggcgccatggatctagggagctgctactcgccggcagcaagggcaccgagttgggctggaagcagccgcggagggagctcgcccatgccatggatagcagggggaaacgctggggagctcgaccaacgaggttgctggtcgaccatggagacaccctgctgccgagcgccatggatccagggagggaggtgctgctgccctgcgctcacttgaacttgagaagggtggcgtccagggtcagcagagagaggaagggcgccatggagcaggggaaaatggagaggggcgccggccatggagagcctgctggcggccatggacagagaggggcgagctgcagaggggcgtcgctggggaagggcgccatggttgtgggggtgctcggctactgcagagatggagctcgcccctgcaggaaggagccgaggggagaagggaggccagccgagggaggagcaggcctgggcgccatgggaggaagggaggaagctccctgcgcgttggggaagaaggcgtgggggagaaaaggctga

SEQ ID NO: 39543 - DNA, 735 bp, Zea mays
  Peptide Sequence Number=SeqID_81322
atggagctgtcccaaacaccaacacgacgatgtgggtcgggactgcacagatcgaacgaagcacgcgatgtggaggggatccggggctgctgttttgtgggggaagagaggaggttgttgctgctgcattttctgggcgccggcaaggggaagctacaggggggggtggcgcccatgggagcttggctgctcgagcttcaccggcgccatggatctagggagctgctactcgccggcagcaagggcaccgagttgggctggaagcagccgcggagggagctcgcccatgccatggatagcagggggaaacgctggggagctcgaccaacgaggttgctggtcgaccatggagacaccctgctgccgagcgccatggatccagggagggaggtgctgctgccctgcgctcacttgaacttgagaagggtggcgtccagggtcagcagagagaggaagggcgccatggagcaggggaaaatggagaggggcgccggccatggagagcctgctggcggccatggacagagaggggcgagctgcagaggggcgtcgctggggaagggcgccatggttgtgggggtgctcggctactgcagagatggagctcgcccctgcaggaaggagccgaggggagaagggaggccagccgagggaggagcaggcctgggcgccatgggaggaagggaggaagctccctgcgcgttggggaagaaggcgtgggggagaaaaggctga

SEQ ID NO: 39544 - DNA, 534 bp, Zea mays
  Peptide Sequence Number=SeqID_81323
atgtcaaaccagcgtggtgatccaggcccacgtgtctcggcgatgtgcgacgctcagaactgcactagacttcatttagggagaatgcaccaagctgctatacccgacggatacccgatatccgcccgatacccgatgggtacgggcacggcaggaaagtttataagttgctaccgcaacctttggctggccaatatgagttctcctccaatggatctcgagaagtccgttccaagagtggaccctttcggaggtgttgatgttaccttgagggaaggcaagttggagttgtattcaacgttaatgagtagcacttgccaagctggcacaaacgagttttctcgcaagaatgtgttagggatagggaatgccaccttagagaatgaccaccatgtggctggagctaatgcaaatgaatggagggaaaaggaagaggacttgatcaataggcacagtgcaccacatggcgtgcaacaggttgatgagcatgagcaacaagacaaagcattcactgggagatgttcctacccgtga

SEQ ID NO: 39545 - DNA, 231 bp, Zea mays
  Peptide Sequence Number=SeqID_81324
atggcgatgtgcgacgctcagaactgcactagacttcatttaggagaatgcaccaagctgttatacccgatatccgcccgatacccgatgggtatgggcacgggaaaaatgagaccgaggaggtggaaaaagaggagattcgcaaactttacactcatctctacaaagaggacaaagcctgttggggcccgccttgccgaaggtcctcaaaatgtctttacttccgtgtaa

SEQ ID NO: 39546 - DNA, 1206 bp, Zea mays
  Peptide Sequence Number=SeqID_81325
atggactgctacaactgtggtgagcttggtcatcttgctcatcaatgtaacaagcccaagaagaataagttcaagggcaagaaagaagatgacagcgatgatgaaaagaaggaaaagaaattcttcaagaggaaggatgggaagcaaaagaggtttcacaagaagaagaatggaaaggcatatattgttggcgactggctcaccgacatcgaatcatcaagtgggtcttcttcaagtgaagaagagaatgatgaaaaagttgcggtcatcgtcggggacttctcttcaccaccaccatcgccatcatccacttctcacctatgcctcatggctaggggtgaacgaaaggtacaaaatgatattaatattgctgatgatagtgatagtgatagtgatgaagaatttgcttcaccttcatatgatgagttagctgacttacttaaagaatatactcaaatcattagaaagtcaaaagctaaatgtgataggttgaaaaatgaaaatgaatctttaaatgccaagtatgacatagttataaaggctagtgatgaaataaaagaagaaaataaaactatgtcatcaactgtaaatgagctcacaaactccctaaaagatgctaaggaaaaatatgacaaattaaatgaagctaatagggagttgcaaaatagactagctattaaccctgttgttaagcttgatgtagcaacctcatgtgatgatttgattcaagaagagcaaactagtctacatgctgaattgactgaaaaagttgaagtcctgactttagacaaccaaaaattgaagaattacttgactgatgcaactactagaggaaaagttgctattgagaacaatgatttcaacaatgagttggcagtggataatcaaaggcttaagaatgaggtcaagaaactaaaaagtgaaaatgaacatcttgcaacaagtgtgcaaaagttcaacaagggtcaatacctccaaaatgagttgcttatgaacactgttatgaaaaataacaagagtggtattggatacaatgcttttgtgcaaaagaaagctatcactcaatacaagccaaagcagactcacaagcctatcaaatgctttgagtgtggaaatgaaggtcattttgcccacaactgcaaagctaaaccaccaactgaaagggaaatgtgcctttgggccatttctaagtattttggtgattga

SEQ ID NO: 39547 - DNA, 1206 bp, Zea mays
  Peptide Sequence Number=SeqID_81326
atggactgctacaactgtggtgagcttggtcatcttgctcatcaatgtaacaagcccaagaagaataagttcaagggcaagaaagaagatgacagcgatgatgaaaagaaggaaaagaaattcttcaagaggaaggatgggaagcaaaagaggtttcacaagaagaagaatggaaaggcatatattgttggcgactggctcaccgacatcgaatcatcaagtgggtcttcttcaagtgaagaagagaatgatgaaaaagttgcggtcatcgtcggggacttctcttcaccaccaccatcgccatcatccacttctcacctatgcctcatggctaggggtgaacgaaaggtacaaaatgatattaatattgctgatgatagtgatagtgatagtgatgaagaatttgcttcaccttcatatgatgagttagctgacttacttaaagaatatactcaaatcattagaaagtcaaaagctaaatgtgataggttgaaaaatgaaaatgaatctttaaatgccaagtatgacatagttataaaggctagtgatgaaataaaagaagaaaataaaactatgtcatcaactgtaaatgagctcacaaactccctaaaagatgctaaggaaaaatatgacaaattaaatgaagctaatagggagttgcaaaatagactagctattaaccctgttgttaagcttgatgtagcaacctcatgtgatgatttgattcaagaagagcaaactagtctacatgctgaattgactgaaaaagttgaagtcctgactttagacaaccaaaaattgaagaattacttgactgatgcaactactagaggaaaagttgctattgagaacaatgatttcaacaatgagttggcagtggataatcaaaggcttaagaatgaggtcaagaaactaaaaagtgaaaatgaacatcttgcaacaagtgtgcaaaagttcaacaagggtcaatacctccaaaatgagttgcttatgaacactgttatgaaaaataacaagagtggtattggatacaatgcttttgtgcaaaagaaagctatcactcaatacaagccaaagcagactcacaagcctatcaaatgctttgagtgtggaaaggaaggtcattttgcccacaactgcaaagctaaaccaccaactgaaagggaaatgtgcctttgggccatttctaagtattttggtgattga

SEQ ID NO: 39548 - DNA, 1200 bp, Zea mays
  Peptide Sequence Number=SeqID_81327
atggctgccattaatggcatccgcatcaatggaggcggtaacggcggcattgaagctccctttacgcacggacgactcgggtgcttcggtttcctggcagcagctggcgtcgcgcggccggtcttcgctggcgtgctgggaacgagggtgcacgtcggcgcctgggctgcgcggggtcggcttctgaagctctggcgtcgggttgcaggatggcgcgcgcggcaaggcgctgcttggcgcgggtcgctgcaggggcgcctgtgcggggtgttcggcgcggggactggccggggcgtcagggctcgcggcactcggctggagccgctgcaggcgcgaggcagggaagagagcaggggaggcgagagaaacgggagaggagagggagagagaagcagaggcgacgacataggagcgtcggcggcggccatgaaagcctggggcgcgcggctggctcctagggttagggagttgggccttatgggcaaaaagcgattagcgaggcacgatagcgagcagggtgctgctccggcttccgtccacaacgacgtcgacagcgagcgtagtggcagacaccggcgaggggcgtggacggtccaacgaatcggcgaaggcgcgggcgagggaacgtgctccactgagaggaggaaggcacgaggagagagcgagcttgggcagggaaaaggagagggctcggcgtcggattttatagaggagagggagagaagtgaagggtcggtcttcatggctgccattaatggcatccgcatcaatggaggcggtaacggcggcattgaagctccctttacgcacggacggcgcaggtgcttcggtttcctggcagcagctggcgtcgcgcggccggtcttcgctggcgtgctgggaacgagggtgcacgtcggcgcctgggctgcgcggggtcggcttctgaagctctggcgtcgggttgcaggatggcgcgcgcggcaaggcgctgcttggcgcgggtcgctgcaggggcgcctgtgcggggtgttcggcgcggggactggccggggcgtcagggctcgcggcctcggctggagccgctgcaggcgcgaggcagggaagagagcaggggaggcgagagaaacgggagaggagagagagagagagaagcagaggcggcgacataggagcggcgacggcggccatgaaagcctggggcgcgcggctggctcctag

SEQ ID NO: 39549 - DNA, 501 bp, Zea mays
  Peptide Sequence Number=SeqID_81328
atggctgccattaatggcatccgcatcaatggaggcggtaacggcggcattgaagctccctttacgcacggacgactcgggtgcttcggtttcctggcagcagctggcgtcgcgcggccggtcttcgctggcgtgctgggaacgagggtgcacgtcggcgcctgggctgcgcggggtcggcttctgaagctctggcgtcgggttgcaggatggcgcgcgcggcaaggcgctgcttggcgcgggtcgctgcaggggcgcctgtgcggggtgttcggcgcggggactggccggggcgtcagggctcgcggcactcggctggagccgctgcaggcgcgaggcagggaagagagcaggggaggcgagagaaacgggagaggagagggagagagaagcagaggcgacgacataggagcgtcggcggcggccatgaaagcctggggcgcgcggctggctcctagggttagggagttgggccttatgggcaaaaagcgattaggttag

SEQ ID NO: 39550 - DNA, 579 bp, Zea mays
  Peptide Sequence Number=SeqID_81329
atgcccagatgggacaggcagtcacgagtcacccgagaccaagcccaggcgagagacgcaatcacgacttggctgaggccactctcgggtgggagaggcagtgacgactcgcttgaggccaagcctacacgggacaaacagtcacgacttgtcctaggacactcttgggcaggagacataggcacgagtcacccgaggacatgcccaggagggacaagcagccacgactctcccgtggccaccctcgggcggtacaagcagacacgactcgcccgaggacaactgtcacacccgggttttaggggtccaaagcccgggcgcgaacataaacaccagaggtggcaccctttaccgttacccatctgccaagggatcgcgacttcccatacacctctaccgaggaggcgaggcagggtaacactacggggccattacaaagttccactagcttcagaaaacccgctacaatttataggaagctccaatgcagggttcttgcctgaccgccatcgcagcaaaatcaaccaaggacctccctacactgaccactcccctactgcccttgcccctttcgggtaa

SEQ ID NO: 39551 - DNA, 426 bp, Zea mays
  Peptide Sequence Number=SeqID_81330
atggaggccaccagaaaggccctcgaagatctccaagcagaacaccatgccggggtccagcgcattgccgagtgggccggcgaggcaagcacgacactggtgccactagggatgagccccatcctagtgtcggagccaccagtgtcgatctctgatgccctcccggtgctggactctgtcgccgatcgcctccgacgcctggatcagatcctcggtgcccgcctggaggcagagggcagcatgctctaccggacggtggtagactacatcctgacgtgcttccggagtcacaaccccaccatatccttggcgctggtgatcaatggtccggtagccgccacagaagatgccgcccgagagagtgtacaagatgcagtggagatggtgaccgtgcgctttcaacgtgatcctaccgacgccgaatag

SEQ ID NO: 39552 - DNA, 351 bp, Zea mays
  Peptide Sequence Number=SeqID_81331
atggaaaggctgcagaaatggcagcaagagctcgagggtaaggccatcgacgtcaccctcgccgaggaaaaccttaaggagaaggagctgtccttggataggcgggagatggatctcgccaggcgagagacatatctcaccttcagggaagaaatgctcacccggcgtggcgagttgctggctgagcacgagctcgaagcagaggaaaaggagaggaagttggaggagcagatctgccagttcgatgtggcgcaggtggcatcgggtccccaagcaatggaggccaccagaaaggccctcgaagatctccaagcagaacactgcaccaaggtccagcgcattgccgagtag

SEQ ID NO: 39553 - DNA, 255 bp, Zea mays
  Peptide Sequence Number=SeqID_81332
atggcggaatcgggcagcgccggtgatggcgccgccgctagcaaccctctacgccgtcgtgcgcgaggtttcgaggatctgaagaatcatcctggtaactggaatctcaagtgccaagcaagttgtgcccttgaaccacttttgttacctgttgggggcgaaggcgaagacgctacccttctctcaggccttcgtcacctcgccatcgtcagagagcaaagcaaccggcacggcccacccttcgtcctcctcact

SEQ ID NO: 39554 - DNA, 132 bp, Zea mays
  Peptide Sequence Number=SeqID_81333
atggcggtcagatgggggattcctgcattgctcttcctagaaactgtagcgggttttcggaagctagtggaactaggagaagaacaggtggttcaagaggagccacacaacgaggagttcgacttgatctag

SEQ ID NO: 39555 - DNA, 327 bp, Zea mays
  Peptide Sequence Number=SeqID_81334
atgtcgctctcactagcccagtactgcaaacgaagtggtctcatgtcccgctgtagcacccgggctttaaaggacaaagccggaaagtcaactgggagacgccacctagatcgaatcgaactcctcgttgtgtggctcctcttgaaccacctgttcttctcctatgggggttgtgagacagcaaggaactacccaagtgattcaggggtaaacaagtggatcaagggcacaacttgcctggcacttgagattccagttaccagggtgattcttcagatcctcgtgacctcactgctagtcgtagcaatacaaacaaacatggtatag

SEQ ID NO: 39556 - DNA, 717 bp, Zea mays
  Peptide Sequence Number=SeqID_81335
atggtggacacggagttcctggggacggtgtaccggccggcggggccagcgtacaagttggagctcgcggagcggtacaggctgctaaggtgcaacgtggatgcgttgcaccctgtccagctcggcctcacgttgttcgatgcggggtgcgtgctctcgagcggccatgacggcgccacgcgcaccgtcatgtggtggagtccgtcgcagcgctgcagagcagaggcgtggatctcgattggacgcggcagtacggcgtcgccgcggtggctgcgttcggcctgcgcctgcgtaagtggccgcgccggtgtcatcacgtcccgcggcagctacgacctcgcgtacctggtgaagatgatgttcgggaccggattcaggatgcctgggtcggcagcggagttcgatgctgtcgtcaaggcggtcctccaccgtcggagggtgttcgatgttggggagatggcgaagctctgcccacgcgaacacctccgccgtgggctggacaacgtcgccggacagctcaacgcggtgcggttcaccgccgacgcggcacgccaggccagctatgtgtcaaacccgggttttaaggaacaaagccggatcgaactagagtccatccttggcgccataaagtcaactgggagacgccacctagatcgaatcgaactcctcgttgtgtggctcctctggaaccacattttcttctcctatggggggtga

SEQ ID NO: 39557 - DNA, 459 bp, Zea mays
  Peptide Sequence Number=SeqID_81336
atggatgcaggtgatagagggttcaggactctgtcagcacatgagtctctaacgccgctatccacctacgctgcttcggtcaatgatgctgctaggcaaactctgtggtctctcaaccacacctaccggcaggagctgcacaatacaaagtataggcatcttcctctacatattcgtggagagaaccagaccaacattgtttcaggtggagcaaatgaagatcgcctcaacaccttagctggtgtggtggcaggtcttaacaccgacctagatagtgctaccctggacctctctagggtacacttggagctggaggatgcacatgcaaggatcggagccctggaagctcagcttgatggaaggaatcccccggaagttcaagtcccagctatggcgttatcccctccccgtaagaggatccgctatggagaaccaggatccatcaccaggctgctttag

SEQ ID NO: 39558 - DNA, 564 bp, Zea mays
  Peptide Sequence Number=SeqID_81337
atggagcccttctctcctccagccatgctctgccgctctggtgccgagcccgaccgtggagtcatcttggaggacaacttggaggaacttctgcctacacccaccttgttgacagaatcactagccttcgcagctagatcatcaacctcagcagcgcctgcaccagcagttcaagcccctactcccggaggcgatgaccaagatgactttggggacgatgatgaagatgacgacgacgaagaagatgacaaggagaacgtcaacaaagaacaacgggaccactacgtggggttatggcctgtcactgaacattacacctcaatgttcgagacagggcacttccctaacctgctgcaagacgtgctgcacgcattgggaacctacgtccgaccgttgtacgagacaaggcaggtgtacgagcctcctcgggattgctactacatcactctcattcatgtcaaggtgatggatgcaggtgatagagggtttaggactctgtcagcacatgagtctctgacaccgctatccacctacactgcttcggtcggcgacgctgctaggtga

SEQ ID NO: 39559 - DNA, 111 bp, Zea mays
  Peptide Sequence Number=SeqID_81338
atggaatatgacattatcctacccctagctagccacctcaggctacgaaggaacaagaccggtgtcacatcaaattactccagtaacagttcttacaactatattatttga

SEQ ID NO: 39560 - DNA, 705 bp, Zea mays
  Peptide Sequence Number=SeqID_81339
atgggctcggcctcgggatggatctccgcctcgctcgacccaggcctcagcctcagcctcggccttaggaggagatctacgcctcgcccaacccaggcctcggcctcagcctcggcctcgggaggagatcttcgcctcgcccgacctaggcctcggcttcaggagaaatcaccgcctcgcccgagacggccttggaccgactacgcaaacagagaatacagcactgtcctccccctagctagccacctcaggctacgaaggaacaagaccggtgtcacatcaaattactccagtaacaggtttatcactgattttggaggatatggtggttctgtcttggatgttgtccaatcttttggccctaataaatgccttgagaactttttcatgcagggattcattgactgtattcgtgatgatttattatacaatccagataccataagcaacacactcatactaaatgtcaatgttgggactattttgaatatcgaggagctcgaacaacacagtacaaatctgcagcccttctcaacatcagttcttaaagatttactagtcccgacgcttcctccggatgaagttctgaaccaaattaaactggtgagccccaatcagtattatttatcatggttcctatgctacgccatagtcactggaccctttatgcaatcaacttccagctttgtcgaattgacattttag

SEQ ID NO: 39561 - DNA, 363 bp, Zea mays
  Peptide Sequence Number=SeqID_81340
atgtcgaccgttggcctctgtagcctgggtctcgacatggctcgccttattgcacgtcctgtagatgtccaacgcgggtcagacaggtcaggaccggttgaaccgccccctagggcggttgatccgccccgtgacacccctggtgacctgactgccagtctgattggcagactgcagatcagaagtcagagggtcagagaccagttgagctgccccccaggacagttcagctggtctagaccagagagttttggagagaaaaccccagctcagctgcccgggggcaagttcagctgggtatggtcaaagaggtccacagctgaagttgaagttcagctggagttgaaagttcaactcaactga

SEQ ID NO: 39562 - DNA, 384 bp, Zea mays
  Peptide Sequence Number=SeqID_81341
atggagccgacgatgcttgctaggaggcatatcatgatcatcgttgtcctcgtcgccactgtcatcgtcattgctgccgtcgtcgttctcatcatcatcgtcctcttcgtcagaggagccgatgcccatccaatgtccagacattgggtcatcgtcgtcgaaggactccacatccgacgattctccgtcagacgtccaagaccagtcagtgccgatcagaagtcagagggtcagagaccagttgagctgccccccaggaccagttcagctggtctagaccagagagttttggagagaaaaccccagctcagctgcccgggggcaagttcagctgggtatggtcaaagaggtccacagctgaagttgaagttcagctggagttga

SEQ ID NO: 39563 - DNA, 288 bp, Zea mays
  Peptide Sequence Number=SeqID_81342
atggagagtcatgatctctgggcagaaagggaatcacggcttgtgggtggcaatgagattgatggttctggttatgactatggtgctggtaagtggtattctttccgtttggaaagggttgtcaacattgcaaccactgctcaggagaagatgaagccgtggaaggagacttccaggagttccaagactatgacgagttctaggtgtgggttagcggcaacccccagtcggctccctgtgaaggccgcgtttatctacgtttcgttttcaaactttgatttattgtaa

SEQ ID NO: 39564 - DNA, 1341 bp, Zea mays
  Peptide Sequence Number=SeqID_81343
atggggctcggtgtatgcggctcgctctgccaagtttgggttcgccccttggggaggagtgcggtgcatttaggaaacctaacaggtggttatgagattgatggttttggttatgattatggtgctggtaagtggtactctttccgtttggaaaggagtacgtttgggttaatgctaaaacttggctttctactagttgtcagcattgcaaccactgctcaggcgaagatgaagctgtggaaggagacttccaggagttccaagactacgacgagttctaggtgtgggttagcggcaacccccagtcggctgcctgtgaaggccgcgatggctcgacttagacacactgcacgaaagtcagtcatccccttcttaccctcccgccttgctgagcgtccgcttcgccgtcccgtggctggacagtccagccacttggagagactacaccaccgcctgcgtgaggagcaggagcgtcgacgacaggagcagcagggctcttctttctcgctccaccaggagatagagtctgtgaggagctgctcccctgtgcttcctctggagccgccccctgcaccaccactgggcgccccagcttctggagtagctgctggaggagacccagacgacggagacggcgacgacagctcgagccacgacaccgacttctctgctaaccctgagccggaaggatgggttgctcgacccatcactcgcgacgctgctcgcgggtgccacttccacgatgcgctcgacaccctgctacgtcgggcatttgaccggcatacttggtccgtcgagtatcgctgtgtggtctaccagcatagtcgcggggtctacccggaccgctgggaggcgacttgcttggtgcgctgcccggagaacagtctccagggtgcagaggcctgttcagagcactattctatctctgagcgggactcagctgaggcagccatgcaagatgctgcacggcgtgcgctttcgcactactgctcggtcttcggtggggcagctgatggtcttgacctgaagtattacccccgccgtccatctgggagcacaggaggcgtgattgtctcacctgtcggtgagggcaatcctaggttgagcagcacagtcaacctagccgccgtgctaaacacggagctggaccatgcattagacgagctgagtagggctcgtgctgagatcgccctgctgcgggctgagcgcgcggaacgtcgtcacctggatggtggttcccccgctcccgttgggactcaacacctgtaccgctcacctcagcgtggacaccagtcttatggcaaccccgactgcaagaccaagataactctagaaccatag

SEQ ID NO: 39565 - DNA, 276 bp, Zea mays
  Peptide Sequence Number=SeqID_81344
atgggctctgctgctgtgctcttgtttcctgattttcttttggttgggtttacattctacatagcacagaacatccaggaggactacggcatgtttgtctgggccatgcagtgtcatccttgccgacttggtgctgggacctcactgccaggattagtagctgcaaaggttggggcagatgtaacactaacagacattgcgcagaatgcagaagtactgaacaacatcagaagcatatgtgctctcaatgacgccaattgtactgtatggttttga

SEQ ID NO: 39566 - DNA, 549 bp, Zea mays
  Peptide Sequence Number=SeqID_81345
atgagctgcatcactctggctggaactcgtgcagctcctgccatgcttggtgctgggacctcactgccaggattagtagctgcaaaggttggggcagatgtaacactaacagacattgcgcagaatgcagaagtactgaacaacatcagaagcatatgtgctctcaatgacgccaattgtactgtatgcatttggttgggaaggttctactacgtctttggcttcctgttcattgtcctcttcctgctggtcatagtctgtggtgaggtttctctggtcctgacctacatgcacctttgcgtggaggactggaaatggtggtggaaggccttctttgcttcttgctctgtcgcattctatgtgttcctctactctattaactacctggtgttcgatctcaggagcctgagcggaccagtttctgccacactctaccttggctattccctgatcatggcccttgcaatcttgctctccactggcgccattggtttcctgctctccttctacttcgtgcactacctcttctcgtttgtgaagattgattag

SEQ ID NO: 39567 - DNA, 606 bp, Zea mays
  Peptide Sequence Number=SeqID_81346
atggaatcggagaacgaaaagctccgtaaagcactggctactctcctcagagttgttcaaaagcgtagttgtgacatcgttgatgtcgtcaaatcagccttccagcctttcaactcacctttgctggacgaatttaaccgagcactagttgagattgatgacctcgccaaggatcttgaagacgtagcagtgcaaactcagtgggaggtagaaaatatggctaactgtcaagtaaacgaaaatcaacgacaagaggaagcagtagaggagcttctcatagaagatggttcagaagacgagctactgatagacgaagagtcaccaattaactatgaagaacttgtgggctacgacgatggtcgtgactactcaaccgacgacacatatccctactattctgttcatttatatatcatgtttcatctgcctctgttgcatagaatggggagtgattggcaccaggtgatgtctcaatatggaagcttccttagccagattgacgagcagcctatgggaactcaacattctgaatttccagttgatgggcaagccgagggctcaagaacaccagttgttcctaaaagccaactcaaagaactaagctag

SEQ ID NO: 39568 - DNA, 639 bp, Zea mays
  Peptide Sequence Number=SeqID_81347
atggggagtgattggaaccaggtgatgtctcaatatggaagcttccttagccagattgacgagcagcctatgggaactcaacattctgaatttccagttgatgggcaagccgagggctcaagaataccagctgttcctaagaagccaactcaaagaacaaagctagcaaacttcactgctgatgaggacactagggtatgccatgcttggcttgcttgttccacttttgctggttacatgatggcagtcctccgacagaatcctagtggactcactgatgcagacaagacatcactggcagcctctaggtttgcagctattgagaagaagcctttccactttttacattgttgggccatacttaaggaccaaccaaaatggatggacaaccacatgggccaacaaaatcagcatggcaacgctaatcccacccattctaacactgtcgatgtggatgcagaagaatctgtaccatctagcttcacatcgaagaggccactgggtcgagcttcttctaaggaaaaggcgaagaggactaaatctgtggacacatcttcatcagattctgagttcatgacacgcatgggagatctttctttggagcgcttgtcagtgtacaaaacagctgttacaacttag

SEQ ID NO: 39569 - DNA, 1281 bp, Zea mays
  Peptide Sequence Number=SeqID_81348
atggagagtcatgatctccgggcagaaagggaatcacggcttgtgggtaaagtgcacaacctctgcagagtgtttgaaactgatatatcagccgtgctcgcggttatgagcggccaagggagctccagtggcaatgagactgatggttttggttatgactatggtgatggtaagtggtattctttccatttggaaagggttgtcagcattgcaaccactgctcaggagaagatgaagctgtggaaggagacttccaggagttccaagaatacgacgagttctaggcgtgggttagcggcaacccccagtcggctgtctgtgaaggccgcgtttatctacgtttcgttttcgcactttgatttattatggctcgtcttaggcacactgcacgaaagtctgtcatccccttcttaccctcctgccttgctgagtgtccgcttcgccgtcccgtggccggagatagagtctgtgaggagttgctccctcgtgcttcctctggaggcgccccctgcaccaccactgggcgccctagcctctggagtagctgctagaggagacccagacgacggaggtggcgacgacagctcgagccacgacaccgacttctctgctgaccaggagccggaaggatgggttgctcgacccatcactcgcgacgctgctcgcgggtgtcacttccacgatgcgctcgacaccctgctacgtcgggcacttaaccagcgtacttggtccatcgagtatcgttgtgtggtctaccagcacagtcgcggggtctacccggaccgctgggaggcgacctgcttggtgcgccgtccggagaacagtctccagggtgcggagacctgctcagagcactattctatctctgagcgggactcagctgaggcggccatgcaagatgtcgcacggcgtgcgctttcgcactactgctcggttctcggtggggtagctgacggtctcaacctgaagtattacccccgccgtccatctgacagcacaggaggcgtgattgtttcacctgttggtgaggacaatcctaggttgagcagcacagtcaacctagccgctgtgctaaacacggagctggaccatgcattagacgagctgactagggctcatgctgagatcgccctgctgcgggctgagcgcacggagcgtcgtcacctagacgatggttcccccgctcccgtcgggactcagcacccgtaccgctcacctcggcgtggacaccagtcttatggcaatcccgactgcaagaccaagataaatctagaaccatag

SEQ ID NO: 39570 - DNA, 237 bp, Zea mays
  Peptide Sequence Number=SeqID_81349
atgggtgacctggcaagcgggtccggcggctgggcaggggtgccatgcggcggccagggtttggggaaggcgttggcgccgggatgggccagatgttcgagaccaattgatacaattcttgaggatcccttggacctgtgggttgccaaatggacaggtgcaagaggaaagaatagcgagaaaaggggaccatcgaaaggcaaggggaatgataagtcatgccgaataggggcatga

SEQ ID NO: 39571 - DNA, 126 bp, Zea mays
  Peptide Sequence Number=SeqID_81350
atgtcgtcgactctgatcttgactgatttgaaggagttggagattgccaaatggacaggtgtaagaggaaagaatagcgagaaaagtggaaactactctaaggccaacaaaaggcaaggggaataa

SEQ ID NO: 39572 - DNA, 255 bp, Zea mays
  Peptide Sequence Number=SeqID_81351
atgccggggccgcgctggccgcgccgggccgccgcacaggcaagccacgccgggccgccgcgctggctggccgcgccgagccaccgcgctggctacgtcgagctctcgcgtgcccgcgcagccgctaacccccttaacaggagcattgatacacacttgatgaagatgtcgtcgactctgatcttgactgatttggaggagttgaagattgccaaatggacaggtgtaagaggaaagaatagcgagaaaagataa

SEQ ID NO: 39573 - DNA, 370 bp, Zea mays
  Peptide Sequence Number=SeqID_81352
atgaaggtgctaccgactctgatcttgactgatttgaaggagttgggggttgccaaatggacaggtgcaagaggaaagaatagcgagaaaagccccagcccgctctcccgcctctgcccggcgcctcggccaggcctaggccagccaggggtggaccctagcatagaagttggccggattttgcctgctggttcgcttagggacgagcaaaggcacgaccagcaagtggagcagccgagacagcgcatggggcgcaaggcgaacgacagcctaggcacgggcgccattgctaggagcgagcacatggaggggaggggccgcctggtcgtcgaacgcgacagagagcttgaccctgatggggaggaagcga

SEQ ID NO: 39574 - DNA, 525 bp, Zea mays
  Peptide Sequence Number=SeqID_81353
atgagcaagaacacaagagacacaagatttatcccgaggttcggtcacaccaccaaggtgccctacttcctcgttgaggcgcccacaaagagccgggtctctttcaaccctaatcctccctttgccaaccacaaagatttgaaatgggagaggcaagaggtgtgtgagagagagtgggaggtgtttctcagggggttttcggttcactggcagactcagccgaagactggaccggtcccaaattcggttgagccggaccaaattcggttgaaccggttgcaaatccggttgatccgggccaaaattcggttgaaccggttgcaaatccggttgagccgggccaaaattcggttgaaccggttttccaaaaatctgcacataaccttttccgacatgactgactggcagactggcaggtcagacggtgacagaggggaacagtgcagaaaccgggttgaaccggttttaattccggttgaaccaatttttgaaactattgcacagattttgagaaaactgaagtga

SEQ ID NO: 39575 - DNA, 288 bp, Zea mays
  Peptide Sequence Number=SeqID_81354
atggggagagaacgaagaacacaaacaaacacaatgagcaagaacacaagagacacaagatttatcgtgaggttcggtcacatcaccaaggtgctctacttcctcgttgaggcgcccacaaagagccgggtctctttcaaccctaatcctccctttgccgaccacaaagatttgaaatgggagaggcaagaggtgtgtgagagagagtgggaggtgtatataaaggtgcccccaaaagctggtggccgttggggaaatctgactgaaaaacggttgaaccggttctaa

SEQ ID NO: 39576 - DNA, 384 bp, Zea mays
  Peptide Sequence Number=SeqID_81355
atggggacgagcgcggcagggaacaacgccggcataggaggagctcggccggacgccatggggcgagcagagagctcggagcggagctgggacgacgcgcagaggaggagccggctgcgcgcggctgccaagacaagcgcagaggaaactccgaccgggcgccggaaagaagaggccgccggggcgaagctccatggtcaggagctgggggcgaactcgagcagaaggaagggagcaggcacggctactactgttgctgctgaggaaactgcctctggtactgctgctactggttctggcgctgatgctggtgctgatgatggcttcagggtcggcatgggtggcgaggtaagactcccaccaagactgtgctgcttctcttag

SEQ ID NO: 39577 - DNA, 306 bp, Zea mays
  Peptide Sequence Number=SeqID_81356
atggcgtttctctctccacgctgctctctctctctctgctacgccattcctcacgtcctgctccgaccaggctcgcgcaggtgcttggcaaaatatctaagatacgaaaccctcactgacttggccgttcttgctgatatcaagaccgattcagttatacatacccttgagagtcttttctttagtcgggttttaactttgtgctgtttgtcggggaccataattaggggtaccctcaagacgcctaattctcagctggtaacccccatcagcataaagctgcagaggcctgatgggtgcgattaa

SEQ ID NO: 39578 - DNA, 651 bp, Zea mays
  Peptide Sequence Number=SeqID_81357
ctgccccccaagggggccacgctggaggagtaccgcaagtacgctgaggcttctgtaagcaaggagcgtcaggatttcttgggacttgtcaacaaggagatagaactatacaactcaatgcttgaaaaggagggtgcagagggtgaagaagaagctaagagagcatacatagctgctagagaggaatcaggtcgtaggctgctgcagaagaaaacgtctcatcagtacttactaaaaagccggaggagctcgacaacagagagcttagcagaggaacgacgccgagctgggtgcaagcagaggcgcggttcggcgaggtcacgacctgggcgagcctggtcggagcaggacgtgaggaatggcgtagcaggagagagagagcagcgtggagagagaaacgccatggggacgagcgcggcagggaacaacgccggcagaggaggagctcggccggacgccatggggcgagcagagagctcggagcggagctgggacgacgcgcagaggaggagccggctgcgcgcggctgccaagacaagcgcagaggaaactccgaccgggcgccggaaagaagaggccgccggggcgaagctccatggtcaggagctgggggcgaactcgagcagaaggaagggagcaggcacggcgtaa

SEQ ID NO: 39579 - DNA, 375 bp, Zea mays
  Peptide Sequence Number=SeqID_81358
atggggctcattgacgctgatgggactgcagtagggaatcacggtgatgcaatggcgcggttaggacacgcggtggccaacggcaagggcacgtcggcggtgagcagctttatccacgacggtgagcaaggggaggggtaccgcggctggccgggatggcgtccagcccaccggcggcggggatttttaccgagctatgtttatccgatggccacggcgcacgaatcatggcgagcggcaatcaacggcgacgagccaccggcggtgaagacagccgtgcggcgaccttatctgattcagttactgtaccatgggtgcatcccattcaacagcctgtcagccgaacttggagcatcattttctcttaatttctaa

SEQ ID NO: 39580 - DNA, 192 bp, Zea mays
  Peptide Sequence Number=SeqID_81359
atggagagtcatgatctctgggcagaaagggaatcatggcttgtgggtggtgatgagaatgatggttttgattatgattatggtaatggtaactggtattctttccgtttggaaagggttgcctttggtgcaatctatgctcaggtaaataagaaggagaacggtgtcaaggcagatatccaggagttctag

SEQ ID NO: 39581 - DNA, 435 bp, Zea mays
  Peptide Sequence Number=SeqID_81360
atggggctcggtgtatgcggctcgctctgccaagatgatgatgaggaggatggttatgattatgcttatggtaatgatgatgatgaggaggagggttttggttatgactatggtaatggtaagtggtattctttccgtttggaaagggttgcctttggtgcaatctatgctcaggtgaaggagaaggcatcgaagtggatctctaggagtttcaggacttcgacgagttcgaggattaggctagcgacctcccccagtcagctgcctgtggttgtccgcattgcaaccactgctcaggagaagatgaagccgtggaaggagacttgcaggagttccaagattacgacgagttctaggcgtgggttagcggcaacccccagtcggctgcctgtgaaggccgcgtgtatctacgtttcttttccacactttgattaa

SEQ ID NO: 39582 - DNA, 702 bp, Zea mays
  Peptide Sequence Number=SeqID_81361
atggggaggctagaaccccgggcagagtgggaatcacggcttgtgggtaaagtgtgcgacctctgcagcgtgttagaaactgatggcccgtatcagggaactgcacgtaagtctgtgaacccctttttgccttctcgcctggcggagcgtccactgcgtcgcacggtgtcaggtcagtccagccagctggagagactgcatcgtcgcctgcacgaggagcaggagcgccgacgccaggagcaggagcaggatcaggagcagcaggactcctcccccttgcctcagcaggaggtggagtctgagaggcctccttcccctgcacctcagccagagatgccccctgcaccacctcagggcatcctggctgctggaggagaccctgaaggagacagagacgacgacgacgctggtggcagttcgagccacgacacggagctttcgaagcagccggagccggagggatggatctctagacccatcactcgataccctgttgcgtcgggccttcgaccaacacacctggtctatcgagtaccgttgtgtagtctaccagcatcgtcgcgggctatacccggaccagtgggaggcacttgcttggtgcgccgtccggatgatgatctccggggtgcagaggccttctcagagcactattctatcactgagagggatactgctgaggcagccatgcaagatgcagcatga

SEQ ID NO: 39583 - DNA, 333 bp, Zea mays
  Peptide Sequence Number=SeqID_81362
atgatctccggggtgcagaggccttctcatagcactattctatcactgagagggatactgccgaggcagcaatttggtgagggcaatcccaggctgagcagcatggtcaacttggtcgttgtgctcaacacagagttggaccacacccttgacgagttgggcaaggttcaggcggaggttgcggaattgcttgttgaatgcgcggcacgccactatcttgatggtggttctccagcccctgttgggattcagcacccttaccgttcatcgccccgtggtcgcttcgactatgttaccccagactgcagaacccggatagatttggatccctag

SEQ ID NO: 39584 - DNA, 1296 bp, Zea mays
  Peptide Sequence Number=SeqID_81363
atggggcattcacaaaatatccttagtacaaagccacccgctaaggtttccacgtcagtattgatggccctctgggtgagggagggctcggcgagcaggggagggctcggtcaggcaagggagcaggggagggactcggtcggggtgtggggcgcggctcaggcgaggagaggcgcggctccggcgagtggcgaggctaggaacgtagggagggagaggaggaacgaccgacggtttccgggtgcgggggaggcgagcgggcgcggccgggcaccgaggagccgggcacggggcggggtcgggcgcgggcgcctggcggcggtgggagaaggagggagaggagaggcctgggagaaggaggagggagaggagaaggaggcgatggttcgtacaatccaaaccacccgaaccaacaccaactacatccctctgccacgacaagttcttgtctacctagtggtagtcgaagaaatccctatggatctccctcgcattcgtgtggagatccgagtcattctggaggatagctcagaagagtttctgcctacacccatcccgttggcagaatcactagcctttgcagttggatcgtcatcttcagcaccgccagcaccagcagtccaagcccctgctcccagaggcaatgacccggacgactctcgtgacgatgatgaagacaacgaaagtgaagaagaagaagaagaggagaacatcaaggaggaagccaacggatgttctacatgcgttgggaacctactccgacccctgtatgagaccaggcgagtgtgcgagccccctcgggcttgctactacatcactcgcattcatgtcagggtgatggatgcaggtgatagagggttcaggactctatcagctcatgagtctctgacgccgctattcacctacgctccttcggtcagcgatgctgctaggcgaactttgtggtccctcatccacacctactggcagaaactgcacaacatgaagtacaagcatcttcctttgcgtcttcgtggagaaagccagaccaacattgttctaggtggagctgaagaagatcgcctcaacaccctagttggtgtggtggtaggtattaacaccgacctagacagtgctaccctggacctctccagggtacacttggagctagaggatgcacacacaaggattgcagccttggaagctcaactagaaggaagggatccccctgaagcccaagaccctaccatggcattgtcccctccccgcaagaggatccgctatgaagaaccaggatccatcaccaggctgctatag

SEQ ID NO: 39585 - DNA, 819 bp, Zea mays
  Peptide Sequence Number=SeqID_81364
atggatctccctcgcattcgtgtggagatccgagtcattctggaggatagctcagaagagtttctgcctacacccatcccgttggcagaatcactagcctttgcagttggatcgtcatcttcagcaccgccagcaccagcagtccaagcccctgctcccagaggcaatgacccggacgactctcgtgacgatgatgaagacaacgaaagtgaagaagaagaagaagaggagaacatcaaggaggaagccaacggatgttctacatgcgttgggaacctactccgacccctgtatgagaccaggcgagtgtgcgagccccctcgggcttgctactacatcactcgcattcatgtcagggtgatggatgcaggtgatagagggttcaggactctatcagctcatgagtctctgacgccgctattcacctacgctccttcggtcagcgatgctgctaggcgaactttgtggtccctcatccacacctactggcagaaactgcacaacatgaagtacaagcatcttcctttgcgtcttcgtggagaaagccagaccaacattgttctaggtggagctgaagaagatcgcctcaacaccctagttggtgtggtggtaggtattaacaccgacctagacagtgctaccctggacctctccagggtacacttggagctagaggatgcacacacaaggattgcagccttggaagctcaactagaaggaagggatccccctgaagcccaagaccctaccatggcattgtcccctccccgcaagaggatccgctatgaagaaccaggatccatcaccaggctgctatag

SEQ ID NO: 39586 - DNA, 537 bp, Zea mays
  Peptide Sequence Number=SeqID_81365
atggacaggactgagcgccgtggcgagctggaagggcgcgtggccaccagagaagaagctgcgcacggcgatgggagctccggcgcgacgagcaaaggaacaccgagcaggacgcgaactagacgggaaattccggccgggcgccatggctgcaggagattgcgcatggggaaactcgacggctgggcgagcaaaggggagctgcgcgctgccatggaaccgagctggttgagcagggaaggaggggagggagcggctgagcaggaacgaagaacagaggggctgaggccggggacgcgcagggagaagtgcggtacaggcgagcacaccagggagagaaacccagcgcaagagctcggctgggagcttggcgggcggaaattcgagcagggcaccggtcaacagagaatcgagagggagaggaaggagctggggcgctcgacggccaaggctggtgagcggctggagaagaagagaagcctgcgtgcgttaaaaagaaaacagagggcggctgggcggtcgggcggccggggatag

SEQ ID NO: 39587 - DNA, 537 bp, Zea mays
  Peptide Sequence Number=SeqID_81366
atggacaggactgagcgccgtggcgagctggaagggcgcgtggccaccagagaagaagctgcgcacggcgatgggagctccggcgcgacgagcaaaggaacaccgagcaggacgcgaactagacgggaaattccggccgggcgccatggctgcaggagattgcgcatggggaaactcgacggctgggcgagcaaaggggagctgcgcgctgccatggaaccgagctggttgagcagggaaggaggggagggagcggctgagcaggaacgaagaacagaggggctgaggccggggacgcgcagggagaagtgtggtacaggcgagcacaccagggagagaaacccagcgcaagagctcggctgggagcttggcgggcggaaattcgagcagggcaccggtcaacagagaatcgagagggagaggaaggagctggggcgctcgacggccaaggctggtgagcggctggagaagaagagaagcctgcgtgcgttaaaaagaaaacagagggcggctgggcggtcgggcggccggggatag

SEQ ID NO: 39588 - DNA, 939 bp, Zea mays
  Peptide Sequence Number=SeqID_81367
atgaggcggaaagacggcggctatcccccatccgggggcttggaaggtggaaagacacgacgcataagggagcgcgaagacatgaccaacgggcgaaaggggcgggcggccatgcaggcggcatgcaaccgtgccaagtggacgcgcttctccgactcccgacacgcccagcatggaggcccaggcccacgcgtcacgcgaccggcgcgccggatgcttcatgcaagaaactgcaccgccacttgcgccaccaccgcgcctcctcgattgtggaaccaataccgcgactcgaggcgacccagcgcacgacccaacagcgccagcctggcgcagcggtcaatgcggccaaaaatgggccggagaagcgggcgacgcttcgccttcgccataatgaccgcgtcaaaaaaggctccgagcctccctactgatcagaggttcgaaggctggccccccgaagggttcgacaactgcctcagatcgcgtgggccctacacccactactggtcagagaggctcgggggctgctctcgcaaacccggctccggccgaaccattgacggcgtcaacataccagcccgagaacttgggacccgaccgtacacccgggctatggccagctcgcatgagggaacaaccagaccagctgaagcattgcgcgaggcattaagacctcgaaggagtgaaaccactcctccgaggcctcgggggctacacccggcgggtgcgctcgcgcgcacccaccggaacaaaatgcaaccgagaaaggctggtccccttgcaaaaaagtgcgacgaaagcctccaagcgagtgctaacactcccttcgaggctcgggggctactgtcggggaccataattaggggtaccctcaagactcctaattctcagctggtaacccccatcagcataaagctgctaaggcctgatgggtgcgattaa

SEQ ID NO: 39589 - DNA, 808 bp, Zea mays
  Peptide Sequence Number=SeqID_81368
atgatgaccgcgtcaaaaaaggggttcgaaggttggccccccgaagggttcgacaaccgcctcagaacacgcagagcgagggatgactctgggtacgtccgatacatggccgaggctcgggctacgctcccgagaggctcgggggctgctctcgcaaacctggctccggccaaaccgttgacagcgtcaacataccagcccgagaactcggaacctgactatgcacccgggatacggccagctcgggggctactgtcggggaccataattaggggtacccgcaagactcctaaactcggctggaacagtagaccaaggtggatccacgcctcgcccgagggcctcctcaagcaacgggcgcaccttcgactcgcccgaggcccagctcgggcaggcttcgcggagaagcaaccttggccagatcgcctcgccaaccgaccggatcgcaggagcattcaatgcaaggatcgcctgacaccttatcctgacgcgcgttccacagtcgacaaggccgaaccgccgagtccaacctcaggcgccataggaagctctgcctcgcccgaccccagggctcggactccacctcgacctcagaagacggtctctgcctcgcccgacaccagggttcggactcaacctcgacctcggaagacggtctctgcctcgcccgaccctagggctcggactcaacctcgacctcggaagacggtctccgcctcgcccgaccctagggctcggactcagcctcgacctcggaggagtcgccgcctcgcccgaccttgggcttggaccgaccacgttacagggg

SEQ ID NO: 39590 - DNA, 156 bp, Zea mays
  Peptide Sequence Number=SeqID_81369
atgaagggtattcaccctcatcacctggtcattaggacatcatactgctcagaggaggaaggctttcctcaccttctacggagttgcggactgcgcatggggatctgcaagaagcccgaatatgtctggaaggaatactgtcacacccggttttag

SEQ ID NO: 39591 - DNA, 795 bp, Zea mays
  Peptide Sequence Number=SeqID_81370
atggaaaactcttgggtcattaggacatcatactgctcagaggaggaaggctttcctcaccttctacggagttgcggactgcgcatggggatccgcaagaagctcgaatatgtctggaaggaataccgcgaaaatggaatggagaaatgctctatggcagtctacctgggagaaagccgaagctacccaaaccaccccccttccaagtcaccttcatcgggcaccgcttcccagacacttgccaaagtgttgcccgaaaggccctcaaacagctatgccaaaactacagcagagaggaaaagacttcaggctctgtcaaggagagaccccaccgaggatgaccccaccattatctacatggccggatacctccacaccctcgatacccactacgatgatctctcctcccactgcacccacctaaactcccgggtggaaagcctagagcagcaagtcaaagagcttaagaaggacaaggcatctctccaagagtgtctcgacatagcagaaggcgaggagggcaacacccgtgaggcctatcgaaccttaaagatggactatgataagaagcttaagaagctcgcccccacaaagaaaatccggaagaaaaccacgagccaaggatgccagacggaaaggaggaagaaagctcccccagcaacagctcccgctaggatagagaatttgtccgatatcgaggatatgtccctcgctagccttgatgatcttctcaaggaatttggggacactctagaaaaggaattcggtagtacctcagggaacgctcgcgtgtag

SEQ ID NO: 39592 - DNA, 492 bp, Zea mays
  Peptide Sequence Number=SeqID_81371
atggtgaccaccaacccctggatggggagaggcaaaccgggctgcgttcttggtcccgccctcagcttcaaggatgttcatcatccttgctggggcggagagcgaagcgagccggggctctacctcccgcgcgggtcggctggccacctcctcttccagcttctggtggatgcaacattccgccctcttcctcgctttagtggcgagggtgggagcgaggacctgccggtgcgcttcggagcggcccgcgtttgccagcgcggagtcggtgctgacgtggtggcggccggaggaagcttccccatcgtcgaggccgtcagtgccgcctacgggccggcctccggctctttggctttgatggttggttcgcatcccttgagcggggacgcgaacgagagcctttcggtggctgcgtccgtcctgggaccatggctgctgctgcagaggtcgccggcgagtcgcccggaacttgtcgccccgcaggctccctag

SEQ ID NO: 39593 - DNA, 951 bp, Zea mays
  Peptide Sequence Number=SeqID_81372
atggcgaccaccagcccttggatggggagaagcaagccgggctgcgatcttggtcccaccctcagcttcaaggatgttcatcatccttgctggggcggagagcaaggcgagccggggctctacctcccgtgcgggtcggctagccacctcttcttccagcttctggtggtggagaccatcctccagctctgcggaggagacgtcctccagccatgccagggaaggcgaactgttgctgcccagctaggatgcaacattccgccctcttcctcgctttcgtggcgagggcgggagcgaggacctgccggtgcgcttcggagcggcccgctctttggctttgatggctggttcgcatcccttgagcggggacgcgaacgagagccttccggtggccgcgtctgtcctgggaccatggctgctgctgcagaggtcaccggcgagtcgcccggaacttgtcgccccgcaggctccccggagtccctcggctcggtcggccttgctatccgaggcttctcttgcttagttaaagggacccctcagccgctcttcgacgagccgaagccaggggtagcggtgtcagcacggacagaggcagagttggctcgaaaagaagacttggtcggccggagcctggccgggtcgtccgttagcgggaccgacgccggagttgatctgccgaggcctcgggccgggctgatgtctttgggggatagctggccgaggcctcggggtgatcagccgagccgcctgctcgagccggatttttggaggggaccctggcggcgatggcccgggcgtgatgatgaagtcgtccttcagagtggagatcctcggaccgcgtcgccgtccgaggctaggtcggacctcgccgaaggtgtagtcgacgccgagggtgctgctgctccctttagccgtcaagatccgatcctgcaggatcggattatcttgtag

SEQ ID NO: 39594 - DNA, 369 bp, Zea mays
  Peptide Sequence Number=SeqID_81373
atggcgctcgcagccccttcttccctccgcctcctcccgaccacgccatcgcaggcgccatctccgccctgtgcctcccgaccacgccatctgcgggagctccgtctctgccagagactcgccaccgccgccgccgccgccgccgccgccgcggccgcggccacggctccactcgcttcctcgcccaccacctccgtggccgtggaggagcgtggtgcggggaagggaacgccgatagatctcgcggcgctcgatggcacctggaggctgtgttacacatcggcatcagacgtgcttgtgctgttcgaggcggccgagaggcttccactcctgcaggttaaacaacgtgtattcagcgatctgtcctaa

SEQ ID NO: 39595 - DNA, 630 bp, Zea mays
  Peptide Sequence Number=SeqID_81374
atgacgtcggtggttctcagccccctacggaagcaaggagacgtcaacagggtcccagttgcaccgccagctgtgcttctacagggctcaggcacttctccgacggccacactatcacgcatacagggctcaagctctcccctgacagccatgttggcatgtacacagggctcaggcacctctctgccagacacgttagcgcctagctacacccccattgtaaatctggaccctctccttgcatctataaaagggaggtccagggccttcctggaggagggcggacaccgagcggaggaagcacgaactgctgcgcgcggttcaggaaatgcggcacggattcgcagcgcgtggggcccgaccaacgcgctgccatcgaggaggccgtcatacgtggcggtggaggagcgtggtgcggggaagggaacgacgatagatctcgcggcgctcgatggcacctggaggctgtgttacacatcggcatcagacgtgcttgtgctgttcgaggcggctgagaggcttccactcctgcaggtgggccaaatataccagaaatttgagtgcaaagatcgatcagatggtggaattgtgaggaatgttgtaaggtggagcatcgagaacttgctggag

SEQ ID NO: 39596 - DNA, 465 bp, Zea mays
  Peptide Sequence Number=SeqID_81375
atgcccgtggcctgcttttcccggcaccctgcgcagcgtctcccgccccaagctcccgtacgcacacaacagcaagaagccaacgcccttccctgctcctcctctcttccccacaaaacagcagccgcagcgagctcgccgtcgtccattgcgccccctgcaatcttcccccttggctgttcgacggaatgcccgtgggaaatattgtgttgcgcgcagcagccccgacgtctccgcacgctgtcggctcgttgttttgtgaagccagtggacagcacgccgggatgcccgccgggtgtttgctgttttgcgcagccccaacatcgtcgtcgttcacccccgaggaaccccgtgtttttcgtggaggagaaggcaagccgctcaacgctcgtcgacgttcagagctatgcacaaatcgaaatcgccatcgttcttacgaacgccgattgggtttgtttatggtga

SEQ ID NO: 39597 - DNA, 483 bp, Zea mays
  Peptide Sequence Number=SeqID_81376
atggacgacggcgagctcgctgcggctgctattttgtggggaagagaggaggagcaggggagagcgtcggggatccactgcgggagggagctcgctcgcaccatggagggcagaggcacgacgccgtgtaccagggacataggagcagggagaagtgacgaccgatgggggagttcggctgctcgagctttgtcggcgccatgggagaagcttcagggcgccaagaaagaaggggcagagagcacgcagggaggtggaggcgccatggggaggaggcgagcagagctactggcttcctgtgcactggccatggaggaaggagtagggatgcccgcggccatggagcagggaaacagggagccgagggaaggggcgccaagcacagggggcagagggaggcgctcgacatctgctggacagccgacaccggagggaagctgggcggccatgggagcggaggaagctcccaacgcgcagccgtga

SEQ ID NO: 39598 - DNA, 354 bp, Zea mays
  Peptide Sequence Number=SeqID_81377
atggcgaagccgccggtgagttttccggccgagatagagtggggaaaggggtgtgtcgtgaacgtggaagtgtggcggaacttttggcattatttaattggacggaaggttgccagggagggagaagggagcttaccggagcggtggaggggaagcacggcggcgctgctagctcaattgagctcggggatgtgtggaggaggaggccggggctggtgtggagtgctcgggctcggctgtcccttttataggcgcccgggagggggagagggatggaggcaacggcgagctccgacgagcttccatgatggcgggcatggagcagacggcgacgagacggctcgggcaggctga

SEQ ID NO: 39599 - DNA, 468 bp, Zea mays
  Peptide Sequence Number=SeqID_81378
atggaggggagagggggctcgaccgaggttcaaccgacggtggggatccgcggcggttctccgccgtcggtccggttttgcgacggggaagcggtggcggagcatgagtggtggatgaggatcgccaggggcggggccgaatttcgcctgcgggggcctagggcggccggtgcccgggagggggagagggatggaggggacggcgagctccgacgagcttccatgatggcgggcatggagcaaacggcgacgagacggctcgggcaggctgaggatgaggggacggctcgggcacagtggcggggtttgtcgcgggggctggcgggcattgatggcgaggcgacgaggcgaggggcgctcggcggcgatcgcgccggtgagggatgggcgagggagaaggagctgacaggtggggtcgggctgccagtgagagaggtccgcgcgagagagagaggggcggggcgctga

SEQ ID NO: 39600 - DNA, 258 bp, Zea mays
  Peptide Sequence Number=SeqID_81379
atgagcaggctggagcacgcgtcgcagacgagcccgaacgcctacgcactcggccagccctattccggtcatcatcgccggcgatccgcccctcgacatgactgccatgatttcccggacctcacccagccctccaccggacctctcctgccgccgggggacctcatggtcgtcgccaacgccggtgactctcgggttgttctgggcaccgcatccgacaatggtgtcgtcacaccgtccagctcatcatccacctga

SEQ ID NO: 39601 - DNA, 441 bp, Zea mays
  Peptide Sequence Number=SeqID_81380
atggctaaactaagtgatgatcatgatgggagggataccctagccttcatgcgcaagaactcgggcagattaacacgaccacgtgttcgaagcgcactggcaacgctaaagcatgccccagcgcacggccccgcgcgcgccgcgccgcgtcacgccaaccttgcacccacgttcgtgcccgcggctataaagccaaccccggcctcgaccatacacccccgcacgctcccaaccctgcccgagcacgagttcaccgtcgtttgcccagggaacggcgtgccaacggccgcgcgagccctggccaccatagaccgtccactccagccctcctccacctaccctattacagccatcaccgtcgatgatccgcccctcgacgtgaccgccaggacatcccggacctcacccagccctccaccggacctctcctaccgacggtaa

SEQ ID NO: 39602 - DNA, 774 bp, Zea mays
  Peptide Sequence Number=SeqID_81381
atggggatccgcaagaagcccgaatatgtctggaaggaataccgcgaaaatggaatagaaaagtgctttatggcagtctacctgggagaaagccgaaactacccaaaccaccctcccttccaagtcaccttcatcgggcaccgcttcccagacacttgccagagtgttgcccgaaaagcccttaaacagctgtgccaaaactacagccgagagatctctgagaccccccttcgatattttccacccagcaacaaaaatacccccacctggaggaaaagactccaggctctgtcaggaggagaccccacagaagatgaccccaccatcgtctacatggccggatacctccacaccctcgacaaccactacgatgatctctcctcccactgcacccacctaaactcccgagtggaaagcctagagcagcaagtcaaagagcttaagcaagagaaggcatctctccaggagtgtctcgacatagcagaaggcgaggaagccaacacctgtgaggcctatcgaaccttaaagatggactatgacaagaagctaaggaagctcgctcccaagaagaaaatccagaagaagaccaccaaccgaggatgccaaacagagaaaaagaagaagaagacccctccagccccacctccccccagaattgatgattggtccgacgccgaggatatatccctagcaagccttgatgatcttctcaaggaatttggggataccttagagaaagagttcggtagtacctcagggaacactctcgtgtag

SEQ ID NO: 39603 - DNA, 222 bp, Zea mays
  Peptide Sequence Number=SeqID_81382
atggcgccgtcccccgtcgtctccctcgctgatgggccggctgggccgcctgccgcgcccgcgcgcgcgctcgcgcccggatggaaggctcttgggtcattagaacatcctactgctcagaggaggaaggatttcctcacctcctacggagttgcggactatgcatggggattcgcaagaagcccgaatatgtctagaaggaataccgcgaaaatggaatag

SEQ ID NO: 39604 - DNA, 168 bp, Zea mays
  Peptide Sequence Number=SeqID_81383
atgacgagcgctggggatgcgacaccctcaataggggaagcggcgcccatgggcgtcaccgtcgccgagactttcgcccaagagcccctagcacaacgtctggccgaaaccccgagacacaacaagctgcctccgccgtcgccgctgcctcgtcgccccgcacaatga

SEQ ID NO: 39605 - DNA, 711 bp, Zea mays
  Peptide Sequence Number=SeqID_81384
atggaactgcagacatcagcatgcagccgtggcaattctggtattgatggtggcgatgatgaattgacactccctgacgacagaagccaatctcatcaagcaacacatggtaatgggttggccttgaagcacagagcagctccgacttccaatcttaaccctccgccctgcctccggtttttgcccgacctccgaaacattctggaccacgaagaagggaggttcgcctcgtgttatcgttgccgagccacatccactgatgtagcagctccgacttcacgttgcaaaacccccacctccactcgcataccaggcaccgagaagcgaagcaacagccgaaggcaaagtcctggccgagacgaacttcagaagcgacgccttcaggaagggagtgacgtcactgtgacgccaccgtcacctgtccgcgatggaccgggctttcacccaaggaagatagcgctggggatgcgacaccctcaacaggggaagcgacgcccatgggcgtcaccgtcgccgagactttcgcccaagagcccccagcacaacgtctggccgaaacctcgagacacagcaagctgcctccgccgtcgccggcctgccggcgcaccaacgccgacctccaccccggctcatgcgctagcccgggaccagcctgccggcgcctccgacgaacggcatgcggaggccgccaacctcgcgcgccagatctag

SEQ ID NO: 39606 - DNA, 432 bp, Zea mays
  Peptide Sequence Number=SeqID_81385
atgtcggacgaccttgttgttcctgtccactttgaaagttggccaagaactttgctttcgcctcctggatcatccgctccttgtgctcctcgaactggagctgctcgtcagccggcaaaggtttcccaagtcggctctatgatgttgcttggagaaatatcagagctatcccttgaaccggccattgagggccgatttgatgagcttagatgtgttgtccccagcggagtcgccaaaaagtatgttgacgccttttcggagcgccaaacactcaacaagaaccgtggcggtgccctctgcacaggggcggacggtccacgcgcaggggccggacggtccgcggcctggtgcgaggcgcggtggtgctctctgcgcaagggcggactgtccgtggcctggggccggactgtccgcgacctggtgcgcggctag

SEQ ID NO: 39607 - DNA, 2517 bp, Zea mays
  Peptide Sequence Number=SeqID_81386
atgcttactccgagcttatctcggaacgccccggctatttcttccctcactatatcaatggcagctgaaatatcagaactctcccttgaaccggccattgagggccgatttgatgagcttagatatgtcttccccagcggagtcgccaaaaaggccggacggtccgcggcctggtgcgaggcgcggtggtgctctctgcgcaagggcggactgtccgcggccaggggccggacggtccgcggcctggggcaaatggggctgactgcagacgatttccgcttcgggaaatcctcctcccatgtcccgtttcctatccccttcttcgccaagcaatcctctccccctttcagaaaaaaaaaagtaatcctctccggagtccaagctccgaccagatccggacccccccccccccctccgaacaagctcgggcatgcccagcagctgatgaggtcgctccgcggggtcctcatcccgctcgtcctcctcgcggggctcgccttccgcgtggacgacggcggcgccgcgctcctcccgctcccgccacccgcgcttcccgcttccccgtcccgcctcgcgctccccggaggcactccgaaggatgatggggcggcggcttcgcgctccacggaggtcgtcacggcgggggtgcgctccaccgagatcgtcgccccagtggggcccaagaagcagagcctccgggagctccttgtccggccgcagcctgcacgtcacgagccgtctagcttggttagcggcgaggcgaaagccgaaaccagatctgtgctccagttttacgacaatggcacgattcagcttgtggacaagctgtctcaatctcctctgtgggagattgccacagggcctccactctcagaccatattactaccactgagtctggtccgaattacctcatttatcctttcaatgggaacgagaacatgaatgggaatagtactgaactttgggaggtttataatgggaacagcgtgaggctcccatggaaattggaggaattcgttgccaggagcccatatattcgggattctgttgttactatcggatcaaaagtttcaactgtttttgtagttgatgctgatagtggtgagattatttacaggcatagtatcccatctgcgttaaaggaattggaaggaccaggggttgaaggagcaccatccaagctaaatgtccgtactagtgatgacagtgataatatcatagtgcttgtgagaactgactattctctcagtgcatcagaccttggcaatcatttatttaactggacaagaacttctttcactgcaaactactatgtgaaatacaagcaccctgacatgcttgatcagtcatcttgcctgcaaggagacattccatgcattagaactgagggtttgccacttgctttacctgatttaaattcagctaatgtaattgtcttgaaagatggtaccccttttgtttctatgcatggttctgatgctttggaaccagttcaaaccccaaggaagctaccaaacactgctgggaagtcaaatatcctattggatgattctcaaaatcaaactcatgatgttgctcgatctcatgccatctctgccgatcctgaagctaccctaaaccccactaggaacacttctggatggctattccctttgtttcccatatttttggtcactggttatctgttgagcttgatatctgcaagcaagtcatgcaggcagtttatgattcaacttattgagccattcacgcacaacaagaaaacggtggacattagaggcaggtcggagggaactcccaaaaaaagaaaaacacggaagaaggatggacttgtcaatagctctgagaccttgacagcatctgacaaggagtgcagtgatactggtgggtcaactgaggcaccaatgaaaaattctgcgctaacagatgcccttggtggtcgtcagattggtaaggtatatgtctccaataaagaaattggcagagggagcaatggcacaattgtttttgaaggatcttatgatggtcgtcaagttgccgtgaaacgtctgctgcgttcccacaatgacatagccgaaaaggagactcgaaatcttattatatcggatcatgatcctaatattgttagactctacggttgtgaccatgacagtgattttgtttatatctcccttgagaggtgccactgcagcttggctgacctaatccaaaaacagtcatatttgtcttctggagagtctatttctaacaatgaggtcagtatgagcatcaactcaaagatttcaaatgttaagggaatagacgtggagttgtggacgcaggatgggcttccttcagcacaactcctgaagctgatgaggtacatgaatgatctcatatgctttctgctgggcgtgtttggttcacgcctacacatgccacagatcatcacaccaaaactacagcgtcttgcagcactgtttggttgccgctgcggtttaggtgctccgtgctcacgccacaggctcgtgctgtaa

SEQ ID NO: 39608 - DNA, 558 bp, Zea mays
  Peptide Sequence Number=SeqID_81387
atggaagcttcttgtagaagggatgatgagtacagtgcgccgttcgacacgggcgcactgtttgtcaacagactggcggcgcgttctctccgcaataaatgcagtggcagcgcggctttatgggccttacgtcagacttggcccgatggcttatgtcgcgggccacaagccacggccaacgaggcagcatcgggtttccgcctgagcaggaagcgtaggattattccggacaggagaagctttttggaaaaacaggccaagcacggaccgtccgggcccctgcggcggaccgtccgtgacagaagaatgaccctcggacagaaccaatgcaaaaacacaagtttccactacagactgtccggaggaaaagcgaagaccgtccgagccctcgcgcggaccgtccggcctcaggcacggaccgtccggtcgccgttactgctgaccgttgcattttcagccgttgatctacagggggcggaccgtccgcaccaggagggcggaccgtccgcgctcagcagaatggccccaacggcccaggaagtggttggtgggctataa

SEQ ID NO: 39609 - DNA, 624 bp, Zea mays
  Peptide Sequence Number=SeqID_81388
atggaagcttcttgtagaagggatgatgagtacagtgcgccgttcgacacgggcgcactgtttgtcaacagactggcggcgcgttctctccgcaataaatgcagtggcagcgcggctttatgggccttacgtcagacttggcccgatggcttatgtcgcgggccacaagccacggccaacgaggcagcatcgggtttccgcctgagcaggaagcgtaggattattccggacaggagaagctttttggaaaaacaggccaagcacggaccgtccgggcccctgcggcggaccgtccgtgacagaagaatgaccctcggacagaaccaatgcaaaaacacaagtttccactacagactgtccggaggaaaagcgaagaccgtccgagccctcgcgcggaccgtccggcctcaggcacggaccgtccggtcgccgttactgctgaccgttgcattttcagccgttgatctacaggggcggaccgtccgcaccaggagggcggaccgtccgcgctcagcagaatggcccaacggccaggaagtggttggtggctataaatacaaccccaaccacctccattcaaaacatccaagcattccaaccttcaacattcaatacaagagctag

SEQ ID NO: 39610 - DNA, 1017 bp, Zea mays
  Peptide Sequence Number=SeqID_81389
atgccggcagcacaggagagcgaccctcaggtcgtcgtggcagcgcctgggcagtccgtctcccgtgcgcccaaggtgcccaaggcgaggatggtaccgaggccggcggcgaggcggacctcggcggtaccttcgggggtcgagatccgagagacctccccacaggcacgattgatcatggcccggagcggcaagcggagccatggcctgaccgatctggctccccggaaagtcctcaagacagcgtcggcttccacagccggtgccgcgccaggcctcgccgttcagctgaccttctcgcaagatgccccacaacggggggctcaggcggctctagttgccgtggagcgagttcctgaggccgtcccttctgtcgaggtggccgtcgcgctggggaaggcggctggcgcggacgtggcctcgggcccaccagacatgccgtcggcgctagcgccagccgctgccgatgctgctgccgtcctggtcgtggagcgacctgtcgccgccgacgctgagatggccgaggcgtcgcttcttggtgcctcggaggaggggggcgtggaaacgccacccgtcccgccgagtggcagccttgtccctgcgcggcggagctccgaggggcggcgccagttgctccggttccggacccgtgaggcttcggatcccttcttcgttcttgacgatgagcgggaggagcagtcttgggacgagctccgcgagtgtgccgaggcaacggtggggtcgctccggtcatccttggaggtcttttgcagggacgtccccaagatcctccaggatccgatggacctgagtgccgccaagtcgtcgttcatccgccgcgaggtcgatgtctggggatcgctgcgatccctgaggacctcgcttgccagggctaccgcgcgcctctcccagcagggcgccgaggtggcggaccttcggttgctctgcgccgatctaagagcagaggcggcagcggcacgcgcagaggtgcagcgacagcagtcggagttcgactag

SEQ ID NO: 39611 - DNA, 720 bp, Zea mays
  Peptide Sequence Number=SeqID_81390
atgaccgttgcttacgttgtacgagtgtcctcgaacacgatccaagagttatcagtactcgatatgtcgtgcgcgttcgacgactactatatcgaggactgtggcgtcatcttggcgccagaggtgacgcagaggaggaccgacaacaatgaccagttcgtcatcctcgccaccgttggggttttctttggaacgccagaatttcacacgaatctttactactctattaagaagggagtgtcagcgtccacagctaaggtgcccccgcctccccccgtgcgtgcccccgcctccccccagtccgcccacgccgcgagcccccgcctccccccgcgcgtgcccccgcctccccccagtccgcccacgccgctcagcgtagaccgcccccgctcccgcccgcccgacctccggattcctcgccgcaaaccgcccgccacctccgcccgccaacgccgcccgcccgacctccagaatcggctgcgcctgctcgaggagcgcgcccaggaggcgatcttagcgtcttgcagggatgttctacgagcctctgggttccggttcgaggacgcgtgggccaagatctcaaaggaccgccacaacaaccgcggtgctgcggaggacgcctccgcgctcgccaactcccttggcgtgctttgcaaggcctgcaagcttgaggcggctatacctatctctaccatcatgaatagagagagagatagatag

SEQ ID NO: 39612 - DNA, 147 bp, Zea mays
  Peptide Sequence Number=SeqID_81391
atggccatcgcagggctgcgcctgctcgaggagcgcgcccaggaggcgatcttagcgtcttgcagggatgttctacgagcctctgggttccggttcgaggacgcgtgggccaaggtgatcccaggggattggatgcttaagctctaa

SEQ ID NO: 39613 - DNA, 774 bp, Zea mays
  Peptide Sequence Number=SeqID_81392
atgagtgcctctttcctctttcatcttgtctccgcaccgccagctgccaaaccgtcgcaccgcctggaccaccgtcttcagatcatcgccgtcagggactatcgcctagaatgtcgtcgccagggactgccgccgggccccagcccgcaaccgacgacgcctagagccctagagatgagttcctcgtcagatggaatcaaaaggttcaaacaacacattgctgggggttttggtgatgtggaaaagtgcccaaaagcacctgaggtagttaagaaagagatagcagcctacttgacgaagatacaattggaaaatgaagaggaaggttgtcacggacaatggagccaacttcaaggcgacgagaagaattctaatggagaggatcccaactctattttgggcactcatgcaaaggcacaagcagggtctaagtcttttgttagtgatgagtggcatcaaaacaagttgcctgccaatagtgaaggccaacaagttgaaaacattgtcctttctattccgttttggacaaagttggaaaaatgcttacaagcttcacaaccacttcttattgctcttaggatagcagatgggaatgaaacaccaccagctcctgggatcatggcagccatggatgttaataagtgcaccatcaatgattcttcaaaagacaagccacaattacttaaggagatcatggattgctatgacaagagatgggatacccaaatggagcaaaagttatatgaggcagccttgttcttgaatctagcctag

SEQ ID NO: 39614 - DNA, 510 bp, Zea mays
  Peptide Sequence Number=SeqID_81393
atgagtgcctctttcctctttcatcttgtctccgcaccgccagctgccaaaccgtcgcaccgcctggaccaccgtcttcagatcatcgccgtcagggactatcgcctagaatgtcgtcgccagggactgccgccgggccccagcccgcaaccgacgacgcctagagccctagagatgagttcctcgtcagatggaatcaaaaggttcaaacaacacattgctgggggttttggtgatgtggaaaagtgcccaaaagcacctgaggtagttaagaaagagatagcagcctacttgacgaagatacaattggaaaatgaagaggaaggagaactgtgcatctttatattaaagggttaccctatattaaaggggaaaggagacaaacccaaagggttttacaaggcagagatcctgccaaaagaacaaaaaggaaaagaaaaacaacacaaaaaaacagaacaagaccaagggtctagatgtctaaggacccaaccacattcaaagacctag

SEQ ID NO: 39615 - DNA, 492 bp, Zea mays
  Peptide Sequence Number=SeqID_81394
atgcccccggagctaccctcgacggagtccgggatgtctgcacagttgtatgctgctgcacagcgtgcgcagcagcagtgcccgcacatcgcctgccaggcggcgcgtcttatccgcaataaatgcagaggacgcgcggcccaggagccttacgttagggtccgcccgttggcttacatcacgggcagtcggccacgcggcagcatcgggactccgcctgagctgggagcggaagcgtacgtggtatggtccggacacgtgtcagctccggacccccgcctagccttggtcaaggcctgggtattctttgtcccagaatctcgggaccttgctgtgagtggcccggaccctgcacaggggggtccgggacccgtcccaggggtccgggcacgcctgtggaggttctggaccttgcccggaggtccggtctatacgtggcggccctggagctgtccacgtggtggggtcgggtgctgttcaccgcgcgactag

SEQ ID NO: 39616 - DNA, 342 bp, Zea mays
  Peptide Sequence Number=SeqID_81395
atggcgccccttgagccgtccacgtggtggggtcaggtgctgttcaccgcgcggctagagatcaccgcacgggcagcgtgtcttcatactgtagtaaggggtacccctgattcagggtaccgacaggcccccgggcctgcctcaggggaggatacgagcctgcagaggtggtcgccgctactggtgaggctgcctagtgcagaggtggttgcctccgctggcgagccgctcggagtagaggtggtcgccgccgctggcgagccgtcggtgcagaggtggccgcctcagctggcgagccgctcggagctagctacccacgcgaccctactggtgtggaggtag

SEQ ID NO: 39617 - DNA, 423 bp, Zea mays
  Peptide Sequence Number=SeqID_81396
atgcccctgtggccgcaatctgcccccgacatcctctctctctgcttcgctcccctcccaggatccgcaccctccatcaacgcgggcggaagccgcaattatatcccgcataaaccatctgctctcccctccttcacgcaaccgacctgtctcctcacccctgtttgctgcgaagcacagctccgtcaccactctctgtgggcgacgaagatggtgtccgatggtgggtactccgccctcgacgaccccaaggcccctggatccatcccagcggtcaccgggacagatccgcagaccatcagtttcaccgactccaacctccagactttctcgtcgttcgaggccaggggcaagatcgctagaacctaccgaaaaacagtgccaccgtcgtcgaccacctcgcctcttgcctccatgacctga

SEQ ID NO: 39618 - DNA, 519 bp, Zea mays
  Peptide Sequence Number=SeqID_81397
atgcccctgtggccgcaatctgcccccgacatcctctctctctgcttcgctcccctcccaggatccgcaccctccatcaacgcgggcggaagccgcaattatatcccgcataaaccatctgctctcccctccttcacgcaaccgacctgtctcctcacccctgtttgctgcgaagcacagctccgtcaccactctctgtgggcgacgaagatggtgtccgatggtgggtactccgccctcgacgaccccaaggcccctggatccatcccagaacttattttggatgacatgaaggacaatgaattcgtgcagggcttagattccaagccaccttttgttgatctctcagttgggactcctcaagaagatgtcaatgactctaaggaacttgacaccaccatggagcctgaggatcttccagagacagaggatgatgcatctgcaacagagaaatttgaatctaaatctgttaaatcatctgcacatgttaacaacgataactttgtgggagatgtgtag

SEQ ID NO: 39619 - DNA, 540 bp, Zea mays
  Peptide Sequence Number=SeqID_81398
atggagcacgggttgggcaggatccccgaggccctcgcctgccttcgcgtgctggacgccgcgcgcacccccgccgtgctctgcctcccggaggccagcgccgtctggtccaagaaggcgctggacctcggccccgcgggcctcatactccccgccatcgagtcccctgaggccgccgctgaggcggtctcccactgccgcagtgccgctacccgccgcgcgggaaagcagaatgacccgtcggagcagctcaaattgaggggttaccatatggtagctggcgcagtggacattgctatgttccggaaggcgacattggatgatgtcaggctgttccgagaggcagtgatggagatcgacgaggaggatgatgaggatgagaaatgtgagaaggaaaatgacgggtactggagtgaccgaattcttatcaaagctcgtgatgttgctaggagcagtgctcagaatagcttgtctgaaaggaataatttgaaggctatgggtcactacggtctcaagggtagtttctttagcattttataa

SEQ ID NO: 39620 - DNA, 3402 bp, Zea mays
  Peptide Sequence Number=SeqID_81399
atggatcataacctcgacgccgttatcattggcgccgagggggctggcgtcatagatcttggcgccgacccccctgatagcaccggaccccaccgtcaagggggcgcagatctggctccgccgaggcgaagagcaacggcaaaccggacaaggagaagaagggcggcggaggcggcacgccgccaacccccaaggacagcaagccgcgcaagccggccgtgccccaaggcgagcgccgccggccatggcacgccgcgcgctgctgacaagtcccccggctcggggtcggccgaccgcaaggcgccaacgcccaaggccgccgcctctcgcctcgctacgactccagagaaggggaagcccgcgaagccgccgcaggagcagcacgcgcagcttgccgcgatccgagaagagctcgtgaaggccaaggagcagttggtggagaacgagaaggagaagtgcaaagtttttgctgagctggagcgtgccaagaaggtggctgatgaggccaatgccaagctgcaggatgcgcttgatgtgcaaaggagggctattgaggcgcaggaggcagacaaactccctgccagagagtcggagcaggcaagcatccatggccagcaggaggctgatgacgctgtgctgcggtcgacagtggagcagctggagaaggccaggtatgagctggccgacgcaatcgatgccaagaatgaagccctcagccaggtagatgatgccgttagggcttccgaggtgaaggcccaggaagttgagcatctcactgtagaggttacgcgcctcaaagggctggttgattccaaggtggatggcaacaggaagaagactgcagagaggattcagaatcttgaagaagagaactttgcattaaagcttgagcttgagaaaaaaaaggctgctgaagaaaaggcagttcgattggagcgcatgattgatgaacttaagagtgatgttgatgatgctaggaattttggttccaagtcaaagcagttagctgacgaatggcagaagaaggcacagcttctcgaggtcagattggaagaggctgatcagtctaatattttgaagggtgaatctttgaattcagcaatggaagaattggattcaacaagtagtttgcttcgtgacagagaatctgaagttgctgctcttcgtgacaaagtcaggttcttggaggatgagctgacaaagctcaagagtgatattgttgtgtccggccaacgggcagatgcagcagagaaagagacgacggatctatggacagagattgaagggcttaggctgaagctccatacagtggaagaagagaaaatggaggccttgaacagtgataagaatactagctcagaaattgagaccttgaatgaacagaagaaccagctggctgacgagcttgaggctagcaaagatgagcttgagaaaattaagaaggcaatggagggtctggcctcagccttacaggaaatgtcagctgaatccagagaggcgcaagaaaagtaccttctgaaacaagatgagatggagcgtgctcaggcacaggtagaggagcttaacttgagtctgaagaatattaaggagaactatgagctactgcttgatgaggcaaactatgagaaggtttgccttacgaaagcagttgaaagactggaagcagaagctaagagagcgcatgaggaatggcagtccaaagagctaagttttgtcagctctattaagaattcagaagaagagatagtcgctgtcagggttcaaatggacaggaccttggaggttgttaaggagaaagaaaatgaaaacacagagttgcaggagaagctgcagcagcttgaatctcagctaatggaagcgaacagaatcagagaggaaggcaacactgaaactatccgatggaaggagaacatattagaccaagagaatgaattacagaacataaaacaggagaatgacgacctgcaggcaaaggaatcagcagcttctgagaagattaaggaactctcttcccagcttactaatgcaaaagatggcacgataaatagtaacaccaaggatggagataatgagaaggggggcactgaagaggatgatgaacctgttgtagtagttgccaaaatgtgggagaacagcaagtttgctgactatgattcagctaaggaggagaatgatggcgactcacaggttgatttggaatcaaacaagggggatgcaggtcttgacagcaatgggttgcactcaactaaggagaacagtggcagggcatcaccaactaaacagcaccagcagtataagaagaagcctttgctgaagagattcggtggcgtgcacagccacagcgttctgccgctcaccccgcggccgcatcccggccaaccctcccgtggccaccaatcaacgcccgtggccaccaatcaacgccgcgccccacccgcgaccttccttcaataccgcatcacggaccggcttccttgccgtgggcggcgctcctccgccgcggcatccgacctcctctctcccgcgccctccctcaagtcccgcctcgccgacggagacaccctgtacgttctgttcctcctctccttctcccgtaccctcgccgagctcgccgccctcgccggctacgactacgtcgtcgtcgacatggagcacgggttgggcgggatccccgaggcgctcgcctgccttcgcgcgctggacgccgcgcgcacccccgccgtgctctgcctcccggaggccagcgccgtctgggccaagaaggcgctggacctcggccccgcgggcctcatgctccccgccatcgagtcccccgaggccgccgctgaggcgtgccgctacccgccgcgcggggtccgcggcgctgcacaccccatcgtccgcgcctccgcctacggcttcgatgactcctacctctcccgctgcgaggacgataccctcgtcatctgccaggtcgagaccgccaccgcgatcgcgaagatcgacgccaacgccaccgtcgacggcgtggacgtcgtgcagatgggcccgctcgacctgtcggctagcatgggatacctgtgggacctcgggaacaggaaggtccgggctacgctgagggaggccgagaggaaggtgctggaggccaagaagaagaagaaggcggcagcagcctcgggtggcaatgctgcttacctgggcggaaagcagaatgacccgccggagcagctcaaattgaggggttaccatatggtagctggcgcagtggacattgctatgttccggaaggcgacattggatgatgtcaggctgttccgagaggcagtgatggagatcgacgaggaggatgatgaggatgagaaatgtgagaaggaaaatgacggaggatctattcgagatcttaaggagcccaagaatttctag

SEQ ID NO: 39621 - DNA, 279 bp, Zea mays
  Peptide Sequence Number=SeqID_81400
atggcagaagagcgccaactcctgcgaggtcgcgctcctccaacagcagcaagaagaagacaagatcgacagcaccgccgcacaggaaatgaaaagcgcgagctccccgacgccaacggtcaagaaggcgaaccgccgcacaagaagcgtgcaaccgtcctgcgattattcgcccttccatcttcaccacaaccagcggtcaaagaggcgaaccgccgtgcaaggagcatacaaccatcccgcggttacgcgccccctcagtttcactgcaaccagtag

SEQ ID NO: 39622 - DNA, 435 bp, Zea mays
  Peptide Sequence Number=SeqID_81401
atggctactgcccgagggatgaactcctttttaaaggcagatttcctcgctcgtgccccgaagcgtcacgagcaaagtctcccccgacgtgcgccagggttcccattctatgacatgggggccaggccgcacatgtcgtacaagctggcccgaagcgtgaagaaggcgaatcgtcgcatagggagcgtgcaaccgccctgcggttccacgtccttccaccttcgccgcagccagcggtcaagaaggcgaaccgccacacaaggagcgtgcaaccgtcctgcggttattcgcccttccatcttcaccacaaccgcacaaggagcatgcaaccgcctcgcgattgcgcgcccccttagcttcgctacagccgacggtgcaacctctagcatgggggcccgggcccacatgtcatacatccggcgcgtcggttcctga

SEQ ID NO: 39623 - DNA, 255 bp, Zea mays
  Peptide Sequence Number=SeqID_81402
atgtttccggcactggtcctaaagaccgataaggacaacgctagagacattgacctagagtcctcacatcgtcatctcgatgttgaggctaggtatagccaaagacgtcggataggaggtccgagacttcgagagcctatcgtggaggtctatgatcttaaagagtttctaggtgggcgaccgatgttgatggcctcggcgaagctgaagaggtgcagcgcggcgccattgatggccttggcgaagggggtgtga

SEQ ID NO: 39624 - DNA, 978 bp, Zea mays
  Peptide Sequence Number=SeqID_81403
atggcggcagacgtggcaatggttggcgatggggtaaacgactccccagcattggcggcggcagacgtgggcatggcgatcggtgctggcacagacgtggccatcgatgctgctgacatcgttctaatgaagagcaaccttgaggacgtcatcactgccattgatctctcgcacaagaccctctccaggatccggctgaactacgtgtgggccctgggctacgtcctgggcatgccgatcgccgccagcgtcttgttccctttcacgggcgtcgtctgcccatccagctctacaagaaatcgctgcacgttgaagacgcgcccaggcccggggaggactcaaatttggtgtgactgcgaagccttatcttattctttctggcaggcattgatccagtacactgatgcggctactgctttagctgctagagaatccttagatggaaggagcatcccaaggttgtctcttgcctgctcatggattcagcaggcagttcaaaaggttgacctatttgggaatctctggatctatgcttcagttacaagatcaacacatccacaagcaccagttcaagctgaaatgccggccgatgtacatagagaggccagggaaggtgtcctggagtttgagagagcttttagggagaggttctctgcctgcacattagctgctaagaggcatattgactccactaccatcttcgatgtccaaggtgtgatttggattttgagcagtaccagtttattatttttgttaatgcaagccttgaagcgtatcaaactctatgaactgaagcacaaagatattagtaaagccgagaaggacatcgttctcagctcaacaagtattgtgatgcttggtatttttgttcttcacacccccttcgccaaggccatcaatggcgccgcgctgcacctcttcagcttcgccgaggccatcaacatcggtcgcccacctagaaactctttaagatcatag

SEQ ID NO: 39625 - DNA, 507 bp, Zea mays
  Peptide Sequence Number=SeqID_81404
atggactccactgtcacagcccaacatgtgactaaatttcctcactacagtctacaccctgtagtagtattcttacggacgaatcaaaccaaacatcaacccgggatcaggccggccgatgtacatagagaggccagggaaggtgtcctggagtttgagagagcttttagggagaggttctctgcctgcacattagctgctaagaggcatattgactccactaccatcttcgatgtccaaggtgtgatttggattttgagcagtaccagtttattatttttgttaatgcaagccttgaagcgtatcaaactctatgaactgaagcacaaagatattagtaaagccgagaaggacatcgttctcagctcaacaagtattgtgatgcttggtatttttgttcttcacacccccttcgccaaggccatcaatggcgccgcgctgcacctcttcagcttcgccgaggccatcaacatcggtcgcccacctagaaactctttaaaatcatag

SEQ ID NO: 39626 - DNA, 978 bp, Zea mays
  Peptide Sequence Number=SeqID_81405
atggcggcagacgtggcaatggttggcgatggggtaaacgactccccagcattggcggcggcagacgtgggcatggcgatcggtgctggcacagacgtggccatcgatgctgctgacatcgttctaatgaagagcaaccttgaggacgtcatcactgccattgatctctcgcacaagaccctctccaggatccggctgaactacgtgtgggcactgggctacgtcctgggcatgccgatcgccgccagcgtcttgttccctttcacgggcgtcgtctgcccatccagctctacaagaaatcgctgcacgttgaagacgcgcccaggcccggggaggactcaaatttggtgtgactgcgaagccttatcttattctttctggcaggcattgatccagtacactgatgcggctactgctttagctgctagagaatccttagatggaaggagcatcccaaggttgtctcttgcctgctcatggattcagcaggcagttcaaaaggttgacctatttgggaatctctggatctatgcttcagttacaagatcaacacatccacaagcaccagttcaagctgaaatgccggccgatgtacatagagaggccagggaaggtgtcctggagtttgagagagcttttagggagaggttctctgcctgcacattagctgctaagaggcatattgactccactaccatcttcgatgtccaaggtgtgatttggattttgagcagtaccagtttattatttttgttaatgcaagccttgaagcgtatcaaactctatgaactgaagcacaaagatattagtaaagccgagaaggacatcgttctcagctcaacaagtattgtgatgcttggtatttttgttcttcacacccccttcgccaaggccatcaatggcgccgcgctgcacctcttcagcttcgccgaggccatcaacatcggtcgcccacctagaaactctttaagatcatag

SEQ ID NO: 39627 - DNA, 2235 bp, Zea mays
  Peptide Sequence Number=SeqID_81406
atgtatgtttgggcggttacttcctacggcgggcagccgtctgtggaggtcttcgccaagaattattgcctgcattggcagaaaaggaaaataggaaataagattgcacaatttggatcgtgcaccttcacgccgaggactgggaagacttcggctgaagtcgtggagatagtcccttgtgccaggaacaagtggggcaactggtgggatttttggttctatgtgtctcctggggaagtcgaagacctgcctggcctccctccgaccattctgtgctcacactgttatgtggcgttccctccatttgaggtggcggaggaggacgaggacgaaggggcccttcgtgtggcccttggcacacggctgggtactgggcgaagtgtgcccccgttggatgccgaccagttggtgcaaagtcctgcctttgtggtcgatttacgcggtcggaacccagccgcgtttgtgcgcgaagtggaggccgaggccgcgaagattgtaggaaggtatgtgccgaggacggagaccctgcggagttgggatatccacggttcgaatgttaggttgaaccgcgtatttgagttgaactgtttgccgtacgccggctacccaggggacgacgatgccgatgctgctgtctgccggggaaaaaatgtggtgacaacggccgacgaaggcccttcgcggggaacagcgccgagcgcggccgccaagaagaggaaattaggtacaacgacagaggggttgagggcttccaaacgttttgctgcggatttgttagagacctgcgtggttcccagggagacgatgtcttcgctcgagcttcgggaatcttccgcgcgaatgctgaaggttaccgggggtcgctggcctaggaatgttccgattcctcggacggctggcgaggacatgtttacatctcgattagctcgtgagatgaaaattttcccttacggacggaatgttgttgctgttgtatcggcagtgatggagaagggtcgtcaagacgcgccgcggaagcgccgggcgttcgccagagttggggacccgcggcgcggagtcaaaatagcgcgggcgagcgtgaagcctgccgcgtccatacaagagcgaaagctgccctcgccaccacgcgctgctgagacggcggtgggtggcgccgaagtttccatggatatttccgtggaagactaccttgtgggcggggtcgcgatattcgacgcccacacagggcggggacctgctggagcagagtccgggcaactggctgttgtcccggcgtcggtgtcggctggcccggttgttgtggcagccggggcaaaggggtcttcacaggacccatggtccaggttttgtgccagcggcgaaattgcttcggccgccaccgtgaaggacgtggctggctcagttgcgcgacagctgaaacacgtggccgccttcgccgagcacattgcgtcgggggcgttgacctcggagtttgctgccgaaaggcggcgactcgaggggaggattgaacgcctccgaacgcagcatactgaggctgtgcgagacaaatcggccgcggaaaacaagagccgcaatttgctggagaagctgttggtggcggaggctgaaaaagaggacctcggccgccggcttgcggtggaaaaggaagatgcggacagggcccgcacagaggcccaggctgcccgtgctgaggccaacctcgccctcaagcgcgctaccgacgcggagtcggggcacaggagtctgcgcggctatctggacaaagcggaggcctccacccacactggggtcgaccgagcacacgcgttgctcgtggatgcgtaccgggagcttggtgcgcgtactgccccttttgatacgtctggcgaggaggtgggcctccgcttcctcgggtggctgcaggaggagttggagctactctcgtccatcgtgacgggcctcatgtcctttgcctcgctcattacctgcgagggggctgcgaatgctttgtcccgtgagggatgcaagcacttcgaagtttttgactggtccaacgaagacttcgaccgtggaatcttccaggtcgaagacgaggtgctaaagcggtccgctggggcgctttacgacaggatgtggggtcctcacagccgcgacaatgtctgggagaggtctgaccgggcgctggagcagatgatgaacgatgaagaagtcgacgacttcggtggcctggaaagctcggtgattgagagcacctag

SEQ ID NO: 39628 - DNA, 536 bp, Zea mays
  Peptide Sequence Number=SeqID_81407
ccttcgtctgcgcaaggagaggacgaggttgtcgagcgaagggtggcgtgtttgccttcgccccaacatttgccctccgagggaccagttcaactaagtcagctgttaccgaagaccacccccacatcaagcagaccgcgcgccgccgccgacagtacgttgcaatgtcttcttcttcgtctactgcgagcgcgtcgccggccgtgccatcgtccgaggagaccttgagtgatttggcggtgatggagttgcagcctagccataccgtggaatttggtacttcgaggatttcctcagtccacgtgctagagatgcagtggcttggttactttggtaatggtgtcgggcgggcaccgggtgcagaggaggtcctcgagcctgaaggcgagttagtggtccaccagttgatgcctaacgccgtggttgcactggcgaagtatgtctgggcagttacttcctacggcgggcagccgtctgtggaggtcttcgccaaaaattattgcctgcattggcagaaaaaggaaaataggaaataa

SEQ ID NO: 39629 - DNA, 210 bp, Zea mays
  Peptide Sequence Number=SeqID_81408
atgggggagggggcgagggcgagtggggctcggggctcaagtggccaggggcgggtcagttgcgagctccacgcgcgacgtgggcgcggagaaggcgggcgcgcgcagctcggcggcggttacgcggggacgacggggctgacagcccgggcccgcgagcagagagagaggggagagcggaggcgggcgcgcgagaggcggctgcgctga

SEQ ID NO: 39630 - DNA, 426 bp, Zea mays
  Peptide Sequence Number=SeqID_81409
atggaggcatcggagatacggggtatggtccctcgtaccttggtgaagcgggagatgaaggcccagagagtttccccgggctcctgcctcactgcatggagccgcctcccgcgcgcccgccttctccgcgcccacgtcgcgcgtggagctcgcaaccgccccgcccttggccacttgagccccgagccccactcgccctctccccctcccccatttgcgctccagcagacccctcttccacctctccctcgctgcgcgcacgccagagcgccgccgccacaaatccccgccgtcccgagctcgtttcccggccaccgttggagctccgccgtgtccgttgccacgccgcggaggtccgccaccgccgccccaggccaccgtcgcgccattgccgtcgcggaggagtccccggagccaagccttgag

SEQ ID NO: 39631 - DNA, 483 bp, Zea mays
  Peptide Sequence Number=SeqID_81410
atggaggaagtgacacatagaggcgttcttgaagaacccgcacgtgaagcatgtacagggcctccaaacttcggcgccgatgacctaggcgtcactgagcacgtggtcagcggtgaagggaggccagtggttaggactaggcattcgggacaccgacacgtccgtcctactcactggttcggggccgcccggagcaggaaccacatgccggcctcgtgcgcggggtgtggcggcaccactgcccgcgccggcggtggcgctgaggacgaggacgacgcaggagcagaacgccagacgccgggagcaatggagcggacgccgggaggcgggaccagtggacggcgagctgtggcaggcggcggccgagcagtggagactggagaggctctagggttcgctggtggagtggtgggcgcctgggcggtctcggtctcgggctctcggctgcctgcggaccggagggaggaacgaccaggtgactag

SEQ ID NO: 39632 - DNA, 366 bp, Zea mays
  Peptide Sequence Number=SeqID_81411
atggcagctggaaaatcctccagccaaaacaggctctgggccttcaagaaagacttcggccatggaggaagtgacagaggcattcttgaagaacccgcacgtgaagcacgtacagggcctccaaacttcggcgccgatgacctaggcatcactgagcacgtggtcggcggtgaagggaggccagtggtcggagaccgtccccccagggcgaggcgccctagtggagcgggcgaagcacgggcgactgcagggacgggggcgacgacggcgctgtcgggaggagacaggtacggcgtgggagggagagtatcagtgacggcggttgcgcttgtgtttggtgcgtggaatagggtttggtttgtttag

SEQ ID NO: 39633 - DNA, 630 bp, Zea mays
  Peptide Sequence Number=SeqID_81412
atggccggttcaaaggatagctctgaagtttccaccagcaatatcatcaagccgacatgggaaaccttgccggctgaagaacagctcctattcgaggagcgccaggatcagctgatcaaggaagcaaaggcaaaattcgtggccgacttcaaggtggacaggaacaacaaagtcgttcagcaacgggcgatagatctggcttcactccgacctactacgaatatccctaatgtaagtgacaccaatgagctccaatctcttaaatcttacatagatgaacacggggcggaatccagtgggggcatcaggtcggactccggtggacgcagggacgcagtccggtggccggtgggctggcaggcggagctcggcgcgttgcgcgggacagggacggggcgggcgacagtcgccactcggcgtctcggcctcggcggacgacgggagacactcggcgccggcggaaggcacaggcgtggccactcggcgtctcgatctcggcctcggcggacggcagaaggcacaacggcgtcgcgacttaacttcaggcgacggcgattgtgtcctgagggagtgagggttagtgatggattggaatttggctgggacctagagccacttgggctgggctag

SEQ ID NO: 39634 - DNA, 654 bp, Zea mays
  Peptide Sequence Number=SeqID_81413
atggcccgatggtggcggagctccatccgtggcggcgccatcgccagcgagcagcgcgcccagggccccgttccaccaaccaccgcatctcggtgctacgcgatgcaacggattccacgaatccaacagaggacttaccagagcgggagatgtcccagacgagtgtccacggcggacagcggcccgcggcggaggcacgatctcggcgacgaatttcagcgcaccacagtcgatctccgcccgcggcgccccaacggcaaccaacccgaggggaagagcaaggcggcccggttaatttatagtgccatggagtcgaatcaggcgatggaatcgctatggccgagaggggaaggagctgactacctgggcccgcttggaaatgagaagtgcgcggctaacacaggggatgtggggctgacgagcgaggtcccattgtcggtggagcgcggggaaggctggccgatgggccccacagcacaaaacagagacaaaaaggcaacaaacaatgtgaaccctacaactatctctcagggtggtggtggaggtggtggaatacaaattatgaagcgtcttaccccgctcttacaacgttcttaccagcactgcaggtggcaaacggtgaccggtgtgactgtccaacgagcgtgggtgtaa

SEQ ID NO: 39635 - DNA, 228 bp, Zea mays
  Peptide Sequence Number=SeqID_81414
atgtccggtggtgcaccggacactgtccggtggcacaccggacagtccgcacaaaatagagacaaaaaggcaacaaacaatgtgaaccctacaactatctctcagggtggtggtggaggtggtggaatacaaattatgaagcgtcttaccccgctcttacaacgttcttaccagcactgcaggtggcaaacggtgaccggtgtgactgtccaacgagcgtgggtgtga

SEQ ID NO: 39636 - DNA, 609 bp, Zea mays
  Peptide Sequence Number=SeqID_81415
atgattggattcaggacagatgacaccactgaagcgacagctatgaagaccctgacgactttctgtggctaccatcccctggagatggtgatgtaccccttgggactcttccctgctaagaagaaggatgaccccatatggtgcaaccgcgtgagtcacgtgaaggacgtaagggcgatgtatcctgacttggttggaagggtcactattcagtgcatgagtgcactgtaccgtcttcaggccagagcgacgctatggcacatcttgctaaccttgctcaaaccaccaagctcaccctcgacagccgagaggacttcgtggtcgactgtcacacccggctttaaggaacaaagccagaggttgtaccctttacccacaagtcatgttacccatcagccaaggggtcgcgactcccatacacctctacctaggaagcgcggcagggcaacactacaaggcctttacaaagttccactagcttccaaaaacccgctacagtttataggaagctgcaatgcagggttcttgcctgaccgccatcgcagcaaaatcaaccaaggacctccctacactgaccactcccctactgcccttgcccctttcgggtaa

SEQ ID NO: 39637 - DNA, 417 bp, Zea mays
  Peptide Sequence Number=SeqID_81416
atgggtcgcgactcccatacacctctacctaggaagcacggtagggcaacactacgaggcctttacaaagttccactagcttccgaaaacccgctacagtttataggaagctccaatgcagggttcttgcctgaccgccatcgcagcaaaatcaaccaaggacctccctacactgaccactcccctactgcccttgcccctttcggaacattattgggtaaaaagtggtcaagggcacaacttgcctgggacttgagattccagctctggcctgggcgcactattatagaggaaggcagggggctcggggtaaatgtccacatgacacagacagatctaggcatggacagagggttgaatatagggatctacggggtttcttttgtaaatctgccaactgaagggggtatcgactga

SEQ ID NO: 39638 - DNA, 420 bp, Zea mays
  Peptide Sequence Number=SeqID_81417
atgtcagctgaatttgcttactcgggttggcttgtatcaaggaacctacctgatgtgtttgctgtacagagaaacatgactgagaagggtagacctgttgcagtggtgagaactgagtcaggggagggcttactcggtttatcccttccgcaccctactcatggaaggtgccacaaagagcggtctggttttgagggggcctggactacaaaccctttggtctttgacaactcttacttcaaggaacttctgagtggtgacaaggagggccttcttcagctcccaagtgacaaagccctgctgaacgaccctgtcttccgccctcttgtggagaaatatgctgcagatgagaaggcattctttgatgactacaaagaggcccacctcaagctctctgaactggggtatgctgatgcttaa

SEQ ID NO: 39639 - DNA, 1572 bp, Zea mays
  Peptide Sequence Number=SeqID_81418
atgacgctcgcctccctcgcccgcgccctcggccggatttgtcagcagttagctgactgcggcagtgcggcatcgtcggcagcccttgggaagcccgtcgtggacgagactgtggattggagatacatcctcgccaggccgcagttccgacggctcttctcgaacgacactctaggaagaactacgagaactactaccccaagggtaaaaaggaggtgcagaaaggagatgggagcaaaaagtctgaatcgaagcgtcgagcagatttggaaggttgcagggagtgaagtgtgtgattgcagggaggaacctttacatgaggttcaggtgcagcataggggatgccatggggatgaacatggtctccaaaggagtgctggtcgattcctgttggctataagatattcagatagtatgcagtactcgcgatccaacctatttgggatgcagtactcgcgcaagcgctacttcgtgctcgaggacgccgcgctccgctgcttcaagtctgcgccatcctccaagggcgagttgttttttgtgcttcaagtctgcgccgtcctccaagggcgaggtggattctttcatggtgttcgcagtataagtttcggggttgaccttcaagaaataaggctgatgggtgtactgcagactgggaggaagccaagcagattatgtggtgcagcattatacattgctgcactctctcatgggtgtaattacaccaaggcagatattgtctctgttgtgcatgtgtgtgaggccactctaacgaagcgattgatagagttcgaaaatacagattctggcagcttaacaattgaagaatttctggcaacagctgatgaatctaatgaagagcctgtttcaaaacattcgcccaagtctggagaaattctctgcaaacacaaggataaaggttttgagcattttgctcatggactttgtgaaaaatgctacaataagactagactacatttgcttttgacacttcgtctgattgcccagttcactaaactgtcgggtggactagaaggtggttctgaccctccagcattccaacgagctgaaaagaaaagacttgaagctgctaaaagggctgaagaagctgcagcagctaaggaggcagcgctggaagaatctctttgcgacacacagaattctgaggttgagagtgccatgactcctagaaaggacaagcctcagccgccacctgagggccgtcttcctgatgccaccaagggttctgaccacctgaggcaagtctttggcaagcagatgggtttgagtgatcaggacatcgttgccctctctggtggccacaccttgggaaggtgccacaaagagcggtctggttttgagggggcctggactacgaaccctttggtctttgacaactcttacttcaaggaacttctgagtggtgacaaggagggccttcttcagctcccaagtgacaaagccctgctgagcgaccctgtcttccgccctcttgtggagaaatatgctgcagatgagaaggcattctttgatgactacaaagaggcccacctcaagctctccgaactgggatga

SEQ ID NO: 39640 - DNA, 1296 bp, Zea mays
  Peptide Sequence Number=SeqID_81419
atggaggaatcggacttgggaggtaatctgggtaagcaaacggaagaggataaggctgcgggagaatcaggggatgagggtaagatcgagaggagccaatctatcaatctgaatagagtgccagcagttgctgtagaggcgatgagcacccagggaaactgtgagacgcacggtgcagcagtgccaggaactaaggatgcaggcacaggaaaggcagggcaatccagtggcgatcgacaggaggagaagttacccaagtgtgagcaggtcgactatggaagtgaagttgaaggctgcgcagatgatgagaaccctggcaagagggctgctttagttactttggttggaaatgaatactgcggcgacgaggatgagagagttcaagtgctcaccattgtcaagaaggacgagcatgcagatgacattgtcgaccgtattaatcctggcacagttgcagggtacagtgaagtgaagggtgctgtaggtgcttctgccgccacttctgcggtgcgacctgctggctcccgatcgtcaagtttccatggtgtgactaggcatagatggagtgggaaatatgaagctcatttgtgggacagttcttgcagagtagagggacgtagaaggaaagggaaacaaggaagttatgataccgaggaaaaagcggccagggcttatgatgttgctgctattaaatactggggcgaaaataccagactgaactttccggcaagttcttttcctttggcttcagtgatatctatcagttacatgatggccttatacatgtcagaattacttcagatttcacaatacggcaaggagttggaggacataagggatttgtctcgagaggaatgtgtgacatacttgagaagaaggcagaaagacgggagatggcaagcacgcataggactggttgctggaactagagacatttacctgggaacattcagtatgcagaacatgaactttgatttacccatgcctttgaaaaaaacagaggaagaagctgcagaggcttatgatattgctgccattgagatacgtggcaaaaacgctgtgaccaattttgaccgaagcaactatgtcgataagggatatggagtgcagcgacgccgtgacctcgacctgaatttcacgagtgtaaaccaggtgttggccgcagcgtcggaagagaccaagacttttccatggttccaattcacaacaacttgcaaccagaactacggaactagcgattttacctggtcgttggttgatctctccagctaccatgtgaatctatttacgacttga

SEQ ID NO: 39641 - DNA, 525 bp, Zea mays
  Peptide Sequence Number=SeqID_81420
atggccttatacatgtcagaattacttcagatttcacaatacggcaaggagttggaggacataagggatttgtctcgagaggaatgtgtgacatacttgagaagaaggcagaaagacgggagatggcaagcacgcataggactggttgctggaactagagacatttacctgggaacattcagtatgcagaacatgaactttgatttacccatgcctttgaaaaaaacagaggaagaagctgcagaggcttatgatattgctgccattgagatacgtggcaaaaacgctgtgaccaattttgaccgaagcaactatgtcgataagggatatggagtgcagcgacgccgtgacctcgacctgaatttcacgagtgtaaaccaggtgttggccgcagcgtcggaagagaccaagacttttccatggttccaattcacaacaacttgcaaccagaactacggaactagcgattttacctggtcgttggttgatctctccagctaccatgtgaatctatttacgacttga

SEQ ID NO: 39642 - DNA, 225 bp, Zea mays
  Peptide Sequence Number=SeqID_81421
atgggagaccacgtctcaggttgcgtgaggggcaaagtctgcgggcaggttcactcaggtactaggcttaccgatttaccatatttctcgattcagacttgcaacttcaaaaattcacaactgaagattcagacatctaaacaaagtgatcttagactttatggaaagatcaccaaaaagagtgatcaaagactttttgaaaagcttggcaaaagcactacataa

SEQ ID NO: 39643 - DNA, 417 bp, Zea mays
  Peptide Sequence Number=SeqID_81422
atgcagtacaatggatcaagcagtctcattagctgcgagaagcagacgattcgaatcgagtttttatccttgcaagtgaccgcacttgtacccaccataaccggaatgggagaccacgtctcaggtcacgtgaggggatatgtctgcgggcaggttcactcaggtactaggcttaccgatttaccatatttctcggtagtgtttgctgggggaggtactcgcttggcgagcatccactggcacttagcaaggtcaaaacatgctaatacaacagcgctgtccagatttggacagattcaggcttgcaccttcaaaaattcacaactaaagattcagacatccaaacaaagtgatcttagactttctggaaagaactggacagattcagtcttcatatttgaaacattcataacttaa

SEQ ID NO: 39644 - DNA, 318 bp, Zea mays
  Peptide Sequence Number=SeqID_81423
atgggcgggtccggtgccgccacgtgtctggagaaagtgacatactctgaggcatcaccaataacgtattctacattggcaacattccagaccttatgcctagggtggctcgcaaggagtagggtaatgatggtctcctgtagcgtagtcggcccgaggccgaggtcgggcgaggcggtgacttctcctgaggccgaggctgagtcttaccctggtggttggcacagtagtcggaatggggcgaacagtgatgttatcctgtcagaacggtcagtgaaagggcgaagtgactgtggtcatttcgaccttgccaactga

SEQ ID NO: 39645 - DNA, 924 bp, Zea mays
  Peptide Sequence Number=SeqID_81424
atgtcccctgaggctattgtgcgtgatgatgttgctaaagctaccaaagctaaaactgagaacaacaagaatattaaagctgttggtcggtcagtgaaagggcgaagtgactgtggtcacttcgaccttgccaactgcggcgcacgtgtcaggataaggtgccagacaatcttcgcattgaatgcgcctgcgatatggtcggttggtaaggcgatttggccaaggttgcttcacaacgaagcctgcccgagctgggcttcgggcgagtcgagggtgcgcccaccgcctgaggaagccctcgggcgaggctggtttgttgacgctgttgatggagtggtcaccggcgagccacctggagtttgttatcccgcaggccctctgaaccttcggccgctctgcgatgagctggagccggaggtggcggtgtcggcgtggatagagacggagtcggctcgaaaagaggcttcgtcagcccgggagcaggcggcttcccaggccgaggaagtgcagcagcggcggctggagctcggccaggtcatccgcgagcgggaccaaccccggagtcacgctgccgaggccatgagccgggctgatgtcctcgggggacagctggctgaggctacggagcgggcagccgaggcgtccgctcgggccgggacccttgcggagagcctggccgtgagggcccaagcgcggtgctggcgtcctcccttggagtggagatccttccgcccgtatcgccgtccgaggctgggccaggttccgccgagagtggaaatgtcgccgagggtgctgctgctccccctgccgatgtctgaacctgcaggaatagtttgtctgaaaaccacttatccgagcgagagttacttttcgcggaaggtgatgagtgaggattctgttatcgatatagtcgagaaggcatga

SEQ ID NO: 39646 - DNA, 612 bp, Zea mays
  Peptide Sequence Number=SeqID_81425
atgggcgcgcagaaatcgggcttcacaggggactccgagcagcgcgcggttgaggaagatggagcagagggcgcgacggggaagctccatggctgggcgggcaccggcagggaagcagggagctcagaccatggggatttacctgcgcaggggcgagcgccatgggggacgagagagaaactgggggaagggagctacgacgcgacggcgatagcagtgctccacgacgagcagagcgccgtgcaaaggagtttggctggtcacagcttccatgggagatggcggtcggttgcagcttggggcgaggtggagcgcagacaggcgacggcggccatgggcagagctcagcggctatgggagcttgaaggaggaacgagcagggagatgggagccgagctagagcaaggtctggcagccggccatgggaaggtcgccgggcaccaagggaaggagcaaggccgagcaggagaagccggccatggagaagagctggaaaaacgcagatatttttgcgtccggatttttagcaatgcccactggatcgatacattattcaactacgtatcccatttcccaaatcttgaaacgaaaatccgaggactaccgacttga

SEQ ID NO: 39647 - DNA, 686 bp, Zea mays
  Peptide Sequence Number=SeqID_81426
gggataacgtgtttgacgactcgacggcaaacgacgcgacgacgagcagcggagagaagcaggcggccgagctaggagggaggctgcgcgcgtggggaaacggcaagcgcgatggccagggagttcggctgggactgggaaactcgcgctcatcctccgacgagcacgggccgaggaaaaccgagcgccattatcaggcaagggatggagctcagcgaactcccatgggcgcgcagaaatcgggcttcacaggggactccgagcagcgcgcggttgaggaagatggagcagagggcgcgacggggaagctccatggctgggcgggcaccggcagggaagcagggagctcagaccatggggatttacctgcgcaggggcgagcgccatgggggacgagagagaaactgggggaagggagctacgacgcgacggcgatagcagtgctccacgacgagcagagcgctgtgcaaaggagtttggctggtcacagcttccatgggagatggcggtcggttgcagcttggggcgaggtggagcgcagacaggcgacggcggccatgggcagagctcagcggctatgggagcttgaaggaggaacgagcagggagatgggagccgagctagagcaaggtctggcagccggccatgggaaggtcgccaggcaccaagggaaggagcaaggctga

SEQ ID NO: 39648 - DNA, 267 bp, Zea mays
  Peptide Sequence Number=SeqID_81427
atggggtgcaccggaggtgcacccaatgggtgtagcccccgaccttcaaatggatttttgaggataatccattcgaaggtcttccttttgtgtctctttgctgaaaattatcttctcttgtttgtagaaatcggcatgaagctattcgcattatgctttggaggtattcacttcgtgccctgcacagatgtgaccgttttgaaaaatatactgataattcctgggcgtcccccaatggtgtgggcaagggacggcttggtgcgctga

SEQ ID NO: 39649 - DNA, 756 bp, Zea mays
  Peptide Sequence Number=SeqID_81428
atggtcgcgttgaaagctagctccgagcgacttgccagcggcggcgaccatctccgcaccagcggcggcgaccacctctgcaccagtggcttgccagcggtggcgaccaccttagtgtattcactgcgtgccctgcgcggatgtgaccgttttgaaaaatatactgataattcctgggcgtcccccccaatgggtgtgggcaagggacggcttgaaataacgctcttgctcctctggttttttcacatctcttcgctattctttattgcatccttctcctcccttctgtctgcttccgccgtgggcaagagtaacaagcgcaagcgcgagccgactcctccatcggaggacttcggcgactcggaatactcggaggaggagttctcctccgagtccgaggggtctccggctcccgtctctcccccggcgtcgtctgatgattcagacgactcccaggggattgccgtggaagtctggacgtacatccgggccgtcgagcgctccgggctcgagggctcggatgagtcggagttctcctcggaggaggaggactcggacggcggcgagggcgaggacgacgacgacgacgacggtggcgacggcgatggcgacggtagcggcgggggcagcggcaggggcgacgggagcaagggcagcaccagaggcggcagcagcacgggcagcacaagaggcggcagcagcaaaggcagcaccaggggcggcggtggtggcagcagcagcaaggccagtggttaa

SEQ ID NO: 39650 - DNA, 573 bp, Zea mays
  Peptide Sequence Number=SeqID_81429
atgcccaacgtgatggatggtggcgaccgtctgagacaagggctgatgcccgactctcagctcagcacttccatcattgtgatgtgcacaagggtgtccaacgagctgggagcccggaacatcgccaacgccaggaaggcgctcaccgtgtcgctggcgctgtccctgatgctgggggtggtgttcctgctgctactgggcctcggccatgacctctgggtgcgcctcttcaccaccagcgaggccgtggtcagcgccttcgcctccatgacgccgctgctcatcggctccgtcgtgctggactccacgcagggggtactctgcggcgtcaccaggggctgcgggtggcagcacctggcggcgtggacaaacctggtggccttctatgtcatcggcttgccgctcgccatcctcttcggattcacgctcgccttccaaaccaaggggctgtggatggggcagatatgtagcctcctctgccagaactgcgtcctcttttttatcaccctgcgaaccaactggcaggagttagacctgaccatgttcaacaaggacaacgattttgtctgctag

SEQ ID NO: 39651 - DNA, 630 bp, Zea mays
  Peptide Sequence Number=SeqID_81430
atgcccaacgtgatggatggtggcgaccgtctgagacaagggctgatgcccgactctcagctcagcacttccatcattgtgatgtgccaaaacaccgaagccatatcatacatgatcacctatggcttcgccgctgtcatcagcacaagggtgtccaacgagctgggagcccggaacatcgccaacgccaggaaggcgctcaccgtgtcgctggcgctgtccctgatgctgggggtggtgttcctgctgctactgggcctcggccatgacctctgggtgcgcctcttcaccaccagcgaggccgtggtcagcgccttcgcctccatgacgccgctgctcatcggctccgtcgtgctggactccacgcagggggtactctgcggcgtcaccaggggctgcgggtggcagcacctggcggcgtggacaaacctggtggccttctatgtcatcggcttgccgctcgccatcctcttcggattcacgctcgccttccaaaccaaggggctgtggatggggcagatatgtagcctcctctgccagaactgcgtcctcttttttatcaccctgcgaaccaactggcaggagttagacctgaccatgttcaacaaggacaacgattttgtctgctag

SEQ ID NO: 39652 - DNA, 450 bp, Zea mays
  Peptide Sequence Number=SeqID_81431
atgaccgcatatttcacggcgccgtgggctggtggcgcgacgtcaacgagtcgccgtgctctacggcatcgtctcggccgtcgcgctggtaagcaccctcccgcttcgcttcgcttccctgacccctgtctggtccaattaatcagaatcgagtgtagggtgtcagagtatggatggacaacgcagaaggtgttccagtttctaaacttccttgtgaacggcgtgcggtctgtcgtgtttgtgctgcggcgaaatgtgcaacttgtagagcctgaggatatgcccgggcttgcattcttcacgacatatgcacttttagtgctcttctgggctaagatttattatcaggcacgtgccatgtcgactgattggcttagaccaactttctattggatcaacggtgtggtctatgcaattcaggtgaaaattgaggacatttaccaacaataa

SEQ ID NO: 39653 - DNA, 450 bp, Zea mays
  Peptide Sequence Number=SeqID_81432
atgaccgcatatttcacggcgccgtgggctggtggcgtgacgtcaacgagtcgccgtgctctacggcatcatctcggccgtcgcgctggtaagcaccctcccgcttcgcttcgcttccctgacccctgtctggtccaattaatcagaatcgagtgtagggtgtcagagtatggatggacaacgcagaaggtgttccagtttctaaacttccttgtgaacggcgtgcggtctgtcgtgtttgtgctgcggcgaaatgtgcaacttgtagagcctgaggatatgcccgggcttgcattcttcacgacatatgcacttttagtgctcttctgggctaagatttattatcaggcacgtgccatgtcgactgattggcttagaccaactttctattggatcaacggtgtggtctatgcaattcaggtgaaaattgaggacatttaccaacaataa

SEQ ID NO: 39654 - DNA, 271 bp, Zea mays
  Peptide Sequence Number=SeqID_81433
atggctacagtgacaaatcttaagaatccagtgaacaaagtggcgatgtggtgcgactcctatttcgtctatgatgactgtgaaagcgatgatcaatattactactttattcgcctgatcggacgcaaggcttctcatgtggcattggaatgtgctcttcaatcacatccaaacatggttatcctaggagaggaggtggctgcttccaaacttacaatttttgatattacaaagcagatttgtgatgtagttcaggcaagggctggaaaag

SEQ ID NO: 39655 - DNA, 930 bp, Zea mays
  Peptide Sequence Number=SeqID_81434
atgaaggttctggggcatgtgtgctaccacatcatagccgccggattgaacgaatatatggctacagtgacaactctgaagaatccggtgaacaagtggcgatgtggtgcgactcctatttcgtattactactttattcgcctgatgggacgcaaggcttctcatgtggcattggaatgtgctcttcaatcacatccaaacatggttatcctaggagaggaggtggctgcttccaaacttacaatttttgatattacgaagcagatttgtgatgtagttcaggcaagggttgaaaaagacaagaaccatgtggttattcttttcctgagggccttgtggagaatattcctgagctatatgctctgctttaggaaatccatggcctccatggcaaagttgtttttgttgagaatatctcttctgagctttcaccatgggcatctgcactctgagtttttggccccttttataaggaagcatattgagactgaaaagctgctagcccagttagttgagactgagatgagaagacgtttggttttggggcatgtgtgctaccacatcatagccgccggattgaacggatacatggctacaatgacagatcttaagaatccagtgaacaagtggcgatgtggtgcgactcctatttcgtctatgatgactgtgaagcgatggtcgtgtggccctttagccacccaaattggaaagcccgatgttcacatggctagcgttgacttgaaagaaaaagcatacgatgtgttgagacagaattcttccagctttttgttggaagatgtctacagaaacccaggcctgctccagtttgaaggaccaggtgtcgattcaaatcctatttcattgtgtgttgaggatcaagactatatgagcagaattagacaaaagtctcatctattcattttggtttaa

SEQ ID NO: 39656 - DNA, 471 bp, Zea mays
  Peptide Sequence Number=SeqID_81435
atggagttgcgttcccccaacgacaaggcggaaagacggcggccgtcgtgggctgagtcttctccaacacgctccaaggccctcctcctacggcgcgggggctgggtcccacacgtcaagcaagccggctcagagcggaagaagccaaaccgccgtgcgcggtgcgtacaaccgcccagcggttacaagcgactctccacttttgcccagatcagcgggagaagcgggcggcgcttcgccttcgccataatgaccgcgtcagaaaaggctggcccctcggaagggttcgacagccgcctcagatcacgtgggccctacacctactactggtcagaggttcgaaggccggcccctcggaagggttcaacgaccgcctcaggctactcgggcttcgcgcccactactgatcaggggttcgaaggctggcccccgaagggttcacagccgcctcagacacagagcgagggatga

SEQ ID NO: 39657 - DNA, 594 bp, Zea mays
  Peptide Sequence Number=SeqID_81436
atggagttgcgttcccccaacgacaaggcggaaagacggcggccgtcgtgggctgagtcttctccaacacgctccaaggccctcctcctacggcgcgggggctgggtcccacacgtcaagcaagccggctcagagcggaagaagccaaaccgccgtgcgcggtgcgtacaaccgcccagcggttacaagcgactctccacttttgcccagatcagcgggagaagcgggcggcgcttcgccttcgccataatgaccgcgtcagaaaaggctggcccctcggaagggttcgacagccgcctcagatcacgtgggccctacacctactactggtcagaggttcgaaggccggcccctcggaagggttcaacgaccgcctcaggctactcgggcttcgcgcccactactgatcaggggttcgaaggctggcccccgaaggaggctcgggggctgctctcgcaaacccagctccggccgaaccgtttgacagcgtcaacataccagcccgagaacttgggacccgaccgtacacccgggctacggccagctcgcatgagggaacgaccagaccagccgaagcattacgcgaggcattaa

SEQ ID NO: 39658 - DNA, 1290 bp, Zea mays
  Peptide Sequence Number=SeqID_81437
atgaagaacgtagaccgacctccttccaatccaaaacggatcataatccagtctactcaggagtgcttcagcgttgacataccccgtgctccggcggggactgttagacccgaaacaaggcatgctgctgatgaggatgatgactttatgccattatccaagaagcgtaacttggacgacagccctgggaaagttttgaagaagaggcttaacatcagatgcaacccccaagatgtgttagtaagcatacagatattaaatgacagacagcaacaagcaattgcacgtaggggattttctagtatccttgatatgagactggacgcactcggcagcagatcacacttagcttggctgatggaaaagctcgaccacaatgacatgacaattcgagctggccctggaaaggagctgaaaattacaaaggatacggtgcacctaattttggggttaccgaatgctgggggaggaactgcattgggcatcgatgaagctgttgctgccaacaatttaagagctgaacttggtctatcgaaagaagattttggggttacagctcttcaagatcgtttgaggaaaggttctgacgatgatttaagcatcagatgctttttcttgatattgttcaataggttgttgttccctactgtcagctggggaataacaaaccatgaggttcttttaaccgaggagatggatcgtttccaccagatggactggtgccagcttattttcaatgatttatgccaagctgccaagaagtggcataataggagcgttacgaacgtttctacaaccatctatggatgttccatcgttattcttctgtattatttggatcatttgcatgactcagcggcacccgagaacaaacgtggaacaccacgaatcaaatactttgataggaatattattcaagccctgacaagagctgacaagggcaagatacgcaaaggagaagaagcatttggacattgctcgcactcaattcacatcgaactcccgctcatcagggatttgatatcaagcaagctgaatcagcttccatcccgccaccgcctgggtttcatagagaaactgtcacattttgatgcggaggttggtaaggcgtgttcagttattaaacagactcttcagcagattgtcgagaaacaatacaatctatctgatgtttttggcgagttaattgatgaggtcctccgtgccgaggcgggtgacaacgaagatgcttatgatgtgcagaaaaccacatcaaaatcagataatattcttccccagacagctggttag

SEQ ID NO: 39659 - DNA, 204 bp, Zea mays
  Peptide Sequence Number=SeqID_81438
atgaagaacgtagaccgacctccttccaatccaaaacggatcataatccagtctactcaggagtgcttcagcgttgacataccccgtgctccggcggggactgttagacccgaaacaaggcatgctgctgatgaggatgatgactttatgccattatccaagaagcgtaacttggacgacagtcctgggaaagttttgaagaag

SEQ ID NO: 39660 - DNA, 264 bp, Zea mays
  Peptide Sequence Number=SeqID_81439
atgtcaaatgaatgtggtttgagttcaaacttttccaggatgtgttcaagggaatttggcacaactttgatatttggatctcctggctttgagtttcaaaaaacagagaacgcagatgatcattgggaagagttcttgggttgtgatcgatactctgctcgcgccttagaagtcgacgctttgctttcagaggttaaggattcattgggtgcaccaaaggtgcacccaatgggtgtagcccccgagtttcgaatggattactga

SEQ ID NO: 39661 - DNA, 447 bp, Zea mays
  Peptide Sequence Number=SeqID_81440
atggccggagtcggtcggtccacgcgcgcaggcggggatgctcgtcggcggcaaggagtccggcctggtcacggcgagatagagcaattggatgggtcagagaggttcacggggtgccagagaagacatgagcgcaaggaattgggcggagactcactggatagctcggtccacgcgcggcggcggaagaccgaagaccggctagggacagggagttgtagcgtcaccaaggtgccagtgtcagaatgcctggtcccgaggtcaaactgcgccaaaaccatgtcaaatgaatttggtttgagttcaaacttttccaggatgtgttcaagggaatttggcacaactttgatatttggatctcctggctttgagtttggaaaaacagagaacgcagatgatcattgggaagggttcatagttcaagggctgatttggggatttatttga

SEQ ID NO: 39662 - DNA, 417 bp, Zea mays
  Peptide Sequence Number=SeqID_81441
atggccggagtcggtcggtccacgcgcgcaggaggggatgctcgtcggcggcgaggagtccggcctggtcacggcgagatagagcaattggatgggtcagagaggttcacgggatgccagagaagatatgggtgcaaggaatcggtcggagactcactggatagctcgctccacgcgcggcggcggaagaccgatgtccggctagggacagggagttgtagcgtcaccaaggtgccagtgtcagaatgcctggtcccgaggtcaaactgcgccaaaaccgtgtcaaatgaatttggtttgagttcaaacttttccaggatgtgttcaagggaatctggcacaactttgatatttggatctcctggctttgagtttcgaaaaacagagaacgcagatgatctttgggaagaggtctga

SEQ ID NO: 39663 - DNA, 607 bp, Zea mays
  Peptide Sequence Number=SeqID_81442
taaccgcggcggaagaaagggcggaggggctttccggcggcgagattgctccggtgaagtggtcgaggatgaatgggaggtctcggggatcacaacgagaggtccatggggtgccagagaagatatgagcgcaaggaattgggcggagactcactggatagctcggtccacgcgcggcggcggaagaccgaagtccggtgaggtcgatctcgggcctccggtgaagtccggccgggtccgagggcttggcaagcttcacgggctactggcggagctagccgaagcactggctcgcccagaggatggctggagtgggctggccacgatggccgaagctctggcggcaatggcgggcggaattgagctcgccggagctaagggaaagtggctggccggtgaggggagttgtagcgtcaccaaggtgccagtgtcagaatgcctggtcccgaggtcaaactgcgccaaaaccgtgtcaaatgaatttggtttgagttcaaacttttccaggatgtgttcaagggaatttggcacaactttgatatttggatctcctggctttgagtttcgaaaaacagagaacgcagatgatctttgggaagaggtctga

SEQ ID NO: 39664 - DNA, 240 bp, Zea mays
  Peptide Sequence Number=SeqID_81443
atggagctccacgaggtgctaagagtctacccgtgcaaggaatcgaagaaagactcaacatggagctcggtctactgtttgggggctaatggctcaagaagggggtctagggttttaacctctgttgttcaaggtgataattgcataacattcttgggtaaagcttctatcatgaaccttccttggtttacccatggtttccagggttttggtgctcctcctccacttaaacacatgtga

SEQ ID NO: 39665 - DNA, 954 bp, Zea mays
  Peptide Sequence Number=SeqID_81444
atggcgtcggacgaccagtacgcgtggggcctgtgctacaaggaggagatcaggccggcgagcaactactgcgacgcgacggacgagcagtggccgtgctacccaggcaagtcctaccacggttggggccccatccagctctcttggaacttcaactacgagccggcgggccaggcgctgggcttcgatggtctgcgcaacccggagctggtggccaactgctcccagaccgcgttccggacggcgctctgcgaacttggagaaacaccgctcgtatgggaagatgcgaggtcggcggagttcgatgggaagatgcggtggcggcgctcgcacgcgaggagggcgatggctcgcttcggcctgacccagcggatatataactttctcccgtatccgcacatgcagccgcaaatatgcgatttgcacaggtgcatgcaagctgaaccaactgcggttgggctcgtcggcggcgtgtgcttcggcctgctcacggtggtagggttcgatcccatggcacagggagattcacggggtgctaaagagtctacccgtgcaaggaatcgaagaaagactcaccgtggagctcggtctacgttcgccggcggtcgggtgaagtccgacgacgctgaatcggtgtctccggtgaggcagagctcgattcctggctctgggagcttcaccgggacacgaggagactcactcgagggtcggacggggcgaggaatggctcggttggccgacaatgagcagtccaaggttcccgagtgtgttgttggagacctccctgagctacaacctggtgaaggcaaccacccaccttgggggaggtgttcctcggttgttaggctggcaaaaccttacgggccagttagcccccgggggatttttggtaaaggaggtgatgctggcaacatggaggactttgaggagttccaggactatgatgagttctag

SEQ ID NO: 39666 - DNA, 648 bp, Zea mays
  Peptide Sequence Number=SeqID_81445
atggcgttcggcgacttcgctgacaaaccggtgcgcaggcaggcggagtccggcggcgaagaacgcctcgaaaacaaccaactcgccctccggctcggggacttcctccgtccccggggcccgagcgactccgtcgcccaaagtagcccaaccgccgcatatcttcaatacggcctgacgtcatccgtgacacaccgaattcaacagagtcgccggcgcgcaactcttccaccatcgcgtcactcaacgtctcctcagacgaggcggcggccggcggcgtggcggtggcggaagaagaagaggatggcatggctacgtaccgtcggcggcggcgggcggtttgcttcactcgagccagaacgacggcgagcaaagggagcagcggaggaaaaggagcagcaaggcggcgggcggctagggttttacggagcgcggaaagcagaattcaaacagcgccgcccccgccccccttttataggcagggcgcggctcctcgggaaacccacaacccgacaggccgcgacgcttcgggaaacccgcaatccaacagtacgccgtccatcaacggtcacatcaaaaacccccgcggaaccacttcgagcgagggcagcgtctccgccatctagcgacgtcttcggcaccaggtga

SEQ ID NO: 39667 - DNA, 519 bp, Zea mays
  Peptide Sequence Number=SeqID_81446
atggcatcgctacgtaccgtcggcggcggcgggcggtttgcttcactcgagccagaacgccggcgagcaaagggagcagcggaggaaaaggagcagcaaggcggcgggcggctagggtttttacggagcgcagaaagcagaattcaaacagcgccgcccccgcccccttttatagacagggcgcggctcctcgggaaacccacaacccgacaggccgcgacgcttcgggaaacccgcaatccaacagtacgccgtccatcaacggtcacatcaaaaacccccgcggaaccacttcgagcgagggcagcgtctccgccatctagcgacgtcttcggcaccaggtattttcggatccagaattatgaatatggagcacggccaggacgaagcctgaaccagacgaaggtcgagtgtagccgaagctgtgcgcagggaagcttcggcgcgatggcagaagggggaaccgacttaaagatgaaaagacttcgggggcctcgacagatttccataagccgttaa

SEQ ID NO: 39668 - DNA, 486 bp, Zea mays
  Peptide Sequence Number=SeqID_81447
atggcatggctacgtaccgtcggcggcggcgggcggtttgcttcactcgagccagaacgacggcgagcaaagggagcagcggaggaaaaggagcagcaaggcggcgggcggctagggttttacggagcgcggaaagcagaattcaaacagcgccgcccccgccccccttttataggcagggcgcggctcctcgggaaacccacaacccgacaggccgcgacgcttcgggaaacccgcaatccaacagtacgccgtccatcaacggtcacatcaaaaacccccgcggaaccacttcgagcgagggcagcgtctccgccatctagcgacgtcttcggcaccagcagagagcaagttccaacacccgtgttcaccgaagatgatgttgacttctccatcgacgcacgggaacgctccgcctcctcccccttcctgctgctgaggttatcgaggttctccgggtcctcctcgtggtgggggaggtggtag

SEQ ID NO: 39669 - DNA, 756 bp, Zea mays
  Peptide Sequence Number=SeqID_81448
atggcatggctacgtaccgtcggcggcggcgcgcggtttgcttcactcgagccagaacgacggcgagcaaagggagcagcggaggaaaaggagcagcaaggcggcgggcggctagggttttacggagcgcggaaagcagaattcaaacagcgccgcccccgccccccttttataggcagggcgcggctcctcgggaacccacaacccgacaggccgcgacgcttcgggaaacccgcaatccaacagtacgccgtccatcaacggtcacatcaaaaacccccgcggaaccacttcgagcgagggcagcgtctccgccatctagcgacgtcttcggcaccagagttaaaggttgatgacttaccggagtgtggatgtgcctggaggccggccgatttcgggacccctctgcaggggacaacccaaggcgacgcgcgggtgtgtcaaatgcgtaggggactcgacgttggggacggagctcgcgacggcgtaggggactcggcgttcggctgccgcggtggagaagatcgaggtctcggtctctgcggaggagaagaacgaaggggcggaacaaccgccttcgcgattccgggtcccttcccggagaggaagaataaggcgacggcgtctatgcggcagagaaggcgagtccgggtctctgcggtggagaaggagaatgcgacggcggtggaacgacagtgggagaatctctgtgtattcggcgggcgcggtagagaagaagctcacggcggcgattag

SEQ ID NO: 39670 - DNA, 741 bp, Zea mays
  Peptide Sequence Number=SeqID_81449
atgagggatcgggaaaggggatatttcgaaaggatccttctcagcgaaggaaacgggccccgagccctcctactgatcaggggttcgaaggttgcgccctgcggggttcggcaaccgccccagagcacttgggctccgagccctttactgatcaaggggtcgaaggctggcccctcggaagggttcgacggccgccccagagcatgcagagtcagggatgactctgggtacgtccgttacatggccaaggctcgggctacgctcccgaggtaccctaagacatttctgagaccagcgggaacgatttgtaatggaatcccaccggagcgaggcaccgagcccttggaccctatcaaatgggtccgggaaaataacattattcaccccgttccgactactgtgccaaccatcagggtaaagctaacgacagtaagtcacgaccaccccgagttcagcctcgagcgcaacagggagctccgcgtcacccgacccaggcctcggcctcagcctcggcctcgggagcaggtctccgcctcgcccgaccccaggcctcagcctcaacctcggtctcgggagaaggtctccgcctcgcccgaccctaggcctcggcctcagcctcgggaagagtcacaacctagcccaaccttagcctcggcctcaggagaagtcaccgcctcgcccgacctcggcctcggaccgactacgccacaggggatacatcattaccctacccctagctag

SEQ ID NO: 39671 - DNA, 312 bp, Zea mays
  Peptide Sequence Number=SeqID_81450
atgcaagaagcgtgcaaccgcaccgcggtcgtacaccctttcagcttcgttgcaaccggcggtccagcatggaggcccgggcccacatgtcatgtaaccggcacaccggttactacgtgcaaagaaaccgcaccaccacttgcgccaatgctgcgtcttgtcgggaccacagaaccagtgcaacgactcgaggcagccccgcgcatgccccaacagtgccaattaagtgcgacggtcacagggatcaggaaaggggatattttgaaaggatccttctcagcgaaggaaacggaccccaagccctcctactga

SEQ ID NO: 39672 - DNA, 765 bp, Zea mays
  Peptide Sequence Number=SeqID_81451
atggcaagctcgccggtgctcgccacctctcctcccttccccctccccggccacctaaaaaaggaccgccccgagccccttgttccaccacaccaggcctcaaccactcaacctccatccctcaggcccaatcgagctcggcgccgtcgtccctcccctctccgggtgagctccgccctcctctctctggtggcttatggtcaaattgctttagctcttaagctccgcctctctgtcgcaaacctagcacacaccttctcttcgcttattgcgcccggaagcctcgacggcgacttcaccgccgcgagcgcccgccaccgtgccatggaccggccaccccaggcaccctccggccaaattggacctacccccatgatcccctacccccgcccatgcttcgccaccactcccccatcgcagaactggagccccggtggagaaccgccgcggggcttcaccggcggttgggccccggccggttcgccccccccgtcaccgctcgacgccgtcagccccccttcctctggcacatgggcccacgcccacggcaccgtccccgcgccgttcccccactggcgggcctgcaacaaaaatacccccacctggaggaaaagacttcaggccctgtcaaggagagatcctaccgaggatgaccccaccatcgtctacatggccggatatctccacactctcgataaccactacgatgacctttcctcccactgcacccacctaaactctcaggtggaaagcttagagcagtag

SEQ ID NO: 39673 - DNA, 435 bp, Zea mays
  Peptide Sequence Number=SeqID_81452
atgggggtagatccaatttggccggagggtgcctggggtggccggtccatggcgcggtggcgagcgctcgcggcggtgaagtcgccgatgaggcttccgggcgcaataagcgaagaggaggtggccggggagggggaagggaggagaggtggcgagcaccggcgagctcgccatgatggcggtgatggcgcaaagtggcgttgggacggctcgggcaggcagggggtggggggtgaagggtcggctcgggcacagtgtgtgggggcgcatgatgccaatcgagctggtgagcgcgttaatggcgaggagatggggcggacggtggccggcggcgaacgcgccgatagcctggtcacgggcgagggggagaaggggctgacaggcggggcccgcctgccagagaggggcggtcgtgaggtaggggagcgcggctga

SEQ ID NO: 39674 - DNA, 378 bp, Zea mays
  Peptide Sequence Number=SeqID_81453
atgccgccgtggtttggccggagcaggagccgccgacgacccccgccgcctgtgcccgtggccagggtagctccgaccacctccgacaccaacccgcacatcggcgtgaccgttgcgacctcccggaggtcactgaccaccccgccggagctctacttccgccgtttagaattaaataaggaaaccactcaaaacccaatattaggaggaaaaataggaatattgtttgaccaggactgtaatcttgctgacggagagtacatcctcgtgccggagcaaggagctgctcaggaggtagccccagatccagcacccgagcctgcaccagaggacctgcctgccactgctttggaaggcaagccccggttttatgcataa

SEQ ID NO: 39675 - DNA, 378 bp, Zea mays
  Peptide Sequence Number=SeqID_81454
atgccgccgtggtttggccggagcaggagccgccgacgacccccgccgcctgtgctcgtggccagggtagctccgaccacctccgacaccgacccgcacatcggcgtgaccgttgcgacctcccggacgtcactgaccaccccgccggagctctactgccgccgtttagaattaaataagaaaaccactcaaaacccaatattaggaggaaaaataggaatattgtttgaccaggactgtaatcttgctgacggagagtacatcctcgtgccggagcaaggagctgctcaggaggtagccccagatccagcacccgagcctgcaccagaggacctgcctgccactgctttggaaggcaagccccggttttatgcataa

SEQ ID NO: 39676 - DNA, 249 bp, Zea mays
  Peptide Sequence Number=SeqID_81455
atgggaacagcagaagcactgtgccttgccgtacttcctagcgctcagagctccacctccgaccgcgcctcgccatccaccgcccgttcactagacccgatcaccaccgagacaagctccatcctcaccggtgaccccgcgggggacttagggctctttctcgagtacctcaccgtaaggacctgttcgtggatgatcactcgggaaaacagtacaaccatgagggtggaatgggacgcccttagctga

SEQ ID NO: 39677 - DNA, 255 bp, Zea mays
  Peptide Sequence Number=SeqID_81456
atgcagattattgaaagaaagtgcgaggctcaaaagggaagaaaaaaaacgctcgataaactcaccgatcaacctggaaatctgataccaattgatgtagctgaggtgcccgatctttcggcgagtagagataattccgatttggcggaagatgacccttgcgatccgactacgacgagcaagcccgaggcgccaatgcaatcgctgaaccaactccctgtggttaccgaccttgctgatgcgagatcggcctga

SEQ ID NO: 39678 - DNA, 606 bp, Zea mays
  Peptide Sequence Number=SeqID_81457
atggtgaaaaaaacacaatgcaaccagcaacaaatgacgcgcaagcacccaaattcaacaatgcagattattgaaagaaagtgcgaggctcaaaagggtgttgggataaggtctaacctgaatttttatgtggttttgtggactgtaggagaaaaaacactcgataaactcaccgatcaacctagaaatctgataccacttgatatagttgaggtgcccgatctttcggagaaaaaaacactcgataaactcaccgatcaacctggaaatctaataccacttgatatagttgaggtgcccgatctttcggagaaaaaaacactcgataaactcaccgatcaacctggaaatctgataccacttgacatagttgaggtgcctgatctttcggagaaaaaaacactcgataaactcaccgatcaacctggaaatctgataccacttgatatagttgaggtgcccgatctttcggtgagtggagataattccgatttggcagaagatgacccttgcgatccgactacgacgagcaagcctgaggcgccaatgcaatcgctgaaccaactccctgtggttaccgacattgctgatgcgagatcggtctga

SEQ ID NO: 39679 - DNA, 294 bp, Zea mays
  Peptide Sequence Number=SeqID_81458
atgcagattattgaaagaaagtgcgaggctcaaaagggtgctgggataaggagaaaaaaaacactcgataaactcaccgatcaacctgaaaatctgataccacttgatatagtcgaggtgcccgatctttcgattattgaaagaaagtgcgaggctcaaaagggtgctgggataaggtctaacctgaattttgatgtggttttgtggactgtaggagaaaaaacactcgataaactcactgatcaacctggaaatctgataccacttgatatagttgaggtgcccgatctttcg

SEQ ID NO: 39680 - DNA, 708 bp, Zea mays
  Peptide Sequence Number=SeqID_81459
atggccttacccgcactggaaggtagcagaggtcaccggctacggcgcggatggcttcacggcggcaccgaagtcgtcgacgagaaattcccaagcaccgcaacccaattcgtgcgcgcagtggccttggtttgcttcctgcggatgcagctggggagggagcaacggctgccgaccaggccaccgcggcagcagcaggggcttccccggcaacaagcttttcccccggttccgcggcggcaccctctgctcgcactggctatggtggcggcaacgtgggggcatgactggtctggtatagcccgagggccaactatatggaccccaggaggtcaacccgaggaactccgcaacggcaccgcgcagctcggaggtcattccgccgagcgatttcgttgccgcgaagaccgggtcggtgaagacgatgagtctgccaagcgggtcccgcgattcagtggaacagatgaggctcggactcgggctaagccccggaagacggcgaactccgctccgcccgacccagggctcggactcgggctaagccccggagacggcgaactccgctccgcccgacccagggctcggactcgggctaagccccggaagacggcgaactccgctccgcccgacccagggctcggactcgggctaagccccggaagacggcgaactccgctccgcctgacccagggctcggactcgggctaa

SEQ ID NO: 39681 - DNA, 450 bp, Zea mays
  Peptide Sequence Number=SeqID_81460
atggagacgcccgagggccaactatatggaccccaggaggtcaacccgaggaactccgcaacggcaccgcgcagctcggaggtcgttccgccgagcgatttcgttgccgcgaagaccgggtcggtgaagacgatgagtctgccaagcgggtcccgcgattcagtggaacagatgagtgcgcggcgtgaaacgctctacttggtaaattggcttcatggcgatattaggcagcgcaacattgaggatcccgcaaatcctttcttggttggacaagtctgggtttgtggccttgtacagaagggcaatgatgtcgtctatgttaatgatgatggtatagaacaacggtataatttacctcaagtcaagaaaattggagacactctagactttgaaattaagaggtggtctgctaggaaagagggcaacttgtgtgctttgttatcaacttag

SEQ ID NO: 39682 - DNA, 720 bp, Zea mays
  Peptide Sequence Number=SeqID_81461
atgtcttctcgctcccttatgcgtcgcgtctttccaccttccaagcccccggatggggggaacccgccgtcttttcgcctcaccgttggagggacgcaactccgtgggagttggtacctttcagccatcgttcggcttcaaggattttcatcacacagcccggttgctcccctccgctggtggtcacccgagacggtgaccaccagctcctgggtggggaggagcaagtcgggctgcgatcttggtcccaccctcagcttcaaggatgttcatcatcctcgctggggtgggtgccgggctgagccggcgctctacctcccgcgcgggttcgtgggtcatcctctcccgcggcattcgagggagagggcgctcactggccctgcgggcggcccggacttcgacaacgcggggctggtcgacggcaggcgtcgtcacctccagcgtgtcgggttcgtcggcttggctcccggcggccccttctgcaggagggcggctgccgcgccgtgtacacgggaggaccaccctagatgtcgcgcgctgctagggtggcgttcgtgttctggggtggtcctgcctttgcaccgggacggcgccttcacgcggaggccggagtccctcggctcggtcggccttgctgtccgaggctcctctagcttagttaaagagacccctcggccgctcttcgacgagccgaggccaggggtagcgatatcagtatga

SEQ ID NO: 39683 - DNA, 864 bp, Zea mays
  Peptide Sequence Number=SeqID_81462
atgaggcgaaaagatggcgggttccccccattcgggggcttggaaggtggaaagacgcgatgcataaggagaagcgggcgacgcttcgccttcgccgtaataaccgcgccaaaaaagggaccgggaaagggggataccccgaaaaggatccttccctgtgaaggaaccgggctccgagccccccctactgatcagaggttcgaaggctggccctccgaggggttcaacagtcgcctcagatcgcgtgggccctacacccactactggtcagaggttcgaaggccggccccccgaagggctccacggccgcctcaggctactcgggctccgcacccattactgatcaggggttcgaaggctggcccccgaagggttcacagtcgcctcagacgccgagcgagggatgaccaggggtacgttcgatacataaccaaggctcaggctgcgctcccgagggctcggactcgggctaagccccggaagacggcaaactccgctccgcctgacccagggctcggacttgggctaagccccggaagacggcgaactccgctccgcccgacccagggctcggactcgggctcagccccagaagacgacgaactccacttcgcccgaccccagggctcggactccgccctggcctctgccgaacgacctccgcctcgcccgacccaggggttcgggctcagcctcggccatggaagacagactcgacctcggcttcggaggagcctccacgtcgcccgacctagggcacaggcccgccacatcaacaggaagcgccatcatcaccctaccccgagccgactcgggccgcagagaacaagaccggtgtcccatctggctagctccgccagatag

SEQ ID NO: 39684 - DNA, 453 bp, Zea mays
  Peptide Sequence Number=SeqID_81463
atggcgccaaaaccacttgggttctataccaaaaatgtgcaataccacttagggcacccactggaaaaagttgagctcgagactcggacgtttgacatgccatggcatggcttttgtcgtgttatgctcagccgtatctgccccggcgtctcacagttgagtgacagccctaggtgccaggaagagccctcggagaagactgtgcacgtctccgtgaagctccctgagcgaggaatcgggctctgcttcaccggagaggccggcccaaggtcaccggacttcaaccgaccgtcggcaaccgtggaccgagactgtaatcttgctgacggagagtacatcctcgtgccggagcaaggagctgctcaggaggtagccccagatccagcaccagagcctgcaccagaggacctgcctgccactgctttggaaggcaagccccggttttatgcataa

SEQ ID NO: 39685 - DNA, 885 bp, Zea mays
  Peptide Sequence Number=SeqID_81464
atggcgccaaaaccacttgggttctataccaaaaatgtgcaataccacttagggcacccactggaaaaagttgagctcgagactcggacgtttgacatgccatggcatggcttttgtcgcgaagtgctcagccgtatctgccccggcgtctcacagttgagtgacagccctaggtgccaggaagaggtctgcgccggacctttgcaaagatttgcacggttgcgacctctggcgacatttgaacactggaagaaacaaaccgccacgtgttcgacgccgtctgccgcgccagagcacgccccgcgccgcgcccgagccaagccggtgccctggtctgcgtccgcggctataaacgcccaggagctttggctgtacccctccgcacgcgctcaagcctcaccggagctcagttcgccgccgtttgcccatgcgcgacgcgcccgcggccacccgagcccctgccaccgtcgaccggccaacccagccattcccaaccccgtccagccctcggagaagactgtgcccgtctccgtgaagctccccgagcgaggaatcgggctctgcttcaccggagaggccggcccaaagtcaccggacttcaaccgaccgccggcaaccgtggaccgaggtacaccgtgcacctctcttcgattccttgcacggttagactccttggacctccacgaagctccctatgcccttgaattgaactatgccgccgtggataggccggagcacacgccgccgacgagctcgcccgcctgctcacgtggaccgggcgattccggccatccccgacgacgagccgtacctcgacgtgatcgccagaccctccccgagccaaccctacacttcgccggaactccctcgccgccgaaactttaa

SEQ ID NO: 39686 - DNA, 201 bp, Zea mays
  Peptide Sequence Number=SeqID_81465
atggcccaaatctcgggacaccgcttcgcgcacgcgcaccttgcgccggggcccacctgtcgcccgtctatgcccctggcactgggcccgaccgacgacgagcagcccgtggttcctgcgtgtgttgccgaagatcttcctgagcaacaacctggtgaaggcaagtgtcctctgacctattatgtcctacatactttataa

SEQ ID NO: 39687 - DNA, 387 bp, Zea mays
  Peptide Sequence Number=SeqID_81466
atggcgccgccgtgcccacggggagcgctgcccctagcttcccgacagagacaaaaccccctgttgcgcatccagtccgcccaaatccaatcggacggtccgatttcaattaggccagatctaatcccgaccgcccgatctggatctggccgttctccactctctccctcacccacgccctgcgactgggaccggtcggtcagaccgtctcgtcccaggccgctgatgcccctgggccgctggtcagacgcgcccacattcgtgtgcgcgcgttcgttcgacaacgagcagcccgtggttcctgagtgtgttgccgaagatcttcctgagcaacaacctggtgaaggcaagtgtcctctgaccttttatgtcctacatactttataa

SEQ ID NO: 39688 - DNA, 258 bp, Zea mays
  Peptide Sequence Number=SeqID_81467
atggagatccctcgagggcgggccaggcggatgactatggccaccgggacgtcaatcatggcctcgcctggtgggattgtggacccgaggctacgcaatttctcaccgggaatagagccccaggtagccacaggttactcgccggagttgtccattgccgtggcgccgccgggcatacgcgtgccaccgcggtcgtcggtgtcggtgttggggaggtatggggtggccgtggatctgggtatgggcggtggtgattag

SEQ ID NO: 39689 - DNA, 258 bp, Zea mays
  Peptide Sequence Number=SeqID_81468
atggagatccctcgagggcgggccaggtggatgactatggccaccgggacgtcaatcatggcctcgcctggtgggattgtggacccgaggctacgcaatttctcaccgggaatagagccccaggtagccacaggttactcgccggagttgtccattgccgtggcgccgccgggcatacgcgtgccaccgcggtcgtcggtgtcggtgttggggaggtatggggtggccgtggatttgggtatgggcggtgatgattag

SEQ ID NO: 39690 - DNA, 258 bp, Zea mays
  Peptide Sequence Number=SeqID_81469
atggagatccctcgtgggcgggccaggcggatgactatggccaccgggacgtcaatcatggcctcgcctggtgggattgtggacccgaggctacgcaatttctcaccgggaatagagccccaggtagccacaggttactcgccggagttgtccattgccgtggcgccgccgggcatacgcgtgccaccgcggtcgtcggtgtcggtgttggggaggtatggggtggccgtggatctgggtatgggcggtggtgattag

SEQ ID NO: 39691 - DNA, 156 bp, Zea mays
  Peptide Sequence Number=SeqID_81470
atggagatccctcgtgggcgggccaggcggatgactatggccaccgggacgtcaatcatggcctcgcctgtagaagagcccgtgaccgaggatcctggtgagcagcaggttgaagtagctgagcaggagctcattgaaggcaagttgtgcccttga

SEQ ID NO: 39692 - DNA, 672 bp, Zea mays
  Peptide Sequence Number=SeqID_81471
atggacagggacgcggaggcgggggacgggaaagccgcggcggcgggcggggaccccagcacggtggccgcgccgacggcgatgccgccgacgagcgtcatgacccggctgatcctgatcatggtgtggcgcaagctcatccgcaacccaaacacctactccagcctcatcggcgtcatctggtcgctcgtctgcttcaggtggaacttccagatgccggccatcgtcctgcagtccatctccatcctgtcggacgcggggctcgggatggccatgttcagtctcgggctgttcatggcgctgcagccgcggatcatcgcgtgcgggaacaaggtggcgacgttcgccatggcggtgcgcttcctgaccggtccggcggttatggcggccgcgtccttcgccgtgggcctccgcggcacgcttctgcacgtcgccatcgtccaggcagctctgcctcagggcattgtccccttcgtcttcgcaaaggagtacaacgtgcaccctgacattctcagcaccgcagtcatttttggcatgctcatcgccctgccgatcacgctcgtctactacatcctgctcggccttcgctggtttgacgaagacaaaacggacagggacacccttcgcttcattcagcacaagacgaaggcctgcggtgacgtctccccgtag

SEQ ID NO: 39693 - DNA, 1593 bp, Zea mays
  Peptide Sequence Number=SeqID_81472
atgattacggggacggacttctaccacgtcatgacggccgtggtgccgctgtacgtggcgatgatcctggcctacgggtcggtgcggtggtggcgcatcttctcgccggaccagtgctccgggatcaaccgcttcgtggcgctcttcgcggtgccgctgctgtccttccacttcatctccaccaacaacccctacaccatgaacctgcgcttcatcgccgccgacacgctgcagaagctcatggtgctggccatgctcaccgcgtggagccacctcagccgccggggcagcctggagtggaccatcacgctcttctccctctccacgctgcccaacacgctcgtcatgggcatccccctgctcaagggcatgtacggcgacttctccggcagcctcatggtgcagatcgtcgtgctccagtgcatcatctggtacacgctcatgctcttcatgttcgagtaccgcggcgcgcggatgctcatcaccgagcagttcccggacaacgccggggccatcgcctccatcgtcgtcgacccggacgtggtctccctcgacggccgcagggacgccatcgagacggaggccgaggtcaaggaggacggcaggatacacgtcaccgtgcgccgctccaacgcctcgcgctccgacatctactcgcgccgctccattgggcttctccagcaccacgccgcgccccagcaacctgaccaacgccgagatctactcgctgcagttcgtcgcgcaacccgaccccgcggggctccagcttcaaccacaacgacttctactccatggaaggcggcgacgaacgggcaggccaagggcgaggacctccacatgttcgtctggagctccagcgcgtcgcccgtgtcggacgtcttcggcggtggcgccccggactacaacgaggccgcggccgccaagtccccccgcaaaatggatggaggcaaggacagggacgactacgtggagcgcgacgagttcagcttcgggaacaggggcgcgatggacagggacgcggaggcgggggacgggaaagccgcggcggcgggcggggaccccagcacggtggccgcgccgacggcgatgccgccgacgagcgtcatgacccggctgatcctgatcatggtgtggcgcaagctcatccgcaacccaaacacctactccagcctcatcggcgtcatctggtcgctcgtctgcttcaggtggaacttccagatgccggccatcgtcctgcagtccatctccatcctgtcggacgcggggctcgggatggccatgttcagtctcgggctgttcatggcgctgcagccgcggatcatcgcgtgcgggaacaaggtggcgacgttcgccatggcggtgcgcttcctgaccggtccggcggttatggcggccgcgtccttcgccgtgggcctccgcggcacgcttctgcacgtcgccatcgtccaggcagctctgcctcagggcattgtccccttcgtcttcgcaaaggagtacaacgtgcaccctgacattctcagcaccgcagtcatttttggcatgctcatcgccctgccgatcacgctcgtctactacatcctgctcggcctgtga

SEQ ID NO: 39694 - DNA, 432 bp, Zea mays
  Peptide Sequence Number=SeqID_81473
atggcaaggggaaatttgtatccatctatggtagactttaagctagcactgagacaatatgccataaacaaagagtttgagtttggaacaaccaagtctgacaagttaagcaggttgaaggaacaaatgctaacaacacatggggttgcacaaaaggcgtcacctatactgaggaatgagccaaatgctaaggttttgcaaacatggatgcaagatacatacaagcccctagtggatgttggcgccggcatgatgaatacattgtttgaggtggagtttgctattatgatgctacaaggaatttgtctcaaggtggagtttgtgatcgaaattccgaagaaggcgaccaagttggcgagcgaagcggaggcccgtcgccgggaggcttgggccggatcgttccctactcacattagggtttcgcctctataa

SEQ ID NO: 39695 - DNA, 390 bp, Zea mays
  Peptide Sequence Number=SeqID_81474
atggcaaggggaaatttgtatccatctatggtagactttaagctagcactgagacaatatgccataaacaaagagtttgagtttggaacaaccaagtctgacaagttaagatggaaagcagaagttttacatagatcccccaatggtgtcattcggatagacacaatcattgttgatggcaagcccctagtggatgttggcgccggcatgatgaatacattgtttgaggtggagtttgctattatgatgctacaaggaatttgtctcaaggtggagtttgtgatcgaaattccgaagaaggcgaccaagttggcgagcgaagcggaggcccgtcgccgggaggcttgggccggatcgttccctactcacattagggtttcgcctctataa

SEQ ID NO: 39696 - DNA, 939 bp, Zea mays
  Peptide Sequence Number=SeqID_81475
atgacgatgctggtagactacacaacgatactcgatagaccatgtgtgtcggtcgaaggcccgacgcaacagggtatcgagaacgtcgtggaaggtctccaccagcagccgggatgccctgaggtggtgcagggggcatccctggctaaggttcaggggaagacggcctctcagactccacctcccgctgaggcgaggggaagagtcctgctgctcctgctcctggcgtcggtgctccttctcctcgtgcaggtgacgatgcagtctctccaggtgactggactgacctggcaccgtgcgaagcaggggacgctccgccaggcgggaaggcaaaaaggggatcacagacttacgtacagtgcacctgatacgggccatctacaaaatacatcaaaccgacggctgagattagatcgcgcgggtgcgggcgcccaggcgcggctgacaagcggggccaggggcgtcagggcacgtgtgcgcgaagcgttatccgtggtccgagtcgttcgatctgaatcggacggaggggaccagacgcccacgacgcaggagcggctgacaagcgaggccaggggcgtcagcggcagagggggagggcgcactgaccgagcgggcccaacaccagaggacttgggcgctgacaggtgggccaagggcgcagggcgtgcgtgcgcgaagcggtacccgcggttcgggccgtgcgatcaggatcggacggaggggatcagaccgggggaaaaacagacggctgcgggcggcgctgctcctctccgcggcggtgaggtcgccagagttgaggcaggcggcacaataggggaaattgggcatggggacgggtgtctcacctcagggcgaaactcggggaggcttggagcggtcttaggcgagtggatggccgggaacatgggcgcgggtctccagcggcggctggcggcgtga

SEQ ID NO: 39697 - DNA, 336 bp, Zea mays
  Peptide Sequence Number=SeqID_81476
atggctcaccggagttcctccggcccgcccgaggctttctcaccgccgttcttccctctctgtcgtggattcatggccccttccccgccattaagttcgttgtgtcgccctcttcctctatgcccaactccggcgaccccggaccccctagctcacgcctgcctcaactccggcgacctcaccgtcgcggagaggagcagtgccgcccgcagccgttcacccctcctcgacaacgagcagttcgaggttcctgagtgtgttgttggagacctccctgagcaacaacctggtgaaggcaagtgtcctctgacccattatgtcctacatactttatga

SEQ ID NO: 39698 - DNA, 837 bp, Zea mays
  Peptide Sequence Number=SeqID_81477
atggcgctttccccctcctccttgcggaaaggcgacgcaggggcgtatgataaaagtcgggaagaggctcgggggctgctctcgcacccggctacggccaaactgttgacagcgtcaacaaaccaacttgataactcggaacctgaccatgcacccgggctacggccaggccgcatgagggaacgatcagaccggccgaggcaccacgaaaagcattcagacctcagaggagtcaacccactcctccgaggcctcgggggctacacccggcggttcggccttgggcacaacaggaggctccgcctcgcccgacctcaggctccggcctcaggaggaggtctccgcctcgcccgacccccggactcggcctcgacctcggtctcgggaagaatcgtgtcctcgcccgaccccggcctcggcctcaagagaagtctccgcctcgcccgaccttggactcggaccgaccgcgctaacaggggatacatcattaccctatctctagccagctcaggctacaaggaacaagaccggcgtcccatctggcttaccccggcgacgggtaatgatggtgccccgcatgcaaccatgacgccggtggctctcagccccttacggcagcaaggagacgtcagcaggatccttgccgcactgccagctgtgctcctacaggacttaggcgcttctccgacggccacgctatcacgtgtacagggctcaagctctcccccgacagccacgttggcgtgtacgcagggctcaggcattcctctgccagacacgttagcacatagctacgcccccccattgtacgtctggaccctctccttgcgtctataa

SEQ ID NO: 39699 - DNA, 927 bp, Zea mays
  Peptide Sequence Number=SeqID_81478
atggctgcctcgggctggagcagtagtcacagacgagttcacgcctcgcccgagggccgcctcaggcagcaggcaccccctcagctctcccgaagcccagctcgggcaggcttcgttgtgaagcaaccttggccagaccgcctcaccaaccgaccgcttcgcaggcgcattcaatgcaggggacgcctgacgccgtatcctgacacatgcgcctcagtcggccaggccgaagtgaccgcagtcacttcgcccctcttctttactgtccgatatgacgggaaaacagcgccgctcgccccgctccgactgtcgtgccaaccacccaggcgaagactaacaacaagtcatgatcaaccaccgagttcggccttgggcacaacaggaggctccgcctcgcccgacctcaggctccggcctcaggaggaggtctccgcctcgcccgacccccggactcggcctcgacctcggtctcgggaagaatcgtgtcctcgcccgaccccggcctcggcctcaagagaagtctccgcctcgcccgaccttggactcggaccgacccgcgctaacaggggatacatcattaccctatctctagccagctcaggctacaaggaacaagaccggcgtcccatctggcttaccccggcgacgggtaatgatggtgccccgcatgcaaccatgacgccggtggctctcagccccttacggcagcaaggagacgtcagcaggatccttgccgcactgccagctgtgctcctacaggacttaggcgcttctccgacggccacgctatcacgtgtacagggctcaagctctcccccgacagccacgttggcgtgtacgcagggctcaggcattcctctgccagacacgttagcacatagctacgcccccccattgtacgtctggaccctctccttgcgtctataa

SEQ ID NO: 39700 - DNA, 168 bp, Zea mays
  Peptide Sequence Number=SeqID_81479
atgaagctaaccatagtagcccaaaaggtaatcaaggaccagaggacacttgccttcaccaaacagatgctcagggtctttgatctcatagaactcgaagagttcgatcacttggtcgccatgcttgatcgtcgattcctcgaagctcagaaacgaaccgcgatctaa

SEQ ID NO: 39701 - DNA, 198 bp, Zea mays
  Peptide Sequence Number=SeqID_81480
atgacggatttcctctcggctccggtgagggtcttcttccacgatcgcgattcgtttctgagcttcgaggaatcgacgatcaagcatggcgaccaagtgatcaaactcttcgagttctatgagatcgaagaccctaagcatctgtttggtgaaggcaagtgtcctctgacctattatgtcccatacgaatcaagctga

SEQ ID NO: 39702 - DNA, 216 bp, Zea mays
  Peptide Sequence Number=SeqID_81481
atggcctggccgcggccccctgcccgcgcgagcttccccctagatcgcggttcgtttctgagcttcgaggaatcgacgatcaagcatggcgaccaagtgatcgaactcttcgagttctatgagatcaaagaccctgagcatctgtttggtgaaggcaagtgtcctctgacccattatgtcctattcacttataattcactatcccgcattacttaa

SEQ ID NO: 39703 - DNA, 240 bp, Zea mays
  Peptide Sequence Number=SeqID_81482
atgcggccgcgcccgactcggcctccccatgcgcagcccctccccttcccctctctcttccatggatgggaggaacaagatgaggagaatcgcgattcgtttctaagcttcgaggaatcgacgatcaagcatggcgaccaagtgatcgaactcttcgagttctacgagatcgaagaccctgagcatctatttggtgaaggcaagtatcctctgacccattatgtcccatttactatataa

SEQ ID NO: 39704 - DNA, 840 bp, Zea mays
  Peptide Sequence Number=SeqID_81483
atgcacgaattggatggtgccttaccagaacggactggccacggtggagttgtgttttgcggtggcggagaccaatttgggggaaaaggggaattctccggctatggtgggcaattgaggggaagaacggggagcttcgacggtagcgtgcaatttggccgagcaacacaggcggccagagataaggaagaataccagcgcagtgaatacgtgttcaacgccgtggcagctattccgaactatactaatcaaaatttcccccttagaaaaatgccgccgcgcacgaggagaactgcgcgcaaacatactggaccgattggtgtgccatgtcaccagctggccccaagacatgataatagtagtagtggaagcaacgatccgataggggttctcgaagcagaactccaagtggaactccgtcgcaggacgaatatatgggtcgcagatggcgaccgaataaatgaattgagaagagacgtcagccacctgcgagatcagctcgcggaccgagatctagcactcgactgggttgttcaatctcgttcgcttgcctgggccaaggaggaaacagctcaagctcgagtagcagagctcaacttggccgttgataacctgcagacatattgcaataccttacatgaagaagttcatgtattatattcgcaactgcaccccagtgaacctgcggatcctgtcgagtcggaagttggaccctcgcatgttgcaagagaagtgcttggtggtgagttggaccttttcaggccccctccttctatgaggctggtcgatgaatggtctcccacacccgacgacgaggcttctaagagcaaccggaagtag

SEQ ID NO: 39705 - DNA, 611 bp, Zea mays
  Peptide Sequence Number=SeqID_81484
ggagcttcgacggtagcgtgcaatttggccgagcaacacaggcggccagagataaggaagaataccagcgcagtgaatacgtgttcaacgccgtggcagctattccgctggccccaagacatgataatagtagtagtggaagcaacgatccgataggggttctcgaagcagaactccaagtggaactccgtcgcaggacgaatatatgggtcgcagatggcgaccgaataaatgaattgagaagagacgtcagccacctgcgagatcagctcgcggaccgagatctagcactcgactgggttgttcaatctcgttcgcttgcctgggccaaggaggaaacagctcaagctcgagtagcagagctcaacttggccgttgataacctgcagacatattgcaataccttacatgaagaagttcatgtattatattcgcaactgcaccccagtgaacctgcggatcctgtcgagtcggaagttggaccctcgcatgttgcaagagaagtgcttggtggtgagttggaccttttcaggccccctccttctatgaggctggtcgatgaatggtctcccacacccgacgacgaggcttctaagagcaaccggaagtag

SEQ ID NO: 39706 - DNA, 1413 bp, Zea mays
  Peptide Sequence Number=SeqID_81485
atggtgtacctctccacctccaagatctgcttcgtgctgctcctcaacacgggcctggttgccatgtgcgtcgcctggcagctcgccaggcgtctcttcctcggctccctccgggaggccgaggtcgagcgcctcaacgagcagtcctggcgggaggtcatcgagattctcttcgccgtcaccatcttccggcaggacttctcggtgtccttccttgccatggtcgctgcactgcttcttgttaaggcactgcactggctcgcgcagaagagggtcgagtacatcgagaccacaccctccgtgcccttgctctcgcacatcaggattgtatccttcatggttttcctgctcacggtcgattgcctcttcctgtcaaactcactcaggtcactcatacagaagcgggaggcgtctgttgccatcttcttctcctttgaatatacgatactagcaacatccactttatcaacatttgtgaagtacatattctatgtcagtgacatgctaatggaaggtcaatgggagagaaaggcagtttatacattttacttggagctcatcagtgaccttgtgcacttgtcattatacatgctcttcttcatagctatcttcttgaactatggtgtcccgctgcacttgattcgtgagctatatgagaccttccgcagcttcagaattcgcattgcagattacatacgttacagaaagatcacttccaacatgaatgaacgctttccagaagctacatcagaagagctcgatgcgagtgatgctacatgtattatttgccgtgaggagatgactacagcaaagaaactgctctgtgggcatctgttccatgtgcattgtctgaggtcatggctagagcgccaacacacttgccccacgtgcagagctccaatcgttcctgcagataatggacgtgctgcatcatcacgacaacatggagcccaggctggggttcaacctggtactgccactccatcctcagaaggagcaccaggtgagaacatgagcaggcgccaagcaaaacttgaagctgctgctgcagcagcttctttatatggaagatcttttgtttatcctccagcaaacaccctaaacaggtctggttctccccagcctacatcaagtgcaccacaatctgaagccagtagctccaatcatcagtcacaaaaagaccaagaaacacagctccaaaacagcagcgatggtttagtgcctctgccttttagtgcagatggtgttgttggttcaggaacaagcacaagagatcttgaaaattcactgcagaaggcacaagaaaactttattaagagccagattgagatgttacaaatccaactgcaaatggtgcagcgtggcgctgctgggttgagcagtagcgagaacactgagcacacagaagactga

SEQ ID NO: 39707 - DNA, 228 bp, Zea mays
  Peptide Sequence Number=SeqID_81486
atgcagtcccgaaacagcagcgatggtttagtgcctctgcctcttaatgcagatggtgctgttggttcaggaacaagcacaagggaccttgaaaattcacttcagaaggcacaagaaaactttattaagagccagattgaggaaaatgaatttgttgcactatgtgtgatgtttttaataccttctgactataatgttagctgtaggctgcaagtccacgagctttga

SEQ ID NO: 39708 - DNA, 183 bp, Zea mays
  Peptide Sequence Number=SeqID_81487
atggatgttttgatgattaggaaccttggagaggaccagcaaggacttgggaaaggcctaggtgttgaggaggagcagcaagggcgcaacaacaggaaggagatcaagtccgactcggctgcgactccatctcgggcaggaattagccctcgtggtgaggtcaatcgcgcagtgcacggttga

SEQ ID NO: 39709 - DNA, 183 bp, Zea mays
  Peptide Sequence Number=SeqID_81488
atggatgttttgatgattaggaaccttggagaggaccagcaaggacttgggaaaggcctaggtgttgaggaggagcagcaagggcgccacaacaggaaggagatcaagtccgactcggctgcgactccatctcgggcaggaattagccctcgtagcgaggtcaatcgcgcagtgcacggttga

SEQ ID NO: 39710 - DNA, 135 bp, Zea mays
  Peptide Sequence Number=SeqID_81489
atggcgcggcagcgatcagcgatgtatgtagggcgcatccacggcacggccttggatgggcctgctgcgatccgagggtgcctgcgcttgcgtgcgagtggaacaatcccagcagttggtttttgggaaatttag

SEQ ID NO: 39711 - DNA, 618 bp, Zea mays
  Peptide Sequence Number=SeqID_81490
atgacgttttcatcaaccgccagcggtttgccgggctgttggaccggccacggcccacgaacatggcaaggcaacgtgtctgtctgcattctgcaatggccaatggatggctgctgctgcgtgcctctgcaagctggggctggagtagctctaaatcatcgcaaccgctttaatggccacaccagcagcagcttggaaggaaggagcgcacctgcggccgactgcgagattgtgattgccagtggccaatggggtaaacagaggcaagccgccgacaagcttcggaattcctacactggatctaatctaatgaaaaaagagaagggatttccaataccacgtgggcgtggtgtgcacaccaagcgcaggcaccctcggatcgcagcaggcccatccaaggccgtgccgtggatgcgccctacatacatcgctgatcgctgccgcgccatcttttttcctgcctggcagaatttacccgtttctggcgtagtagacgacgcccatgtgatgtgccgcgcatcgctgttcatccgccgcatcctcaccgcatgtgccaggcagtgctcagtggcaaaatggagaagacagagacaaatgacagggatgtctgtttattga

SEQ ID NO: 39712 - DNA, 187 bp, Zea mays
  Peptide Sequence Number=SeqID_81491
atgacacgcgccggaatcagcagggtcgacgatgtcgaagtagcgaaatcagcagggtcgacgagatgcacctctgcggtcgggacgaagggaactaaaaggcggctcagctatgaagagaggcgaaagcgaactgggatctgggatgatatggaggctggctgccgggctccttttatagggccga

SEQ ID NO: 39713 - DNA, 519 bp, Zea mays
  Peptide Sequence Number=SeqID_81492
atgaggggtgccacgccgtcggatcggaggcgagagacacacatcgatgaaggaacgacgtcgcccgttgttgccgccgacagcgtgcgtggcactcgtgaaggttgctgcatgcgcaatcaaggacgctcgatcgatcgtttcggatctcacgttcccgcagagcacgtgataagcgtgaccaatagtagcagcacagtacgtaccggaggttgggagttgggacctggactggatagcctcggactggagcagcaggaccaaccgatggatcagctgggtcgacgaggtcagcagatcacgagcagtcgcgtgaagacgcttcccaaaaaccttattcgccctctcccggtgcaggatctagaagacgaagggttccggagacctgctctcctgatcgcacatgcacctctgcggtcgggacgaagggaactaaaaggcggctcagctatgaagagaggcgaaagtgaactgggatctgggatgatttggaggctggctgccgggctccttttatag

SEQ ID NO: 39714 - DNA, 348 bp, Zea mays
  Peptide Sequence Number=SeqID_81493
atggaacctacccttgctcccacaaagccatgggctgagaagactgctgctgccatgacatttgttgtaccgattcctccacaaatccctaagcccctcgatcagctgggtcgacgaggtcagcagatcacgagcagtcgcgtgaagacgcttcccaaaaaccttattcgccctctcccggtgcaggatctagaagacgaagggttccggagacctgctctcctgatcgcagatgcacctctgcggtcgggacgaagggaactaaaaggcggctcagctatgaagagaggcgaaagcgaactgggatctgggatgatttggaggctggctgccgggctccttttatag

SEQ ID NO: 39715 - DNA, 519 bp, Zea mays
  Peptide Sequence Number=SeqID_81494
atggctactgcacaggagattgatccctttttaaaggcggatctccccactcgcacccccaagcgtcacgggcaaagtctccaccaacgtgctccagggttcccaccctatgacacgggggctgggtcccacacatcatacgagttgacccgaaacgcgaagaaggcaaaccgctgcacgcgaagcatggcaagcgacacctctggcaggcgaagcgagcgccgtttcacctccgtcatgatgaccgcgtcaaaaaaggggttcaaagctggcccctcggaacggtttgatagccgccccagagcacgcagagtcagggattaccctgggtacatccgttacatggctgaggctcgggctacgctcctgaggtaccctaggacatttccaagaccagcgggaacgatttgtaatggaatcccaccagagggaggcatcgagccctcagaccctatcaaatgggtccgggtccagcaaatcacctgcaggtacttttggagcgtgcctctgggtcactag

SEQ ID NO: 39716 - DNA, 830 bp, Zea mays
  Peptide Sequence Number=SeqID_81495
atgatgactgcgtcaaaaaaggctggcccctcggaagggttcgacagctgccccagagcacgcagagtgacggatgactctgggtacgtctgttacatggccgaggctcgggctacgctcccgaggtccgggtccggcaaatcacctgcaggtacttttggagcgtgcctctgggccactagtcgacccttatcgaacgaggcacaggcgtccactcggatcacccagactgatgggcacgattcaggtcaaggcttcgtctacccaaggggcgtgatctcgcctcgcccgagcccagcctcgggcgagaactgtagtcacggacgaagttacgtcttgcccgagggcctcctcaggcagtgggcgcaccctcgacacgcccgaggcccaactcgagcaggcttcgtcgagaagcaaccttggccaaatcgcctctccaaccgaccgtatcgcaggcacattcaatgcgaggatcgtctgacaccttatcctgacacacgcgcctcagtcgtcaaggtcgaagaagctccacctcgcccgaccttaggcctcggcctcggaaggaggtctccacctcgcccgaccccagggcttagcctcaacatcagcctcggaaggtggtctccgcctcacccgaccctagggctcggcctcaacctcggccttgggaggaatcacgtcctcgcccgaccccagcctcggcctcaggagaagctacgggggaacaagaccggcgtcccatctgactcgccccggctcaagcacttctccgacggccacgttatcgcctacgcagggctcaagcacctctccgacagccacgttggcat

SEQ ID NO: 39717 - DNA, 564 bp, Zea mays
  Peptide Sequence Number=SeqID_81496
atgcgtagcttcggaactgttcatccttctcccagaccacgctttccatatcgtgtacaacttcattctgaggctgaaggtccctgtgaatgcatcatacttggaaaacatgttagttgtgtttttgaggaccttcggaagatgaaggcccccaacatagccgttgggctaccgttcactgtcaatgggaaaggacaccctcttccacttatcatcgacgcgtatgacaatgctattggtactgctagggaggtttacgaggaagaaagtatcgaaccagtaacgggagatgtggctcttgaggactctcttaatgaggaacaaagagccacctatgataagattccatctgccgttgacactaatcagggcagattgttctttgtggatggactaggtggcaccgagaagaattatctatatagagtgctgctcgtgacactgcgcagccagggtaagattgcagtggcaacaactacacctgacattgcggcttccataatgcctagaggaagaaccgcccattcacgcttcaagatacctctcactattgacgatggctaa

SEQ ID NO: 39718 - DNA, 516 bp, Zea mays
  Peptide Sequence Number=SeqID_81497
atggcgcagggccgaagctatgcgcaggggagcttcggcatgatagcagaaaaggaaaccgacttaaagatgaaaaggctatttagaccccgatggattgctatagagttagtagcaaatgaacatgctacagtcaatgggaaaggacaccctcttccacttatcatcgacgcgtatgacaatgctattggtactgctagggaggtttacgaggaagaaagtatcgaaccagtaacgggagatgtggctcttgaggactctcttaatgaggaacaaagagccacctatgataagattccatctgccgttgacactaatcagggcagattgttctttgtggatggactaggtggcaccgagaagaattatctatatagagtgctgctcgtgacactgcgcagccagggtaagattgcagtggcaacaactacacctgacattgcggcttccataatgcctagaggaagaaccgcccattcacgcttcaagatacctctcactattgacgatggctaa

SEQ ID NO: 39719 - DNA, 699 bp, Zea mays
  Peptide Sequence Number=SeqID_81498
atggtgactactcgctgggagaatggcgggagcaactcgccgtcattccggaggatcacccgcataaagcggctcgccggcacaccgaatccccgctcgtggaaggagacgaagctcacaatgtaccccggcgggacgggaaagggggataccctgaaaaaggatccttcccgtgaaggaatcaggctccgaatctccctactgatcagtggttcaaaggctggtccctcggaagggttcaacagccgcctcagagcacgtgggctccacacccaatactggtcagaggttcgacggccggaccctcggaagggttcaacggccgcctcaggctactcgggctccgcgcccactactgatcaggggttcgaaaggctggcccccgaagggttcacagccgcctcagacacagagcgagggatgaccatggctcaaggagcgggtgatacaaacttcttggggtcgtccacaaatttggagactcccaagcaacctctaaccgtcaatgaacacgaggttccaagagtaacaaatccgcacacggttaagtttgcaacgagctcaagaacaagagaatgggagaatcgagatgaaattgacagcgagttcgatcgagttcacctcacaccaagggtccttcaaatgattgaaggagatgcgattgcgggtgtgaaaggtgaaatgaatgctcttgtttga

SEQ ID NO: 39720 - DNA, 300 bp, Zea mays
  Peptide Sequence Number=SeqID_81499
atgtcagaccttggaatgtcaactacaagtgatgtcactaagtgcaaagaatgtggtgtgttgacaagtgaaaacaactctataaataaaacagctgatgaacagacattcaagacacaaaaggatgcaccaccaaaccaacagacaaccttgtcgtcgcatcaggtccaagaaacgaaaagggaaacatggaaaagtcaagaaataacttcagaaaagcttgctatcaatgtggacgtgaaggtcattacttctgtaactgtcctgagaagagttcactacagatcacctccgagatga

SEQ ID NO: 39721 - DNA, 1038 bp, Zea mays
  Peptide Sequence Number=SeqID_81500
atgtcagaccttggaatgtcaactgcaagtgatgtcactaagtgtaaagaatgcggtgtgttggcaagtcaaaacaacactataaatgaaacagctgatgaacagaccttcaagacacaaaaggatgaacaaccaaaccaacaaacaagtgaccttggaacatgttgttgttgcgagtactatggaattccttgtcgccagatcagtacaaacgaaagtgaaactacaaaacagaagaaccggattttgttttctggcattaaaagacaaatgtctccccaagaacaagtaatagcagagtctctcatacctaatgcattgtcagttgatgaattgcaaagtattccaaaaagaaagcatcacaaggatgcccagccacaagaagaaatacatgagtgttacattgatggatggactattacttgcacacagtttcagcctcgtcgtcgcatcaggtccaagaaactaaaaggaaaacatggaaaaagtcaagaaataacttcaagaaaagcttgctatcaatgtggacgtgaaggtcattacttccgtaactgtcctgagaagagttcactacagatcacctccgagatgaagctacctcagttttcagacacggaatatgaacaaaaatgcatagaaacttctatcaacatagtgaagaacaacaaaaggtatagaaaaacatttggatatatgagtagtccacctcaaccacaagcaaaagccccgaaacacatggatacccaaaccgaagaatcaagtcagactcagctatatgagatacagacactcaatcaaccctcacccccggttggtcaagcaaagttgactcgcaaagaactcaaggcaagaggtgcttgctactactgcaaaaacgaaggacatcttattcgtgaatgccccaagaagcgtctagaccgaataaagaagaaagctgccaagcatgacctaagcaatactttagaagacccaccattttataagtatgatgatgaaggacgcttgattagggagcaaagaagtaagaaagttccttaa

SEQ ID NO: 39722 - DNA, 138 bp, Zea mays
  Peptide Sequence Number=SeqID_81501
atgacggcgattggtgagctcgggaccacggatagggtatttataccgacggccaagcctatattggcggcggattcacgggcagttgaagcaatctgcgagctcatcgtttcctttatactatttccaattttctaa

SEQ ID NO: 39723 - DNA, 528 bp, Zea mays
  Peptide Sequence Number=SeqID_81502
atggcggcgattggtgagctcgggaccacggatagggtatttataccgacggccaagcctatattggcggcggattcacgggcagttgaagcagtctgcgagctcatcgctcgtgctctggatttgttctgccacgccatactgagaagaggatttgagagagagaggggtggagggtgccaacgaggtcgcgattgctcctcattgccaagcgtggtccggtggggacctggcaaggggcgccacgacgaaaggactgggcttcctcgtcgtgtgcagaagacgaactgggcggccgcggagcgtatcagctcgtgcctgcgcagtgccacgacgactgtagactcaagataccccttcgccgttgcaagttcacaaaagaaaccctggaaaaactgtgaatcaacccgcagttcacataacagtactctgtgtcttaggaacacttgcgttgaagcccctggactctctggtaatgatgtcctcggtccagaacacttaggaaattcagaaattataaagaactag

SEQ ID NO: 39724 - DNA, 600 bp, Zea mays
  Peptide Sequence Number=SeqID_81503
atggccgtgatgggttcaacatcggaaaatatgtacctctgccaggtgaggaagcaacaaatttttgttgcttttgttccaaggtggtgcctaaggaagaaagtcaagactgaagcctcgggaggaaatatgccgccgcgcacaaggaaaaccacgcgcaagtccactgggccgcttggcgtgcctcgccatcagctggccttaaggcatgaggatagtagcagtggcagcaatgatcccattggagatctagaagctcaggtggagcagcttcgaacggagctccgtcacaggaacagtgtgtgggtcgaggatggtcagcgcataaatgagttaagaactgacatccggcatctgcaagacgagcttgccgaacgagatttggcactcgactgggccgtcaactcgcgttccattgcttgggaccgagaggccaaagctcgagcccaccctgtcggaatgggagctagaccttctggaacagcaggtgaagcttttggcggggaactggatcttttcaagccccctacttcaatgaacctggctgatgaatggactcctacacccgacaacgaagccgcgaaggataataaatactag

SEQ ID NO: 39725 - DNA, 432 bp, Zea mays
  Peptide Sequence Number=SeqID_81504
atgagcttgccgaacgagatttggcactcgattgggccgtcaactcacgttccattgcttgggacccagaggccaaagctcgagcccaccctgtcggaatgggagcagggccttctggaacagcagatgccatctcgaactcgtgcacatgacggtgcgagaacatcccgtggccaagatgatacaccaaatccaccgccggttccacccacgctcgccgaggctatcgccgccttggtcaccgcaaccgctgacaacacccgcttccttcgtgaaatggcgggacagcaactacagcagcaaggcgggagagcttatccgcaaggaccccgcgaaacttcatatttggatttctcagaaacatgtcccccactatttgtcaaggctgaagatccccttgaagctgacaaatggatttgggtcattgagtag

SEQ ID NO: 39726 - DNA, 312 bp, Zea mays
  Peptide Sequence Number=SeqID_81505
atggagaaagagctgctgcggcatcagcctctcgccatggatggagctcagatgggggaggaagaagtcggccggagatgcagcgcaggtactggcggccatgggagaaactcgagctcgctgccatgggggatgcttcagcgcgtcgaggaagaaggagcagggggcgccatggctggccgaggtgtggaggccgtcggccatggaaggcagagagcagagggcatgcacaccaaggaggaagagggctggcgtggggagaagaagacagggaggctgtggcggctggggagaagtgaggggtgggagtga

SEQ ID NO: 39727 - DNA, 312 bp, Zea mays
  Peptide Sequence Number=SeqID_81506
atggagaaagagctgctgcggcatcggcctctcgccatggatggagctcggatgggggaggaagaagtcggccagagatgcagcgcaggtactggcggccatgggagaaactcgagctcgctgccatgggggatgcttcagcgcatcgaggaagaaggagcagggggcgccatggctggccgaggtgtggaggccgtcggccatggaaggcagagagcagagggcatgcacgccaaggaggaagagggctggcgtggggagaagaagacagggaggctgtggcggctggggagaagtgaggggtgggagtga

SEQ ID NO: 39728 - DNA, 777 bp, Zea mays
  Peptide Sequence Number=SeqID_81507
atgccccctgcaccacctcagggcatcctagctgctggagcagaccgtgacggagacggagacgatgacgccggtggcagttcaagccacggcacggagctctcggaggagccagagccagatggatggatcgctagacccatcactcgtgacgccgctcgggggtgtcacttccatgacgctctcgataccctgctgcgtcgggccttcgaccgacacacatggtctatcgagtaccgttgtgtagtctaccagcatcgtcgcgtgctatacccggaccagtgggaggctacttgcttggtgcgtcgtccagacgatgatctccggggtgcagaagccttcttagagcactattctatcactaagagggatactgccgaggcagccatgcaagatgtagcacgacaggcactttcccagtattgctcattgttcagcggggtagctgatggtcttgacctgaagtactaccctcgccgttcgaccaacagtgctggaggtgtgattgtctcaccagttggcgagggcaatcccaggctgagcaacatggtcaacttggtcgtcgtgctcaacacagagttggaccatgcccttgacgacttgggcaaggttcgggcggaggttgcggaattgtgtgctgaatgcgcgacacgccactatcttgattgtggttctcccgcccttgttgggattcagcacccttaccgttcaccgccccatggtcgcttcgactatggtaccccagactgcaggacccgcatagatttagatccatag

SEQ ID NO: 39729 - DNA, 777 bp, Zea mays
  Peptide Sequence Number=SeqID_81508
atgccccctgcaccacctcagggcatcctagctgctggagcagaccgtgacggagacggagacgatgacgccggtggcagttcaagccacggcatggagctctcggaggagccagagccagatggatggatcgctagacccatcactcgtgacgccgctcgggggtgtcacttccatgacgctctcgataccctgctgcgtcgggccttcgaccgacacacatggtctatcgagtaccgttgtgtagtctaccagcatcgtcgcgtgctatacccggaccagtgggaggctacttgcttggtgcgtcgtccagacgatgatctccggggtgcagaagccttcttagagcactattctatcactaagagggatactgccgaggcagccatgcaagatgtagcacgacaggcactttcccagtattgctcattgttcagcggggtagctgatggtcttgacctgaagtactaccctcgccgttcgaccaacagtgctggaggtgtgattgtctcaccagttggcgagggcaatcccaggctgagcaacatggtcaacttggtcgtcgtgctcaacacagagttggaccatgcccttgacgacttgggcaaggttcgggcggaggttgcggaattgtgtgctgaatccgcgacacgccactatcttgattgtggttctcccgcccttgttgggattcagcacccttaccgttcaccgccccgtggtcgcttcgactatggtaccccagactgcaggacccgcatagatttagatccatag

SEQ ID NO: 39730 - DNA, 777 bp, Zea mays
  Peptide Sequence Number=SeqID_81509
atgccccctgcaccacctcagggcatcctagctgctggagtagaccgtgacggagacggagacgatgacgccggtggcagttcaagccacggcacggagctctcggaggagccagagccagatggatggatcgctagacccatcactcgtgacgccgctcgggggtgtcacttccatgacgctctcgataccctgctgcgtcgggccttcgaccgacacacatggtctatcgagtaccgttgtgtagtctaccagcatcgtcgcgtgctatacccggaccagtgggaggctacttgcttggtgcgtcgtccagacgatgatctccggggtgcagaagccttcttagagcactattctatcactaagagggatactgccgaggcagccatgcaagatgtagcacgacaggcactttcccagtattgctcattgttcagcggggtagctgatggtcttgacctgaagtactaccctcgccgttcgaccaacagtgctggaggtgtgattgtctcaccagttggcgagggcaatcccaggctgagcaacatggtcaacttggtcgtcgtgctcaacacagagttggaccatgcccttgacgacttgggcaaggttcgggcggaggttgcggaattgtgtgctgaatgcgcgacacgccactatcttgattgtggttctcccgcccttgttgggattcagcacccttaccgttcaccgccccgtggtcgcttcgactatggtaccccagactgcaggacccgcatagatttagatccatag

SEQ ID NO: 39731 - DNA, 663 bp, Zea mays
  Peptide Sequence Number=SeqID_81510
atgccccctgcaccacctcagggcatcctagctgctggagtagaccgtgacggagacggagacgatgacgccggtggcagttcaagccacggcacggagctctcggaggagccagagccagatggatggatcgctagacccatcactcgtgacgccgctcgggggtgtcacttccatgacgctctcgataccctgctgcgtcgggccttcgaccgacacacatggtctatcgagtaccgttgtgtagtctaccagcatcgtcgcgtgctatacccggaccagtgggaggctacttgcttggtgcgtcgtccagacgatgatctccggggtgcagaagccttcttagagcactattctatcactaagagggatactgccgaggcagccatgcaagatgtagcacgacaggcactttcccagtattgctcattgttcagcggggtagctgatggtcttgacctgaagtactaccctcgccgttcgaccaacagtgctggaggtgtgattgtctcaccagttggcgagggcaatcccaggctgagcaacatggtcaacttggtcgtcgtgctcaacacagagttggaccatgctcttgacgacttgggcaaggttcgggcggaggttgctgattgtgtgctgaatgctcgacacgccactatctga

SEQ ID NO: 39732 - DNA, 1650 bp, Zea mays
  Peptide Sequence Number=SeqID_81511
atggatatgcagttcacttttgttggtgctggattgcctggttcttgccatggcatggcagtgctcaggagttgtatggaagaagcgaactatccacacccaccagcagggagctacctcgtcgccttccggcgccgtaccaggtgcatccgtgtcgtggctaggtacgcggaaagggaaggcaaggtcagaccgtcggtgctgcgtgtggcgaagcctccaaccactaagcagggagaatacccgccgccccgtgtcgttcgttctccagctccagctgcaggctgcaggctgccagctggggtggcggttgcctacgcgcggtcgtcacgccgaagctgtggccgcgtgacccggaagatgaacgggcggctgtcggccgagtaccgggggctggaggtgaaggtgccgaacctcttccggtgccccatctcgctggacgtgatgcactcccccgtgagcctctgcaccggcgtcacctacgagcgcgcctccatccagcgctggctcgactccggcaacaccacctgcccggccaccatgctcacgctcccctccaccgacctcgtccctaacctcaccctgcgccgcctcatcgcgctctgggcgtccacggccgcgccctcctcctcgtcgcccgccgcgtccgccgtcgggcccacgccggccgcggccgcggccgagctcctccgccggatcgctgaccccggcgcggacccctgccccccgctccggaagctcgcggctttcctctccgacgacgacgtggacgagttcgacaagaacgcgctggcgagggccggcggtgccgccgagaccgtggcgtttgtgctgcggagggcggacagggaggccgcggaggccgccgtgcgcgtgctcgcggcgatcgcggcgtccgactgcatcgaggaggagagcaagaggcgcgtggccgctgcgctcgccgccgacgcgccgtccgcggccgcgtccctggcgcgcgtgctgcggagcgggacctcgctggaggcgcgcgtcgacgcggcgaggctggtggagtcgctgctccgcaatgcggcaccgggggcgcgggccgcggtggcggagtccgaggacctggtccgcgaactggtccgcctcgtgggccccgcggacgagaagaagggcagcctggacgggcaggccgtggcggcgggaatgtcgtgcctagcggccgtcgcggcgacgcggcgtgcccgcgctgcgatggttcggctgggcgccgtggccgccgcggtgcgcgtcctggaagccgacgccgggcccccgggccaggcgctccgcgtgctggaggccacagtggggtgcgccgagggccgcgccgcggtgtgcgagtccgccctgtcggtggtgcccgcggtggtgtccaagatgatgaaggctggggtgggcggcgcggaggcggcggtgtcggtgctctgggcggtgtgccaccggtaccgggaccggcgcgcggtggaggcggcggcggcgtgcgagggcgggctcaccaagctgctgctgctgatgcagagcgggtgctcggcggctgcgcggcagatggcgtcggagctgctcaagatcttcagggtgaacggcaagagctgcgtcgcggggtacgactccaagactagccacatcatgcccttctga

SEQ ID NO: 39733 - DNA, 1302 bp, Zea mays
  Peptide Sequence Number=SeqID_81512
ggaaggcttcagatgaacgggcggctgtcggccgagtaccgggggctggaggtgaaggtgccgaacctcttccggtgccccatctcgctggacgtgatgcactcccccgtgagcctctgcaccggcgtcacctacgagcgcgcctccatccagcgctggctcgactccggcaacaccacctgcccggccaccatgctcacgctcccctccaccgacctcgtccctaacctcaccctgcgccgcctcatcgcgctctgggcgtccacggccgcgccctcctcctcgtcgcccgccgcgtccgccgtcgggcccacgccggccgcggccgcggccgagctcctccgccggatcgctgaccccggcgcggacccctgccccccgctccggaagctcgcggctttcctctccgacgacgacgtggacgagttcgacaagaacgcgctggcgagggccggcggtgccgccgagaccgtggcgtttgtgctgcggagggcggacagggaggccgcggaggccgccgtgcgcgtgctcgcggcgatcgcggcgtccgactgcatcgaggaggagagcaagaggcgcgtggccgctgcgctcgccgccgacgcgccgtccgcggccgcgtccctggcgcgcgtgctgcggagcgggacctcgctggaggcgcgcgtcgacgcggcgaggctggtggagtcgctgctccgcaatgcggcaccgggggcgcgggccgcggtggcggagtccgaggacctggtccgcgaactggtccgcctcgtgggccccgcggacgagaagaagggcagcctggacgggcaggccgtggcggcgggaatgtcgtgcctagcggccgtcgcggcgacgcggcgtgcccgcgctgcgatggttcggctgggcgccgtggccgccgcggtgcgcgtcctggaagccgacgccgggcccccgggccaggcgctccgcgtgctggaggccacagtggggtgcgccgagggccgcgccgcggtgtgcgagtccgccctgtcggtggtgcccgcggtggtgtccaagatgatgaaggctggggtgggcggcgcggaggcggcggtgtcggtgctctgggcggtgtgccaccggtaccgggaccggcgcgcggtggaggcggcggcggcgtgcgagggcgggctcaccaagctgctgctgctgatgcagagcgggtgctcggcggctgcgcggcagatggcgtcggagctgctcaagatcttcagggtgaacggcaagagctgcgtcgcggggtacgactccaagactagccacatcatgcccttctga

SEQ ID NO: 39734 - DNA, 648 bp, Zea mays
  Peptide Sequence Number=SeqID_81513
atgaccagaggagtttgtcgcgcacactttgaatgtcaattgtgccaagtttgggaggcgagcatcaaggatcctcatcactggtggggaggatttgaaggtcaatctttgggctatagggaaacccggtgccctcctggctttacaagtccagttgagtcagtaagctttgactcttctaaagttacgataggtgctggtgcagcaagtggaacgataaaaatatggaatattgaggaggcgaaagttgttcgaactttcactggacacaaatcaagttgtgcatctcttgatttccatccttttggagaattcttagccattgggtcttcagatacaaacatgaaaatatgggatactcgacagcagagatgcatccacacatacaagggtcatacccaacgaattaatgtgcttaaatttactcctgatggccgatggattgtttctggtggggctgataacttagtgaaggatatgcccgggcttgcattcttcacgacatatgcacttttagtgctcttctgggctaagatttattatcaggcacgtgccatgtcgactgattggcttagaccaactttctattggatcaacggtgtggtctatgcaattcaggtgaaaattgaggacatttaccaacaataa

SEQ ID NO: 39735 - DNA, 648 bp, Zea mays
  Peptide Sequence Number=SeqID_81514
atgaccagaggagtttgtcgcgcacactttgaatgtcaattgtgccaagtttgggaggcgagcatcaaggatcctcatcactggtggggaggatttgaaggtcaatctttgggctatagggaaacccggtgccctcctggctttacaagtccagttgagtcagtaagctttgactcttctgaagttacgataggtgctggtgcagcaagtggaacgataaaaatatggaatattgaggaggcgaaagttgttcgaactttcactggacacaaatcaagttgtgcatctcttgatttccatccttttggagaattcttagccattgggtcttcagatacaaacatgaaaatatgggatactcgacagcagagatgcatccacacatacaagggtcatacccaacgaattaatgtgcttaaatttactcctgatggccgatggattgtttctggtggggctgataacttagtgaaggatatgcccgggcttgcattcttcacgacatatgcacttttagtgctcttctgggctaagatttattatcaggcacgtgccatgtcgactgattggcttagaccaactttctattggatcaacggtgtggtctatgcaattcaggtgaaaattgaggacatttaccaacaataa

SEQ ID NO: 39736 - DNA, 516 bp, Zea mays
  Peptide Sequence Number=SeqID_81515
atggacaaggatcgtcaagatgcgacgcggaagcgtcggacgttcactagggtcggggaccctagtcgcgaggtcaagagggcatggggaggcatgaaatccaccgcccccagcagcagcagaccaccgccggctgcgaagctagccgtccccgggcccagcaaatcttcgtcgggtgcgagggctgtcactttcgggtcgggcaagccgccctcggctgagcccacgaaggagcgaaggccaccgtctccggcggccgccttcgccgaccatgttgcgtcgggcgctctgacttcagagttcgctgccgagaggcaacgactcgagggcaggattgagtgcctccgggcgcagcatacggaagctgctcgggacaagtcagctacagaaaacaagagccgtaggctgaccaagaagttggcggctgcagaggccgagaaggaggatctcaggcgtcagttggcggcagagaggaaggacgtgaacagagcctgtgctgatgcgcaggctacataa

SEQ ID NO: 39737 - DNA, 402 bp, Zea mays
  Peptide Sequence Number=SeqID_81516
atggcgggttctgttgcgcaacagctgaagcatgcaacgcagcagctgaagcatgcggctgccttcgccgatcatgttgcgttgggcgctctgacctcggagttcgctgccgagaggcaacgactcgagggcaggattgagtgcctccggacgcagcatacggaaggctgtgcgggacaaatggtgcgtgatgaggaggccaaagacctcggggacttggagagcacgctacccgaggcgtcgggcacgaaggaggaggctgagggggagctggcaccgccgtccgatggtggcgaaggccccgtggtgacccccacgccgacctatgctggcgaggaccctgtgccggccattgcgccgactggttccgatgtatgggcctacgcagacaaccgctgctaa

SEQ ID NO: 39738 - DNA, 411 bp, Zea mays
  Peptide Sequence Number=SeqID_81517
atgaaatcgcccgagaaactgataaatttcaccgagaaactgataaatttcaccgagaatccaggggaaaatagtgcagctgttggttacctgatctttgatacaaacggtggcctaaatcagatgagaatggtagttccactcctatttggatctgttgcaatggaaaaggttgcttgccacatcgttcattggatatttaggagaaccggtagacatatctttctaactgacgatgatgaagggcagcctccactgttgcagcggatggttgaagatcatgacgatctctactttatttcttggaagataaagcctcaccaagtcatcatctccaggaacgatgttagcgaaagtcaatttaatctggtgctgaacattgagttgcaacaaatcatagattcatactaa

SEQ ID NO: 39739 - DNA, 549 bp, Zea mays
  Peptide Sequence Number=SeqID_81518
atggagcagtgtgtagcccgtttggatgttgccatgtttaatgccatccttcgtgaatcagcaagtgagataccaacagaccctatatctgacccaattgttgacccaaaagtcctaccaattccagctggtgatctaagctttgggtcaggcgcgcagctgaagaactctctccaaccaactatgacaggagcgttagctaggacagcaatcaggctaacaattgtggacaaagttcagtctgaagtcaatgcatctgaagtgcatgaaagggttccactcctgtttggatctgttgcaatggaaaaggttgcttgccacatcgttcattggatatttaggagaaccgttagacatatctttctaactgatgatgatgaagggcagcctccactgctgcagcggatggttgaagatcatgacgatctctactttatttcttggaagataaagccacaccaagtcatcatctccaggaacgatgttagcgaaagtcaatttaatctagtgctgaacattgagttgcaacaaatcatagattcagactga

SEQ ID NO: 39740 - DNA, 633 bp, Zea mays
  Peptide Sequence Number=SeqID_81519
atggcccacaagtcggcgcagttgctcccggtctggcacacgcggagggaggctgggcagtggggcccggtcgtcagcggtgagcgcgtgcggggagaacttgggccgcacgagtgtaaagggcttctgctcggcttctggccgccagaagccgaagctggaaccaaacgctcagcttttggcgcggattctggccgacgcgcttcgatacccgtatcacgtcggaggtctgtcttcggttccaagatccagtggaagcaagcagactccatagccgacaaggcaattggacggatgcaagagatttcggacaagatattttccgtagcgagggaaacaatccatcctagacgcggattgacctcatttgatgctaccaaacttcgtgtagctttggaggagataacttgcatgctggagcaagactctctggtgttgcaagagcatttggacatcgtgaacaactttaacatcccggttgacagcagctatgaaccttctaccttgtcgtcaccacccccatctgacgacgacctgactccacattgggactttgcggagcatttccaaaacttttggggagttgaatatgactccgatcagatgccttcgtttagtgacaatgatgtttaa

SEQ ID NO: 39741 - DNA, 411 bp, Zea mays
  Peptide Sequence Number=SeqID_81520
atggaggagttcgcgaatggaggtcggccgtacctgcgaagacgacggcggtggcgcgttgggtgcgcggcagcggcgcgttgggtgcgctgcggcggcgcgtgcttcggcgagtaccctaacccaacgcgaagtggacagacttctatccgaagccaagtgaaggccgcttccagcggagcgtgcgcggggggcttcttaccgaagcgcgtcggccagaatccgcgccaaaagctgagcgtttggttccagcttctgcttctggcggccagaagccgagcagaagctgaaccaaacaggggctatgggcacatgctgagcttgttgcaaggcggagaaggagatcctgtgtgcgcaggtccactcatcagaggcagcgcacacgcacaagagatggggcaggaatgctga

SEQ ID NO: 39742 - DNA, 387 bp, Zea mays
  Peptide Sequence Number=SeqID_81521
atggggaggaagcggcgagcgtgtcggaggctagagcgacgggagaagcagcatcctcgcgacactctgggtagcacggggaagaggagagcaatcccttttctatcgccgccaggggagtggacagtgcaatctccttatgccctgatatccgcagcctgcgtggtatcggcgtgcagcggaagcttcactggcaacgtacgagtagtggtgggcatagtgtatgccgcagcacgggcgtactgcctgccaacggaatggacaggcacgccgcctgcaggatggcctggtcgccgcctgcaggatggcctggtcgccgcccgtcagcggagtggacaggtcacatttaatgctgaggcagcacatcgcctgccagtggagtggtag

SEQ ID NO: 39743 - DNA, 1575 bp, Zea mays
  Peptide Sequence Number=SeqID_81522
atgagcatagtgtacgccgcagcacggacgtactgcctgccaatggaatggacaggcacgctgcctgcaggatggcctggtcgccacccgctccgcccgctggcttacgtcacgggcggtaggccacgtggcagcattggggctccgcctgagcggggagcagaggcgtacacagtatggtccggacacgtgtcggccccggacccccgcctggccttgattaaggcccgggtattcttggccccggaatcttgggaccctgctatgggtggcctggaccccacacagaggggtccggaacccatcctaggggtccggtttgcacccgtggaggtcctggaccttgcctggaggtccagtctgtatatgcaggggtccggcaccttcccatgggggtccggacccactgttgataccttggaggatatcgtcttctctggccacatggcatccctggagccgtccacgtggcgaggtcgggtgttgtttaccacgcgactagagatagccgcgcgggcaccgcgtcttcatactgtagtaaggggtacccctgtttcagggtaccgacatagtcaatctccataccctttgtgctggagaggcggtctgccttcgtccacctctaccgctgctgacgccgtctcggcctcggtagccttacgcgcctcgtcgacgcgtgcctcgatctcggcctccatgtacccctgctcctcaagcgcttccctcagcacgagcagccgcagctccacctgtcgcttccgctcgtgctcgatgatgtccctgtttggcttccgcatcccgccgggcgcggagggagagcaggaggagggggagggccagggcttggcgaggaatttacttgcctggacgtgcccggtcgtgccagacccccgcggggtctacagcccgatcctgttgtacatgccggagagcgtcggccgagcggtcggaccggcagtgaagacctcgtggctgaggaaccctagctcgggctttggatctgcttccaacgagtctagcgaccgggctcgggcccatcctagttgtttatttgagtggccgcctcagttaggtcctccggagaaccccgtctcgttgggtcgtttacgcttatgggcttatcgccgtcggttgcgatcagcccacttgccatttgcatcgttttcaagcactattaaatgggtcgtgcctcgatggctcgccagacactgcccatttggccatctatacctccgcacggtaacggtgatcctcgcctcagttgccactacctcattcaccatcctgcttcttttctctctcccctcatgcctccacctccgcaccaccccattctcggtagaggacgtaggagcatgcgcctcatccccgtattcgttcgacaccagccccgacaccgactcgcgcagtagctattgcatgtccacgaggacatttcacatcatgcgcgcaccatcgttttcgccgtcgtcggacatcttgttcgtcttcccggcctttgtcctattcttcctccccaacctgctgccccagcccacggtcgtagccacgagcgaccgacgctcgtcaacgcgg

SEQ ID NO: 39744 - DNA, 225 bp, Zea mays
  Peptide Sequence Number=SeqID_81523
atgggagaccacgtctcaggtcgcgtgaggggcaaagtctactgccaggttcaatcaggtatccgcacgttaatccttatttcattttcatctcgtagaccacgcgtccccatggacccgtgtccacagaccatcaccattctgttatcaaagtggatacaaccaattcctgacctcgcgcgagtgctagaaaaatcactcgacttctaccgagatcctaattaa

SEQ ID NO: 39745 - DNA, 360 bp, Zea mays
  Peptide Sequence Number=SeqID_81524
atgggtctgtggcggaaccgcccgaattattcccagcttaagtgcccaaatcgcacctttaaaggcagcaacacacttaaaccgggaataacccgtcagtccctcggatctagtccgataaagccacttatccaggatcgaataccactagctcactcgaagtacaatggatcaagcagtctcattagctgcgagaagcagacgattcgaatcgagtttttatccttgcaagtgaccgcacttgtacccaccataaccggaatgggagaccacgtctcaggtcgcgtgaggggtaaagtccactgccaggttcaatcaggtatccgcacgttaatccttattccaattttcatctcgtag

SEQ ID NO: 39746 - DNA, 258 bp, Zea mays
  Peptide Sequence Number=SeqID_81525
atggcttccaagaaagtaacttcgaaggccaccacctccatcgatgacgcaacaaaggcagcccttctcgctaagaagaagggcaaggcatcccttgttggtgatgtccctcatgaggccattgaggatgggcagtcaacagcaagcgacatcgccaagagaacccgcctaccccatgtggcggaaccgcccgaattattccagcttaagtgtccaagtcgcacccttaaagacagcaacacacttaaaccgaaataa

SEQ ID NO: 39747 - DNA, 534 bp, Zea mays
  Peptide Sequence Number=SeqID_81526
atggaggaagaagctgcgtcttccacgtctcgggccttcaaccgccctacgcctggtgctgctgttgtgcactctgcgcggcaacacacccctacgcaggcgtctagggcgtcaagggctacacctagggcgctgtctgcagccagggaattgttgtgccaccctcctagctccacggccttgccggggaccatgaagcagtggtgtgacgatgtcgaccgactgctcgacatggcgcattctggctcgaccaggtctaggcctcggtcatctcggcgtcaacacgaggcatcagcatcagtgcgctcaccctcggtgagggccgcaccgactgaggacctacgggcagagctcaaccgcaggcgtgcgggagaggacgcaccagtctctgtggagaggtctagtgacctgcgggtagaactcaaccgcaggcgtgcgggcgaggatgcccgtgcggcggaaccgcccgaattattccagcttaagtgcccaagtcgcacccttaaaggcagcaacacacttaaatcagaataa

SEQ ID NO: 39748 - DNA, 744 bp, Zea mays
  Peptide Sequence Number=SeqID_81527
atggcgagggggagggtgcgccctgcggcgaaggtggaggcgatgggaggtcatggcggcgcgatcgtcgttgtcgggggccgtgaggcatctatcgcggcaggggcagggccgcagggggcgagcagcgcgggggcgtacaagtacgtctcggagttatggagaaggaagcaatccgacgtgatgcggttcgttcaacgcgtgcgctgttgggagtacaggcagcagccggccatcgtccgcctcacaaggcccacccgccccgacaaggcccgccgcctcggcttcaaggccaagcaggggtatgttgtttaccgcgtccgtgtgaggcgtggtggcaggaagaggcctgtgccgaagggtattgtctatggcaagcccaagcaccagggtatcacccagctcaagttccagaggaacaagagatctgttgctgaggaacgggctggacgaaagcttggtggactcagggttctcaactcctactgggtgaatgaggatagcacctacaagtactttgagatcatcctggttgatgtggcccacactgccatccgcaacgacccaagaatcaactggctatgcaatcctgtgcacaagcatcgtgagctccgtggtctcacctctgcaggcaagaagttccgtggcctgcgtggcaagggccacactcaccacaagaacaggccgtcgaggagggccacctggaagcgcaaccagaccctgtccctccgccgctaccgttga

SEQ ID NO: 39749 - DNA, 225 bp, Zea mays
  Peptide Sequence Number=SeqID_81528
atggcgagggggagggtgcgccctgcggcggaggtggaggcgatgggaggtcatggcggcgcggtcgtcgttgtcggggccgcgaggcgatgggtgggcaacgcggcagagagaggaacgtgcggggaggtattccgcaagcccatccccgcccgtaaagagaaagggacctatatggtggagttgaagtcactcttctttttccagagaaaggcaatactttga

SEQ ID NO: 39750 - DNA, 909 bp, Zea mays
  Peptide Sequence Number=SeqID_81529
atgcggaagcgccgagcgttcactagggtcggggaccctagtcacgaggtcaagagggtgcggggaagcgcgaagcccgccgcccccgacagcagcaaaccaccaccggctatgaagccagccgtccctaggcctagcaaatcttcgtcgggtgcaagggctgtcgcttctggctcgagcaagccaccttcggctgagcccatgaaggagcaagggccaccgtctccactacgcaccaccgtggaggcggcgggtggggccgacctcaccatggacatctgtgtggatgactaccgcgcgactgccttcgccaatcatgttgtgtcgggcgccctgaccttggagttcgctgccgagaggcaacgactcgagggtaagattgagtgcctccgggcgcagcatacggaagttgtgcgggacaagtcagctgcagaaaacaagagccgcaggctgatggagaagttggcggctgcggaggccgagaaggaggacctcagccgtcatttggcggcggagaggaaagacgcaaacagagcctgcgctgaggcgcaggctgcacaaaccgaggccaaacttgcgcgtgcggaggccagtctcgctcgccaatgcgccgaggaggtggaaacgagccacagctgcctgcacaaccgcctagacaaagcggaggcctctactcgcacagaggtcgaccagacgcatgcacaactcgtggacgtgtatcgggagcttggtgcgcggaccgctccctttgatgcgtccggtaaggaggtgggccttcgcttcctcagatggctacaggaggagctggaggtgctcccaacgattgtgacaggcctcatgtccttcgcctcactcatcacctgcgaaggggccgtgaatgccctgtcctctggacttcgaagtctttga

SEQ ID NO: 39751 - DNA, 1021 bp, Zea mays
  Peptide Sequence Number=SeqID_81530
atggaaacgagcctctgcggcctgcgcgaccgcttggacaaagcagaggcctctacttgcgcagaggaggagctggaggtgctccggacgattgtgacgggcctcatgtccttcgcctccctcatcacctgcgaaggggccgtgaatgccctgtcccacgagggatgcgggcacttcgaagtcttcgaccgatcggacgaagaatttgagcgcggaatcttccgggttgaggacctggtgctgaagcggtcggctggggcgctttacgacagaatgtggggccctcacggtcgtgagactgtctgggagaggtccgaccgggcgatggagcagatggcgcatgatgaagaggtcgaggacctcagggatctagatagcacactgcccgaggcatcgggggtggagctagcgccaccatccgatgctggcgagggccccttggtgaccttcgtgccgactagtgccggcgaggaccccgtgccggccgctgcgccgactggtggggacacttcgattgtggcgggcgaaccagctaccgaagaccctgcagtgtcggccggcccttcgcaggttccaatgtatgggcctgcgcaagcaaccgctgctgacaatactaattttgtggcggccgcaaccgtagtgcctgccaatgataatttatctggttctggatctgagtgttttgagtctgatggtgagtttgggagttcgttttcctggattgaagagtcctcagatgaaggcttggattattttgctgcattagatgtggccgcggtggagtccccgccgcgggtggaggttggcgaggtggctgatctgcctaatgcaaggaccgagtgccggaggcaaagggtggtttcgaagcatagcgtgggcgaggtttcgcgaagtggtaggcgccgtcgtatggggatggagcgggaccgtcttcgagtagaccggtttggtaaacgagaactattgtcctcgtcgtttgggacgagcattggtgagggggatctatggaatctttttgagg

SEQ ID NO: 39752 - DNA, 774 bp, Zea mays
  Peptide Sequence Number=SeqID_81531
atggagctcgccacgacacccgctgttctgcctacttgtgctcggcccagcactcgtgcttgccatcggcttgcattggcactcgcgtgcctgctcgtcgtcaccgctgcgcgctcgctcttcgtccatcgggtttcgcgtatgctcgcgtttgcgttgagtcgtcgaacccatcatcccctgctcgactgtcaagcaaaccccctgatccgcgtcctcctcgccgtcaactctcggctcacaagctcattttcccttgtgcacatctccacagactctgtctcatcacgcgtgtgcgttatcgaactcgtcgtcgactttatctcccggagactgatcctggagttggatgaaaaggtgagacaagttcgtctagcatctgctaggggctcgaccaaatgtctaaattggacaaccgtcatcgtcctcgcggttatcgaatcaattcggttttggatttacgaagaaggtcttaaagaacataggaaaagagccaagttgacctcaagatggtgcaaggagtggtcttcttcgcacgacaatttcgttagtcgaaccaacctgaagaagtggatgggaatttttacaaaagaaaatacttatgatggtgaatccgtcaaaggccttaatgagttcaacatcagaaaagatgtacctctaccaggttataactttgtgctggtgttgatggtgttaagtgccggtgggctcagccttcttataagtctaagaaacttttctatacttcttattgaggatggtcacttgagctag

SEQ ID NO: 39753 - DNA, 774 bp, Zea mays
  Peptide Sequence Number=SeqID_81532
atggagctcgccacgacacccgctgttctgcctacttgtgctcggcccagcactcgtgcttgccatcggcttgcattggcactcgcgtgcctgctcgtcgtcaccgctgcgcgctcgctcttcgtccatcgggtttcgcgtgtgctcgcgtttgcgttgagtcgtcgaacccatcatcccctgctcgactgtcaagcaaaccccctgatccgcgtcctgctcgccgtcaactctcggctcacaagctcattttcccttgtgcacatctccacagactctgtctcatcacgcgtgtgcgttatcgaactcgtcgtcgactttatctcccggagacggatcctggatttggatgaaaaggtgagacaagttcgtctagcatctgctaggggctcgaccaaatgtctaaattggacaaccgtcatcgtcctcgcggttatcgaatcaattcggttttggatttacgaagaaggtcttaaagaacataggaaaagagccaagttgacctcaagatggtgcaaggagtggtcttcttcgcacgacaatttcgttagtcggaccaacctgaagaagtggatgggaatttttacaaaagaaaatacttatgatggtgaatccgtcaaaggccttaatgagttcaacatcagaaaagatgtacctctaccaggttataactttgtgctggtgttgatgatgttaagtgccggtgggctcagccttcttataagtctaagaaacttttctatacttcttattgaggatggtcacttgagctag

SEQ ID NO: 39754 - DNA, 2439 bp, Zea mays
  Peptide Sequence Number=SeqID_81533
atgaagtcagttgatcgtcctcccgctaatcccaaacgcataacaattgagtcaagccaagaattctttagtgttgagataccacggccggcctctattggagttcctccaaacacaaagcattctgatcagtgtcctgcacctgtcgagaaaccatctgttatttatgaagccaatgaacaaactggatctggcaatgacgacgatgacttcatgacacctacaaagaagcgtaatgctgctggaagtcatatgaatatcttacggaagacatgcacaaagaggccgaaagtattagaaactccacggcagaaactcaatgttagatgcaaccctcaggatgtgattataactattaagatattgaatgagaggcaacgacaagccgttgctagaaaaggattttccaatattcttgacatgacacttgatgcactgggtagccgttctcatcttcgttggttgatggataagttggaccacaaggatatgactattcgccctggagttggcaaggaactaaagattacgaaagaaactgtccaccttatactaggccttccgaatgctggcggtggtaagccactaggaatcgatgaagcagtggcgggcaataacttgagggctgatcttggattgtccaaggatgagtttgttgttgcatctcttcaggaccgattgagaaaaggaaatgatgatgacctctctatcagatgcttctttttgatattgttcaatagattgttgttccccacttctagctggggcatatctaaccatgaagtgttattgacggaagaaatggaccgtttccacgaaatagactggtgccacttaatttttaacgacctatgtgaagctgcacaaaagtggcatacaagaagcacttctaatgtgtccacgacgatttatggatgctcagttgtcatactattccgaagcttttctgaaacttgctattctgctgtccctagtgtgcagtttcaatcagagcatagggacaggacaaacatttttgatgtccctcgtcccgatccttgtggtcatcatactattcatatccagctccctttgatcaaggatatgctttcaagtaagataaagcagctccaaccacgtgaccgaccaaaattcattgaaaagtttgttgagtatgattctgaagttggcaaagcgtgttccgtcataaaaagtactcttaccaagatggttgtgaagcagtatgaactagcggacacattcgctgagttaattgatgatgtccttcgcgcggagtctggcgacccagacaatgttgcggaagcgcctcaaacagataaacctccagatatatctcagcatatgtcgtcagaggaacagacccatgagggtacccagaatacccaggacatgactatgccttcacaacccaatacggagttgacaggtacccagtttgaagaaatacacgaaaagcaacaacaaatgcgtcgtgcatttgagggctgccctgacgatttggagacgaacataaccccaaatgccgaaaaccagggaggagacattggtccatctcatgacactcctactttcacgggcccccttttcgatcagacacctagtggtcatgttgcagatggtgaggaaacacatagcttgcacagtacacatgaccactctgtgccacgtttaacagaattggactgtgctcggtcgcttcgtgattttttgtgctcctcaaaagctgacccaaaacagtgtttcatcatgggttttcgccatgacaaaaacaataattgctcgtccatcaacaaagacagacttgtactggatgtcaatgttggtattctcctcaactttgaggagcatgaacggtacagtaagtctcctcagatttttgatcaaactgtccttgatgcttatctggacaagaccctgccccaactggacaattttggtgactacaaagcgattatggtccctattcttcatatgggacattggacattgtatgtcataaatatccagttacgatgtattcacatattagattcaaatccatatggtccggagttgggtggtacttcatggaagatgtttcattactccctaaaggacatagggaccaggaaactaccatgggctagggttataatgaacagattgaacaaatctttgcaacaagtccggcccaattcacgcatcccaaaatttggaaatttcccaattgacatgccacctatgtgtcccaccatgatagctggatctaatgactgtggcttttttgtcatgagatacatccagtactatgaccatacggatggttctatcaagcaatttataaaacgagaaaactctggtgacctacgatctctggctctacattacctcaccttccatagcaagaacaagtgcctcccgttgcctctagaaattcaaagattcaagtttggacgctag

SEQ ID NO: 39755 - DNA, 171 bp, Zea mays
  Peptide Sequence Number=SeqID_81534
atgggcgggggcctcctggcagcggcatctagcccgaggtcggcgttgccgctgcttggtccctcggagcagaaggcgtcgtcgtcgccgctgctggagcagctgtcggggcctgaacatgtatgtaatttcggcacggagccgtgttttttcctcattttcgagcactaa

SEQ ID NO: 39756 - DNA, 996 bp, Zea mays
  Peptide Sequence Number=SeqID_81535
atgctcgaaacaagaggaaaaaagacgcagcttcgcaagcgcgacgagggtgtgtttcctggcctcggcggccgcagaaggcacacgcgacaagacggtctgatcctgcaggctcgggtcttcacgctgaagggagccgtagcaccctcggcatcgacgacgtcttcagcaaagtccgacccagcctcggacggcgacgcggtccaaggactcctccgggaatccggcccgagcaggcggctcggccgggcggccgaggggtctcttcaactaagccagaggagccccagacaacaagggcgaacgggccgagggattcctacgcctccgggatacggatacctcacccgtcaccttgacacggggcgactcatgcttggtaaagcggttcagataatcaacgggcgagacttagtgctcgaaaatgaggaaaaaacacggctccgtgccgaaattacatacatgttcaggccccgacagccacaaggaacagaaaacactggcattcgaagtgccactacaaacagaactccggttccccctccgcaggtacgaacgaccccactccgagggggaaggcctgcggagcaacgggaggccgacggatggcgcgccgtcacctgctctagcagcggtgactacgacgacttctgctccgaggggccaagcagcgacaacgctgacctcaggctagatgccgctgccaggaggcccccgcccatgccaaaactcgtaaggcaaggacgggcagaaggccgtagagttggagggaccgggaaagggggataccccgaaagggatccttctccgcgaaggaaccgggctccgagccccccactactgatcaggggttcgaaggctggccctccgaagggttcaacagttgcctcagatcgcgtgggcccgacacccactactggtcaggggttcgaaggccagccccccgaagggttccatggccgcctcaggctactcgggctccgcgcccattactga

SEQ ID NO: 39757 - DNA, 705 bp, Zea mays
  Peptide Sequence Number=SeqID_81536
atgacgtgggcaggctcttcgtctgttatcctttctcggaaatttattgaatattgtattgttggtatggataatctgccaagaactctgctgatgtactacactaacatgcccttgccacacaggaagtattttcagacagttctttgcaactccgctgaattcaacaagactgtagttaaccatgacctacactattcaacatgggatgctcgttccaaaaacgagccacgcctactgactatagatgatgtagaaaatatgaccgaaagtggtgcagcctttgggactagatttcccaaagatgatcatgcgcttgatcgcatcgatgaagaaattttgcaccgtcatcctggagagctagttacaggaggatggtgcataggtgttgggcatgatagtccatgcgacatttcagtacaagtggatcataagaaatgttctaccataagcagctgcggcagcattgcatttgctatcaaggattcaaggggagctgtgacgaccgttggcgcagtagccgttgctctggttggtacaccggacagtccggtgaattatagcggggtggctctccaaaaacccgaagctgagcagttcagagttgatctccctggtgcaccggacactgtccggtggcacaccggacagtccggtgcgccagaccagggcagccttcggttggttttgctcctttctttttga

SEQ ID NO: 39758 - DNA, 1098 bp, Zea mays
  Peptide Sequence Number=SeqID_81537
atgcagcgactgcgcaggagggcggagtccgggcaggggcggtgcgggcgttgcagcgactgcgcaggagggtggagttcgggcaggggcagtgccacaacggcgcagaagtgcgaaggcagcacagatccgcgggcagagatccgcgacggccaccagagggcgaagtccctgcgctgtgtgaaatctggcgggagcaggaggttgcagatctgcgacggtggcgctggcactcaagggctccctgcgcggcgggagcaggagggtgcagatccgcgggcagagatccgcgacggccacacggcggcgcgggcactcgagagctccctgcgcgaagtccggcggacggcggcgcgggcagagatccgcgacgcgacggctgggggaggaagaaggcggcggacggggaaggggcggcgaacgacgacgtgggcagccaatgtggatgacaaaatgatgaggcaggctcttcgtctgttatcctttctcggaaatttattgaatattgtattgttggaagtattttcagacagttcttttgcaactccgctgaatttcaacaagactgtagttaaccttgacctacactattcaacatgggatgctcgttccaaaaacgagccacgcctactgactatagatgatgtagaaaatatgaccgaaagtggtgcagcctttgggactagatttcccaaagatgatcatgcgcttgatcgcatcgatgaagaaattttgcaccgtcatcctggagagctagttacaggaggatggtgcataggtgttgggcatgatagtccatgcgacatttcagtacaagtggatcataagaaatgttctaccataagcagctgcggcagcattgcatttgctatcaaggattcaaggggagctgtgacgaccgttggcgcagtagccgttgctctggttggtacaccggacagtccggtgaattatagcggggtggctctccaaaaacccgaagctgagcagttcagagttgatctccctggtgcaccggacactgtccggtggcacaccggacagtccggtgcgccagaccagggcagccttcggttggttttgctcctttctttttga

SEQ ID NO: 39759 - DNA, 204 bp, Zea mays
  Peptide Sequence Number=SeqID_81538
atggcggtgtggtatagaaacaagggtacatcatgttttagctatttgggatcatcggtcgtggtgttagatgcccttatccaagttgagataacaattgcgggtacacaggatgtaattgtggacattactccacaacccataacactcaatcaaagttccaaatcagacaagtatcataagaacaaacactcaagcgtatag

SEQ ID NO: 39760 - DNA, 372 bp, Zea mays
  Peptide Sequence Number=SeqID_81539
atggcggccacggcggaggaggagcggctccggcacgcaacccagcgatttcccgagagcccgcgccaatggttctgggaagaccgcaggggcgggtttatatgcccccgattgatagagcctgttgccgagaagcttgggcatgcgcaggtcaaatccgcggttcacggcggcgtcttcttcgcggttcggttgagctcgcccgcgagtctcgcggggacgacgggtccgtccaaccggccccacgcggaagtgtcccaggtggaagagtgtccgccagatgtaattatggacattactccacaacccatcacactcaatcaaagatccaaatcatacaagtatcataagaacaagcactcaagtgtatag

SEQ ID NO: 39761 - DNA, 192 bp, Zea mays
  Peptide Sequence Number=SeqID_81540
atgagtgcctgccagtggggcccaccgagcatagacagaccagggagcagaaccggggttggcggggtggatgggatggatggtcaccatgaatatgctgatgtaattgtggacattactccacaacccatcacactcaatcaaaggtccaaatcatacaagtatcataagaacaaacactcaagtacataa

SEQ ID NO: 39762 - DNA, 291 bp, Zea mays
  Peptide Sequence Number=SeqID_81541
atgaccaggaacatggccatgcatatatacccggagtcaggggggttcggccccaggctagcaacggttgacgagagattcgcggcaactgatcccgacctgttcatacggcaagaaattcggccgaggccgcagcaacggaccccaaagagcgcaccacgattgagcttgcccgaatcgagtggcgaaggaaggagagatgtaattgtggacattactccacaacccataacactcaatcaaagatccaaatcagacatgtatcataagaacaaacattcaagcgtatag

SEQ ID NO: 39763 - DNA, 738 bp, Zea mays
  Peptide Sequence Number=SeqID_81542
atggagttggtgatgttatctctcttttgtggttcaagcgcagccttcctcgctattgcactcagtttattgagtttttttaatgcgcctcagatatgcatcatgctttgtgcggaccatggtccctgtgtatctggtgctcataactctatagttactgctagggctggaaaggaccttgtttccagcttggtgtctggattattgacaattggcccccgttttggcggagcaattgatgatgcagcccgatacttcaaagatgcatgtgataggggcctcacaccatacgagtttgttgaaggcatgaaaaagaagggaatccgtgtgcctgggattggtcacaggcagaaagttcacttgcctgtgtcaattaggattaagagcagagacaacagggataagcgtgtgcagcttctacagaaatatgctcacacgcatttcccttcagtcaagtacatggaatacgctgttcaggttgagacctacaccttgtcaaaagcaaacaatttggttatgaatgtcgatggtgcgatcgggtcactttttttggatcttctgtctggaagcggaatgttcaccaaacaggagatcgacgagattgtggaaattggttatcttaatggtctctttgtccttgcacgttcaattggcctgatcgggcacaccttcgaccagaagaggcttaagcagccactctaccgccacccatgggaggatgtcctgtacaccaagtga

SEQ ID NO: 39764 - DNA, 642 bp, Zea mays
  Peptide Sequence Number=SeqID_81543
atggacgacggcgacgccgcgaattcggggaagcatgtggccgggcaggtgtgccagatctacggcgacggcgtgggcaccgcggcggacgacgacctcttcaccgcctgcgacgtatgcggcttccccgtgtgccgcccctgctacgagtacgagcgcaaggacggcacccaggcgtgcccgcagtgcaagaccaagtacaagcgccacaaaggcgatgaaccatgctatgctggtgtccctatgtctacaattattgaacagggttatggagttggtgatgttatttctcttttgtggttcaagcgcagccttcctcgctattgcactcagtttattgagatatgcgtcatgctttgtgctgaccatggtccctgtgtatctggtgctcataactctatagttactgctagggctggaaaggacctcgtttccagcttggtgtctgttgatttttcctctctttggagatggaagataagactggatgctagtgtgatgctgtccaaaggaaacgagagcctcttgattcctgataatgcacaggtcatcagttcatcggttgtggatcgctgcccacatcgttctgagatccagagtgtagctcatgccgagggcgaaggtgctgtcttcaacatttga

SEQ ID NO: 39765 - DNA, 225 bp, Zea mays
  Peptide Sequence Number=SeqID_81544
atgggggcggactactcaaacctttcagaggatcacctcctgttctaccaccagctctgccagtactggaaaacggcaggtttctgcccataccacaaaaagttctcggagcccgacttcagcgtgctcgaggacgagttgttcgtcgagggagggagagatgttatggctggaaaagcatatgggcgccggcctaagcagccaggggaagataagctagactga

SEQ ID NO: 39766 - DNA, 525 bp, Zea mays
  Peptide Sequence Number=SeqID_81545
atgggggcggactactcaaacctttcagaggatcacctcctgttctaccaccagctctgccagtactggaaaacggcaggtttctgcccataccacaaaaagttctcggagcccgacttcagcgtggcaccggcagcagcacatgcacatgcacctccgccgccccgtgctgtgcagcagacgcatcgccgcctcatcgccgacgaccgctgggctgctggtccgccgccctgcgacgctccccgtctcaacagcatagtcgtcgtgccctcgccctcgacggccatggatcccctccacgccgtcctgccggacaccagcgcagtcgcgcccctggccgccgccggtgccgacgcgcgcctggctgcgccccacaccgccagcctctcctcgcccagcgccgccgccgtcctcatcacctccgatctgggcctaccaggctacccggcgtgcaccggcgtactcaccggtctcctatcgccgacccgtctccccagactcccactccctgggtttctccactga

SEQ ID NO: 39767 - DNA, 1767 bp, Zea mays
  Peptide Sequence Number=SeqID_81546
atggaccagtctgagctcaaccacaacctggtccccctggaggtcagggaggagtacgagctcaggagggacctcaaggtcagggctttcaagacctatcacgccatacccagccaggcaaatccaatggagtcgtgccccagtaaagaggtggagaacttgagggagaagctggttgaagaaaatttctacctaatcactgagctaggtgaacaaggacgagtacctgtacttctgctgaagcttgacgaccccgtccctagaagaaaaccagctatcgtgttcttgcacaactcttacaagtgcaaagagtggctgcacccactgcttaaggtcttcctgtctttgagatttgatgaagatattggaaaagatgagattgagaaaaagagggatgtatcagtttcagaatatattcaaagtgtgacaaagagtgaatctcatgtgattcggtctacagtgctctacaacatcaaaaccattactacaactatccacaagtggcaaatgattcttctgttcaatgaggagttgatcaaggtccagatgctgcttaccagcttacatcgtttctggattcaggatcttatgttggtcccacaagtaacacatattatactgttggtgctcataagaccatgccaggatatgcaacaagcaattactattatcatcaaaacaatgcctgagttcaggtggccttccaggtactacgagatcctgggggtctccaaggacgcgtcacaggatgacctcaagaaggcctaccgcaaggccgccatcaaggaccaccccaacaagggcggcgaccccgagaagtgttgctatgatggtgttttgctcttccctgatagtgtgtatatatcatttttcttaatctacaagagtatgacgatgtttggttacaaggctttcaaggagctagctcaggcttatgaggtccccagcgaccctgaaaagcgagagatctatgatcagtatggggaggatgccctcaaggagggaatgggaggcggtggtgggatgcatgatcccttcgacttattccagtcattctttggtggtggaagcccttttggaggtggcagcagtaggggcagaacgcaacgatggggagatgatgtggttcatcctctgaaggtttctctagaggatttgtacaatggcacatcaaagaagctctctctgtcccacaatgtcctctcctccaagtgcaatggtaagggttccaagtctggagcttcgtcgaggtgtgctggttgtcaatgttctggcttcaaggtccaaatccggcagttgggacctggaatgattcagcaaatgcaacatccttgcaatgagtgcaagggttctagagagaccatcagcgataaagatagatgcccacaatgcaaaggtgataaagttgtgccggagaagaaagtttttgaagtggtagttgagaaagattctttcaaggcaatcaacgatgaaggcatgcccatgtatcagaggcccttcatgaagggcaagctatacatccacttctcggtggagttctcggacttgttgagctcggagcagtgcaaggccctggaggttgttctcccgcccaagccagtatcacagtacactgacatggagctggacgagtgtgaggatacgatgccctacgacgtgaacatcgaagaggagatgcggaggcggcagcagcagcaccaggaggcctacgacgaggatgatgatgtgccaggtggtgggcagagggtgcagtgcgcccagcagtag

SEQ ID NO: 39768 - DNA, 1158 bp, Zea mays
  Peptide Sequence Number=SeqID_81547
atggaggccatcatggcaggatacttcaagacactcttccacctcaaccccggcgggatccagccacacccgccggccacctgcgatagggagtcgctcttgaggccgcatgatactgatgcttcagcttcacaggatcaaatcacatcgcataagggttccaagtctggagcttcgtcgaggtgtgctggttgtcaatgttctggcttcaaggtccaaatccggcagttgggacctggaatgattcagcaaatgcaacatccttgcaatgagtgcaagggttctggagagaccatcagcgataaagatagatgcccacaatgcaaaggtgataaagtcgtgtcggagaagaaagtttttgaagtggtagttgagaaaggtatgcagaacggacataagatcacattccctggcgaagctgatgaagcgcctgatactgccactggagatatcatctttgttctccagcaaaaggagcatcccaagttcaagagaaagggcgatgacctcttctacgagcacacactgaccttgattgaatctctgtgtagcttccagtttgttctgactcacatggataacaggcaaatgctgatcaaattgaaccatggcgaagttgtgaagcctaattctttcaaggcaatcaacgatgaaggcatgcccatgtatcagaggcccttcataaagggcaagctgtacatccacttctcagtggagttctcggactacatcaggtggtggtatggcgagccgcgccggctcggcttgggtatctggcgagctcggaaaccggttcagtttgacggaggctcacgagtctactacattcagtatcacaattctttcaaggcaatcaacgatgaaggcatgcccatgtatcagaggcccttcataaagggcaagctgtacatccacttctcagtggagttctcggactcgttgagcccggagcagtgcaaggccctagaggttgttctcccgcccaagccagtatcacagtacactgacatggagctggacgagtgtgaggatacgatgccctacgacgtgaacatcgaagaggagatgcggaggcggcagcagcagcaccaggaggcctacgacgaggacgataatgtgccaggcggtgggcagagggtgcagtgcgcccagcagtag

SEQ ID NO: 39769 - DNA, 360 bp, Zea mays
  Peptide Sequence Number=SeqID_81548
atgccgccacgtaccaggctaacgacacgcaagtccacgggaccaattggggtgcctcggcatcaattggctccccgacatgaaagtagcagcagtggaagcaacgacccgatcggagaccttgaagctcgtgtttactgcaacactttgcacgaggaagtccatatattatactcacaactacacccaagtgagcctgcaccacctgctgaggcagaagctggaccatctcacgttgcgggacgtgcgctgggtggggagttagacctttttgagcctcctccttccttgaggttggtagatgtctggactcccacacctgacgatgaagccgccaagactgatggcaagcaggaataa

SEQ ID NO: 39770 - DNA, 228 bp, Zea mays
  Peptide Sequence Number=SeqID_81549
gtttactgcaacacgttgcacgaggaagtccatatattatactcacaactacacccaagtgagcctgcacaacctgctgaggcagaagctggaccatctcacgttgcgggacgtgcgctgggtggggagttagacctttttgagccccctccttctttgaggttggttgatgtctggactcccacacctgaagatgaagccgccaagactgatggcaagcaggaataa

SEQ ID NO: 39771 - DNA, 396 bp, Zea mays
  Peptide Sequence Number=SeqID_81550
atggtttcctctgctgccaggggcctcgcccaggtccggtcgtggtcgctcccatcgccgaccgagctcctcttctgtagcaggccatccgccttgtctctatggtcatgtgtagtgagctctatttttttcccagtgctctcgcctgctcgacggaatgccgcagcgcgatgcggccatggattctccctgtgtcgcgccctcggcgtgcttgacgtaatgccgcagcaagctgcagcagcgacgcccttcgctgcgacgcgctcgccaggtagaaattattttagcttatatagagaggaggtgacatgccaaggtagtcgtcgctttctctatatttataagtctaaatgtgtatggttacggtcgcagatatgtgctatagaaaagtggtaa

SEQ ID NO: 39772 - DNA, 330 bp, Zea mays
  Peptide Sequence Number=SeqID_81551
atgacgcagaaacgctgcgcagagcgacgacgtgaggcccgacttggcgagcgtgacatagcgaagggcgtcgctactgctgcttgctgcggcattacatcgagcacgccgagggtgcgacgcagaggggatgtcgaggctgctgctgtggaccggcgctgctgcacagcgcagatcgggtccacgctggttcgacggtggccggggaaaaggagcggcgtccaacgcgacaggatgaagacccgcctaaaggagtcgctggccacagcaacagaggggagctcgactgtgggggagctcgatgcacaccggaggctcgtccatggctag

SEQ ID NO: 39773 - DNA, 417 bp, Zea mays
  Peptide Sequence Number=SeqID_81552
atgaagacccgcctgaaggagtcactggccacagcaacagaggggagctcgaccgtgggggagctcgatgcacaccggaggctagtccatggctgggaaagggcgcttgctcctgtagaaaggctgggtgtcgtggggcagagaagagcagggggcaaaaagaaacgccaggggagcttgaaattgaggggaacagagagagggtcggattccaacctttggggtgtcgagccccatcctggaggtgcttgcgtgcgtgagaagcctggcagccaagaaatggaagaagggagcgactgccagagggcttctgctgttaaggcgacgaccacgcgcggcattggtggcctcggccggatgttgctggttggctggtaccaggaattggtgaagagactggtgtcaacgactggttga

SEQ ID NO: 39774 - DNA, 264 bp, Zea mays
  Peptide Sequence Number=SeqID_81553
atggatccgcttaggggaaagggcgcctggatgggagagcagaggcaccgcggtcccgtgtgcttgaggggtgccgagttggagaggctgggtgcttgcgtgcgtgagaagcctggcagccaagaaatggaagaagagagcgactgccagagggcttctgctgttaaggcgacgaccacgcgcggcattggtggcctcggccggatgttgctggttggctggtaccaggaattggtgaagagactggtgtcaacgactggttga

SEQ ID NO: 39775 - DNA, 465 bp, Zea mays
  Peptide Sequence Number=SeqID_81554
atgtcgttggtcgttgcggtgcagccgtccgccgaggcggtcgtgaacaccacagttctgatggttgtcaaggaggcgatcttgtaccacgggtgctttctcccctggtgggtttggagtggactgaggcctccctatcgaagcaagagggtctcgcctggtgctcctaggcgggctcccaagactagagatgtcaatggggacccgatacccgccaacccgtggggaattcccctattagggtacgggtatgggacaaaaattgtacccatgggtatggatatgggacaaaatctccacccattgggtaaacgggtatgggtttgggaagcaacaatccgaacccgattacccatgggtatttcatacatgtacatctgtcgtgtttgtatgaatgagttgaggctgagccggccaccaagcccagcacgacagcgcaccaggccccaggtcctagcccaataa

SEQ ID NO: 39776 - DNA, 351 bp, Zea mays
  Peptide Sequence Number=SeqID_81555
atggggacaattttcatcccatacccgtaccctaatagggaaattccccacgggttggcgggtatcgggtccccattgacatctctagtcgaagccaaactcgctaccttcgggaatttccaagggcgctccgctatgcaccggactgtccggtgtgccagcggaagcaacggctactacgacgccaacggtcacctgcagaggcatttaatgcgctacagtgagcgccagagtcagagcacgcgtgggaggcgcaccggacactctacagtacctgtccggtgcagcaccggacagccaggcgacctcaccagtcagagctccaatggtcgaaccctaacggccgggtga

SEQ ID NO: 39777 - DNA, 219 bp, Zea mays
  Peptide Sequence Number=SeqID_81556
atggagtccgcggtcagctttgacggggctcacccggagatccagcgcatgcggattctgttgacatcgtgcccgcgaaggtcggctcggtggttgaagatgattccgaccagcggggcccacatgtcagtcagccaccgactgagtgcgggtgagcgcggtgtgactggtttctgggctcggatggcagcgcccctgtggagtcccccgcgcggctga

SEQ ID NO: 39778 - DNA, 219 bp, Zea mays
  Peptide Sequence Number=SeqID_81557
atggagtccgcggtcagctttgacggggctcacccggagatccagcgcatgcagattctgttgacatcgtgcccgcgaaggtcggctcggtggttgaagatgattccgaccagtggggcccacatgtcagtcagccaccgactgagtgcgggtgagcgcagtgtgactggtttctgggctcggatggcagcgcccctgtggagtccctcgcgcggctga

SEQ ID NO: 39779 - DNA, 276 bp, Zea mays
  Peptide Sequence Number=SeqID_81558
atgaacaaaaacactggcattcaaagtgccattacaaacggaactctggttccatccccgcgggacatctcctccgcagagctagagggtgtttgccaccaccagaagctggaagaagaggtggcccgccgacccgcgcaggaggtagagccccggctcgcctcgctctccgccccagcgaggatgacgaacaccctcgacgctgaggacgggatcgagatcacagcccggcttgcctctccccatccaggagctggaggtcaccgtcttgggtga

SEQ ID NO: 39780 - DNA, 1653 bp, Zea mays
  Peptide Sequence Number=SeqID_81559
atgaacaaaaacactggcattcaaagtgccattacaaacggaactccggttccgtccccgcgggacagacgcgaccaccagaaggctctcgttcgcgttctcgctcaagggacgcgaaccagccatcaaagccaaagagcgggccgctccaaagcgcaccggcaggacgcctcctccacagagctggaggatggttgccaccaccagaagctggaagaagaggtggccagccggcccacgcgggaggaccaggatcacagcccggcttgcctctccccatccaggggctggaggtcaccatcttgggtgaccgccggcggaggggtgcagctgagctgcgtgatgaaaatccttgaagccgaacgatggctgaaaggtaccaactcccacggagttgcgttcctccaacggcaagacggaaaagactgcgggtatcccccatccgggggcttggaaggtggaaaggcacgatgcataagggagcgcaaagacatggtcgcctttcaagggggtcaccctccttttaaaggcgactctccctacttgcgtccccagccgtcggggactgagtcttctccaacacgctccaaggtcctccccctacggcgcggggactgggtcccacacatcatgcaagccggcccagagcagaagaagccaaaccgccgcacgcggtgcatgcaaccgcccagcggttacaagcggctctccacttttgtccagaccagcgggcgaaagggcgggcagccatgcaggcggcatgcaaccgtgccaggtgggcgcacttctccgacttccaacacgcccagcatggaggcccaggcccacgcgtcatgcaaccgacgcgccggatgcttcgtgcaagcaactgcaccgccactcgcgccactaccgcgcctcctcgactgcgggaccaatgccgcgactcgaggcgacccagcgcacgacccagtagcgccagcctggcgcgacggcggcgcctctggcaggagaagcgagcgacgcttcgccttcgccataatgaccgcgtcaaaaaaggctggcccctcggaagggttcaacagccgcctcagagcacgtgggctccacacccactactggtcagaggttcgaaggccggcccctcggaagggttcaacggtcgcctcaggctacccgggctccgcgcccactactgatcaggggttcgaaggctggcccccgaaggaggctcgaggctgctctcgcaaacccggctccggccaaaccgttgacagcgtcaacataccagcccgagaacttggaacccgaccgtgcacccgggctacgaccagctcgcatgagggaacgaccagaccagccgaagcattacgcgaggcattaagacctcggaggagtcaaaccactccctccgaggcctcgggggctacacccggcgggtgcgatctcgcgcacccaccggaacaatacgcaaaaaagtgcggcccggcggcaagaaaggctggtccccttgcaaaaaagtgcgacgaaagcctccaagcgagtactaacactcccttcgaggctcgggggctactgtcggggaccataattaggggtaccctcaaggctcctaattctcagctggtagcccccatcagcataaagctgcaaaggcctgatgggtgcgattaa

SEQ ID NO: 39781 - DNA, 324 bp, Zea mays
  Peptide Sequence Number=SeqID_81560
atgttgcacagcatagattttgcagtactgctcattgttcatcggggtgtgattgtctcgcccattggtgagggcaatgccaggctgaacagcatggtcaacctggtcgtcgtgctcaacaccgagctggacaacgcccttaacgagttgggcaaggctcaggcggagattgagaaattgcgtgctgagcacgcggcgcgccactatcaggatggtggttcccccgctcccgttaggattcagcacccttaccgctcgccgccctgtggtcgctttgcttatggcacccctgactgcaggacccagatagatttggagccatag

SEQ ID NO: 39782 - DNA, 477 bp, Zea mays
  Peptide Sequence Number=SeqID_81561
atgaagctctcggaggagcaggagcccgagggatggatcgctaaatccatcactcgcgatgccgctcgcgagtgtcacttccacgatgctctccacaccttgctacgttggaccttcgaccgacacacttggtccatcgaataccgttgtgtagtctaccagcatcgtcgcgagttatacccgggccggtgggaggctacttgcttggattgctcgttgttcagcggggtagatgatgacctcgacctaaagtactaccctcgccgtttgatcgacagtgctggaagtgtgattgtctcactcgttggtgagggcaatcctaggctgaacaacacgatcaacctggtcgtcgtgctcaacaccaagctggaccacgcccttgatgagttgggcaagcacccctaccgctcgccgccctgtggtcgctttgattacggcacccctgactgcaagacccagatagattttgatccatag

SEQ ID NO: 39783 - DNA, 672 bp, Zea mays
  Peptide Sequence Number=SeqID_81562
atggcgagagtagcgtgtaccttccatggcaagaggctggacggtggagtatctgtgctctcggttggcgtgaacccattctggtctttagaaactcgggtgcgagttgccatatgccagggttgtcccaaagcaggaagaagaaaactaagaactacctatggaagagacaaggcatgcacgaagaccacccttcggaaggcgaccggacctcagggtgtacctcgtcaccagttggctcctcgacatgaggggagcagcagtgagagcaatgatcccataggagacctggaggctagagtcgaacgtattactatggagctatgccatggagggagggagcgtgcgcgtgctagtcgtcgcatcgctgagttgttagaagaggactgcgaggcgactgctcgagcccgagtggaagagctgagcgtggccttggaaaatctagaagtgtacaacaatgttctgcacgaggaagtgcatgtggtgtatgaccaactacacccaaacatgctatcggaagttgtagagatgggagctagcgcagcggaagtagatgaaggaggactttatggggaactggacatcttcgaagcccctcctgtgaatgtcgtggataatcatcctcccgaagctagtagcagatctggagcagccaaggatgtggaggactag

SEQ ID NO: 39784 - DNA, 429 bp, Zea mays
  Peptide Sequence Number=SeqID_81563
atgtccgaagaaacgggcttcgctctaataccagctgtcatggaacctcccaaggtattaggcccacctacagatgtccttgtcctaaggacctcagacagtcatgcagaccagaatgggttcacgccaactgagagcacagatactccaccatccagcatcttgccatggagtgtacacgctactctcgccatttgttcactcccattgtgtggtggcctttttgatattggtccgaccaaggtaacaagggatggtaaccaatttccaaggaaggaagtgcatcagctgtttatcacacaattcctatcacctaataaatcatataaggtgataaagattttaaaacaacaagaagaagggataatgcactggggcttgccttgtgttgcaggaggttcgggttccacactgcagatgtcaaagtaa

SEQ ID NO: 39785 - DNA, 189 bp, Zea mays
  Peptide Sequence Number=SeqID_81564
atggggtgcaccggaggtgcacccaatgggtgtagcccccgaccttcaaatggattttttgaggataatccattcgaaggtcttccttttgaaaaaattggcatgaagctattcgcattatgctttggagatgggtgggagtgcttattgaatgctttgcgactgttcagcgaccgcggttggaagtga

SEQ ID NO: 39786 - DNA, 678 bp, Zea mays
  Peptide Sequence Number=SeqID_81565
atggggtgcaccggaggtgcacccaatgggtgtagcccccgaccttcaaatggattttttaaggataatccattcgaaggtctttcttttgaaaaaattggcatgaagctattcgcattatgctttggaggtatttactgcatgccctgcacggatgtgaccgttttgaaaaatatactgataattcctgggcgtccccccccaatgggtgtgggcaagggacggcttgatgggtgggagtgcttattgaatgctttgcgactgttcagtgaccgcggttggaagagtttggtgactcggaatactcagaggaggagttctcctctgagtccgagggatctccggctcccatccccctgcgagagttgtcttgcggcggaggtctggacgtacatccgggccgtcgagcgctccgggctcgagggctcggatgagtctgagttctcctcggatgaggaggactcggacggcggcgaggacgaagatgatgacgacgacgacggcgacgacgacgacggtggcgacggagacggtgatggcggcaacggcggcggaggcagcggcggcaagggcagcaccagaggcggcagcagcacgggcagcaccagaggcggcagcagcaagggcagcaccaagggcggcggcggcaagggcagcggcggcaaggccagtggctaa

SEQ ID NO: 39787 - DNA, 231 bp, Zea mays
  Peptide Sequence Number=SeqID_81566
atggccggctcggccgcccccgcaccctgccccgtgcccgcccggctcggccgcccctggccggttcaaccgccctggccccagctcgcccgcccgttcccccgtcccggcctcgcccgaccgtatcttcgctcgcccgcgctcgcgagaacgatccggttgaagagcccgaggaactcgcaggagaagcccctgagcagcagtcggttggtggaggcaagtgtcccttga

SEQ ID NO: 39788 - DNA, 341 bp, Zea mays
  Peptide Sequence Number=SeqID_81567
agaacgatccggttgaagagcccgaggaactcgcaggagaagcccctgagcagcagtcggttggtggagatggttacgagatcgatggttttggttatgactatggtactggtaagtggtattctttccgtttggaaagggttgtcagcattgcaaccactgctcaggagaagatgaagccgtggaaggagacttccaggagttccaagactacgacgagttctaggcgtgggttagcggcaacccccagtcggctgcttgtgaaggccgcgtttatctacgtttcttttccacactttgatttttattgtaaggactatgtggacgtctcagacgtatga

SEQ ID NO: 39789 - DNA, 279 bp, Zea mays
  Peptide Sequence Number=SeqID_81568
atgacgcgacgcagttcctgggctgcaagaaattcggacaatatgttaacgggcagcccagaaaaaagggttgctcaaaatggtcccgctgtccaagacaattctctatttactggacaaactaaagacgagaacgatccggttgaagagcccgaggaactcgcaggagaagcccctgagcagcagtcggttggtggaggcaagtgtcccttgacctatctatgtcctattcattatttaattcacctcccgctttacacatttatgcctaaggattga

SEQ ID NO: 39790 - DNA, 1341 bp, Zea mays
  Peptide Sequence Number=SeqID_81569
atggccggctcggccgcccccgcaccctgccccgtgcccgcccggcctcggccgcccctggccgagaacgatccggttgaagagcccgaggaactcgcaggagaagcccctgagcagcagtcggttggtggaggcaagtgtcccttgacctatctctgtcctattcattctttaattcacctcccgctttacatatttatacctaaggtggttatgagattgatggttttggttatgactatggtgctggtaagtggtattctttccgtttggaaagggtacatcgggttaataacttgggtaatgctaaaacttggctttctactaatggctcgacttagacacactgcacgaaagtcagtcatccccttcttaccctcccgccttgctgagcgtccgcttcgccgtcccgtggccggacagtccagccacttggagagactgcaccaccgcctgcatgaggagcaggaacgtcgacgacaggagcagcagggctcttctttctcgctccaccaggagatagagtctgtgaggagctgctcccctgtgcttcctctggagccgccccctgcaccaccactgggcgtcccagcttctagagtagctgctggaggagacccagacgacggagatggcgacgacagctcgagccacgacaccgacttctctgctaaccctgagccggaaggatgggttgctcgacccatcactcgcgacgctgctcgcgggtgtcacttccacgatgcgctcgacaccctgctacgtcgggcatttgaccggcatacttggtccgtcgagtatcgctgtgtggtctaccagcacagtcgcgaggtctacccggaccgctgggaggcaacctgcttggtgcgctgcccagagaacagtctccagggtgctgaggtctgctcagagcactattctatctctgaatgggactcagctgaggcagccatgcaagatgctgcacgacgtgcgctttcgcactactgctcggttttcggtggggcagctgacggtcttgacctgaagtattacccccgccgtccatctggcagcacaggaggcgtgattgtctcacctgtcggtgagggcaatcctaggttgagcagcacagtcaacctagccgccgtgctaaacacggagctggaccatgcattagacgagctgagtagggctcgtgctgagatcgccctgctgcgggctgagcgcgcggaacgtcgtcacttggatggtggttcccccgctcccgtcgggactcagcacccgtaccgctcacctcagcgtggacaccagtcttatggcaatcccgactgcaagaccaagataaatctagaaccatag

SEQ ID NO: 39791 - DNA, 237 bp, Zea mays
  Peptide Sequence Number=SeqID_81570
atgctgtctgacccggtgccgaccccggcggaggccgtttctggggtcgccctggagccgaccccggagactacggaagacgcatcgggtgccctcgcagctgctgcggccggcgaagacctgcccccgggggtcgccgaaggttcaagatttttgggcctgcgcacacaaccgctactactaaatttttggcggcttcgaccgcgaaagatgttggtcttgtcgcggacggtttga

SEQ ID NO: 39792 - DNA, 1452 bp, Zea mays
  Peptide Sequence Number=SeqID_81571
atgctgacgccgtccgtgagaaatcggccgccgacagcaagtgtcgcaagctgcggacaaaggtggccacgctggagggagagaaggctgacctccggcgccagttggcgggggagaggagggagaccaacgaggctcttgtcaaggcgcaggctgcgcaggcggaggctaacctggcacgggcggagggcaatcttgcccagggagcgcgccgagcagctgcaggagcggctcaccgccctggagagccgcgtggagagggccgaggccatgtcgcgcgcggaggcggagcggacgcgccagctgcttgtagatacataccgtgggctgggcgcggggaccggtgatttcgaagtgccggaccgagagcccggacttcgctgcctggagtgggtgcaggaggagttgcaagcgctccccactgtcgtggaggggtttatggcgtatgcctccctggtcacctgcgaaggggcgatgaacgcgctctcccgcgaagggtgccggcacttcgaggtcttcgaccaagccgatgaagattttgagcgagatatctttaaggttgaggaccccgtagtgaaggaatccgccggagccctctacgaccggatgtggggtctgcacggtcgcgaggtggtcagggagcgggccgaaacggcaagggcgcaggcggcgcgtggcgagagggtggacgacttcggggcgttgaacagcatgctgtctgacccggtgccgaccccagcggaggccgtttctggggtcgccctggagccgaccccggagactacggaagacgcgccgggtgccctcgcagctgctgcggccggcgaagacctgcccccggaggtcgccgaaggcgcgcctgatgccctcgcagctgctgcgccgagtgctgaagatcccgcagtggtggcggtggcaacgacggcggaagcaacggcggagccaacggcggaggctcccgcagcgtcagggccgtcgcaggttcaagattttgggcctgcgcacacaaccgctactactaaatttttggcagcttcgaccgcggaagatggtaatgaatgtggtggatctgcatctgagttttttgattgtgctgactctgggagctcggttgagtggactgaggagtcgtcggaggaggacttggactattttgcggccttggatgtggctgcggcggaggcttcgccgcacatcgcgggcgcaggagatgtggcaggtcctagcaccgggcgacgacgacgaagggcgattgcgaaacgtagagttagtggagcggagggggcttggcttcgtgtgagtggggctggccggcaggaactgttgtctttgccggccgccgtgaatacaggtgaaggggaactgcgaagtctttttgcgggtgatgagcttaggataatgttatttaattatagggagatgggaattattcctaaggttgagccgatgtag

SEQ ID NO: 39793 - DNA, 1662 bp, Zea mays
  Peptide Sequence Number=SeqID_81572
atggaagcgtggccgcctctagcccccgcggcggccgcagccgccaccccggtcgctgcctccgacgatgcggcggtcactcccgccggttccggggcgtggggaccagcggcaacggcgcagcggaaggccgtggagcaggagtcagcggcgcaggcggtgagccgcatcgtggcgagctgcgccaactccagcggcgtggcggtcgccgtggtggacgccaacgccgttatctccggcgcccccgccctctccacatccgcgggggcgccttgtcaccgtgccggaggtgctcgaggagttaccaagtttgccagggagacaggagacatccaaacactttcagatgttgatatcaagattattgctttggcttacatgttagaagctgagatccatgggagtagccatttgcgggagcaccctcctcctctgcttgaggtgaatgtcagaaagctgtcagaagctccactgcctggttggggctctaatgtgcctaacctgaaagagtgggaagaattggatcagatgtcagaagctggtggagatatcaattctagaatacttcctctgaaggacattgagaatcaagatctcccgatgagcgagaccaacagtgtgtgtgaggcacaggaggatacagaggaccagccttcagagaaggatgcacctgttgcatgggaagaggatgagaataatgtaggttggatgcctgctgttagccgcagcacacacagaagatatttgcggaggaaggcaaggcgtgatgccctcaaagaatctggacaaagttttgagacgagttctgttgctgcatcaattgatagcgataaagttctctctgaaaatggagggttggagcatggtctgacttcaacaggtggcctctcttctgtccctgagaaaatcagtgcaagttctgatggttttgaacttcaagcagaccctgaaattgctggagaacagttgcattctgaccagctatcttatggtgatgatactgatgcatgtaccaaagaattggacaaactagatataaaaggtgaggatgagggaggtgatgatgcacattccgtagactatgagagcagcgaacagagttgggccctgaggtccttatctgaatcaactatagcatgtgttactagtgattacgcgatgcaaaacgtcatcctgcagattggcctccggctcatagcaccaggtggcatgcagatacgccagatgcataggtgggttttgaggtgccatgcttgctataaggtgacccaagaggttggcaaaatattttgtccgaagtgtggcaatggtgggaccttaaggaaggtctcagtgacagttggtgaaaatgggatcactatggcttcacggcgcccacgtgttacacttcgaggcacaaaattttcgctcccaatgcctcaaggtggaagagatgccataactaagaaccccattctacgtgaggaccagcttcctcagaaggttcttcatcctaaattgaagaagtccagcaaggcggatgatttcttgggcgttgaggacatattttcgcacagtggtgataagaaggcgtcactgaaacctccagttggcaaggcactggcaatgttcagcgggaaaaggaatccgaacgacaaccacttctctcgcaagaagcactaa

SEQ ID NO: 39794 - DNA, 342 bp, Zea mays
  Peptide Sequence Number=SeqID_81573
atgcaccgcgtcgtgcctataaagcagcccaaggcttcggccgtacctccccgcgcgctctcagtcctgcccgagccaaagtttaccgaacatcgcctcgagcacgccgcgccaccgcccgccaagccacccgagcctcagccaccgtggccagctcactccagccactcccgggctacgccagtcgctcggttagctttgccagatgcccgtgaagcttcccaagtcctcggacccgggcaaagcctcgccggagaccccgaatcaccctcgccggacttcggtcacccgccgccgcgcgtgaaccgagctaaccaagaacttagtaaatttgtatcttaa

SEQ ID NO: 39795 - DNA, 276 bp, Zea mays
  Peptide Sequence Number=SeqID_81574
gctgatctcaacatgaggcagagaagatggctagagctaatcaaggactatgacctggagagcctcgccggagaccccgaatcaccctcgccggacttcggtcacccgccaccgcgcgtgaaccgagctatctggccggaatcctcgccgccgacgagttcgcccgcctgtgcacgtggaccgaccatcgccggagacgatccgcacattgacgtgaccgtcaagacctcccctacacccttgactacttcactggagcagtctcgccgctggtaa

SEQ ID NO: 39796 - DNA, 975 bp, Zea mays
  Peptide Sequence Number=SeqID_81575
atgacgagagatgagtatgtggtgggtggcgaggtcaagacatcgataccccttgcggtcaggggagtaaccgaggaagaggcaatgagtggaggcctctgcccagtagttggcagggagagacgtctggaagaggaggcaacagatcatgttggtggtggtgcgaatgatgcgttcgaccagaccgttttgggaagaggtgtaaaggacgcaccggaatcgaccacccagtcggagggaggtggtgtcatcgccatggtgctgaaagtggaggcgagggaggttggatcccatcctcaagccagcggggttcaaggtgtcgggtggggatccccggaggcgggagatggggcggagccggagtcgtcgggggcacgcctagggaggcgctgtcaggagggccgacgtaggaggacgggaggcactcaaggcttggcccgaccacatggcgatggtcccggtccaggggttgtagaattacggccatgcctggccgccaccccggccggaagaaccaccttgggtggagccgctactcccacggccaccctttcggggacgacctccatcggtggtggtggccggatgaggggctgcagggacggcgggggtagtgcgggtaggagcctcagtcgacggagggtgaggtgcttggcccttcgaaggtgcatggcgaccgggaggaggactgtagagggcaggggcgggagcgggtgcctcagtatccatggtaagctcctcaaggagaagctcgttgcgcacgacatggaaggtggggaagggcatagtcctcttgacgagagccttcaggtggccctagcgggggttgaggccacagagatccccttgagagaactggtggaactgggtgttgaggtggagcgctcgagcctcccggttcccgaggaactgcccctcaagagcgagccatgcccgacgagcggtgtccgcctagtcgcggatgatgtcctgtag

SEQ ID NO: 39797 - DNA, 438 bp, Zea mays
  Peptide Sequence Number=SeqID_81576
atggtatatgagggcggggtcggcgaagcggaccgcgctcgtcaacagggccggatcagcgggagccgaaggagtggctcgcccacggcgatggtagacgagggcggtcggggaagcgggccgcgctcgtcaacggggctggacgtggcacgagtagagacgttagcggaggcgtcaaggccgcgcgtgacgcgggtagagccacgagcgaaggcgtcagagccgctcgaggcgcgggcaatggcgcaaggcagggcgcctggggtggagggggaaccagatcggactcaaggagagagtcgagatcggtgggtggggaggagccaacaaagggaaacatatctttgtcgaaaacaacgtgacgaggtcaagacaacgataccccttgtggtcaggggagtaaccaaggaagaggcagcgagtggagcgaggagatag

SEQ ID NO: 39798 - DNA, 402 bp, Zea mays
  Peptide Sequence Number=SeqID_81577
atgtctgagattgtcaatcaaggaaaactggtgtctgatgagatcatcataaatctgctgtcaagacgcctggaagagggagaagaaaagggtgaattggggttcatccttgatggctttcctcgaaccatgagacaagcgaagatgacccagatcatgttcgagaccttcaataccccagctatgtacgtcgccatccaggccgtgctctctctatatgccagtggtcgtaccacaggtatcgtgctcgactcgggagatggtgtgagccacaccatccccatctacgagggatacgccctcccccacgccatccttcgtcttgacctggccggtcgcgacctcaccgactgctcatctgcgctagactgtgtttgttcaaaagatattattcaaatttaa

SEQ ID NO: 39799 - DNA, 693 bp, Zea mays
  Peptide Sequence Number=SeqID_81578
atgccgctaccgacgcacaccctcgcgctcctgctccgccgcctgttcaccacccgctccatcgccgccgtgcagggcctcctccacaagctcctcgacatcggggttgatgccaggccacagttcctagagcaacaactcaagaaggccaaaggcccaaatctgatgttcgggaggggagatgaaacagaaggttctgacaattcaaagtctaagtttaaggatgatgagcaggatggacaggtatctagcaggtcacttaagaaggccattggattcaaaactcatgtacgctactgtgacacattgatggtcctgaagttgtggataatgtcaaaggttccctttagatcaagcactggccaccgggtgctgcacgtcaacggccaacaggggcaccgtgcaggtgggcagaagcagccagcgacaacagtagggcacagctttctatcctatatttgcatgttcttcaaagggatgtatatggaccttccaaatacactagacttttgcaagcaaccaaagatactctcagagaagaagcttgctaagattgtcaatcaaggaaaattggtgtctcatgagatcatcataaatctcctgtcaagacgcctggaagagggagaagaaaagggtgaattggggttcatccttgatggctttcctcgaaccatgagacaagcgataagctaa

SEQ ID NO: 39800 - DNA, 2121 bp, Zea mays
  Peptide Sequence Number=SeqID_81579
atggaggtggattttgatgacaaaggcagctggtggtatttgttcaaggactattggttaaatttgaagacaaacttgtcgttgacagttgaggaaatatcagcagccaaatctcgaaagagtggagagttacctgatactaatgatgaagttaattcagagagttcatcagggcgcaatctagaaagcaatacatcaaaaaagaggggaaggaagcgatctaaacaagctgccatcaatgagggttctgaaggaaaagcgagcactaggaaatctgccaaacgagacctgtcaggcattcatgatgttcagacctcgtcagggaaaaaggttagaaaactatccaggcgttctttgagcagccagcattcatcaaaagactctgaaagtgttgggacatctacatcctcagctgaagaggacagctgggcttctaaggagctcattaactttgtagctcatgtgagaaatggcgataaatctgtgatcagccgatatgacgttcaaccccttttacttgactatatcaaacgcaacaaactgcgtgatcctcgtcggaaaagccagataatttgtgattctttgctccaaagtctcttcgcgaaagaacgtgttgggcattttgagatgcttaagcttcttgaatcacattttttcatgagtgaggtttcaccaattgatgctgatgaaaatcatggtggtgtagtagatcctgatcctagtcaggatgctgatggtaacagtgaagcttcagttgttatgagttcagaaaaaagaagaaaatcacgcaagtatgacctgaggcaccagcctaatcttgatgattatgcggcaatagataaccataacattggcttgatgtacttacgtcgcaacctaatggaagaattgattggcgatgttgacacatttgatgagaaagttgttggatcatttgtgaggataaaaatacctggtacagggcaaaggcaagacatttatagacttgtacaaattgttgggactggaagatctgcagaaaaatataaatatgggaaaaggactactgatataactctagagatactaaacttagacaagcgggaggcagtaactattgacataatctcaaaccaagagttcactgaggaggaatgcaaacgcttgcgtcaaagcataaagtatggattcattccaaggctgactgtgggagaggttcaggagaaggcaagggttctccaaactctgaaagtcaatgactggattgaaagcgaaaagatgcgacttgggcatcttcgtgaccgcgcaatattcactcttagggaatgtgtagagaagcttagattgctaagcactcctgaggagcgtgctcgtaggctgaatgaagaacttgaaatacatgctgaccctgcgatggatccatattatgaatctccggaggaacaggagcaggaaattgaaaaaagtagcttcaacaagtccagaggttctttcttgaggaaagatggtaatcctgtgcctccaggtaaaggagatggtagaaatgctgcacagcgagattcaaaaactaattgggaatctaatcgaaatacatgggccgaatcgagttctcatatggaatcaccccttccacggaggtccacattttcttctcaaggtgaaagtgctggttatacaagtaaatcagagagcccaaacactggtgcacaaacagttaaactggaaggcaccacacgcagtgctccacaagggtcacctggtgcctcttctggaattttagctaataacatatgttcaggggcaaaaactgcacctcaatcagccattaacgagtctgagaagatctggctgtacatggatccttctaataaaatccaaggtcctttctcaatcatacagctgcggaaatggaacagcaatggctacttccctcctagtttgaaaatatggaaagctagtgagaagcaggacgattccattctattgactgatgctttggcagggaagtttgagaaagaccttcctccatgggaaccgccacatgttagtttgtttcaaattaacaaaacccctcttgagcaaagcacaatagctggtgaacaaactccaaaatcagtagttgcaaagtctttctcaaagtag

SEQ ID NO: 39801 - DNA, 2324 bp, Zea mays
  Peptide Sequence Number=SeqID_81580
actggccccgcccgcccgcctacctaagcccgcccgccgcggccgccgcaaacgccgcgacctgcacccccgcccgccgcggccgccgcgaacgccgcgacctgcaaagccctcttgagcaaagcacaatagctggtgaacaaactccaaaatcagtagttgcaaagtctttctcaagcagtaatcaaagacatggttatagttcaacaaaccttggaacaaccatgatccattctggcacacaaggttattatggaatgcaaaattctcatgcagcatacacaagccaacattctcttactggaagttggaatgccacgtcaagtcagtttggggtcgcggtaaatcctgtgacacctactcagcctgccagggggagcttttcaggacaaaacatagtgtctgcagaaaatatgggtcatctaactcctggaacggctcctgcagctgcaaatgcagaaatggttaattcagatttgacctcccagaagcaaatatcgcatttaccgcaaacagacggcatattagctgatgacattgaatccaaatcaggagaagatgtttcacatggaaaagtgagctcttcagccaaagcaattggaccactgggtgcacagcttggacaaggacaactgaacactcagcaacatgaagcagacacaaaaaaccagatgtcatcaactgatgtctccaactcgacgatgccatcacagatgatgtcaacaccatccgctgcatcagtacaaccttcattgacaaccattgctggcagtgataatcaaagcagtgggtgggctgtacctacacaagtggtgaacacatctggccagtctcagataactgaaaatctgacctggggaaatacacctcacggtgatgcaagcttaggttggggaatgatgggacagaacaatatgaatatgccttgggtagcatcagctcaaggtgcttcgggctacaacatgggtgcagccatgtcaacccagccaaattcagttccaaacatgggttggttaccaaatccaggaaacaccaacatgaacatgatctgggccgcaactcaaggccaggggattccaaatgcagctgctatgatgggaggtcagatgcaaggagtcgcagtggccccttggggtggtgttgcagcaggaaatgcaaattcttatcctgcctggggaaaccaacaagttggaaacatgaaccaaaacgttcgatggagtgctcctgtgcagggaaacccgagtcaggcaaataacaacatgaactggaatgcaccaaatgaaagtcatggaagccacgctctggtgccgatggggggtcatgggggacatagagcagtctgctatacatttcttgaacgcggggactgctttaaagttgactgcaaattcgcccattcaacaaacacagagggatatccatgcatccaggatccgggcaacgagaggcgatatgagaatcacaatgagagaaacgatcgacagtttgataggcagccttcggataatgaaaggcatcatgttaggcctggtggcagggatgacgataggcaggctgataggtctcagtcaagagagccgcgtcagggcgctggctatggggtcacgaaggaggccagggccagccctcgcagggagtatcgggggatccccggggatggtggcgacatgggggacgttgggtattgcgagtcatggagtagagatgatgctcaaaggcagtacattgtagaacttggtataccagaagaatggatgcatgaagctctggctctttatcacgaatactatggagataaacagggcgcactggagaatttgattcagtgtggcaactggaagaaagctcatactattttcgtgacttctgttgctcattctatgtttctgtcatctaaccatcaggaggtctggaggatcacaagtgccttggagaaccacaagtatgaaattgctgactgggaccttggtgccggaatatacatagacttctacgttctgaagaactcaatgcaagaaagaaatgccatggatgattcgggttcactcgaggagatgagtgaatcatgcggaagtttctttggccgattaaacgagtcgttgttagtctggggaagcaaattacctgttgagtcaagggcatgctactcgaagatggcagaggagctatgcgcgcttctggtggacaccccaagcgagacgctgaacctacccatggggtgtcttctaatgatgctcaacgctccagttccggacgagagcaggtcgtcgtacctgcaggacgcactctccgtcttcaccgaaatcctttgcagcgatccgtag

SEQ ID NO: 39802 - DNA, 229 bp, Zea mays
  Peptide Sequence Number=SeqID_81581
aggttgcgcatctttacccacaagtcatgttacccatctgccaagggatcgcgacttcccatacacctctaccgaggaggcgaggcagggaccgccatcgcagcaaaatcctcccgagggcctccctacactgaccactcccctactgcccttgcccctttcgggtaccaggatgattcttcagatcctcgaaacctcactgctagtcgtagcaatacaaacaaacatg

SEQ ID NO: 39803 - DNA, 1335 bp, Zea mays
  Peptide Sequence Number=SeqID_81582
atgggtcggcgcgagacggagcgcgaaggggggaaaccagagggagacaggcgtaaaggggaaacccgcggccttcgtgtttgtcccgcgcccaggtcggaggttgtaccctttacccacaagtcatgttacccatctgccaagggatcgcgacttcccatacacctctaccgaggaggcgaggcagggaccgccatcgcagcaaaatcctcccgagggcctccctacactgaccactcccctactgcccttgcccctttcgggtaccaggatgattcttcagatcctcgtgacctcactgctaatcgtagcaatacaaacaaacatgagacacagtgcatagtgactaatggacggcgggttctatttcaaaggaacctagggtctcttaagcaaaacgccagggcgaaaggactcctctgcccccaaccaccggagcagaccccagacacggcggcgctctccgacgagagaagagcttacgggattggagtggtctgtgatgctagccacggcagaaggcgagcctacggcggcgttgaggctccacccaattcgcgctacaggtggcagtccgcggtcgcggcgagagagacgaaggtggcggtgcttcccggattcgcgtacggcccggaaggggcgacgactggggaaatagagggcggcgtgttccagggacctcgcccgcaaattggggacgagactgccaagacggtcccacgcgcaagtgctaggcggtccgcgctggtaatagaggttgtaccctttacccacaagtcatgttacccatctgccaagggatcgcgacttcccatacacctctaccgaggaggcgaggcagggaccgccatcgcagcaaaatcctcccgagggcctccctacactgaccactcccctactgcccttgcccctttcgggtaccaggatgattcttcagatcctcgtgacctcactgctaatcgtagcaatacaaacaaacatgcaggggctcggggtaaaaatccagagacacagtgcatagtgactaatggacggcgggttctatttcaaaggaacctagggtctcttaagcaaaacgccagggcgaaaggactcctctgcccccaaccaccggagcagaccccagacacggcggcactctccgacgagagaagagcttacgggattggagtggtctgtgatgctagccacggcagaaggcgagcctacggcggcgttgaggctccacccaattcgcgctacaggtggcagtccgcggtcgcggcgagagagacgaaggtggcggtgcttcccggattcgcgtacggccggaaggggcgacgactggggaaatag

SEQ ID NO: 39804 - DNA, 735 bp, Zea mays
  Peptide Sequence Number=SeqID_81583
atggtgacggttgatcgcggcacacgagggcgcgacctcaccctgttggctggccatcagcagcggcaccaagctgctatctccaaggtacactgtttagcgccaccacattccgctaccgaccgccacgagggcgcctccgctggttattgttgcgacctattccagactggagttgctcttggccaagagcctgaagacaagatgcctgttaatgagtactatgaatacttcggtccagattacactcttcatgttgcaccaagtaacatggagaacaaaaatacacgacaacaactggatgatatacgatctaaacttctggataatctttcaaaacttcgacatgctcctagtgtccactttcaagagagagttcctgacacagaaatacctgagcaagatgaagatcaagatgatccagatgaacgacatgatcctgactctgatatggaagtggatgaccacaaggctgtggaagagtcatcgaggaggagcattctaggtataaaaatcaagagagaatttggtgaaaatgcgaccagagtacaggatggtggcagggttgcatctgaacatagaggactggaacccatggcagaagacattggttcctccaagcaagctcctgcagatgccagtgcaatggccatcgatgaaccaagcaatgtcaagaatgaacctgagagctcaactaaattgcaaggccaagcagctgcgtaccacaagccatag

SEQ ID NO: 39805 - DNA, 537 bp, Zea mays
  Peptide Sequence Number=SeqID_81584
atgcaagccacgctccagaaggttgagcaaggactactgcaaatcaaggcagcagtgcaacatgagcaacaccagctggcgttgtccgcacggctccggacgtcggcggctgtgggcatacaagctgctgctcgtggcttccttgcacgacagagcgtgcgggagatgcgccggcagatgctcgagacagccttggtgacggttgacctcggcacacgggggcgcgacctcaccctgtcggacggccatcaacagtggcactgggccgctatctccaagtgcgagcatggtacgtgtcccgcgggcgacaaacttcaactctacgacaacggcggtagggaaggcactcacctcgtcatcaataagggcacactatttagcgccaccacattccgctaccgaccgccacgagggcgcctccgctggttattgttgcgacctattccagggcctaagtctattataaagtttgtcagtctaacttcctacagtcgccattcaagcagaccacaaaatggtgttccaatactgatgtga

SEQ ID NO: 39806 - DNA, 570 bp, Zea mays
  Peptide Sequence Number=SeqID_81585
atgggccaagtcatttatattggggctaacgacaaagccaggttcatttatgttaggaataactacatgagttatttctgccccaggtatgttccaatgtttgtggagatagagtacgatccgaactgccagtacacatctgttctaatggaagagcaactagaggctcttggaagagcaatagttgctggcaagtcgtgggagcagtttgtgttatgctatatatgggtccatgaggttgtgtatgcaagtggtggaaaagctcatgaaaggtgcggactctacatatcttatattgttttattggttgaatgcaatatatgttctgaatctgtcgtgatgttatttgtttgtaagtacacaatgtttgataacatcatcgacttgagccaggtgagggctcagcgtggaggtttgtcgaggtctgctgctcatagttcccatctctccactcaagatcgagcagaagtggagcaactgcgtgaagaacttaatggagtatcgaccatcactcgtcgttgtaccctgatggtgatcagcgatagtgaccttccattttatgtgttgtga

SEQ ID NO: 39807 - DNA, 216 bp, Zea mays
  Peptide Sequence Number=SeqID_81586
atgggccaagtcttgaccttgccatctcttaactacttggctgctactgagcacatatacgaactgcatagccaggtatgttccaatgtttgtggagatagagtacgatccaaactgccagtacacatctgttctaatggaagagcagctagaggctccttgaagagcaatagttgctggcaaggttgtgtatgcaagtggtggaaaagctcatga

SEQ ID NO: 39808 - DNA, 627 bp, Zea mays
  Peptide Sequence Number=SeqID_81587
atggggagcgcccgcgttgtcttcgtctcgttgtggaaagagcgcaacctcgtggaggttggtaccgttcagccatcgctcggcttcaaggatttttgtcgtgcagctcggctgccttcccccaccaatgggcagtttgatggagagaagcaagtcgggttgcggcctccaccccgccctcagcttcaaggattttcgtcatccgggctaaggcggaggagcgcaccgagtggggggttgcctccgcgtgggtcgggtgcagcgttccatccttcgcccgagcggcagtcgcgccgcagaggcctcgacgagggcgggagtgaggacctgccgatgcgctttggagcggccggcgcttgctggtgcggtgttggtggacaggtggtcgccaccgtcggtgctgaggtggtggcagctggagaaggtttctccgcccgcacccctggacctccgtctccctggcttgaatggctggagtgggcggcggtgagccgcttggagttcgtcgtcccgcgggcctcctggaaccctcggctgctctgcgatgagccaaagccggaggcagcggtgtcagcatggacagaggcggagttggctggagaagaaacttcgtcggcccaggagtag

SEQ ID NO: 39809 - DNA, 327 bp, Zea mays
  Peptide Sequence Number=SeqID_81588
atggggagcgcccgcattgtcttcgtctcgttgtggaaagagcgcaacctcgtggaggttggtacctttcagccatcgctcggcttcaaggattttcgtcgtgcagcccggcttcctcctctcgctgatggtcacccaagaggcttcaaggattttcgtcatccttgctggggcggagggcgagctgagccggaactctacctcccgtacgggccggcgggccacctcctccttcagcgttcgtgggagagggcgctcaccggcttagcggaaggggcagactttgacgacgcatggccgagcggccgcaagcgtcgtcagctctag

SEQ ID NO: 39810 - DNA, 255 bp, Zea mays
  Peptide Sequence Number=SeqID_81589
atggcgagagctcaccttggctatgatacagaagaggtttgcggtgaccttggcattgaggagtgcgttctcggcgagaaccgggtgcggtttcaacgtcgaggcattgcccgcttcacctccatacgtccagttctccaccccacttcgcccaccgagtgccagtggagcgcttccttgattcgccacctcctgtccctgatggatcttgagaggcacaagccaccaggccagcaccggagagggccgacctaa

SEQ ID NO: 39811 - DNA, 393 bp, Zea mays
  Peptide Sequence Number=SeqID_81590
atggagacagaggatagcaggagaactcaccaagaggaaaccggatgcagccgcagtaggaagacgccagctcccgagagcggtccgattcagcgaggagaggagtacgccagctgccgcgagcaggccgaccccgagagcagccgcaagaagagacggtgtagagaggagtatgccagacggcgtctgcgcaggcgaacggtcggccctctccggtgctggcctggtggcttgtgcctctcaagatccatcagggacaggaggtggcgaatcaaggaagcgctccactggcactcggtgggcgaagtggggtggagaactggacgtatggaggctttcatgcagcgcacatttgcaccagaatctcgccctgagggtgatgaaatctgctga

SEQ ID NO: 39812 - DNA, 561 bp, Zea mays
  Peptide Sequence Number=SeqID_81591
atgccaaccttgcaatatgaaaacaagtggcattgtaatgtgaaagaagtggttgcagctaaaagagaacatttgaccttgctccaagaactgaatcccaggtcagacagcaaaacagatatcccacaccttcaaggcttcaacttaaaacttattctaaccaagagcccgtcgagcgcgaatgtgacttcgcccacgctctccatcatctctccgtactcctccgcctccatcagcattgccgtcggcgccaccgcaggggctttcgcgagctcccaccctcctcttcttgtcccgcgccgccgcctctccggccggggccgcgacgaggacggaggtgggtcctcgtcgaagtcccacatcgaagaggactcctacgatggcgggagcgggagaggctacgaggccgacgacaccagcaagtcggcggcggcggcgcagtcgaacgcgtcctgcgaggacgagaccccgccccctccgtcggagaaggagcgggatctgcgcccgtacgttcgcaggatcatggcgtccgcaccatcgtcgaggcacggtgagagatag

SEQ ID NO: 39813 - DNA, 360 bp, Zea mays
  Peptide Sequence Number=SeqID_81592
atggaggcggaggagtacggagagatgatggagagcgtggacgaagtcacattcacgctcgatgggctccgacctgcagcgcagaagcgaacgcgacgggccagcctgctcgcgctgctcgggatctgcgcctccgccgagcgccaccgcgtgctccggtcccaaggatgcgggggttctgacgtggacgacgcagggggcttcggcttcataacgaggatcggcgaggctccggcattagagggtgctcaagtttcagcagagacctttgattccggccgaactacaactaagcaaaccaagaagccacagagcaaaatcgacgcttctgtttgggaaaacaactctgggaggcattag

SEQ ID NO: 39814 - DNA, 336 bp, Zea mays
  Peptide Sequence Number=SeqID_81593
ctgatttggccaccacagttccagggaactcttgaggcctctctcctcctctttggctcctaccgtccaacccctgaggatcctgtgccgacacctgctccagtgattgacactcagaccaaggatatcgcttttcaccagttcgagactcagggcgcagcagtccctaacgatgatgatgatgatgatgatgatgactttggggttccgcctctgcctcctatgcctccacacactcatgatcataaggctaggagctccagtgctgcccctgctacccctcctgccattgaccctgctcttgctgcgatcctccagacccttactcagcagtag

SEQ ID NO: 39815 - DNA, 936 bp, Zea mays
  Peptide Sequence Number=SeqID_81594
atggacgcttctgccacgaatgggttacagggaggctgctatatccagctctggctacttggtgccctggtctctcactcagagtttgatgttgtggactttcttatttgtgagatcgaggacaccgtactggatggtctgcgagcccggcgacaacagccatatgctcactatctctgccacatcttcgctcagctgatttggccaccacagttccagggaactcttgaggcctctctcctcctctttggctcctaccgtccaacccctgaggatcctgtgccgacacctgctccagtgattgacactcagaccaaggatatcgcttttcaccagttcgagactcagggcgcagcagtccctaacgatgatgatgatgatgatgatgatgactttggggttccgcctctgcctcctatgcctccacacactcatgatcataaggctaggagctccagtgctgcccctgctacccctcctgccattgaccctgctcttgctgcgatcctccagacccttactcagcacataccggtgttccgattcccccagttcagtcagcaccgcctccacctcttcaggctgctattgtgccagccattcaggcaggaccccctcttcctacagtcggtccttcttcctctccgctccggcccggtcaccctggttttctcgtcactggtcatcagctccgttagcactcagccgccagtgccaccagctcctgctgttaccactgctactgtggcggtgtctgtgacctcttcagctctggcagctcctgcagcgcagcctccgtctgagtcagtaccagctccagcttctacagcagatcctggatccgagactgactctaacccgcagctggcgttcgctcttctgcctcgaccgcgaccggatgcacccccgccacctccttcctcttctggtgtgtag

SEQ ID NO: 39816 - DNA, 318 bp, Zea mays
  Peptide Sequence Number=SeqID_81595
atggcaagcttgtcgaggaccagatcatcgaagcatataagtttctggatgagaagtggtcacccaagtttcgttgatgaagcaccagaagaccaattaaggaaggaatccatgagggagttcacaagagaaagttatcggagcgttcgtgccatctcgtggaggccagatccgcaagtctaccctaggcggtggagccagaagccagttccgcgagatccccttcccccttcgccgaataagcacgggttttcacccttatcacctttgagtagggatgatcagggactccctggtttaggggagggcctaaggtga

SEQ ID NO: 39817 - DNA, 435 bp, Zea mays
  Peptide Sequence Number=SeqID_81596
atggcgcagtcgaccgttggcagcctgagagccgttggcgcaccggacagtccggtgcccccttctagccgttggctcggccacgtgtcccgcgcagatcacgcggccgaccgttggccctaccgaccgttggctcaccggacagtccgaaatggcccaagggcacatttccctttcacctggtcaagcagcaacagcagaagaaggccccgtaacacccttgttatgaggtacttcaaggagttcaaatccccaagattaaagagttctaccctcattctttttaagtggggtagtgttccagtaaagttcctgctgtggagaaaaagaagaaggcctgtagcaagcttgtcgaggaccagatcatcgaagcatataagtttctggatgagaagtgatcacccaagttccattgatgaagcaccagaagactaa

SEQ ID NO: 39818 - DNA, 1575 bp, Zea mays
  Peptide Sequence Number=SeqID_81597
atgggtgtggcctgttgtagccttctactcgccgtaactgatgctgaattggaaagattacaacaagcgttgaggattctttctgatgctgaaaaacagataagactttcaagcgagcgttcgacatggttcactgctgctttactccagcttggttccggtcacaattcagaaataactcaatcaagaagcagcagtaagcaaagcgctaaggcaaccagcgaaaccatgatggaagcaatgagagaatcttctgcaagcaggagtacagctcatcatttatccacttttcctgattcaaagaaaatagtggatctgaaaacaaccagtgggcactccagtcctcatgcttcactgtcctccaggatgagacacaatgaaaacatgatttatgccgagcatatgtctgttgatagagcattattggattctgctcaaacaagtatttcttctgagcaaaagggtatgcatagtggaatctcagataaccttacccgaatttggatgaagtgcatagagaattgccactccaagacattgcggcaacttctctatgatcatgggaaattaacatctgtcaaagaatgtgaaggtaccattgttgcttttatagcatttgaggacaatgatataaagtttcgagcccaaagatttattagcagcatcagaaattcaatggaaactgtactgaaatgcaatgtggaagtcaggatttgtttgatgcaagaatttcttgctgggggactaaagcatgagacatacccagatgagacagctgaatctgatgtcttgagttgttcaacgaacagtgaacgtcgaaagggtgttctgaatctatcaggtgctggtggagtgcagccaaacaatgttcccatgatcatctctgaggaaacttcaggaatgcatagaacaagagggcaggatgtttctattgaacagttgaaggtatcagcttttgatgaacaaaggttagagagtgcatggctccaggctgctgaaaaacccatgcctggtatgttaaatcaaggtagacctgagagaaatcaaattcttccacaaaatggtggtcagcatcatggtaggtcctcaatggccaccgttgttccgtcaaggcatgttgacaaggatctatctaatgaactgaaagccttaaagatcagtgacagtcatggaccccataatggtcaagatgtacagatggagagtggttatgccatttcaccaagccttttgcatagaaataaccatttggcaaattgtgacaatgagagcgttgtttctgagtccggagcacccggttgccatgggctgttcccatgctggaaaactgaaaaaacgaaaaggagaaagggaaaagggcagacacggttgaggtatcttcggactcgaatcggtatcacagagggagaagctcaaagcatacgaaggttgatacagcaccgaagctgtgagcagaaaagcttcggcatggtggcaggaaaggaaaccgacttaaagatgaaaaggctattcggacctcgatggattactatagagttattgtcagatgtaaagggcataaatgtaattttgtaa

SEQ ID NO: 39819 - DNA, 399 bp, Zea mays
  Peptide Sequence Number=SeqID_81598
atggagggagctactgatgaaggtgcacctgctgccgaagctgaacatgttgacatcgaagaagatgatgttgatgaagaagaggaagattataccattctcatgccagccaaaccgagccacttggactttgggaaatctactgtttctgaggctgatatgcctatgatgatgttggggaccttcggcgtccgaaggtatcttcggactcgaatcggtatcacagagggagaagctcaaagcatacgaaggttgatacagcaccgaagctgtgagcagaaaagcttcggcatggtggcaggaaaggaaaccgacttaaagatgaaaaggctattcggacctcgatggattactatagagttattgtcagatgtaaagggcataaatgtaattttgtaa

SEQ ID NO: 39820 - DNA, 354 bp, Zea mays
  Peptide Sequence Number=SeqID_81599
atggggatggtggcgggctcgcacaaccgcaacgagttcgtcatgatccgccatgacggcgatgcgtcaggcccggctaagcccacaaagagtgcgaatgggcaggtctgccagatttgtggtgactctataggtgtttcagccactggcgatgtctttgttgcctgcaatgagtgtgccttccctgtctgccgcccatgttatgagtatgagcgcgaggggaaccaatgctgcccccagtgcaagactagatacaagagacaaaatgttggtttcctgtcaacttctttgagtgtgtgtaacttgtatgaagctagcatgacggagttcacatcacatgcttactttacgtga

SEQ ID NO: 39821 - DNA, 291 bp, Zea mays
  Peptide Sequence Number=SeqID_81600
atgacgaactcgttgcggttgtgcgagcccgccaccatccccattttgatcagcaaaccacaccagcaagcgcccatgagaagaagggtcgcggccggtcagacccaccgctcctgcgtcggttgggaaatcaaagtcgcggtcggatctgggcgagcagggcgcgaatccgggcatggcggcgacaatggcaaggagatctggggaagagaaggtgggatcaaggcggtggcgctcgtgcccctccggtctcgctttgggctagttcgggggcggctgcggtcgggctga

SEQ ID NO: 39822 - DNA, 774 bp, Zea mays
  Peptide Sequence Number=SeqID_81601
atggatgttgcacgctacagatcccagaatatgatggaggcatttggtttaaatcatctgaggtttggttcatcacatattgatttggattcagacttggatggaatggataacaaagacaaagttgttagcactcagccacaaaaggctgctcgtttacaaactcccgaaaggaaaattagcataatggagaaagctgtggagctcaatccagataattcaaaagtttctgaaattcggaagtcctacgtgtatgctgtacaggctctatctgcagcttgcaccaagttatgtaggcaggataataaaagcatggattccaaatcttcatccttagttcaactagaagtggggttggtggatatatttgttaatctgtgccgatttgagtggcagacaggacatcgggaactagcaactgggctatttcaggcgcagatggagtttagcttatttgcccctcctttgtatctgacaacaagcagtaagcaaaggctctttgaacacttctggaacagtggtggtgccagaattggggaagatggagctcttggatggtctgaatggttagcaaaagacgaggagagtagacaaaagttgtctatgcaagaaaattcacaagagactgaaacaggaggctggagtggttggtttgatccttctctgggtaatactgagacaaatgatttatcaaacaaatcactggaaccatcattgaccgatggaaatgatgctgaagaccttgatgctgaggactcaccagcacaagatgat

SEQ ID NO: 39823 - DNA, 2163 bp, Zea mays
  Peptide Sequence Number=SeqID_81602
atggatgttgcacgctacagatcccagaatatgatggaggcatttggtttaaatcatctgaggtttggttcatcacatattgatttggattcagacttggatggaatggataacaaagtaagagctggaggccgttactattctgcaaaaaatgcagtttctgaaagaaataaaggtttcaaacatctgaaaatatttaagggaaacacctctgtaatgctcgctgaagattttgtcccatttggtacacaatcacttcctttgaaaagcacaactgtggaacaagagctagaggagtcttgggaagatgaaatacttcgccggactagggaattcaataagatgtctcgtgaacgccctcacgatgaaaaagtttggctggctttcgctcaatttcaggacaaagttgctagcactcagccacaaaaggctgctcgtttacaaactaccgaaaggaaaattagcatattggagaaagctgtggagctcaatccagatagtgaggaattattgctttgccttctgaagtcatatggcaagagggacaacactgagactctattgactaaatgggagcaaatacttacgaagcacccagatagctctacgttgtggaaacagtatctgcttctgtgccaaggggaattctccagattcaaagtttctgaaattcggaagtcctacgtgtatgctgtacaggctctatctgcagcttgcaccaagttatgtaggcaggataataaaagcatggattccaaatcttcatccttagttcaactagaagtggggttggtggatatatttgttaatctgtgccgatttgagtggcagacaggacatcgggaactagcaactgggctatttcaggcgcagatggagtttagcttatttgcccctcctttgtatctgacaacaagcagtaagcaaaggctctttgaacacttctggaacagtggtggtgccagaattggggaagatggagctcttggatggtctgaatggttagcaaaagacgaggagagtagacaaaagttgtctatgcaagaaaattcacaagagactgaaacaggaggctggagtggttggtttgatccttctctgggtaatactgagacaaatgatttatcaaacaaatcactggaaccatcattgaccgatggaaatgatgctgaagaccttgatgctgaggactcaccagcacaagatgatgttgaatccttgctgaaaaagcttggtatcgatgtagatgcagagtccaatagtgaagttaaagacgcagaaacctggaatagatgggcctcaatggagctgtcacgggacaatcagcaatggatgcctcttcatgaaaattatgaggaggcccgcttttctctgatgtgccaatttattgatttttatggtggcaaaatctcaagatggacatcaacaaacagtccaagttggctcgatcgaatattgagcttagagaatattacagatgacatcctggaagatctaggtgctgtatctgacgttgtaaacaagaaccaaagttcatatagttgtaaatataaattggaatcattactgggaagcatgtgtgacctttcacaaaggccgggcctgatgaaatttctcaaaaatgcgatactgcttctgcttggtgttttccctcgtaatcatatcctggaggaagctgttcttgttactacccaaatgtttactcctcaagagaactcttcctccattcaaactaatgcatcacgggctttggccaaaagtatgttgaagaaagaccgacaggattttttgctttgtgggatatatggacgaactgaggcaatgaatgggaacattgaacaagcaaggaagatatttgacatggcactgttatcaactgaagcaacttctgagatagtgctggagcaagcgagcaggcggactggccctgcttggcgggtggcggacgtccctgttgtggccttgtgggggcggcggatgggcggacgcggacagggatggcgctgcctggcacaggcgatggcggcctggactcctggaggcgccgcggcggctgcaccagatgggcgtgggcggacagggacagggacggcgcggactggaggcaccgcggcggctacagcggactggacggactgggcaggcggaatccctattccctaa

SEQ ID NO: 39824 - DNA, 390 bp, Zea mays
  Peptide Sequence Number=SeqID_81603
atgaacatagaaaggttggcaatgtcaacagattcaggagctaggataccattggatgtgctagaaggaagaaaaaacttcagctactgcctactgtccgctgtagccgccgcggtgcctccagtccgcgccgtccctgtccctgtccgcccacgcccatctggtgcagccgccgcggcgcctccaggagtccaggccgccatcgcctgtgccaggcagcgccatccctgtccgcgtccgcccatccgccgcccccacaaggccacaacagggacgtccgccacccgccaagcagggccagtccgcctgctcgcttgctccagcactatctgcacttcagcagttgctcaagcgaacagcttgcctgttgctcgcttgctgaaggattga

SEQ ID NO: 39825 - DNA, 1371 bp, Zea mays
  Peptide Sequence Number=SeqID_81604
atggccctagatacctgctcttacgacgactgttgggtgttgcctccgctggattgctgggactgggcctcggagctgctgttccacactctcgaaggcgctggagctgccgccgtcttcccggagacgccaggtgtgcagtgctcgccgtcggaggcgtccagtggctacctgcacgacgccatcgctccagtgagcgcccgtcgcaacaagcggcagcggatggcggcggcgacgacgacgcctccctctcggcgtccggcgaccgtctgcggggaccttcagtgccttcttgcgggcttgcgggattctagcgccgacgccgagggaggagcagatttccgccatgatttgaacaccacgacggccgcggagacggagacacgctgcagctttgtctcaggcgggggcgacggggcaggtgcatcgagcagggaggagcagcagcggggccccagcgcgcaggtgctgctaccaacgccagcggcagcggcgaagggcggagatgaggaggcaaaggcgtccgctgtagtcccccctcgtcgcttccccgccaccgtgcgagccgctgctcccctgcagctgcaaaaggctgccgcggggacggcacacgcggcagcgcgtcgcgacgatcgcccgcgacccgtcgtcgaccgcgaacactccttccgtgcgggtgcgggtgcgggtgcggccgccacgacggcgcccgcctctgcctgccactcgttactgtcagactacagagcagctgctgcagtcgctggctcgctgcaacatgggcaatattttgaacgtgttggctttggggagcatgcgttcgaacatgtttcaggggaggacgagaagagaggtgtcggagtgctgtacccctttgcagtcgtcaagccgctggggttagacgacggccgcatgacgacgctggacgacgtcaaccagagaatcctcaagagaccggcaagaccagttcggcaccccgttggcccgttcgcgttcggccccgccgtgtcggctcacggcctgagtctgtccggcaaggcagtcgttgcgatgcctgctgttaggtataaccatggtagattagtagctacggatccgccgcggtgcctccagtccgcgccgtccctgtccctgtccgcccacgcccatctggtgcagccgccgcggcgcctccaggagtccaggccgccatcgcctgtgccaggcagcgccatccctgtccgcgtccgcccatccgccgcccccacaaggccacaacagggacgtccgccacccgccaagcagggccagtccgcctgctcgcttgctccagcactatctgcacttcagcagttgctcaagcgaacagcttgcctgttgctcgcttgctga

SEQ ID NO: 39826 - DNA, 279 bp, Zea mays
  Peptide Sequence Number=SeqID_81605
atgaagaagacattacaaaatctgaaggtgtcctgtgctgggaggggattaatgggctaccttggaaataagttacaatgcaagcgtcagttgtgtaggaaggagaagaaggtctactcgacggcgatactagagagaaaaaagtcaccgaaccgcattgtcgtcgacgaggccaccaacgacgataactccatcgtcgcattgcaccctgacagaagttgcagctcttccgcgacgatattgtgctcctcaaggtcttatattatatggctaatctga

SEQ ID NO: 39827 - DNA, 831 bp, Zea mays
  Peptide Sequence Number=SeqID_81606
atggcggcgccgtcctcgccgtcgcggcgatccgcgtcctcgtcctcccggacccgcgcctgcgcccgcttctctgtgtcctcgtcctcgagcagcagcgacacccgcgtgtacacctcgtctgtcgtcgcctacacggaacaagacaggaaggagaagaaggactactcgacggcgatactagagaggaaaaagtcaccgaaccgccttgtcgtcgacgaggccaccaacgacgataactccgtcgtcgcactgcaccctgacaccatggagaggctgcagctcttccgcggcgatactgtgctcctcaagggtaagaagaggaaagacactgtttgcattgtccttgcggatgaaacctgtgaggagccaaaggttcggatgaacaaggttgtccgccagaacctgagggtgaggcttggtgatgtggtttctgtccaccagtgccaggatgtgaaatatgggaagcgtgtgcacattcttccaattgatgatacagttgaaggcattacagggaacctgtttgatgccttcttgaaaccatacttcctagaagcatacaggcccgtgaggaaaggagaccttttccttgtcaggggtggaatgagaagcgtggaattcaaagtgatagagactgacccttctgaatattgtatcgttgccccagatactgaaatattttgtgatggggagcctattaagagagaggatgaggagcgtcttgatgaagttggttatgatgatgttggtggagttagaaagcaaatggccccatcagagagcttgttgagcttccactacgccatcctcagctttcagacgaatctctag

SEQ ID NO: 39828 - DNA, 144 bp, Zea mays
  Peptide Sequence Number=SeqID_81607
atgtcattcctgatggaacaagctggaggccagactttcacaggcaaacaacaggcccttgaacttgctcccgctaaacttcacgacagatccccagtgttcctcgggagctacgatgatagaggcaccaactctaaggcatag

SEQ ID NO: 39829 - DNA, 1512 bp, Zea mays
  Peptide Sequence Number=SeqID_81608
atgaagatggttgctgagtttacagctccaaagaagaaaactgatgatcaggatcaactccctgagccagtggaacgcaagcaaatcctctcagatgagagggtccttaatgttcttaagcgtataagtgatgaggattgtcttctgatgggcctgaatcccaaatatgcccgtcctgattggatgatacttcaagttcttcctgatcctccaccccatgttagaccatctgtcatgatggacacctcttccagaagtgaggatgacctgactcatcagttagctatgttaatacgacataatgagaatttgaggaggcaagagagaaatggtgctccagctcacattataatagagtttgctccgctgttgcaatttcatattgcaacatacttcgataatgatcttcctggccaacccagggtgagtggtttagaatgtcaatttgcatgtataaaatcaactgacagcagattagtggaggaatgcaagtatcctgaggatggttcaccgcctagatcctttagatatatcagaaggcccttgaacttgctcccgctaaacttcacgatagatccccagtgttcctcgggagctacgatgatagaggcaccaactctaaggcatagtttgggccaagatagagaagatatctcggaagtggttagtgataatggtaatgatggcatccaaaatagaaggaagagaagcatagcaaagaagcagaagagtgggccagatgaaggttctaaaaaacgaagccaaagaagaagaaagatcccaatgcccctaagaagctataggtccattcatcagtacccaaataccatttattattctctaatgttcttgattgtcttccatgtcacatttattggtgttgcatatttgggttttgtttctactatggcagagaaaaaaacagagatgattaatataatacaaaattgtgcagttaaccacatagcttgctgtgtggtttacagccaatgtggtaacaggactgtttcaagcgacaaatatactgatcgtagaactgctagctggattgtattatcagtttggacaaggaatgatgacaacacactgatttcaaggctattgctcctcctgggtatgctcaagttagaattgctagtgattaccctcttctctctaaatgggccatttatggagaagttagtatactgcacattttccttgactgtttcaagcgacaaatatattgatcgtagaactgctagctggattgtattatcagtttggacaaggaatgatgacaacacactgatttcaaggctattgctcctcctgggtatgctccagttagaattgctagtgattaccctcttctctctaaatgggccatttatggagaagttagtatattgcacattttcctttcttcagatgatgcagcagctcggggccgtgctcgacgggcgtgcgcgtagggagcggcatttgcggggaatcgcgacgggcggcctggcgggcgcgacgtgcgcgtga

SEQ ID NO: 39830 - DNA, 711 bp, Zea mays
  Peptide Sequence Number=SeqID_81609
atgcccagtgtagtcactggtctaagtcaagactcaagactagccgaaagatccaactcaagagatgacttgtcgggtatcgtaattagaggtacctggattacatccctaaacgtgcttaaccccgaggttgccaccaggcacattcccgaggacaataaggcgaacaggagcgacaagaccgcggtctcgtcggctttcaccaactacgatgatgtatgcctaagtacaacggctgttgttcccccacgtcacctaccaactactgatgggacacgcatacacgcattcgacaaagcgcgggactggacctcgagaggaaagtacacctcgcccgagcccagcctcggctacttactccccgcgaataccgcaggagaccactccttcaactgtgtcgcgcacgtctacgaatcccggtgcgggctcagtcacggcctcgggcagactttcgcctcgcccgagcacggcatcgacctcgttattatcaacaaaagggcgcccgacgtcaccgaaaacgggggagctgacatattacccatgggctttttgccatgctcagcactacaccaaccactacgacatgtgcaacttccccatcaggccgacccgaagcacggcccatttaatagtgcatgggtcgctacatctatagaagatccttttcaatctgcttctaatggggttcaattcgagttctacatggattag

SEQ ID NO: 39831 - DNA, 828 bp, Zea mays
  Peptide Sequence Number=SeqID_81610
atgcaccggcagatgctcgaggcagccttggtgacggttgacctcggcacacggggggcgcgacctcgccctgtcggacggccatcagcagtggcatcgggccgctatctccaagtgcgagcatgtgtagtcactggtctaagtcaagactcaagactagccgaaagatccaactcaagagatgacttgtcgggtatcgtaattagaggtacctggattacatccctaaacgtgcttaaccccgaggttgccaccaggcacattcccgaggacaataaggcgaacaggagcgacaagaccgcggtctcgtcggctttcaccaactacgatgatgtatgcctaagtacaacggctgttgttcccccacgtcacctaccaactactgatgggacacgcatacacgcattcgacaaagcgcgggactggacctcgagaggaaagtacacctcgcccgagcccagcctcggctacttactccccgcgaataccgcaggagaccactccttcaactgtgtcgcgcacgtctacgaatcccggtgcgggctcagtcacggcctcgggcagactttcgcctcgcccgagcacggcatcgacctcgttattatcaacaaaagggcgcccgacgtcaccgaaaacgggggagctgacatattacccatgggctttttgccatgctcagcactacaccaaccactacgacatgtgcaacttccccatcaggccgacccgaagcacggcccatttaatagtgcatgggtcgctacatctatagaagatccttttcaatctgcttctaatggggttcaattcgagttctacatggattag

SEQ ID NO: 39832 - DNA, 456 bp, Zea mays
  Peptide Sequence Number=SeqID_81611
atggccgtacgacagggcgaggtcgcgcccccgtgtgccgaggtcaaccgtcaccaaggctgcctcgagcatctgccggcacatctcccgcactctctgtcgtgcaaggaagccacgagcagcagctttgacgtcgcccatggggacggagacgccgtcaacgaagatgatgtgacgaaatttggcgttgtccctggagatggacacgccggcgtccaggatgtggtgacaaaattggcaggcgatgctgcccatggagatggggacgccggttgccaggatggcgtgacgaaggtggcatacggcgcagcccatggagatggggacgtcgattgccaggacggcgtgacgaaggtgacatgcggcgcaatccatggagatggggacgccggttgccaggatgacgccgcgaaattggcagcagaagccatgggatcagatcgaaacccaagctag

SEQ ID NO: 39833 - DNA, 867 bp, Zea mays
  Peptide Sequence Number=SeqID_81612
atggagatggggacgccggttgccaggatgacaccacgaaattggcagcagaagccatgggatcagatcaaaacccaagctagccgataccagatgttatggtcgttagatcggtgctcagtcggtatgaaaaagaatttggatcaagaaattatcaattttctgctgggaaggtggacttcgttgttgttgatgcccaaacacttgatgagggtatcttatgccgccttagaccaaggaatcacctaccaaaattatctaactaaagagacttctgaccttttgctaagcttgttgaagccggccatgatcatgaccaatgcacagttgtccactccactccttttgggccagttacagaggtatatctgccagtttgtagtgaccatccttctcctagtcttttggccaacaaatggtctcggttctcttccttgcatgaacacattcatgagcttcatgaggtcggtgggcgccgaactgctttcaaggaccaaggaaaaagatgacgaggacgatggtgattatgatatggtttttgatgcggaaggatccatgcacctcgttaaaaaggcagtggcaaagaccccaagtgctagctcagactccagacctactggacgcggaagtgttgttgcaagggcaacagcaggaagacaccgattggagcctgattcatcgattcgtgtcgacatgggttctgagatgacatcagaagatgggggaaagttggcccgcgctggcaaatcgggagcaaggaaggtgctccaacggctgttccgtgtcattcagtctgttcttgtcattgccgctctgaatgcccccttgtacatgatgcttctcttcaaggattggattgatcgttga

SEQ ID NO: 39834 - DNA, 936 bp, Zea mays
  Peptide Sequence Number=SeqID_81613
atggagatggaacagagaccggaagactacgggagccgagagggagacggggtggatgtgggtgaaatacctgagaggctgagacacggcgagcccgtggagcagcgagccagcgacacggcgtcggcgatggaacacagaccggaagacgaggggagccgggaccgggagggagacgaggtgaaatacctgaggcccgtggaggcggaggcgcggagcacagacgcggcgatggagcagagactggaagccgaggggaaccgggagccgagagggagacaggacgcggcgatggagcagagactggaggccgagccgccgaggggatccgggagcgggagggagacacgccggcgccgatggagcagagaccaggcggcggcgatggagcagagaccaggcggcggcgatacgccaggggaggccgggaggatagggttttctccaattcagtcgtgcccgagtcgggcctgtccgtttaacgggctcgtgctcgtgcctgcactgtgggccgacctatcggcccaagcacggcacgggggtcgtgccgggctggcacgggcacggatattgtcgtgccgggccgggtttgggccgtgccaatccgtgccgggcctcgtgccgcccaacgggccggcccaatatggacatcgcgtcccgcccgcggctgcaccctgccccacacgctcgagcacgcgccgccccacacgctcgagcacacccctgccccacacgctcgagcacgcgccgcctcgggggatccgccaccgcctccgcctcttcctcgaccgtggcggtgagcgcagcgccgcccccagtgtagatcttgagacggcgatgaagcttcaagcccacgcgcccctcaaggtatggctacgacgcagtccccaggtcgcaactgatttagacgcagatggaggcgtcggcggcctctga

SEQ ID NO: 39835 - DNA, 873 bp, Zea mays
  Peptide Sequence Number=SeqID_81614
atgtcggacgaccttgttgttcctgtccactttgaagttggccaagaactttgcttttgcctcctggatcatctgctccttgtgctccttgaactgaagctgatcgtcagccggcaagcttcgatccaccaagcgaccccagtggcggagggcgcacaaaatgtaaggcgtccacaccccgcggtgttctgccgcccgcggctgcaccctgccccgcatcacgcaatccagcgcaattccccggcccacacgctcgagcacgccccctgccccacacgctcgagcacgcgccgccccgggggatctgccaccgcctccacctcttcctcggccgtggcggtgagcgcagcgccgcccccagtagatggaggtgtcggcggcctccgacgaaaccctaccgacgtgctcgaccacctcaagccccacactatcgctctcctccatcttctctacaaccgctgcccacctctagctccgcctcctccctacgtgaaatgggtgggcatcgcgctggcacagctccatctccgggcacgcagggtggcggcgcgtcgcggatctggagctggtcgatcatcacgcgtcgtcggcagccaggtaaatctgactgattcttctccttacctgcttctcctggtgtggatctcggctctcgacgagtttcagggatccatagcggtggcggcggcggccatggacaagagccctggtgctgcttctcacttacgtctttcctcgttggtgaaccgcgatcttgtgcccatctcgattttggtgactcaatttgcaagttgggttgggcacgtgagatctggaactatgttgcaggctaaaaagatgcctctaaagaagctaaaagaagaggagggctag

SEQ ID NO: 39836 - DNA, 270 bp, Zea mays
  Peptide Sequence Number=SeqID_81615
atggcggtcacgatcacgtgggtgaaggcgaggcagatcttcatcagccgcggcaaccccaccgtcgaggttcaacattttgctttgccaagtcttccaggggccgtggacgtgggcctcagcgacggcagctacgcgaggggggccgtacccagcggcacatccactgttttcagaccagtttgcaaatctttaatgtctccagtcttttatatttgggttagttatggtggtaccccagccctcgcctctgaccagtttgcacagtaa

SEQ ID NO: 39837 - DNA, 246 bp, Zea mays
  Peptide Sequence Number=SeqID_81616
atggttgctagatcaggatacaaaaacttgctcatctatggactaggaaaaagagggatgaaactgattcttggtgtttcgtataatgccttgaacaagtatcttcctctagaatgctttgacctcagcaaaacaccatttatttcatctaaggtggatgtttggtcagctggtgtaattttttaccaaatgctttatggaaggcgtccttttggtcatgatcagactcaggagagaatactttga

SEQ ID NO: 39838 - DNA, 402 bp, Zea mays
  Peptide Sequence Number=SeqID_81617
ttaaggtttcccctctcaccaagtctaggactaggaaaaagagggatgaaactgattcttggtgtttcgtataatgccttgaacaagtatcttcctccagaatgctttgacctcagcaaaacaccatttatttcatctaaggcggccaggcgcttgaagaatcatggtcgcctaggcgtccacgtggcggtccaacgccttgcctcaccttaccgccttaagaacactgcttccagtattgccttcaagcacgatcacaaacaatttggcatgaaccagtctagcacctatgttgccacaggagcagctggccaacctctgaattgcatgaatgaagacagctctgattataagctggctactcagcagtgtggagtggcaactggcaactggcaaccataa

SEQ ID NO: 39839 - DNA, 453 bp, Zea mays
  Peptide Sequence Number=SeqID_81618
atggttgctagatcaggatacaaaaccttgctcatctatgttaaggttcccctctcaccaagtctaggactaggaaaaagagggatgaaactgattcttggtgtttcgtataatgccttgaacaagtatcttcctccagaatgctttgacctcagcaaaacaccatttatttcatctaaggtaacaggtctcctcgctttaaaaactggttttggaatgtttcaattgggaggagactcaggagagaatacttcgggaagatataattatcaatgcacgaagagtggagttcccctaaaaaagccagctgtatcgaatgaggcgaagaaccagtctagcacctatgttgccacaggagcagctagccaacctctgaattgcatgaatgaagacagctctggtaaatctgttcaatcatttatggaagttgagaatctttttactagagtataa

SEQ ID NO: 39840 - DNA, 870 bp, Zea mays
  Peptide Sequence Number=SeqID_81619
atggacaagagccctggtgctgcttctcacttacgtccttcctcgctggtgaaccgcggaatatatgaggccttggagttgagggatggaggatctgattatcttggcaagggtgttcttaaggagaaggcggtcacgatcacgtgggtgaaggcgaggcagatcttcatcagccgcggcaaccccaccgtcgagctgcgcgcaggtggacgtgggcctcagcgatggcagctacgcgaggggggccgtacccagcggcgtatccactgggttatacaatcatatcttgcagaactgacaatatttttttgccctcataccaagaatcagttccttatattgcttgacaaccgaccatggttgctagatcaggatacaaaaccttgctcatttatgttaaggtttcccctctcaccaactctaggactaggaaaaagagggatgaaactcattcttggtgtttcgtataatgccttgaacaagtatcttcctccagaatgctttgacctcagcaaaacaccatttatttcatctaagcttgccaccggtactggtattgctccgttctgcttgttcctgtggaacatgttctttgagaaacatgaccactacaaggatagttcttgtgcaagagaattacacaaagatgggacttcatattcaggttttgatttggaacttgactccttaagttggatgagggtgacagagctattgattccaactcatctgcatttggaagcatcagatgaacctgatcaatgtgagatgtatgaagatgacagtaaatcatcctcaacgcctcagatgcatacaaactcaaaggcaagctctcagcgttacaagtcaagtagaacagatgacgagtga

SEQ ID NO: 39841 - DNA, 579 bp, Zea mays
  Peptide Sequence Number=SeqID_81620
atgaaggcgttcgagaagttccagtatgtagatgttcttgttcctattgtttcttttcctctgaagtaccgttgcacgagcctgttgtcgatgccttcgtgggccacacctatagccacaacaaaaaggctaggagcagcaagccacagcaacaaggccaagacgaactgcacggtcctgacactaattaggcttgccaccggtacaggtattgctccgttctgcttgttcctgtggaacatgctatttgagaaacatgaccactacaaggatagttcttggaagctcctcggcgcgctttctgaagttatggtgagaagcggcatgaatcctactgtcagtgatcaagcaatcctcttggatctcattgctaaatcgagatgtgtcgttgctgccaagaagtactttttggacctcccagaaacttccaagacttattttaggtatcacgctcttctcaattcttactccaaagttttgatgattgagaaggccgagtctcttgtggagaaaatggaggagctcaactttccattcatattttatatgaagagaaaggtggagcacgagaggaactaa

SEQ ID NO: 39842 - DNA, 759 bp, Zea mays
  Peptide Sequence Number=SeqID_81621
atggtgctgaaaaaggagcttggagcaaatggtcacaaccttaaccgatgtgatagtgttcaagaggatgagaaactcatcgatcttgcaggttcagagagttcaagtgctaaaactacaggacttgccaccggtacaggtattgctccgttctgcttgttcctgtggaacatgttctttgagaaacatgaccactacaaggatagttcttggaagctcctcgacgcgctttctgaagttatggtgagaagcggcatgaatcctactgtcagtgatcaagcaatcctcttggatctcattgctaaatcgagatgcgtcgctgctgccaggaagtactttttggacctcccagaaacttccaagacttattttaggcacaatgtagtgaatgagcactttttaattgttgttccttgttgtgaagtaaccattactgggttaacgaacaactcatactttgatggagcacatgaggttcgacattatgtcaggaagcattcggatcttggtcgtattgtgcttgaagttgctaaggtatataatgaatgtcatgaaggattgctttctcttaatcccatattgtgtgagatactaaatatatgtcctaaaaacaacttacgtccagaactcacaaattccccgccaagcaaactgctagaaaacttttcagaggtggacatgatgaagatgatagtgctgatgccgacacaaatgatgctgatgtacctcggtaactccactttcttctcagccctttag

SEQ ID NO: 39843 - DNA, 381 bp, Zea mays
  Peptide Sequence Number=SeqID_81622
atggaattactcagcaagtcttacccgactaaagaaaagactctcaagggtatgctggttatatgggagtcaagacggagacactacaccgagactctcttctcgtgcaagtcacccgcccggtctcagcttaatctttttaacccaaaaacttggtacctggcagagggtttcaaggagggtaatcgagatcaaggaagcaagcaagtgagaaagattttaaaaacatcaagggaggtggcaaatgcaccggggcttgccttcgttaacagggaaaataacaagcctaggaaaattggtttcacaattttatcatttttctaccattttctaaaattgttttggctctggagtaaaaagaaaaaggaaacagatgaatag

SEQ ID NO: 39844 - DNA, 381 bp, Zea mays
  Peptide Sequence Number=SeqID_81623
atggaattactcagcaagtcttacccgactaaagaaaagactctcaagggtatgctggttatatgggagtcaagacggagacactacaccgagactctcttctcgtgcaagtcacccgcccggtctcagcttaatctttttaacccaaaaacttggtacctgggagagggtttcaaggagggtaatcaagatcaaggaagcaagcaagtgagaaagattttaaaaacatcaagggaggtggcaaatgcaccggggcttgcctttgttaacagggaaaataacaagcctaggaaaattggtttcacaattttatcatttttctaccattttctaaaattgttttggctctggagtaaaaagaaaaaggaaacagatgaatag

SEQ ID NO: 39845 - DNA, 272 bp, Zea mays
  Peptide Sequence Number=SeqID_81624
atggaattactcagcaagtcttacccgactaaagaaaagactctcaagggtatgctggttatatgggagtcaagacggagacactacaccgagactctcttctcgtgcaagtcacccgcccggtctcagcttaatctttttaacccaaaaacttggtacctgggagagggtttcaaggagggtaatcaagatcaaggaagcaagcaagtgagaaagattttaaaaacatcaagggaggtggcaaatgcaccggggcttgcctttgttaacag

SEQ ID NO: 39846 - DNA, 381 bp, Zea mays
  Peptide Sequence Number=SeqID_81625
atggaattactcagcaagtcttacccgactaaagaaaagactctcaagggtatgctggttatatgggagtcaagacggagacactacaccaagactctcttctcgtgcaagtcacccgcccggtctcagcttaatctttttaacccaaaaacttggtacctggcagagggtttcaaggagggtaatcaagatcaaggaagcaagcaagtgagaaagattttaaaaacatcaagggaggtggcaaatgcaccggggcttgccttcgttaacagggaaaataacaagcctaggaaaattggtttcacaattttatcatttttctaccattttctaaaattgttttggctctggagtaaaaagaaaaaggaaacagatgaatag

SEQ ID NO: 39847 - DNA, 693 bp, Zea mays
  Peptide Sequence Number=SeqID_81626
atggccgaagctctggcggcaatggcgggcggaaataagctcgccggagctaagggaaaggggttggccggtgagggtgagtgcggggcgaagtgggggcgcgcctgggaaggctttataggcacggcgcggtgcacgggcggtcgtggaccggcgagtgcgcgcgggcgtgcactgggaaggcgcggtgcgcgaacgggcgtgaaccaggggtgtcagccgcggtcgaacacgtgttcccgttgcctctgcccctgttcaagcgccgattgggagcaaatcttcgcgaatttgggcaagatcactgcaagggatttgttcaccagaccaagctttgtcttttgtgtatggacaacgtgcggttttaggctagggacagggagttgtagcgtcaccaaggtgccagtgtcagaatgcctggtcccgaggttaagctgcgccaaaaccgtgtcaaaagaatttggtttgagttcaaactttcccagaatgtgttcaagaaaaaccctgagtgacactggggtgtcacagccttccccccttaaaggaatctcgtcccgagattcgggccagagtcctcccggggtgaagcgaagggtgagactgataggaaaaagggtgatgattgttattattagggcaaaactgctcttcgaatgtcattctctttgcaacttcagaaggaagtccttttaa

SEQ ID NO: 39848 - DNA, 396 bp, Zea mays
  Peptide Sequence Number=SeqID_81627
atggccgaagctctggcggcaatggcgggcggaaataagctcgccggagctaagggaaaggggctggcccggctagggacagggagttgtagcgtcaccaaggtgccagtgtcagaatgcctggtcccgaggttaagctgcgccaaaaccgtgtcaaatgaatttggtttgagttcaaactttcccagaatgtgttcaagaaaaaccctgagtgacactggggtgtcacagccttccccccttaaaggaatctcgtcccgagattcgggccagagtcctcccggggtgaagcgaagggtgagactgataggaaaaagggtgatgattgttattattagggcaaaactgctcttcaaatgtcattctctttgcaacttcagaaggaagtccttttaa

SEQ ID NO: 39849 - DNA, 450 bp, Zea mays
  Peptide Sequence Number=SeqID_81628
atgggtccacggccacgggtctgcctcttcgactacgagtcggtaaggcaggttcttttcaacaagtccggccatttcttcaaggacgacgcccacccgactattctggcaatgctcggcaaagggctggtcctggtggaaggcaccgactgggtgcgccatcggagggtggtcaacccagccttcggcatggacaagctcaaggatgagctggacgacatggccaaaacctatcctggccgctttaagatctactatgtgttgaatcagcctcctgagaactggaacggtggtgttgggtttgtgtctaaggaaatgatccaatctcattgtccagcgcctgctgaggacattcagatcctgagatgtggtcctcctccgatgaacaaggccatggctgcacaccttgacgagctcaactacacaaaggagatgcagttccagttctaa

SEQ ID NO: 39850 - DNA, 681 bp, Zea mays
  Peptide Sequence Number=SeqID_81629
atggatcatattcaacccaagaacaccccgcacaatgaaccactgcctctagtgtttttacttgtgcagcctcctgagaactggaacagtggtgttgggtttgtgtctaaggaaatgatccaatctcattgtccagcgcctgctgagtacattcagacagttacatcagaagctgtatcagaagtggttcagagttctgtttctgtggcggtcgatgctgttgacttggtagatgacaagggagatagcgatgatgacatcgtcgatcaccatggggacgaggacaggatgactgatgtggagctgtggcagcaacttgaaagtgagttgtaccggaagagggagggagaagaagatgacatagccgaagagatggctgaaagtacaattgctgaggaggataatggcttagtgccaattgtggagccagagatccttcttgatggagaccatgggatcgaaagaactctcgaggtggcagagaaagtgtggtctgaggtgttcttctacttggcccagaacaatgttctgtttgagggtatcctgctgaagcccagcatggtcactcctggagccgaccacaaggagaaggcttctccagaagccatcgcaaagcacacgctaacaatgctcaagcggatcccttctggttgtgtccttcatgttgcacgagatgactaa

SEQ ID NO: 39851 - DNA, 585 bp, Zea mays
  Peptide Sequence Number=SeqID_81630
atgtgggtgacgtcgatgccgcaggtttgggacgaggagggcgcggccaagggcggcgcggtgaccccggcgccggccgcggccatgctgggctcgctggcggggtggctgtcccggaccgtgcagccgcagccgccggcgccccgggtgtgcggcaccgcggggggcccgcccgtgacggcgcccaggctcaggctccgcgacggccgccacctcgcctactgcgagagcggcgtgccccgggaccaggccaggttcgccgtcgtcttctcccacggattcaccggctcccgcgaggacagcgtccgcgcctcccagggccgctggacagcgacctccgtatactgtttgtccacatgcaatgcaaagctggagtttggcgagctacagctagtcagctacacagggtcgctgccattggccaggcgtctatcggttggctgccacttccactcccaggcagcggacggagcattgcgtcgcgacgcggtcatcgcggcgagcgacgcggactgggcggtgggggggccgtcacgtatctcgcccgggaacgcctcccgcatttttttacccctagctcattag

SEQ ID NO: 39852 - DNA, 555 bp, Zea mays
  Peptide Sequence Number=SeqID_81631
atggtgcggcccattctacagcccatcctacggcgcctgccttctacaccccaggctacggcgcctgccgcctccactccagcgacggcgcgagcaggatgcccacgacctcgacctcctcctcacgaccacgaccacggcctcaaccgctccgccagctccgccatttacgcacacgacttcaacctcgtcaggctcaggctccgcgacggccgccacctcgcctactgcgagagcggcgtgccccgggaccaagccaggttcgccgtcgtcttctcccacggattcaccggctcccgagaggacagcgttagcgcctcccagggaagattttcattcctgatgcttcggaattatgggctactcttttggcagacgctcatgacagtggccatgaggcctcttccagtgccttctgaggtttggagtgatatttctatggactttgttgagggatttccggaagtgggtgactggagagaccacggagccgtcaccgccgtgaaggaccagcagcagtgcggcagctgctgggccttctcggcagtgggtgcg

SEQ ID NO: 39853 - DNA, 396 bp, Zea mays
  Peptide Sequence Number=SeqID_81632
atggggaagcatgtcccatcactcctcatgctcctcctcggccgagtgcagtacaatggatcaagcagtctcattagctgcgagaagcaaatgattcaaatcgagtttttaaaccttgcaagggctcaccgccttggcgtacaatgcctcactgaccccgactgccgtcatgcagtgactgcacttgtacccaccataaccggaatgggagaccacgtctcaggttgcgtgaggggatatgtctgcgggcaggttcaatcaggtatccacacgttaatccttattccaatttcatctcgtagaccacgcatccccatggatctgtgtccacagaccaactatcaatatgatatgaaagtgggtacaatcaatgtcctgacctcacgcgagtgctag

SEQ ID NO: 39854 - DNA, 192 bp, Zea mays
  Peptide Sequence Number=SeqID_81633
atgggagaccacgtctcaggtcgcctgaggggatatgtctgcgagcaggttcaatcaggtatccgcacgttaatccttattccaatttcatctcgtagaccacgcatccccatggatccgtgtccacagaccaactatcaatatgatatgaaagtgggtacaatcaatgtcctgacctcgcgcgagtgctag

SEQ ID NO: 39855 - DNA, 375 bp, Zea mays
  Peptide Sequence Number=SeqID_81634
atgccatcctcttcttcttccgccaccgccacgccgccggccgccgcctcgtctgaggagacgttgagtaacgcgatggtggaagagttgcgcgccggcgactctgttgaattcggtgtgtcacggatgacgtcaggccgtattgaagatatgcagcggttgggctactttggcggcggagtcgctcgtgctccggggacggaggaagtccccgagccggagggcgagttggttgttttcgaggcgttcttcgccgctggactccgcctccctgcgcaccggacgaagcagaccgccgcgggaagaaaccggcggtggaggcccggaggcgaccctgcgctggcggccgccacctcttcgaaaaagagaaattag

SEQ ID NO: 39856 - DNA, 768 bp, Zea mays
  Peptide Sequence Number=SeqID_81635
atgatgcgccaacaggaaaagaacaaggcgagccagcaggaggtagctattaccgtagctgttgaggagaatcgccaattgccgatggagcgtatgccgcggcggaggagcacgtcgacaaccaattccagtcgacaccggtggagcccctgcctgacgatgcccacaaaagctcccacgcgtgttaacggagctgccacaacgcttttcccggcttggacggtggtgcagagggagaatccccgcggcggcgaggagaggcggcgcgcgaggtgcgactggatgttgttagcgaaaaggggcagagacgggtcacgggaagcgctgcgcgagggttcttatgggcggttagttgcgcgtggggacgattcctggatcttgacccgccatgctcgggtcgacggaaatccagccgcggcagcaccggatttttctgttgaagaagacgcctgcggtggggttcggctgacagagggggcccgcgtggaagtgagcgtggtgagcgagagggaggggctgcgaggcggacccactggtaagccaaaccaggtatgctctttttatgatgcaaatgaggcacacaaaatggaggagatctctccaatattcttggtatacaattttgagtattacagccaaaacgggaaagaaatccgcaccggacagtgtccagtggtgcaccggactgtccggtgcgccagtcgacagaaggcaagaattgccttcctggaatgctctcaacggctcctagctaccttggggctataa

SEQ ID NO: 39857 - DNA, 462 bp, Zea mays
  Peptide Sequence Number=SeqID_81636
atgcccaactaccctgcccagatgatgcgccaacatgaaaagaacaaggcgagccagcaggaggtagctattaccgtagctgttgaggagaatcgccaattgccgatggagcgtatgccgcggcggaggagcacgtcgacgaccaattccagtcgacgctggtggagcccctgcctgacgatgcccacaaaagctcccacgcgtgttaacggagctgccacaacgcttttcccggcttggacggtggtgcagagggagaatccccgcggcggcgaggagaggcggcgcgcgaggtgcgactggatgttgttagcgaaaaggggcagagacgggtcacgggaagcgctgcgcgagggttcttatgggcggttagttgcgcgtggggacgattcctggatcttgacccgccatgctcgggtcgacggaaatccagccgcggcagcaccgggatttttctgttga

SEQ ID NO: 39858 - DNA, 1197 bp, Zea mays
  Peptide Sequence Number=SeqID_81637
atgaagcaattcttctttttcagtgcagcggatgagtccaaatttctgttcaatgacccgtacccattcatcggcttcgagagggtcttcggctttgacgaaaagtgggggacgggggaccgttcgtcagccaggttcatagaaggagggggcttgaaaaggtccaattcgtcaccaagtgcttcacctgctgttccagaagtacacctgcaagttgtcaacggctgtgctaagctcatccacacgggctcgagctttggcttcctgatctccgatggggtcgttattgccgctgctgctctcctcatgtctcgaagccagctgagaaccttctatacattgcactcttctacctggtcttataagatagtgggtgtacatccatttagtgcatattcggtgtcccacaacaatttaaggcctgaaacagaagagggtgaattatctcctaatggtgatttcaaagaggaacacttctgtgttttcgaagatgaagctatagatggaacttctaaacaaaatgaaggttctaccagcagatctccccagggtagacctaagaattatctcaagttttcaggcaaggatcattcaagtgcagaaaatgaaagtaacaagagagcccagaggtctgcagaggatagtgaaaatgcatctgaggctgatgaagatacctctggcagagaatctgatggtgatgaggagtcttctcatgaagatcaggatgaagaagaggatgatatggatcttgatacaaaggcaaaaaatgactgcagagcagaggtaaatagggaggcacagggtttggatggaggaacatcaatgtcattttcagaatgtttgcaaagtattgttaaaccaatttccaagtttatcagtgcactatacaacttgcttgatggttcttctgaggaggagcccgcggcggagaagacgaccaccgggaagaagcccaaggcggagaagcgggtcctcgcgggcaagtccgccggcaaggaggacggcgagggcaagcgtggcaggaagaagggcaagaagagcgtggagacgtcgcacccacatttatcctcatcatcgagacactcaatcgaagtggagggagtggagcagttcagagggagatcgtgggggattgcagggagagttggtgcagctgtggaggttgtggcgcgcgggggtggggagccctggcattga

SEQ ID NO: 39859 - DNA, 351 bp, Zea mays
  Peptide Sequence Number=SeqID_81638
atggccatgatgggttcaacatcggaaaagatgtacctctgccaggaccgtgccgatgtacgcttgctgaccgaggaccctttaactggtcacatgcctcgtcatggcttcaactgccagcgctgtgttgacagccctgctgtaggagagatcaaggcaggtggccatctttctctgaagccggtcattgaggcctcgcataaaacaattcctctttttcagcactccttctggaatgtagtgctcacgaaacgccaatttaaattcgtcccatcggatgagcccaaatttctgctcaatgactcgaacccattcatcggcttcgagaggatcttcggctttgacgaatag

SEQ ID NO: 39860 - DNA, 510 bp, Zea mays
  Peptide Sequence Number=SeqID_81639
atggagctctcagaggagccgaagggatggattgctagacccatcacttgtgatgccgctaacgggtgtaacttccacgatgctctcgatagcttgttgcgtcaggcattcgaccgacacacttggtctactgagtaccgttgtgtagtctaccagcatcatcgcgggttatacccggaccgcggagtagctgacggcctcgaccttaagtactaccctcgccgtttgaccggcagtgctggaggtgtgattgtctcgcccgttggtgagggcaatcctaggctgaatagcatggtcaacctggtcaccatgctcaacgccgagctagaccacgcccttgacgagttgggcaagatgtctgagaacaggcgcagaggtggaaggcgtgctcaggaggagcagcaggcaccccaagaggaggcagctcagcaccagttgccaccgccacccccgatgaccattgaacagatattcctgatgcaaacccaagcagtccaagcgattgtctag

SEQ ID NO: 39861 - DNA, 187 bp, Zea mays
  Peptide Sequence Number=SeqID_81640
gccgtcggaaactggacgttttcctgtagtgtctgacgacgtcgcccccagccccagcccagcgtcagggaagtctgcgagcgcgaaggccaaggcgcaagagaagagctcgtcgtaccgagtcggcggcgcccgttgcttgccgcttgttgctgtctcgtcggctgggctgacgctcttgtggtga

SEQ ID NO: 39862 - DNA, 1302 bp, Zea mays
  Peptide Sequence Number=SeqID_81641
atggagcaggagcgcggcacgaggagaggagctcaacaaggccggagtcctgacgaagccgaaggaagcagcatattgacgcgtacaggaacgcgcggctcgagtctcgttgcttcacgacgtgcagctgaaggtcgggcgcacgaaggtgggcgtggagtagggaggagcacgccgccggccgtgggcatcgcagcgacgaaagctgacatgaggctgtgcggcgccatcacagaggagcacgccgccacagcatgggcaacacagagacaggcgcgacgccggcgaagaggagttccacgacgacgggaccggatggagcaggcgagcacgacggtctgcctcgggcggtgggggcgcaaggaggcacagcgggccgcgcgcccgcctcctgcttgcgcattcggcggaggcgcagcggaccgcacgggccgcgcgcgtgacatcggagaagtagcagtcggcaccatccggagaagtagtagcccgcccagagagctagcaggctgccgcgccgtggagccaggaagaagagaaatcacaatacgtgaacatgaggaggaatctccttgcgtgtcaacaaccactgctcgacccttccacccgcgcccgtgcccacgcccgcgcccgtgccacttggacctcgcggaggttccacacgttctgcagaagacggacgtcatcgagcgaacagcacgaagcaaggtatcaccgtcttcgtgcccaaggactcggctttcgcggcgctcagcggggagacggcgctgggcaacctcagctccggtcgctgctcccgtaccacgcgctgcccaggtacactccctggcggagttcgaccggctgagcagccacggcccggcggccacactaaacctcacctacgacataggtaccgtccgggtgaagtcggcgtggtccggccccaagatcagcagcagcgtgtactccacccgccccgccgcggtgtacgaggtcagccaggtgctcctgccggtgcaaatcttcaagagcgactccccgctggcgccggccccttcccctgcccccgccccggacgccaaggtctctgacgacgtcgcccccagcccagcgtcagggaagtccgcgagcgcgaaggccaaggcgcaagagaagagctcgtcgtaccgagtcggcggcgcccgttgcttgccgcttgttgctgtctcgtcggctgggctgacgctcttgtgtgacgatctgagcttctcagcatgtgattgccttgcttctgacctccgccaccagttcctgccgaggcaggcatcaggaatcagaaactag

SEQ ID NO: 39863 - DNA, 546 bp, Zea mays
  Peptide Sequence Number=SeqID_81642
atgtcatttcttgagaatgaaatgaacatcctatttgatttgatgtgtgcctacggccccttccacagaattcactgggcaacatacattgctgaaaggccttcgtgtgaggaagttttggttttattagaagaaaatagttttgtaatgggtttggaaaaggttctggacggacacatggtcaaagtctgcaatgatcagtacagtttgaccgacaaatatactgatggctggctgtcttcagtgctgggaactacaattctcacgctgatgtacccggctgcatttacatggttcactaccagatgtgaagaccaggtgggagaacagctcatggggcaagaagctgattgtctagaagaggagagcatcgctcacccaacgtacataatcgggcagattgttctcatcgagcagcacactaggctcctaggacagatgagaggagcttcacaccctgatagcagcggtggtcatcgggcacccgcatccatgctcatcccctacatcctaccagggggttgtgagtaccaaggggcaccctga

SEQ ID NO: 39864 - DNA, 390 bp, Zea mays
  Peptide Sequence Number=SeqID_81643
atggacagccgcaaacagaaggaacatcctggaggttttcttttcacgaagtttgccagtagtagccagattctttttgaccttttcctgggtttggaaaaggttctggacggacacatggtcaaagtctgcagtgatcagtacagtttgactgacaaatatactgatggctggctgtcttcagccaaccggattgtgccacctcatgaggggattgagcttgggattggggatgcatcagtcatctgtgcacttgcagaggcatatggacgcaaagaggagcatgttaagaaggaccttaaggaattgggtgatttggggcttctggcaaaagcaagcaggaatcaggaatcaggcaaagacagtcaagataaaaaagaaaccatatga

SEQ ID NO: 39865 - DNA, 1050 bp, Zea mays
  Peptide Sequence Number=SeqID_81644
atggctgcagcaatttttcagtgcttgaaaaagttttatgatcttaccgagttgctctttggggacataactcctccaacagggattaggcaggctatggagatgcaggctgaagtagaaaggagaatatgtgcccaatttgatcatctgctttactgcagtcgagcagcggaggaacccggcgctcaggggacagccaaccgtcgtggtgcagtacaatggctggaaaggcggcggcttgattgccgtcagctacgaggctcgtggatttggtccatgcgcggagatgaggccaagagggtctgtcctggtattaatcttgttcaggtcccagtggcgcgtggcaaggctaaccttaatctttacagaagtgctggtgctgaggttgttgcaatccttgcaagcaaagggaagtgcgagcgggcatccatcgacgaagtttatcttgaccttactgatgcagcaaaggaaatgctcttacaagctcccccagattcaccagaggggatttttatggaggcgacaaagtcaaatatcttgggccttccggctgatgccagcgagaaggaaaagaatgtgagggcatggctttgtcaatcagaagctgattaccaggacaagttactggcatgtggagctataattgttgcacagttacgagtcagagttctggaggaaacccaattcacatgctctgctgggattgctcacaataagatgttagctaaacttgtcagtggaatgtacaagcctgctcagcaaacagttgtcccttcttcatcagttcaagacttactagcatcactacctgtgaaaaagatgaaacaacttggtggtaagcttggaagttccttgcaggatgatcttggggttgagacaattggtgatctcctaagttttacagaggaaaaattacaagagcagtatggaggtttggaaaaggttctggacggacacatggtcaaagtctgcaatgatcagtacagtttgactgacaaatatactgatggttggctgtcttcagattgtagaacaactctttttaaataa

SEQ ID NO: 39866 - DNA, 1374 bp, Zea mays
  Peptide Sequence Number=SeqID_81645
atgactgaatcgactggcacagcgaccaaatctactgtcggtggggcagcaggcgatcccctggaggccggatcggtgattggggacttggaggcgtgggctgctgctggggtttcggtggaggctgccggcgtgaagcattggccaccgagtgctgcacgccaacagccaacagggggtaccgtgcagctttctatcctatatttgcatgctcttcaaagggatttatatggaccttccaaatacactagacatttgcaagcaaccaaagatactctcagacaagaagataggaaaatttctccatctgatgatgactgggacatggctgcagcaatttttcagtgcttgaaaaagttttatgatcttaccgagttgctctttggggacataactcctccaacagggattaggcaggctatggagatgcaggctgaagtagaaaggagaatatgtgcccaatttgatcatctgctttactgcagtcgagcagcggaggaacccggcgctcaggggacagccaaccgtcgtggtgcagtacaatggctggaaaggcggcggcttgattgccgtcagctacgaggctcgtggatttggtccatgcgcggagatgaggccaagagggtctgtcctggtattaatcttgttcaggtcccagtggcgcgtggcaaggctaaccttaatctttacagaagtgctggtgctgaggttgttgcaatccttgcaagcaaagggaagtgcgagcgggcatccatcgacgaagtttatcttgaccttactgatgcagcaaaggaaatgctcttacaagctcccccagattcaccagaggggatttttatggaggcgacaaagtcaaatatcttgggccttccggctgatgccagcgagaaggaaaagaatgtgagggcatggctttgtcaatcagaagctgattaccaggacaagttactggcatgtggagctataattgttgcacagttacgagtcagagttctggaggaaacccaattcacatgctctgctgggattgctcacaataagatgttagctaaacttgtcagtggaatgtacaagcctgctcagcaaacagttgtcccttcttcatcagttcaagacttactagcatcactacctgtgaaaaagatgaaacaacttggtggtaagcttggaagttccttgcaggatgatcttggggttgagacaattggtgatctcctaagttttacagaggaaaaattacaagagcagtatggaggtttggaaaaggttctggacggacacatggtcaaagtctgcaatgatcagtacagtttgactgacaaatatactgatggttggctgtcttcagattgtagaacaactctttttaaataa

SEQ ID NO: 39867 - DNA, 459 bp, Zea mays
  Peptide Sequence Number=SeqID_81646
atggacactgcccgtaacgcgcggcggccacgcagggcccgttacggtgggccggatcgcacgtgggcctctgagctggacgaggccacactgtgggatgacgtcgtcgccggtcttcgtctggtgccgatcaagcgaagggtgtccctgcctgttttgtctctgtcagaccagcggctgcagcgaaggcttcgagcgaagggtggcgtctttgccttcgccccaacacctggatcgggcggagcggagttcgccgtcttccagggcttagcccgaatccgagccctgggtcggccggagcggagcttcctatggtgcctgaggtcgggcctgactgcctgtcagcctcactctgtcaagtggcactgcagtcgttgcggcgcaggcggcgctgtccttctgtcaggtcggtcagtggagcggcgaagtgactgcggtcacttcggctctgtcgactga

SEQ ID NO: 39868 - DNA, 543 bp, Zea mays
  Peptide Sequence Number=SeqID_81647
atgaggtccccctacttgacgatggacaacgtggtgcagccgctctggaccgcgtccaagtggcggctgcgctggagcttgtcgtacacagtgacacatgtggcccacgtaggacggcttccagacgtcaaactgggagccgccaagcttcttctcgtcgtcgatgagcgatgccaacacgagcgcctcttactatcggtgtttgttcaggttttccaagcccgtaacgcgcggcggccacgcagggcccgttacgatgggccggatcgcacgtgggcctctgagctggacgagggcgcactttgggatgacgtcgtcgccggtcttcgtttggtgccgatcaagcgaagggtgtccctgcctgttttgtctctgtcagaccagcggctgcagcgaaggcttcgagcgaagggtggcgtctttgcctttgccccaacatttgccctccgagggaccagtttgacaaagtcacctggtgccgaagacgtcgctagatggcggagacgctgccctcgctcgaagtggttccgcgggggtttttga

SEQ ID NO: 39869 - DNA, 1494 bp, Zea mays
  Peptide Sequence Number=SeqID_81648
atgaagtcagttgatcgtcctcccgctaatcccaaacgcataacaattgagtcaagccaagaattctttagtgttgagataccacggccggcctctattggagttccgacaaacacaaagcattctgatccgtgtcctgcacctgtcgagaaaccatctgttatttatgaagccaatgaacaaactggatctggcaatgacgacgatgacttcatgacacctacaaagaagcgtaatgctgctggaagtcatatgaatatcttacggaagacatgcacaaagaggccgaaagtagtagaaactccacgacagaaactcaatgttagatgcaaccctcaggatgtgattataactattaagatattgaatgagaggcaacgacaagccgttgctagaaaaggattttccaatattcttgacatgacacttgatgcactgggtagccgttctcatcttcgttggttgatggataagttggaccacaaggatatgactattcgccctggagttggcaaggaactaaagattacgaaagaaactgtccaccttatactaggccttccgaatgctggcggtggtaagccactaggaatcgatgaagcagtggcgggcaataacttgagggctgaacttggattgtccaaggatgagtttgttgttgcatctcttcaggaccgattgagaaaaggaaatgatgatgacctctctatcagatgcttctttttgatattgttcaatagattgttgttccccacttccagctggggcatatctaaccatgaagtgttattgacggaagaaatggaccgtttccacgaaatagactggtgccacttaatttttaacgacctatgtgaagctgcacaaaagtggcatacaagaagcacttctaatgtgtccacgacgatatatggatgctcagttgtcatactattccgaagcttttctgaaacttgctattctgctgtccctagtgtgcagtttcaatcagagcatagggacaggacaaacatttttgatgtccctcgtcccgatccttgtggtcatcatactattcatatccagctccctttgatcaaggatatgctttcaagtaagataaagcagctccaaccacgtgaccgaccaaaattcattgaaaagtttgttgagtatgattctgaagttggcaaagcgtgttccatcataaaaagtactcttaccaagatggttgtgaagcagtatgaactagcggacacatttgctgagttaattgatgatgtccttcgcgcggagtctggcgacccagacaatgttgcggaagcgcctcaaacagataaacctccagatatatctcagcatatgtcgtcagaggaacaggttctggctctacattacctcaccttccatagcaagaacaaagtgcctcccgttgcctccagaaattcaaagattcaagtttggacgctagctgtgtccctgggatcaacattttgtgaatcgcaaactgtttga

SEQ ID NO: 39870 - DNA, 342 bp, Zea mays
  Peptide Sequence Number=SeqID_81649
atgcagaataggggcatgagcataataaaggatggagctaaagtaaggattgtaaccgacagggagaggatgcaaccaaggtcaggacaaaacttgcaaggcgtcgaagaagggggagcaattgatgatgaaatagatgaggcattatccccgaacagggatggaaaagaggatgcttcaaagggtaggtttaaggtaagatataggggtgataaggataaaggtgataatgatgaaaagcgtaatccatggatagagttaaggcgggactcgcaaagtgaagaaatggagaaaacaattaaggataagataagtgaggttccgatagaagagttgaagtaa

SEQ ID NO: 39871 - DNA, 414 bp, Zea mays
  Peptide Sequence Number=SeqID_81650
atgcatgataggggcatgagcataataaaggatgaagctaaggcaagaattgtaaccggcaagggagaaaatgcaaccaaggtcaggataggtaaaacaccattctcaaatcgagatgggaaagatgatatttcaaaaggcatcgaagaagggggagcaattgatgatgaaatagatgaggcattatccccgaacacggatggaaaagaggaggcttcaaagggtaggttcaaggttacacgcggtaaagaagaggatatagccaagggtgaggtaagtaaaacaccactctcaaattgggataggagattggagattttagataacagacatcacgtaatcaccaaggtgtggtcgagagatgggaaaggtaaaggcaacactaaacagaagtataacaaaggatggagctga

SEQ ID NO: 39872 - DNA, 252 bp, Zea mays
  Peptide Sequence Number=SeqID_81651
atggcgcgcgccagaatcagcagggtcgacgacgtcgaagcagcgaagtcagtagagtcgacgaggtcagaagatcacgagcagtcgcatgaggacgcttcccaaaaaccttattcgccctctcctggtgcaggatctagaagacgaagggttctggagacctgctctcctgatcgcagatgcacctctgcggtcgggatgaagagaactggaaggcggctcagctgtgaagagaggcgaaagcgaaactga

SEQ ID NO: 39873 - DNA, 477 bp, Zea mays
  Peptide Sequence Number=SeqID_81652
atggagcgcgcaggaatcagcagggtcgacgacgtcgaagcagcaaaatcagcagggtcgacgagatgcacgtctgcggtcgggatgaagggaactggaaggcggctcagctatgaagagaggcgaaagcgaaactgggatgaattggatgctggctgccaggcgccttttatagggccgacccataaatccttcacgtcggacgccgagcggcgagcgtgcccagcggccttcacgcacacctccacgtcggccatggcgataggcaacgagcggacgagccggttcgcttctgctctcttccctgtcgatctgacgaggcgaagtgttgtggttctgtggttgtgcttctgcgcttgtggtgggccactgagggagactagcagttatagcaggaggggcaccgcgacggtcattgggacggctgttgtctcctgctcacctctacaacgacgacggcggtgcgccttcggctag

SEQ ID NO: 39874 - DNA, 1475 bp, Zea mays
  Peptide Sequence Number=SeqID_81653
atggctgaaaggtaccaactcccacagagttgcgtcctccaacgacaaggcggaaggactgcgggtgtcccccatccgggggctcggaagccgtcgtgggctgagtcttctccaacgcgctccaaggtcctccccctacggcgcgggggctgggtcccatgcgtcgtgcaagctggcccagagcagaagaagccaaaccgtcgcgcgcggtgcatgcaaccgcccagcagttacgagcattcctccacttttgcccagaccagcgggcgaaagggcgggaagccatgcaggcggcatgcaaccgcgccaagtaggcgtgcccctccgacttccaacgcacccagcatgggggcccacgcccacgcgtcacgcagccggcgcgccggtcgctacgtgcaaacaactgcaccgccactcgcaccactgccacgcctcctcgactgcggaaccagtaccgcgactcgaggcaaccctgcgtacgacccagcagtgccagccaagcgcgacggtcaatacggccataaatgggccggcagtaatggtggtggcaggcgggcgggagcagcgttcgcgtcgtcagccaagcttacgtcccatcctggggcagtgaaagaaccctctatcacgacgggaagcgagcgacgcttcgccttcgccataatgaccgcgtcaaaagagggaccgggaaagggggatacctcgaaaaggatccttctccgtgaaggaaacaggctccgagcctccctactgatcagaggttcgaaggctggcccctcggaggggttcaacagccgccttagagcgcgtgggttctgcgcccactactggtcagaggttcgaaggctggcccctcgaaagggttcaacggccgcctcaggctactcgggctccgcgcccactactgatcagggggctcggactcgggctcagccccggaagacggtgaactccgctccgcccgacccagggctcggactcgggctcagccccgaaagacgggctcggactcgggctcagccccggaagacggcgaactccgctccgcccgacccagggctcggactcgggctcagccccgaaagacggcggactccgctccgcccgacccagggctcggactcgggctcagccccggaagacgacgaactccgcttcgcccgaccccagggctcggactcagccctgggcctccgccgacggtctccgcctcgcctgacccaggggctcggactcgacctcggcctcggaagacaaactcgacctcgacctcagagaagcctccacatcgcccaacctaaggcacggaccgaccacgtcaacaggaggcgccatcattaccctaccccaagccgactcaggctacggggaacaagactggcgtcccatctggctcgctccgccagacaagtaatgatggcgccccgcacgctctatgacgacggcggctcccagcccccttacggaagcaagaggac

SEQ ID NO: 39875 - DNA, 954 bp, Zea mays
  Peptide Sequence Number=SeqID_81654
atgggtacggattggaaccaagttatggcacagtatggcagtttcctatccgaggatgatggcactcagtttgacaacactgcatttcctcctccgcctgatataccagcccaggcctcaccagcagcacctccagtgaaaaagcctcctcaacgcacaaagctagccaatttcacgtctgaagcggatatgagggtttgtcaagcatggttggctatgagttgtgatcccattgtcaacactggtcagaagcgtcaaggattttggaatcggattacagaggcatacaactctcatagaggatcaatgccagagagtggcatgactgatgcagataagacttcgcttgcggctactcggtttgctgctgttgaaaagaagcccttccatttcttacattgttggtccatattgaaggatcaaccaaaatggatggaccagcacatgggcaaccaaaatcctccacccaacccaattggtacccaatcaaatactattgacttagatgctgctgaagactcaggtccatcaagctttacttcgaagaggccgcttggtcgtgattcagccaaggaaaaggaaaagaagcaaagatcagagaacacatcatccaatgattccgagtacctaacacagatgggtgagctatctttggaacggttatctgtctacaaatcagtagcttcaactgaggagaagaagttggagttcatgaaaaaacaggagaggcagaaactgatattggagaggaagaagctaaatttagagaagatgaagatggaacgacaaaaggtgaaggaggacacggaacaggaggttctcatattgagcattgatttgacaaaatgtaaccccctacttcgacagtactatgaggcaaaacaacatgagattctggcaagggttactggaagctcgtcgtcaagtgatagtcgcctagaggggggtgaatag

SEQ ID NO: 39876 - DNA, 831 bp, Zea mays
  Peptide Sequence Number=SeqID_81655
atgacgtcccttggatcagagaccgacgatcccgattttacgagatcccgaaccaccgttggtcgtcgatctaccatccgacggtcacgacccaacgcggcgaagggaaggtccggcgacgacgatggcggatccgcggcggcgagtcgaagttcggcgaggaattgcgccacgtccagtggccgacttcgcccgcgaacgactcgacacccttcgaatagacttggagacgctccaaggccagtcaccggggacccgacgtcgacgaccacgcgttttggtcacggcggcgaacttggcccgaggaaatcgcgacggtgtggctggcgagaggttgcgaataccggtgaggatgggaaggggtcgcggagcttcggctttatacccaaggaacggcccgcggccgttgcacggaggccgagaatccacggagagctttgcggagtccgcgcggcgcgatcggcaaagctgttgaaggcgggcctgacgcgcgggccccgcggaccagagagagggagggcaggcgagcgcggggcgagagaccgcccagtgggccccgagtctgacaagtgggcccaggttgtcggcgccagggatcggagtgagtgggccgcgcggggagcttcaccagagatcaaggaaggtgtgagcgcgaggaatttgagaatggctcaccggattgctcggtctacgcgcggccgcgggcgaccgaagtccggcgaggacgatcttgggtttccggtgaagttctgccaggtccgagagcttggaaagcttcacgggccacaggcaaagctaaccgagggacaggcgcagcttggacgcggctga

SEQ ID NO: 39877 - DNA, 618 bp, Zea mays
  Peptide Sequence Number=SeqID_81656
atgacgtcccttggatcagagaccgacgatcccgattttacgagatcccgaaccaccgttggtcgtcgatctaccatccgacggtcacgacccaacgcggcgaagggaaggtccggcgacgacgatggcggatccgcggcggcgagtcgaagttcggcgaggaattgcgccacgtccagtggccgacttcgcccgcgaacgactcgacacccttcgaatagacttggagacgctccaaggccagtcaccggggacccgacgtcgacgaccacgcgttttggtcacggcggcgaacttggcccgaggaaatcgcgacggtgtggctggcgagaggttgcgaataccggtgaggatgggaaggggtcgcggagcttcggctttatacccaaggaacggcccgcggccgttgcacggaggccgagaatccacggagagctttgcggagtccgcgcggcgcgatcggcaaagctgttgaaggcgggcctgacgcgcgggccccgcggaccagagagagggagggcaggcgagcgcggggcgagagaccgcccagtgggccccgagtctgacaagtgggcccaggttgtcggcgccagggatcggagtgagtgggccgcgcgg

SEQ ID NO: 39878 - DNA, 207 bp, Zea mays
  Peptide Sequence Number=SeqID_81657
atgccagtgccaagccgttgccaaaacccctactccttgctgctgtgcacccgttgtcgccctgcgctgggttcgctgcagcatgtctctgctcagcgctgttgctccatgatgcgcgtgctgctcgcggagatcctcgtccatgaccccgccaagcgccctgttgttgttcgccacttattcgcgtcattgcctttgtcaaaataa

SEQ ID NO: 39879 - DNA, 494 bp, Zea mays
  Peptide Sequence Number=SeqID_81658
gtgtcggcgtcggcggcgagcggcacagcaggtggagtctggcgggcgatggcaatgacgcggcgtcacggtgcagcacgagcgtggggagtcccaacgacaaacggcgacagcggcacacacaggcaatgacgcgaataagtggcgaacaacaacagggcgcttggcggggtcatggacgaggatctccgcgagcagcacgctcatcatggagcaacggcgctgagcagagacatgctgcagcgaacccagcgcagggcgacaacgggtgcacaacagcaaggagcagggattttggcaacggcttggcactggcatcgtggcttcgtcatcggcacagtgaaggaagctcgagcgtgcgggaatccagcgagatgggcgggcttcgggacaggaacaacaaggaatggcgagaggaggaagatgagcatgaaaatgacaatcactgctggcgaggagggatggagaagaatgggctgatgcacgttttatag

SEQ ID NO: 39880 - DNA, 246 bp, Zea mays
  Peptide Sequence Number=SeqID_81659
atgaagaaaatagacgaggaggtccaacgacaaaaagatcaggtgctcaaggtggcggataaatggttcctctcgcacttcagggtggattgccaccagaagaccgtccaagaaagggaaatagacgtcgattacatgtcatctgtgctgcaacagctccccacaataggtgatgccaggtcggaccgtccggagcaccagaagtcacctgtgatccgcctagtgcggaaggccgacataaaataa

SEQ ID NO: 39881 - DNA, 473 bp, Zea mays
  Peptide Sequence Number=SeqID_81660
atggccgtcgaccaagggatagcccacttcctcgtcctcgcggcggtcttcgccagtttgtcggccggccccgtgcgaatgctactaacaatgtcgcaaaataaggcggtctccgaaaaatcgccccaaaaaggcaccaacatactttttggcgactccgctggggacgaggttcaagatctacaaaatcaggcttatatggccgattctaaagatctcaacaaggcttctccaaacagctgcacaaggctgactaatttatcggccgctgagcataaaagattaaaagatgacatgaagaaaatagacgaggaggtccaacgacaaaaagatcaggtgctcaaggtggcggataaatggttcctctcgcacttcagggtggattgccaccagaagaccgtccaagagaggaaaatagacgtcgattacatgtcatctgtgctgcaacagctccccacaataggtgatgccag

SEQ ID NO: 39882 - DNA, 279 bp, Zea mays
  Peptide Sequence Number=SeqID_81661
atggggcatcatcacatatctaggtcgtattttcgacagacagatataaaacggagtgggaatgcctcgattgatatcatgtccaagttcttcaagctgatggtggttctacaattaatgaatgatttgaacgaagtgttcaagatgccgctatctcttgtattgaggcttatagtgtgcttgaggttcttcgacctctctataattcccctaagatactggaacaaaagtcttcctcctcgtctgccccaatgtcggcaagtcagccctcttcaacag

SEQ ID NO: 39883 - DNA, 837 bp, Zea mays
  Peptide Sequence Number=SeqID_81662
atggctgggaggaccgcgcccgcctccctcccctccttctccctcacgcccgactccctcgctgcccctttatcctggatctcgtcatggacgctaccacgaccaacgattgatatcatgtccaagttcttcaagctgatggtggttctacaattaatgaatgatgtgaaccgaagtgttcaagatgcagctatctcttgtattgaggcttatagtgtgcttgaggttcttcgacctctctataattcccctaagatactggaacaaaagtttagtaagatcttcactaatcactacatagtgcagcactgggctgttaatattttttgtaccatgtgtcataagcatgagaggttgcctgtagagtaccgatgctttattgcagtcttcctcctcgtctgccccaatgtcggcaagtcagccctcttcaacaggatcattgcgtctctgcgagctaatcagttctgtgagcgtctccctagccccaatggcgagtcaattgttgattgccatcagatctcaaagatgccaaatcttgcattcaccatagcaaacaagattttcaccttaacaccagagcagtacatagtgaagttggagcaagcaggacaaactatctgcatcagtgggtttatggcatttgacgtaccgcctcctcgtggtcctctctgctacgctgaacatatctgtactactcttaagtgtgcaatgagggcgtccaccgagggaatcaccgtgcccccgctcgccccctccacgcccgtgcatgtctgcgtccgcccccttcgtctccccgcaatggacgcgtccctacctcatgtctacaacgacaactag

SEQ ID NO: 39884 - DNA, 462 bp, Zea mays
  Peptide Sequence Number=SeqID_81663
atggttcaccggagttactctagtccgcccgaggctctctcaccgccgttctcccgtctctgctcgtggattcatggcctcttcccggccattgagttcgccgtggcgccctctccctctctgcccaactccagcgaccccggagccaccctagctcgtgccaccgtcaactccggcgacctcaccgccgcggagaggaacagcgccgcctgcagccgtctgttttccccctggtctgatccccttcgtccgattcagatcgaacggctcagatcacggataacgcttcgtgcacgcacgcctgacgccctggcccgcctgtcagcgcccaaacccccttgcgctgggcccgctcggtcagcgctctctccccctctatcgcgtggtagttttcttaaagagaccctcggtttattggaaatcaacccaccgtccctggttttcacgcgcaggcccctgtaa

SEQ ID NO: 39885 - DNA, 625 bp, Zea mays
  Peptide Sequence Number=SeqID_81664
ctcgacggagaccgctccaagcctccccgagctccaccccgaggtgagacacccgtccccatgcccaatttcccctattgcgccctgtgttcggccaatttcactttcgccggtgctcggccgctgcggccttagcgccttaagtcccctccccgtggccggaatggttcaccggagttactctagtccgcccgaggctctctcaccgccgttctcccgtctctgctcgtggattcatggcctcttcccggccattgagttcgccgtggcgccctctccctctctgcccaactccagcgaccccggagccaccctagctcgtgccaccgtcaactccggcgacctcaccgccgcggagaggaacagcgccgcctgcagccgtctgttttccccctggtctgatccccttcgtccgattcagatcgaacggctcagatcacggataacgcttcgtgcacgcacgcctgacgccctggcccgcctgtcagcgcccaaacccccttgcgctgggcccgctcggtcagcgctctctccccctctatcgcgtggtagttttcttaaagagaccctcggtttattggaaatcaacccaccgtccctggttttcacgcgcaggcccctgtaa

SEQ ID NO: 39886 - DNA, 1020 bp, Zea mays
  Peptide Sequence Number=SeqID_81665
atggtgtctcaggctggcgccgctgggtcgtgcgctgggtcgcctcgagtcgcggtattggttccgcaaccgaagaggcgcgatgatggcgcaagtggtggtgcagttgcttgcatgcagcatccggcgcgccggttgcgtgacgcgtgggcctgggcctccaggctgggcgcgttgggagtcggagaagcgcgtccacttggcgcggttgcatgccgcctgcatggctgcccgcctctctcgcccgtcggtctgggcaaaagtggagggtcacttgtaaccgctgggcggttgagtgcaccacgcgcggcggtttggcttcttctgctccaagtcggtttgcatgacatgcgggacccagcccccgcgccgcaggggagggccttggaacgtgttggagaagactcggctcgtgacggttgggggcgcaagcagggagagttgcccttaaaaggagggcgacccctttcggaaggcgaccatgtcttttcgctcccttatgcatcgcgtctctccaccttccaagcccccggatgggggatacccaccgtcttttcgcctcatcgttggaggaacgcaactccgtgggagttggtacctttcagccatcgctcggcttcaaggattttcatcatgcagcccggctgcacccctccaccggcggtcacccaagatggtgacctccagcttgatgatgggggaaagcgagccgggctgcggcctctgtccctccctcagcctcaaggattttcgtcatccaggccaagatggaggatgaggcgagtcggagggctgcctccgcgtgggtcggttacccttttcttcccctggcgtctgggggagaatggcatcctccagcttcgcggagacttcctccagccatgccgggataggtgggcggttctggctagggcgaagacctgccggcgcgcttcgaggcgtcgacagccggagatggcttctctaccgatgagattgccaactccgccagtagccctgggtctccgtctcccgacctga

SEQ ID NO: 39887 - DNA, 240 bp, Zea mays
  Peptide Sequence Number=SeqID_81666
atggcatcctccgatttcgcggagacttcctccagccatgccgagaaaggcgggccgccgccacccgctctgactgtggcaatgatcacccccgccccgggcgacgaagcagcttcagcagcagcttcggggcaggtgctacgacagaaggactctcacccaccgaggacgagagccagccattcgagccgggagacggagacccagggctactggcggagttggcaatctcatcggtag

SEQ ID NO: 39888 - DNA, 405 bp, Zea mays
  Peptide Sequence Number=SeqID_81667
atgacgagtacgaggatgggatggacatgggctacggcgggcatcaccagcgcggcggcggccacgcggggtacggcgcggaggaggacgacgagatggggtatggcgaggggggtggggacggggacgagatggaggaggaggcggatggggacgccgagcagcaggaagatatcacgcaggacgacgcctggggccgtcatctccgcctacttcgaggagaagggcctcgtgcgccagcagctcgactccttcgatgagttcatccagaacaccatgcaagagattgtcgatgagtccgccgacatcgagatccggcccgagtcgcagcacaaccccggccgtcaggccgagtttgccgaggttgtcgccccactcttattgaccgttgcaagtgtggcctga

SEQ ID NO: 39889 - DNA, 411 bp, Zea mays
  Peptide Sequence Number=SeqID_81668
atggaggatgacgagtacgaggatgggatggacatgggctacggcgggcatcaccagcgcggcggcggccacgcggggtacggcgcggaggaggacgacgagatggggtatggcgaggggggtggggacggggacgagatggaggaggaggcggatggggacgccgagcagcaggaagatatcacgcaggacgacgcctgggccgtcatctccgcctacttcgaggagaagggcctcgtgcgccagcagctcgactccttcgatgagttcatccagaacaccatgcaagagattgtcgatgagtccgccgacatcgagatccggcccgagtcgcagcacaaccccggccgtcaggccgagtttgccgaggttgtcgccccactcttattgaccgttgcaagtgtggcctga

SEQ ID NO: 39890 - DNA, 930 bp, Zea mays
  Peptide Sequence Number=SeqID_81669
atggaccagctacgcggtaacgtcgccaaggccaggaaggtgctgggcagcaagggcaaagggaaggggtttgccaggaggtggtgcagcagggcagcatgtaacgggagcataagcgaataccataagtgccttgctaggaagatctgcacgttccttgtgcagatcggctccatgactctcaaggaggagactggaatagatcttgatgatgtctgttgtttgctccagacggcattggtcggaagaagcatgctaatcctacttgatgatgtttgggagcaagacattgttgatcgcttcacaagactttatgataatgattgtcggtatcttgtgacaacaagggatgaagctatctacgagatagcagaagctgaaaaggtagaaatatgtaaagacgacatcaaggagatcagcacggaaattcttctctatcacagccttctcagtgctggagagcttccgctaaacttgcagcagatgctgtctcgagctgcgtttagcagatccgtaaacaggaaaggttatttattttatctggtcattaggtggttacgacaccgaagacaaggcagcgagggctacgatctggctgctctgaaatactggggtccagctactcacgtcaatttccccgtagaaaactatcgagatgagctcgaggagatgaaaggcatgacaaggcaagaattcgttgcgcatctaagaaggagaagcagtggattttctcgaggcgcttccatctaccgaggggtgatgaggttcgtctgcacagactactatgccaccgcattttgcttccttagagatcgtctcaacaggcaccaccagcatggaagatggcagtctcggattggaagcgtcgctggaaacaaggatctatacctcggcactttcagtaagaaagatcgttccatttggctgtag

SEQ ID NO: 39891 - DNA, 504 bp, Zea mays
  Peptide Sequence Number=SeqID_81670
atggaccagctacgcggtaacgtcgccaaggccaggaaggtgctgggcagcaagggcaaagggaaggggtttgccaggaggtggtgcagcagggcagcatgtaacgggagcataagcgaataccataagtgccttgctaggaagatctgcacgttccttgtgcagatcggctccatgactctcaaggaggagactggaatagatcttgatgatgtctgttgtttgctccagacggcattggtcggaagaagaaagctaatcctacttgatgatgtttgggagcaagacattgttgatcgcttcacaagactttatgataatgattgtcggtatattgtgacaacaagggatgaagctatctacgagatagcagaagctgaaaaggtagaaatatgtaaagacgacatcaaggagatcagcacggaaattcttctctatcacagccttctcagtgctggagagcttccgctaaacttgcagcagatggtcagtgttgctacatga

SEQ ID NO: 39892 - DNA, 729 bp, Zea mays
  Peptide Sequence Number=SeqID_81671
atgaagataaactcaagcagttcactatcttttagctattcgttgttatcatatccacatgtggccactccgccaactgtagcacacgtcagggaaggctcaaccatcgcctcggggaagacttccgcctcgcccgagcagggctctaacctcaataatcgcaggaaaggaatcccaacgtcacccgacatagggatgctgacgcaacccgtaaggaagcttttacccataccaaagccctgttacaacaactacggtatgggcgacccctcccctggaggctcgggcgtgctcgaggacttcgtgtccgacctcgacgcgctaacgcagcagtcgaggcagcggcacacgcacaagctacacggcccgcagctggaccaccagttccagagcctgggcaggctcatggaccagctgcacggtaacgtcgccaaggccaggaaggtgttgggcagcaagggcaaagggaaggggtttgctaggttggtgtggagctccgtggtgggtgactcgctcatcaagtacgccaggctgatcagggacgacctcaaccagtggctggagctgcaggagctgacccagagcatcggcaatgtcatagcgtcgactgccagaagcacgccgtcgttggtgagggttaagtcggagcatggataccggtgtccaagaagtgcagctatgtcagggagctgttggagaggaatggggctcatcgagtcgtcctcatag

SEQ ID NO: 39893 - DNA, 513 bp, Zea mays
  Peptide Sequence Number=SeqID_81672
atgtcgggtgacgttgggattcctttcctgcgattattgaggttagagccctgctcgggcgaggcggaagtcttccccgaggcgatggttgagccttccctgacgtgtgctacagttggcggagtggccacctgcaggattcactgtggggcaggcccacgaaagaatgaccttacgatttactgggcccttgggcctttcgtgaggtcttttactcttttagtggacccgggggatatctatcccccacaagcccccgatctttgggtttatttagagttgagggctggccttttaatcttgtcccacgccttagaagtcggcactgtcttggcttggaatgataatccatggggtgcaccggaggtgcacccaatgggtgtagcccccgaccttcaaatggattttagaggaaattggcacgaagctattcgcattatgctttggaggtcagcattatgtcatcaatattttgcttcagaggtattcactgcgtgccctgcacagatgtga

SEQ ID NO: 39894 - DNA, 342 bp, Zea mays
  Peptide Sequence Number=SeqID_81673
atgtcgggaaaaatgccgggcgcggactttatccctcatgcgacctgggactgggtctcccatgctagctatggtgggtacaagtgcggtcactgcacggcggcagccggggtcagtggagcattgtatgccaaggcggtgaggcctggacgcgaacggggaatcgatggggacggttgtcatgtgtggggtcgaagtaccctgacatgccgtgtgtttaggtttaccttgcaaggtaccattcaggaaatggttgatggtgtgacttgtcctaccaccctgccaccgggttggacggtcgagtgggatgttgctccggcaggagaggagcatgaggagtag

SEQ ID NO: 39895 - DNA, 246 bp, Zea mays
  Peptide Sequence Number=SeqID_81674
atggcggcagccggggtcagtggagcattgtatgccaaggcggtgaggcctggacgcgaacggggaatcgatggggatggttgtcatgtgtggggtcggagtaccctgacatgccatgtgtttaggtttaccttgcaaggtaccattcaggaaatggttgatggtgtgacttggcctaccaccctgccaccgggttggacggtcgagtgggatgttgctccggcaggagaggagcacgaggagtag

SEQ ID NO: 39896 - DNA, 2625 bp, Zea mays
  Peptide Sequence Number=SeqID_81675
atggtggctctgtcgaagtatgtctgggcgacgacttcgtacggcggacagtcatcggtcgaagtctttgcgaagtactattgcctgcactggcagaagaggatgattggagacgaagttgcccagtttgggtcctcatacccgccctttgaggtggcggaggatgatgcggacgaaggggcccttcggtgcgccgccggcctgagcagtgggcgcgatttggttgaagaatttgtggcgtacggggtatggcccttggcgcatggctgggcgttgggcgaagtgtgccctcgccagatgccttcccatggtgggaagatggtgcgaagtcctgccttcgcgctgaatctgcaaaaccgtgatccggccgcctttgtgcgtgaggcggaggatggggcggtgcggctcgttggtcgttacgtgccgaggacagaggtccagcgcaactgggatatccgcgggtcgaatgaccgtttgatcagggtttttgaattgaatcaattgccgtatgacggctatcctggccaagacgatgtggaccgccgtgggaagaagccggtggtggagactagagacgtccctgcgccggcggccgccccatcctctaaaaagaggaaatttggtactgctatgggaggacttggggtttccgttggttttgctagagagttgatgcggacatgcacggccccggtgggaaggatgtcttcgcccgagctccgggagtcttcggcgcggatgctgagggttaccgggggttggtggcctaggaatgttcctatcccccgcacggccggcgaagacttttttacatctcgcatggttcgtgaatggagagtttttccttacgggcggaatattgctgctgttgtgtcggcagtgatggacaaggatcgccagagagctgcacaaaagcgccaggtggttgtcaggctcgttgaagccaggccgaagaggcagcggggggctgcgaaggctgcggcccccggcggaggcaagccgccgctggcggcgaagtcgggcgtccctgcatctagcaaggcgccggaggcagcggcaggcgccggtgggtcggacgaaggccaacttgctatagttgcgcctgccgcggcgaccacgacggctgccgtagtgccgaaggcgaagggcggggctcttagcgccggaggcgagatgttagccctcgcggctgtcagggatgaggcgggcgctgtgtcccgccggctgaaggaggcggctgacttcgccgaccgcacggcgtcgggggccctcacggcagttgtgtctgccgaagtcgagagacttcggacgcaacatgctgacgccgtccgtgaaaaattggccgccgacagtaagtgccgcaagctggcggacaaggtggccacactggagagggagaagactgacctccgacgccaactggtgggggagaggatggagaccaacgaggccctcgcccaggcgcaggctgcgcaggcggaagccaatctggcacgggcggagggcaatcttgccagggagcgcgccgagcagctgcaggagcggctcaccgccctggagagtcgtgtggagagggccgaggccgcgtcgcgcgcggaggcagagcggacgcgcaaacagcttatggattcataccatgagctgggcgcgcggaccggtgacttcgaagaggagttgcaggcactccccactatcgtggaggggtttatgtcgtatgcctccctggtcacctgtgagggggcgatgaacgcgctctcccgcgaagggtgccggcacttcgaggtcttcgaccaagccgatgaagattttgagcgagaaatctacaaggttgaggaccccatagtgaaggactccgccagagccatctacgaccggatgtggggtccgcacggtcgcgaggtggtcagggagcgggccgagacggcgagggctcaggcggcgcgtggcgagagggtggatgacttcggggcgttgaacagcgtgttgcctgacctggagccgatcccggcggaggccgtgtccggggccgccctggagccgctcccggagaccgcggaaggcgctccggatgcccccgcaactgctgcggccgtcggagacctacccccagagaccgccgaaggcgcgcctgatgcccccgcaaccgctgtgtcgagtgctgaagatcctgcgacggtggcggcggaggcgacagcggaggcaacggcggaggcaacggcggaggctcccgcaacgacagggtctttgcaggttcaagattttgggcctgcgcatgcaaccgctactactaaatttttggcagcttcgaccgtggatggtggtaataaatgtgatggttctgcgtttgagttttctgattttgctgactctgggagctcggttgagtggactgaggagtcatcggaggaggacttggactactttgcggccttggatgtggctgcagcggaggctttaccgcacgctgcggacacagaagatgtgcctggtcctagtactgggcgccgacgacgaagggcggttgcgaaacgcagagtgagtgaagcgcagggaggtgaggagcttaggataatgttatttaattatagggagatgggaattattcctaaggttgagccgatgtag

SEQ ID NO: 39897 - DNA, 1221 bp, Zea mays
  Peptide Sequence Number=SeqID_81676
atggagagtcatgatctccgggcagaatgggaatcacggcttgtggggtacatcgggttaataacttgggtaatgctaaaacttggctttctactagttgtcagcattgcaaccactgctcaggcgaagatgaagctgtggaaggagacttccaggagttccaagactacgacgagttctaggtgtgggttagcggcaacccccagtcggctgcctgtgaaggccgcgatggctcgtcttagacacactgcacgaaagtccgtcatccctttcttaccctcccgtcttgctgagcgtccgcttcgccgtcccgtggccggacagtccagccacttggagagactgcaccaccgcctgcatgaggagcagcagggctcttctttctcgctccaccaggagatagagtctgtgaggagctgctcccctgtgcttcctctggaggcgccccctgcaccaccactgggcgtcccagcttctggagtagctgctggaggagacctagacgacggaggaggcgacgacagctcaagccacgacaccgacttctctgctaaccctgagccggaaggatgggttgctcgacccatcactcgcgacgctgctcgcgggtgtcacttccacgatgcgctcgacaccctgctacgtcgggcatttgaccggcatacttggtccgtcgagtatcgctgtgtggtctaccagcacagtcgcggggtctacccggaccgctgggaggcaacctgcttggtgcgctgcccggagaacagtctccagggtgctgaggtctgctcagagcactattctatctctgagcgggactcagctgaggcagccatgcaagatgctgcacggcgtgcgctttcgcactactgctcggttttcggtggggcagctgatggtcttgacctgaagtattacccccgccgttcatctggcagcacaggaggcgtgattgtctcacctgtcggtgagggcaatcctaggttgaacagcacagtcaacctagccgccgtgctaaacacggagctggaccatgcattagacgagctgagtagggctcgtgctgagatcgccctgctgcgggctgagcgcgcggaacgtcgtcacctggacggtggttcccccgctcccgtcgggactcagcacccgtaccgctcacctcagcgtggacaccagtcttatggcaatcccgactgcaagaccaagataactctagaaccatag

SEQ ID NO: 39898 - DNA, 267 bp, Zea mays
  Peptide Sequence Number=SeqID_81677
atggagagtcatgatctccgggcagaatgggaatcacggcttgtggggtacatcgggttaataacttgggtaatgctaaaacttggctttctactagttgttagcattgcaaccactgctcaggcgaagatgaagctgtggaaggagacttccaggagttccaagactacgacgagttctaggtgtgggttagcggcaacccccagttggctgcctgtgaaggccgcggttatctacgtttcttttccgcactttgatttattgtaa

SEQ ID NO: 39899 - DNA, 465 bp, Zea mays
  Peptide Sequence Number=SeqID_81678
atgggatacacgacttgtgggtacagggtacaacccctgcagagtgtaaaactgatgcacccggctttgttccttaaatccgggtgtgacacctcccttactcttgtggttttcattatggtcaatattgtaagggtgagagactccaacttgtgcagattactcacaaagctcaaggggggcacgtacaaggatgctgagccccgacatgtgggcccaggggcaaaacggaaggaagtaactaacaccagtcacgccagggtgatctccgagcgccataatgtctgtagtgcatatagtattgatatcctgcgctgcttccttggtaacgcgcgagtgatgatgagcatagtgcatgccgcagcacgggcgtactgcctgccaacggaatggacaggcacgccgcctgcaggatggcctagtcgccgcctgccagcggagtggacatggcacattaaatgctga

SEQ ID NO: 39900 - DNA, 2427 bp, Zea mays
  Peptide Sequence Number=SeqID_81679
atgcgggatggcctggtcgccgcctgccagcggagtggacatggcacattaaatgctgaggcggcacatcgcctgccagtggaatggacagtgctcattaaataccgaggcggcacatcacctgccagtggaattgacaggcggcgcgccttatccgcaataaatgcagaggccgcgcggcccagagaccttacgtcaggctccgcccgctggcttacgtcacgggcagtaggccacgtggtagcatcgggtcttcgcctgagcggggagcggaagcgtacacagcttgggtattctttgtcccagaatcccgggaccctgctgggagtggcccggaccccacgcagaggggtccggctcgcgcccgtggaggtcctggaccttacctggaggtccggtccgcatatacaggggtccgacactttcccatgggggtccggacccactgttgatgccttggagtatattgtcttctctggtcacgtggcgaccccggagccatccacgtggtggggtcgggtgctgtttaccacgcgactagagcctggttgctcaagtgaattttctggaattgaatttggagaagcacaacttgtccaaatcaagattatcagtgggggattatggtccagcagaggtgcttcttacatcatggatctccagaacctgggacgttcagctgagaaaattttagaggttaatggtgataagttcaacattttggcatctaaattttggtcaacctgggttggccctggagctaggaggagtaagctaatgtttagaacttggaaaggagacaaagaatttgaacctcaatcagagaatacagctgacacaactgttaccacgactattccaggcttaccagatttgaaggcagccggagagggttctgtacaccaccctttatctgctaaggagtcatttaaagcagcagtgacatttttgttcagaaaatggtaccttcgtgctgtttcattctggaagaacataaagcaactttcagaaaataccctccagttaatggtcagatcaaattggaacgatttcctacatattattaaggatcttcaactaccaagcatggatcatcttatttcgacaatagtgcaatggtttgagaggagaagtaaagcatttgagcctacttatttatatggcgtggaaaagggttatttcttgctttctgaaggtgctaaaactcgtcatggtgtccgaacaatcaatatcacaatttctgctcgaaatccttgctttggaaacaggtggcagcaacttttgataaacagcattgttggatatgatactatacttacaaacagcttggtgaattctcctggtcatggctatttatacaactttcagacgaaggagctctatgatcttagttatgggcatgaaccaccagaaggtcctacaagatttggagattactttgtgacaaaatgtggtgtccttctaatgtcactctttgtctttttcacaaccaccatgtctgtttcatttactttgagagaaacacaatcccgcatgcttagattcacagtgcagcttcaacaccatgcacgccaccacctgccaacctttcagttgatattcgtgcatgtcatcgaatcattggtttttgtgccgattatgattgggattctcttttttctatttgagttctatgatgatcaattgcttgcgtttcttgttttgactcttgtatggttatgcgagctattcacgatgatcagtgtgcggacatccatatcgatgcagttctttccacgcttcttcttgctgtattttttggttttccatatctacttcttctcatatacctatggcttctcatatctggctttctctgctacggcagcattcatgcagcacctgattttatatttttggaaccgttttgaggtgccagctctccagagattcatgcgaagtcgagcacacattcaccagcaaacaggtgtccacattacatcctcaactatctacacttctaccttacacattgctagggtaaatgtgagggaccctggtacaataaacgatggcctcggtgctgctcgtgaagcagatgccctattggttcaggatgagtctaccaggagccagcaagagggtcaacagaatggaatttctgagccagctgccaacaatgctctccagtatcaagagcaaaaccctcagcgagctggaagtacccctgcaggctcaggctccctcaacccatttgggtcccttttgctgtggttgctgggaggcggtgcttctgatggcatagtttctttcttctctatgttcagagatgttcgtgatcatggtcaagattacaccgatccacctcgaaatggaaatgatcagttagtaggtaagggtgaaggttgtatctatattcattacatgtgcacattccctaccgtctga

SEQ ID NO: 39901 - DNA, 678 bp, Zea mays
  Peptide Sequence Number=SeqID_81680
atggcccgcgcctataaagccctcccaggcttcgactgcactcttccgcgcaccctcaaacctcaccggagtttagctcgctgccgtttgcccgtgcgcagcgtgtccgcggccgcccaatccctctgccgccgtagaccggccaatagagccattcccaaccccgtccagccctcggagaagactgtgcacacctccgtgaagctccccgagcgaggaatcggagtttgcttcgccggagaggccagtccacgctcgccggagctctcaaccccgccggactatgtgggccgggatacaagagcaatacaaattccctatgtttatcctcaacaaaaacctaagcctaaagactgtaaccttgcagacggagagtacatcctcgtgccggagcaaggagctgctcaggaggtagccccggatccagcacccgagcctgcaccagaggacctgcctgccactgctttggaaggcaagccccgtagactttgcccctcacgcgacctgagacgtggtctcccattccggttatggtgggtacaagtgcggtcactgcacgacggcagtcagggttctctggaggaaatggttgctggagtgacttggccgtccatcttgccaccgggttggactgtcgagtgggaccctgcctcggctgaggaggagcatgaggagtga

SEQ ID NO: 39902 - DNA, 606 bp, Zea mays
  Peptide Sequence Number=SeqID_81681
atggcccgcgcccgcgcctataaagccctcccaggcttcggctgcactcttccgcgcaccctcaaacctcaccggagtttagctcgccgccgtttgcccgtgcgcagcgtgtccgcggccacccaatccctctaccaccgtagaccggccaatagagccattcccaactccatccagccctcggagaagactgtgcacacctccgtgaagctccccgagcgaggaatcggagtttgcttcgccggagaggccagtccacgctcgccggagctctcaaccccgccggagtacgcggaccgggtaatccactccaccatccttcgattccttgtgcacacggtcactacgttaccccgtgaagctcaccgtgcccttggattgaaccagttcgccgtggtttggccggatacaagagcaatacaaattccctatgtttatcctcaacaaaaacctaagcctaaagactgtaaccttgctgacggagagtacatcctcgtgccggagcaaggagctgctcaggaggtagccccggatccagcacccgagcctgcaccagaggacctgcctgccactgctttggaaggcaagccccggttttatgcataa

SEQ ID NO: 39903 - DNA, 918 bp, Zea mays
  Peptide Sequence Number=SeqID_81682
atgttacatgatgactacatgctcatttatgtcatgtttgatctgcctgtattcaatagaatgggtagtgattggaaccaggtgatgtctcaatatggaagcttccttagccagattgacgagcaacctatcggaacacaatattctgaatttccagttgatggccaacccgagggctcaagaacaccagctgttactaaaaagccaactcaaagaactaagctagcaaacttcactgctgaagaggacacaaggtgttccacttttgctggatacatgatggcagtcctccgacagaatcctagtggactcagtgacgcagacaagacatcactggcagcttctaggtttgcagcaattgagaagaagcctttccactttttacactgttgggctattcttaaggaccaaccaaaatggatggacaaccacatgggtcaacaacaacagcaagccaacgctaatcccacacattccaacactgtcgatttggatgctgaagaatctgtaccatcaagcttcacatcgaagaggccccttggtcgagatgcttcgaaggaaaaggcaaagaggactaaatctgtggacacatcttcatcagattctgagtttatgacacgcatgggtgatctttctttggagcgcctgtcagtgtacaaaacagctgtttcaactgaggaaaagaagttggattcaatgaacagaaatgagaggcagaaattgctcctagaaaagaagaagctgaacctggagaaaataaggctagaaaggcagaaactaaaggaggacaaggaagaggagataatgatcttaagcatggatttgagcaaatgtaaccctctactccgccagtactatgaagccaagcaacaagagatactggcaagggttactgggtctacttcatctggccagtga

SEQ ID NO: 39904 - DNA, 858 bp, Zea mays
  Peptide Sequence Number=SeqID_81683
atgggtagtgattggaaccaggtgatgtctcaatatggaagcttccttagccagattgacgagcagcctatcggaacacaatattctgaatttccagttgatgggcaacccgagggctcaagaacaccagctgttactaaaaagccaactcaaagaactaagctagcaaacttcactgctgaagaggacacaaggtgttccacttttgttggatacatgatggcagtcctccgacagaatcctagtggactcagtgacgcagacaagacatcactggcagcttctaggtttgcagcaattgagaagaagcctttccactttttacactgttgggctattcttaaggaccaaccaaaatggatggacaaccacatgggtcaacaacaacagcaagccaacgctaatcccacacattccaacactgtcgatttggatgctgaagaatctgtaccatcaagcttcacatcgaagaggccccttggtcgagatgcttcgaaggaaaaggcaaagaggactaaatctgtggacacatcttcatcagattctgagtttatgacacgcatgggtgatctttctttggagcgcctgtcagtgtacaaaacagctgtttcaactgaggaaaagaagttggattcaatgaacagaaatgagaggcagaaattgctcatagaaaagaagaagctgaacctggagaaaataaggctagaaaggcagaaactaaaggaggacaaggaagaggagataatgatcttaagcatggatttgagcaaatgtaaccctctactccgccagtactatgaagccaagcaacaagagatactggcaagggttactgggtctacttcatctggccagtga

SEQ ID NO: 39905 - DNA, 337 bp, Zea mays
  Peptide Sequence Number=SeqID_81684
atgcagcagatggcgaatgatgagaaggtcgacgacttcggatgcctggagggcatggtgcctctggcggaggatgcgcgggtggggattggggagcagtcggcgccgccgactggtgctggcgaggaccctgtggcagccgccgcgccgcctggtgaagacacttcggtggcagccgcgccggctgccgaagaccctgcaacgttggctggcccttcgcaggttccgacgtctgggcctgcgcaagcaacccctactgatgatactaattttgtggcggtcgcaaccgcagtgtctgctaatgatagtttgtctggttctgaatctgggtatgatg

SEQ ID NO: 39906 - DNA, 603 bp, Zea mays
  Peptide Sequence Number=SeqID_81685
atgcagcagatggcgaatgatgagaaggtcgacgacttcggatgcctggagggcatggtgcctctggcggaggatgcgcgggtggggattggggagcagtcggcgccgccgactggtgctggcgaggaccctgtggcagccgccgcgccgcctggtgaagacacttcggtggcagccgcgccggctgccgaagaccctgcaacgttggctggcccttcgcaggttccgacgtctgggcctgcgcaagcaacccctactgatgatactaattttgtggcggtcgcaaccgcagtgtctgctaatgatagtttgtctggttctgaatctgggtatgatggtgagtttgggagcccgttttcctggagtgaagagtcttcggatgaagatttggattattttgctgcgttagatgtggccacggcggagtcctcgccgcggctggaggtgggcgaagcgtatgatcccccggctggcgtgaggatcgagcgccgacaacgaaaagtggtgtcgaagcatagcgttggcaagatgtcacgaagtggtaggcaccgtcgtatggggatggagcgaacccgccttcgagtggatcgcggtggccaatga

SEQ ID NO: 39907 - DNA, 249 bp, Zea mays
  Peptide Sequence Number=SeqID_81686
atgagggtggagtgggacgcccttagctgcttaattagaggaaccagaggagtagttggcttcgcggtagggctgtcaattgggtccgggcacagtacttgctctgatgaacttggtggtgtagttggctttgctggagggccgtcaatggggccggggcatagtgcttgctcccctaaggatgatctaagatacaatggttctattgatggttttggttatggtgatgataatgatgttcctcgatga

SEQ ID NO: 39908 - DNA, 612 bp, Zea mays
  Peptide Sequence Number=SeqID_81687
atggcgaagccaactactcctctggttcctctaattaatcagctaagtgcgtcccattccaccctcatggttgcattgttatcccgggttgtcactccccaaacaggtccttacagagagagggatcttcggcaacacactcaggaaccacgagctgctcgttgtctaagtaaagcgtgcatacattcaatacatttggaagggtcaggggcgtcagcggcagaggggggagggcgcactgaccgagcggtcctagcgccagaggacttgggcgcttacaggcgggccagggcgtcagggcacgcgtccgcgaagctgtacccgcggtctgagccgttggatctaaatcagacggaggggatcagaggcaggccaaggcgcagggcgcacgtgcgtgaagcggtacccacggtcctggcccgtgcgatcaggatcggacggaggggatcagaccgagggaaacagaaggctgcggcggcgccgctcctctccgcggcggtgaggtcgtcggagttgaggctggcgcgggctagggtggcaccggggtcgccggagttgggcagagagggagagggcaccacggcgaactcaatggcggggaagaggccatga

SEQ ID NO: 39909 - DNA, 297 bp, Zea mays
  Peptide Sequence Number=SeqID_81688
atggctcaccggagtcactccggcccgtccaagaccttctcaccgccgttctcccttctctgcccgtggattcatggcctcttccccgccattgagttcgccgtggtgccctctccctctctgcccaactccggcgaccccggtgccaccctagcccgcgccagcctcaactccgacgacctcaccgccgcggagaggagcggcgccgccgcagccttctgtttccctcgatccaacggctcagaccgcgggtacagcttcgcggacgcgtgccctgacgccctggcccgcctgtaa

SEQ ID NO: 39910 - DNA, 564 bp, Zea mays
  Peptide Sequence Number=SeqID_81689
atggacagagaagggagaacggcggtgagaaggtctcgggcgggccgaagtaactccggtgagccgttccggccacggggaggggacttaaggcacgctaaggcctgggctagcttcagcagaggcaggggtgacacagggacctactccggggaactagacctggctaaatcggccggccactgcgcgagcacggcggaccgccgcggccgagcaccggtgatggtgaaattggtcgaacacagggcgcaaaaggggaaattgggcacggggatgggtgtctcacctcggggcggagctcggagaggcttggcgtggtctccgacgagctggatggccgggaacgcgggcgcgggtctccggcggcggctggcggcgtgggcaagcacgagagagggcgaagctgcacgaaatgaggtgaggggtgtgcacggggcactagcggggctctatgaagggagctgggcgcatgggcgggcgtcatggccgagaaatccggcgacgtgcgcgagtgcgcacgcgctggtccacggcgagcgcggagggcgtggaactaacaggtag

SEQ ID NO: 39911 - DNA, 678 bp, Zea mays
  Peptide Sequence Number=SeqID_81690
atggtccttcttccccaccacgtcgcgcgagtgacagagcccggtagtcgacggcgagctcgccactgtgacggcgaacaacccaagccgtacccagctcaagccaaaccaaacctcacacgcttcctaatcatgctgcagagaggggaatggaacgtaccgccgcagagggcggtgaggacggggctggcgcacacggtccgaagatcctccacgcggtgggtgcgtcgagggtccctgacgccgagattccaaggagctccgccgccgcaccagaggcttttgccgcgcccgaactccccgtcggtcacccgattcgaagacgacggatgtcttcggcagacgctgcgcacattcgatttctctttcttggaagcttggtggggcagcgaagaaaaagggatagcacgcgtggacgaggtcgagcggatcagggatccgttttatacagttcgaggtggcaaccaccatcccgagatccccgggtcaacatccatggcggcggacgcgggttttagttgcagcccaagcggatcgacgagggacgcggtcgttcgctccaacggagatgacactgatgccggggcccacctggccagcgaggcgcgcaaggacgaagtgcgtgcagcggaagtctgttggggaagaagaagctacgcagtgggacccacaaggtag

SEQ ID NO: 39912 - DNA, 675 bp, Zea mays
  Peptide Sequence Number=SeqID_81691
atggtccttcttccccaccacgtcgcgcgagtgacagagcccggtagtcgacggcgagctcgccactgtgacggcgaacaacccaagccgtacccagctcaagccaaaccaaacctcacacgcttcctaatcatgctgcagagaggggaatggaacgtaccaccgcagagggcggtgaggacggggctggcgcacacggtccgaagatcctccacgcggtgggtgcgtcgagggtccctgacgccgagattccaaggagctccgccgccgcaccagaggcttttgccgcgcccgaactccccgtcggtcacccgattcgaagacgacggatgtcttcggcagacgctgcgcacattcgatttctctttcttggaagcttggtggggcagcgaagaaaaagggatagcacgcgtggacgaggtcgagcggatcagggatccgttttatacagttcgaggtggcaaccaccatcccgagatccccgggtcaacatccatggcggcggacgcgggttttagttgcagcccaagcggatcgacgagggacgcggtcgttcgctccaacggagatgacactgatgccggggcccacctgggccagcgaggcgcgcaaggacgaagtgcgtgcagcggaagtctgttggggaagaagaagctacgcagtgggacccacaag

SEQ ID NO: 39913 - DNA, 216 bp, Zea mays
  Peptide Sequence Number=SeqID_81692
atggcgggcggaattgagctcgccggagctaaggagagggggctggccggtgaaggtgagcgtggggtgaagtgggggcgcgccctggggaggctttatttgcacggcgcggacgtgttcaatgcaagggaatttggcacaactttgatatttggatcttctagttttgagtttcgaaaaacagagaacgcagttgatctttggaaagaggtctga

SEQ ID NO: 39914 - DNA, 483 bp, Zea mays
  Peptide Sequence Number=SeqID_81693
atgggtgcaaggaatttgacaatggcttaccggagagcttggtccacgcgcgggggcgggcgaccgaagtccggcgagggtgatctcgggcttccggtgaagttctgccgggtccgaggacttggaaagcttcacgggccaatggcgaagctaaccgaagcgttggcgcgactaggacgcgactggagagagctggccacggcggccgaggctctgaaagcttggcgggcggtggcgcggcgtgctcggggcaatttccggacgtcgcgcggttttaggctagagacagggagttgtagcgtcaccaaggtgccagtgtcagaatgtctggtcccaaggtcaaactgcaccaaaaccgtgtcaaatgaatttggtttgagttcaaacttttccagggcgtgttcaagggaatttggcacaactttgatatttggatctcctggttttgagtttcgaaaaacagagaacgcagttgatccttag

SEQ ID NO: 39915 - DNA, 535 bp, Zea mays
  Peptide Sequence Number=SeqID_81694
agacaaccgatcaagccaaggatggaggcaagaagagcttcgaggtatcgagtgcacgggagaaggtcaaggagaccaggaacccaaagccaggggtgaagaagaagacttgcaaagtcaaggttgatcgagttaagaagacttatgagtccaacatcgacctcaaacaagccaaattgggtaaaacgatgaaaaaagttaatggagacgaaagcgatgatgaggaggaatatgaggatgatagcgaggatgagtcttcatcaccacaaggtacattttcctgtattgcttccactaataataatgacagggaaaatgagaccggtgatgtggaagaagaggagattcgccggttctacaccaatctcaacaaagaagacaaagtgctcttggttaagttgttgagtaggaacaaggaacaaggcgagacgcttctcaggctagaggagactctcatcaaaaccaacgacagcctggagaagatgaccaaagaacatgaggagctaaagtgctctcatgataatttggtccaacg

SEQ ID NO: 39916 - DNA, 535 bp, Zea mays
  Peptide Sequence Number=SeqID_81695
atggtctcccattccggttatggtgggtacaagtgcggtcactgcacgacggcagtcggggtcagtgaggcattgtacgccaaggcggtgcttaatgcaaagctaacaaggttcaacacaaagacaaccgatcaagccaaggatggaggcaagaagagctttgaggtatcgagtgcacgggagaaggtcaaggagaccaggaacccaaagccaggggtgaagaaaaagacttgcaaagtcaaggttgatcgagttaagaagacttatgagacaaccgatcaagccaaggatggaggcaagaagagcttcgaggtatcgagtgcacgggagaaggtcaaggagaccaggaacccaaagccaggggtgaagaagaagacttgcaaagtcaaggttgatcgagttaagaagacttatgagtccaacatcgacctcaaacaagccaaattgggtaaaacgatgaaaaaggttaaagaaagtaccattctgagctctgctggaggagaaacagaaaagctaggagaagaacaagaaagat

SEQ ID NO: 39917 - DNA, 811 bp, Zea mays
  Peptide Sequence Number=SeqID_81696
atgggggatatccgttgtctttccgcctcgtttttggaagaatgcaactccgtgggagttggcacctttcagccatcgttcggcttcaaggattttcatcagccagcccgactgtaccccccccgccggcggtcacccaagacggtgaccaccagcccctgggtggggagaagcaagtcgggctgcgatcttggtcgcaccctcagcttcaaggatgttcatcatcctcgctggggtggaggccgggctgagccggagctctatctcccgcgcgggttcgtgggtcagcctctcctacgacattcgagggagagggcgcttactggccctgcgggcgggtcggacttcgacaacgcggggctggtgcttaatgcaaagctaacagggttcaacacaaagacaaccgatcaagccaaggatggaggcaagaagagcttcgaggtatcaagtgcacaggagaaggtcaaggagaccaggaacccaaagccaggggtgaagaagaagacttgcaaagtcaaggttgatcgagttaagaagacttatgagacaaccgatcaagccaaggatggaggcaagaagagcttcgaggtatcgagtgcacgggagaaggtcaaggagaccaggaacccaaagccaggggtgaagaagaagacttgcaaagtcaaggttgatcgagttaagaagacttatgagtccaacatcgacctcaaacaagccaaattgggtaaaacgatgaaaaaggttaaagaaagtaccattctgagctctgctggaggagaaacagaaaagctaggagaagaacaagaaagat

SEQ ID NO: 39918 - DNA, 567 bp, Zea mays
  Peptide Sequence Number=SeqID_81697
atggcaggggatagagaaaagggatattttgaaaggatctttctcaggggttcgaaggctgcgccctgcggggtttggcaaccgcctcagagcactcgggctctgagccatttactgataaggggatcgaaggctggcccctcagaagggttcgacagccgccccagagcacgcagagtcagggatgaccctgggtacgtccgttacatggccgaggctcgggctacgctcccgaggtaccctaggacatttctgagaccagcgggaacgatttgtaatggaatcccaccggagggaggcaccgagccctcagactctatcaaatgggtccgggaaaaccacactattcaccccgttccgactactgtgccaaccaccagggtaaaactaacaacaattcgacacatcttagagtactacgatgcatccaagagttcagagaatgttgacagatctacagatcaacttaccaacaatgaattgtcatcgccaccaaaaaagatgaagcacacccaggttagcaaagccatgccagattctacatgttccaagaatgacgacagttag

SEQ ID NO: 39919 - DNA, 450 bp, Zea mays
  Peptide Sequence Number=SeqID_81698
atggcgaaggcccgcctaacgtcgtggtgcagcgccccgtggagtctgctgcgcacgtggccgcccaaggcccacaggaacgaagaaaacaacattgttcaccccgttccgactactgtgccaaccaccagggtaagactaacaacagtgagtcatggcctctcccgagttcagcctcgggcgcaacagggagctccgcctcgcccgaccccaggcctcggcctcagcctcggcctcgggagaaggtctccgcctcgcccgaccctaggcctcggcctcagcctcggcctcgggagaaggcctccgcctcgcccgacctcagcctcggcctcgggaggagtcacaacctcgcccgacctcggcctcggcctcaggagaagtcaccgcctcgcccgacctcggcctcagaccgactacgctacaggggacacatcattaccctacctctag

SEQ ID NO: 39920 - DNA, 360 bp, Zea mays
  Peptide Sequence Number=SeqID_81699
atggacggaatggctcaccggagtttctccgacccacccgaggctttctcaccatcgttctcccctctctgcccgtggattcatggcctcttccccgccattgagttcgtcgtggcgccctcttcctctctgcctaactccgacgacctcggagccaccctagcttgcgctggcctcaactccggcgacctcaccgccgcagagaggagcagcgccgcctgcagccgtctgtttccccctgacaacgagcaatctgaggttcctgagtgtgttgttggagacctccctgagcaaccacctggaggtgctgttggcaacatggatgacttcgaggagttccaggaatatgacgagttctag

SEQ ID NO: 39921 - DNA, 468 bp, Zea mays
  Peptide Sequence Number=SeqID_81700
atggtgagaaagcctcgggtgggtcggagaaactccggtgagccattccgtccatggggaggggacttaaggcgcgctaaggccttggctaacttcagcagaggcaggggtgacacagggacctactcaggtgaactagaccgggctaaatcggtcggccaccgcgcgagcacggcggaccgccgtggccgagcatcggcgaagggcctccttgtctccccctccattgttgccttgtggcggcgtggccacaaagcaagctcttccttgtgcctcgtcggagttcgagctgggctccgtcgaggtgtggctcgagtcgtcctcgaggaggttgaggacggatgtaggctagcagccgacgacgaccaccataaccgatggtgggaacactttcgcctactgcttaacggtagcgacgagttcgttgagagggcgcttgaggccggcggcacgccttcagaggcatga

SEQ ID NO: 39922 - DNA, 285 bp, Zea mays
  Peptide Sequence Number=SeqID_81701
atgctgaacaaagaaaccacatttgaactagggaacaatttatgtgaggatggcaagaagtacgacaccgagaacacttgtagcagtggaagcacactgttgaaggcggtgttaagttttgctaaggcacgatccatgatggaaaaggaaaggggtaacctgctgaaagcccttggcacacaggttgcagaacctctgagggctatggttatgggagctcctttggaggatgctcaccacctcgcccaaaggtacgacagaatgcgtcaagaagctgaagcgcag

SEQ ID NO: 39923 - DNA, 144 bp, Zea mays
  Peptide Sequence Number=SeqID_81702
atgctgaacaaagaaaccacatttgaagtagggaacaatttatttgaggatggcaagaagtacggcaccaagaacacttgtagcagtggaagcacactgtcgaaggcggtgttaagttttgctaaggcacgatccatgatgtga

SEQ ID NO: 39924 - DNA, 132 bp, Zea mays
  Peptide Sequence Number=SeqID_81703
atgctgaacaaagaaaccacatttgaagtagggaacaatttatttgaggatggcaagaagtatggcaccaagaacacttgtagcagtggaagcacactgtcgaaggcggtgttaagttttgctaaggcatga

SEQ ID NO: 39925 - DNA, 1077 bp, Zea mays
  Peptide Sequence Number=SeqID_81704
atgtccgggggtgcatgttctaaccttggatatgccagagacatgaatggtaatgttccaattagcactacaaattcctctggaccaagcattggagttagctcgttggtgactgacgccaactcgtcactttccggtggtgcccagttacagccaagtactagcatgaatggtgattcattgatgcgtgttcctgcatcaccaatgtcattttcatccaataacatctctggctcttcagtcattgatggttccatcatgcagcaaagtccaccccaagaacagatgcagaaaaggaggtcttcaagtgtaacatcacaacatgtgatcgatgctggtggtgcattgcatgctcagaagaaatcaaggactgatgttagtcagggtgatatcatgcaacatcagctgattcagcatctgatccatggtcagaattctcttcatttccaggggcaacagaacccacagcttcaagcttttatccagcagcataaactagcacaacttcagcaacggcagcagcagcatttgttgcaaccattttctcagatgcaacaaccccaagttggtattcctcggcagccgcaacttaggccgccattggcacagactggaatgcagttaggtggtcctgttaggactcctatcgagaggggtgtttgttctcgcaggatactgcagtatctatttcacaagcgtcatcgcccagaggatacatggcgatgtggcatttgcaatacacatgctgggaaaggatatgaagctacctatgaaatacttcctaggctctgccaaattagatttgaccatggtgttattgatgaatacttatactttgactcacccaacgaatttgggttgcctaatggacaaatggtgctggagcatgcaaaagttgttcaaaaaagtgtttatgaacatctacatgttatacacgagggacatctgagaatcattttcacaccagaactgaagataatatcgtgggaattttgttcaagacgtcatgaggaatacaccactcgtaagactatagcaccacaggtgcatggactcaatataagatcaaaatattaa

SEQ ID NO: 39926 - DNA, 1515 bp, Zea mays
  Peptide Sequence Number=SeqID_81705
atgtccgggggtgcatgttctaaccttggatatgccagagacatgaatggtaatgttccaattagcactacaaattcctctggaccaagcattggagttagctcgttggtgactgacgccaactcgtcactttccggtggtgcccagttacagccaagtactagcatgaatggtgattcattgatgcgtgttcctgcatcaccaatgtcattttcatccaataacatctctggctcttcagtcattgatggttccatcatgcagcaaagtccaccccaagaacagatgcagaaaaggaggtcttcaagtgtaacatcacaacatgtgatcgatgctggtggtgcattgcatgctcagaagaaatcaaggactgatgttagtcagggtgatatcatgcaacatcagctgattcagcatctgatccatggtcagaattctcttcatttccaggggcaacagaacccacagcttcaagcttttatccagcagcataaactagcacaacttcagcaacggcagcagcagcatttgttgcaaccattttctcagatgcaacaaccccaagttggtattcctcggcagccgcaacttaggccgccattggcacagactggaatgcagttaggtggtcctgttaggactcctatcgagaggggtgtttgttctcgcaggatactgcagtatctatttcacaagcgtcatcgcccagaggatacatggcgatgtggcatttgcaatacacatgctgggaaaggatatgaagctacctatgaaatacttcctaggctctgccaaattagatttgaccatggtgttattgatgaatacttatactttgactcacccaacgaatttgggttgcctaatggacaaatggtgctggagcatgcaaaagttgttcaaaaaagtgtttatgaacatctacatgttatacacgagggacatctgagaatcattttcacaccagaactgaagataatatcgtgggaattttgttcaagacgtcatgaggaatacaccactcgtaagactatagcaccacaggttaataatcttctgcaagttgtccagaaataccaagctgttgtcactgaaagtggatcagccgggatatcaaataatgatgcacaaaccatctgcaacatgtttgtcactgcatcacaacaactggcaaaaaatctagagcatcacaccttaaatgaacatgggctctctaaaagatatgtacgctccctgcagatatcggaggtggtgaatcacatgaaggacttgattgagttcagccacaagaacggccttggtcctaaaggtagtaatgtttattgtgatatcctggccctaattgatggtgatatcctggtccaaggcttaatagaattaatagagtactcgtaccaacaaggtgcatcttctttttcggaagcctatctcgaaagaacctctaatttaaacgtgattggcttaaagcaatttaggatggatgacgacgagaagttttctcggttggatgagtga

SEQ ID NO: 39927 - DNA, 1713 bp, Zea mays
  Peptide Sequence Number=SeqID_81706
atggggcggtgcgaattgttgggcgctacgtgccgaagctgggatatacgtggatccaacgaccgcctgaatagggtcttcgagttgaatcgtctgccgtatggtggttatcctggggaagacgttgtcgaccgccgcgggaaaaaaccagcggctatgaccgaagacgacctcgtgccggaggccaccccatccactaagaaaaggaagctaagtactgcagtgggagaactgggggtctccgatagttttgctatggagttgatggggacgtgcgcggcccccgggggaaggatgtcttcgcccgagctccgggagtcttcggcgcggatgctggaggttaccgggggtcgatggcccaagaacgttcctatctcccgcgtggctggcgaagacttctttacgtctcgcatggctcgtgacttgagagtgtttccttacgggcggaatattgctgctgttgtgtcggcagtgatgaacaaggaccgtcaagatgctgcgcagaagcatcgggcggtcgtcaggatggtcgatcccgtgcgcgaggcgaagagggagcgaggaagcgcgaaggctgcagcctctggtagtggcaagctggtgccggctgcgaaaacggctgcgcccgggggcaacaaagcgtcgacaggcgagaaggctgcggccgctggcggaaccaagcctctcccgggcggaccgacgcccgcgaagctgcctccaccggggaagcgtgttgctgacttcggcacaaatatcaatgtagaggattatctcggggggtcgggcgagggacagttggttgttgtcccgccctcgatggcggccacgtcgacatcggcggtggtaaaggcgaagggggccacgcaggacccgtgggccgccttttgtgcgagcggcgagattttgacggccgctgccgctagggacgtggcgggcaccatgtcccagcggttgagggatgtgtctcagcaattgtcgcagcagccgacgcagcagctgaagcaagcggccgacttcgccgaccgtgttgcgtcgggcgtcctgactgcggacgtcgccgccgaagtcgagaatcttcgggcgcagcacgcggatgctgtccgggataagtcggtcgcggagagcaagaaccgcaggctggcggagaaggtggctgccctggaggccgagaagactgacctccgacgccggctggcgaaggagaggagggaggctaaccaggtcgtcgctgaagcgcaggctacacaagcggaggctaaggtggcgctggcgaagggtagcctcaccagccaactcgccgaggagtgggaggcgaggttcaacaccctgcgcagtcgtgtagacaaggccgagacctcggtgcgctcagaagtcgtgcggacgcacgcgcagctcgtggaggcatacctcgatctaggtgcgcggactgcagatttcgaagtgcccgaccgcgaggccagcctccgcttccttgaatggttgcaggaggagctgctagtgctcccgacgattgtgcagggcttcatgtcctacgcctccctcgtcacatgcgagggggccatgaacgcgttgtcacgcgaggggtgcaaacactatgaggtcttcgaccagtcagatgacaactttgggcgggagatttttaaggttgaagaccctgtggtgaaggattccgcgggggcactcttcgatcggatgtggggccctcatggttga

SEQ ID NO: 39928 - DNA, 1728 bp, Zea mays
  Peptide Sequence Number=SeqID_81707
atggggcggtgcgaattgttgggcgctacgtgccgaagctgggatatacgtggatccaacgaccgcctgaatagggtcttcgagttgaatcgtctgccgtatggtggttatcctggggaagacgttgtcgaccgccgcgggaaaaaaccagcggctatgaccgaagacgacctcgtgccggaggccaccccatccactaagaaaaggaagctaagtactgcagtgggagaactgggggtctccgatagttttgctatggagttgatggggacgtgcgcggcccccgggggaaggatgtcttcgcccgagctccgggagtcttcggcgcggatgctggaggttaccgggggtcgatggcccaagaacgttcctatctcccgcgtggctggcgaagacttctttacgtctcgcatggctcgtgacttgagagtgtttccttacgggcggaatattgctgctgttgtgtcggcagtgatgaacaaggaccgtcaagatgctgcgcagaagcatcgggcggtcgtcaggatggtcgatcccgtgcgcgaggcgaagagggagcgaggaagcgcgaaggctgcagcctctggtagtggcaagctggtgccggctgcgaaaacggctgcgcccgggggcaacaaagcgtcgacaggcgagaaggctgcggccgctggcggaaccaagcctctcccgggcggaccgacgcccgcgaagctgcctccaccggggaagcgtgttgctgacttcggcacaaatatcaatgtagaggattatctcggggggtcgggcgagggacagttggttgttgtcccgccctcgatggcggccacgtcgacatcggcggtggtaaaggcgaagggggccacgcaggacccgtgggccgccttttgtgcgagcggcgagattttgacggccgctgccgctagggacgtggcgggcaccatgtcccagcggttgagggatgtgtctcagcaattgtcgcagcagccgacgcagcagctgaagcaagcggccgacttcgccgaccgtgttgcgtcgggcgtcctgactgcggacgtcgccgccgaagtcgagaatcttcgggcgcagcacgcggatgctgtccgggataagtcggtcgcggagagcaagaaccgcaggctggcggagaaggtggctgccctggaggccgagaagactgacctccgacgccggctggcgaaggagaggagggaggctaaccaggtcgtcgctgaagcgcaggctacacaagcggaggctaaggtggcgctggcgaagggtagcctcgccagccaactcgccgaggagtgggaggcgaggttcaacaccctgcgcagtcgtgtagacaaggccgagacctcggtgcgctcagaagtcgtgcggacgcacgcgcagctcgtggaggcatacctcgatctaagtgcggcggactgcagatttcgaagtgcccgaaccggcgaggccagcctccgcttccttgaatggttgcaggaggagctgctagtgctcccgacgattgtgcagggcttcatgtcctacgcctccctcgtcacatgcgagggggccatgaacgcgttgtcacgcgaggggtgcaaacactatgaggtcttcgaccagtcagatgacaactttgggcgggagatttttaaggttgaagaccctgtgggtgaaggattccgcgggggcactcttcgatcggatgtggggccctcatggttgagaggcggttag

SEQ ID NO: 39929 - DNA, 1044 bp, Zea mays
  Peptide Sequence Number=SeqID_81708
atgggggatttgtggaccaacataagggctgatctcgcaaagatgcaagccacgctccagaaggttgagcaagggctgctgcaaatcaaggcagcagtgcaacatgagcagcaccagctggcattgttcgtacggctccggacgtcggcggctgtgggcatacaagctgctgctcgtggcttccttgcacgacggagagtgcgggagatgcgccagcagatgctcgaggcagacttggtgacggttgaattcggcacacgggggcgcgacctcgccctgtcggacggccatcagcagtggcatcgggccgctatctccaagtgtgagcatggtgaccacagggctgaggatcaaagtcatcagaagaagcaaactgaacctggggaccagcaagaagccccagttactagttcagatagccaaccaacagtgggcacaccatcaacagattatgtggcaccctatgcccctcatgacatgagccatgcaatgggtcaatatgcttatccaaatattgatccatactatggaagtctttatgcggcggcttatggtggacatccattgcctctttgcaaaatgctagggtacggcttttctctgttattcctttcccagacccccctcatgtgggagccgccagcacttggttttgcagggatgcatccaacattagtcggaatgcatccggctggcttacctttgcctaccgatgcaattgaagagccagtgtatgtaaatgcaaagcaatacaatgccatattaagacggcgtcaatctcgggctaaagctgaatcagaacggaagcttgtcaagggccgcaagccctatctccatgagtcacggcatcagcatgccttgaaaagggccaggggagctggaggtcggtttctcaattcgaagtcagatgacaaggaagagaactccgactcaagtcaaaaagagattcagaacggagttgcgccccaaaagggtggccaaccgtcaacccctccgtctcccaacggtgcgtcgtcagcttatcaggcgcctagtcgtgaatga

SEQ ID NO: 39930 - DNA, 588 bp, Zea mays
  Peptide Sequence Number=SeqID_81709
atgggggatttgtggaccaacataagggctgatctcgcaaagatgcaagccacgctccagaaggttgagcaagggctgctgcaaatcaaggcagcagtgcaacatgagcagcaccagctggcattgttcgtacggctccggacgtcggcggctgtgggcatacaagctgctgctcgtggcttccttgcacgacggagagtgcgggagatgcgccagcagatgctcgaggcagacttggtgacggttgaattcggcacacgggggcgcgacctcgccctgtcggacggccatcagcagtggcatcgggccgctatctccaagtgtgagcatggtgaccacagggctgaggatcaaagtcatcagaagaagcaaactgaacctggggaccagcaagaagccccagttactagttcagatagccaaccaacagtgggcacaccatcaacagattatgtggcaccctatgcccctcatgacatgagccatgcaatgggtcaatatgcttatccaaatattgatccatactatggaagtctttatgcggcggcttatggtggacatccattggtaatgcattctctccgttag

SEQ ID NO: 39931 - DNA, 252 bp, Zea mays
  Peptide Sequence Number=SeqID_81710
atggcgtccagagcccatgtgctcggctcccttctccaccccctggccggcctcctctgcacagcagccccttctctctgtttcttggcacttctctggttcgagctcgagctggtgagccaccgtcgcccatggccaactccctgctcaggtgatgaatcccgcgctccctgtgccacatctccagccggctttcgtccccttgctctacggccagcagaagccagcggcgcccttcttccccaagagtag

SEQ ID NO: 39932 - DNA, 807 bp, Zea mays
  Peptide Sequence Number=SeqID_81711
atggcggcccacggtgaagtcccagcaccgacgagcaatcgccaaggcgatgagaccccaacagtggaattgatggctgacgaagcactcagggaccgcagcgcagcaccagagtgccccgcggatgcctgcacgcccgcgactattgggttcgccggcggcggatcaccacggcctcacgagcactcggcggccagtcggatatgggagcggctgctctctactcttggggaagaagggcgccgctggcttctgctggccgtagagcaaggggacgaaagccggctggagatgtggcacagggagcgcgggattcatcacctgagcagggagttggccatgggcgacggtggctcaccagctcgagctcgaaccagagaagtgccctgcgccatggctggagcagaagggctcgcgtcgagtcctggcaggtcgagctcggccaaggggaaaaaggggtgcccgcgcccatggaagaagaaggcaccgggagcttggaagggttgcgcaggggagggacgttgtccatgggagggagccgccagcttggaggaatggagctcggcggccatggagtttctgcccctgcgcacgtacaagaaacagagagaaggggctgctgtgcagaggaggccggccagggggtggagaagggagccgagcacatgggctctggacgccatggccgtggctgctggccgagcagggaggaacagggggagggctgggcgtccatggcaggagcgtcggcaaggggaggaagaagactgttggctgaaagaagaagagagagtggcggctaggggg

SEQ ID NO: 39933 - DNA, 1386 bp, Zea mays
  Peptide Sequence Number=SeqID_81712
atgcaggcagcatgcaaccgcgccacggggatgcaccttttcgacttcgatgcgtccagcatggagtcccaggcccacacgtcatataaccgacgcgtcggttactacgtgcgaaaaactgcaccgccacttgcgccagtgccgcgccttctcgactgcggaaccggtgccgagattcgaggcaaccctgcgcatggaccaatagtgccagccaaacacgccggtcacgggtcagttagccgcgggagaaggcgcaacggtcgatatggccagaagtggactgatagtaatggcggtagcaggcgagcggaagcggcggtcaaatcgtcggcaggctcacgtcccctcctggagcagcaggagagccccctcccacgacgtgaagacgacgcgcccgtgttccgttcctcgaacggctcacgcatgcacaacggctgccccgcgaaccactcgtcccgtcgcattaactccgtggaaaggggatactccgaaagggatccttctctgcgaaggaagcgggccccgagccctcctactgatcagaggatcaaaggctggcccctcggaagggctggcccctggaagggttcgacagccgcctcaggccactcaggctccacgctcactactgatcaggggttcataggctggccccccgaagggttcgacagccgcctcagaacacgcagagcgagggatgactctaggtacgtccgatacatggccgaggctcgggctacgctcccgaggaacagtagaccaaggcagattcacgcctcgcccgagggcatcctcaagagcattcaatgcaaggatcgcctgacaccttatcctgacgcgcgctcctcagtcgataaggccgaacagccaagtccagcctcgggcgccataggaagctccgcctcgcccgaccccagggctcggactcaacctcgaccccggaagacggtctccgcctcgcccgaccccagggctcggactcaacctcgtcctcggacgacggtctccgcctcgcccgacctcagggctcggactcaacctcgacctcggatgacgatctccgcctcgcccgaccccagggctcggactcagcctcgacctcagaggagcctccgcctcgctcgaccttgtgctcggaccaaccacgtcgcatgggggtacatcattaccctacccctagctagctcaggctacagggaacaagatcggcgtcccatctggcttgccccggtaaaacaagtaatgatgacaccccgcgtgctccatgacgacggtggtgctcagccccctacggaagcaaggagacgtcagcaaggtcccgacagccccgacagctgtgcttctacagggtttaagcactcctccgacggccacgacatcacatga

SEQ ID NO: 39934 - DNA, 1712 bp, Zea mays
  Peptide Sequence Number=SeqID_81713
gtgaacaaggtgatccttgggcaagcaaggtgtcttctactgaagatacagaacaacagaatgattcttggtcaagcaagatgatttctggtggtgctgaggataccagtggtggctgggacaccaaggtgaaagactcttcctgcaatgatgggggtgaaggactacaaaatgatccatgggcaaacaagattggttctaatgaaggtaaagaacaagaaactgatccttgggccagcaagatgtcttctactgtgtgtgctgatgacaagaaaggtagctggaacactacagcaaagggcattccatctaaggaaaaggctgatgatccatggaatagtaaggggggtaatgatgacagcaagaaaactgacacctggggtgctggctcgtcaggtggggatcaggaactttcttggagcaaacctaatttctctttgggggaccaggaatctacttggaacaacccaaggttcagtgacgatgacaatgcgaataatagaggtggatttggacgtggaaatcgaggcagagggagaggaaggaattttggggatggtggtgggtcatcatggaatggaggcaatagaaacgatgaatcaggtggcggaaggtctggagagccatggaacagaagggactttgatggtggcggaggaagaggcagaggtcgttttgggcgaggtgaccgtaaccagggcaacaacttcgggtcaggagatggtggcagctggggctctggcaggggaaatggtggccgcggtggttacaggaactggaacgataacaatgagcgatccttcggtgaaggtggtggctggtcccagtcccagtcttccgattggaatgccaacaaaggaaatggcgaaggaaatcaagctttctcgaaaagcaagcccagctgggaagcacaaaacacctctggtagagatggtcaggcaggaaagggtgatgcaaacaactcctggagtaagaacagatcatctccatctagcgcttggggcgctcccagtggaggagctggcggccgaggttcttggggaaagagcaacgaggatggctggaactcagcgggaggatcagccaaagagaagcctgcatggggtggtgggtcagaagcgtctaccaagaaagaggacaaaggtggtgaggggaacgggagccaaggaggaggtggtgtcagttcctgggataaaggggcagatgatgcatggaacggcaacacgggtagtgatattgggagtggtggatgccaccacgctgccgccatcgatcccagccaccacgtcgccgccatcgatcccaaccaccacgacgtcgtcgtcgctccggtcaccaggacgtcggatgacgatgagatcggtgcggaagttggcgaggattgtggagaaatagtgcaagcaactcactcatacttgattgctccagaagttggaatggcttttggttcagaggaaaaatcttatgacatgtacaacgactatgctggggccgtacagactgaactcttcaccttcgggtttctcagacgccgctccgctataattcaccggactgtccggtgtgccatcggagcaacggctagtgtcggcgtttcgaccccggggggtccctggaccgacgaccttgttcatgtgatgtcgtggccgtcggaggagcgcttaaaccctgtagaagtacagctgtcggggctgtcggggctgtcggattga

SEQ ID NO: 39935 - DNA, 4809 bp, Zea mays
  Peptide Sequence Number=SeqID_81714
atggcggtgaaggggaagggtaagcaggtggccgccgaatcccctggccctggcgctggcgctggcggtgcctccgggtccggcgggaagcggcggatggcctctagtgacgcgggggcggggccctcgtcgtcatccgctgcgaagcgccgccgccgcgccggggtcctccagttcgtcgacgacgtagctggcgtcgacgacgattatgaggaggacgagctcgagtccgaggatgacaccgatgatgtcatatcatactctttcaccgtaaatgtatttgaaggtttctttactggtggggaacatgcacaaaatctgagtcacaaaagaactgaaaggtcacaccctcttccatttcttgtgaaggaagaggagcttagtggcgatgaacttgaggaattcatcaagaaccgatacagtaatcgtgtgaaatacgctgctgatcggagctattctagagaagacgatgacattttctccatggattgtgcactcaaagagccgactatttggagagttaaatgcatggttgggcgtgagcgccaaatggccttctgcttcatgcaaaaatttgttgaccttcgaaaaattggtaccaaagtgccaattattacagcatttgcacttgatcacataagagggtttgtttttgttgaagcggagaaggcctgtgatgttacagaggcatgcaaagggttttgtagtgtgtacacaagcagaatcacttctgttcctgcagctgaagttcctagcttgttatccagccgtacgaaaccatttgaaatctctcgtggtacatggatccgcatgaagaatggaaactataaaggtgatctggcacagggtggtgcagtttcactaaaaggagctgcagttcctgctccacggttgatcagctcccaagaactagagttcttcaggcctcatattgaaataaagcgcgaccgtcagactggtgaagtttttgaagtacttgatggtttgatgttcaaagatggatttctgtataagaaggttgcacttagttctttgatttattgggggatacaaccgacagaaacagagcttttgaagttctcttctagcccaagcaatagagcttctgctgatgacttggattggctctccggcatgtatggttctaagaaaaggaaccttccagaaaaacgagatatggaatcatcatcttctaaaataagatcctccaaagcatcagaccttaaagcgtcaacttctactgaaaattatgacgagaacgatgaattcaaccttcatgatcttgtactctatgggcgaaaagattttggtgtgattgttgctgttgagaaagatggttttaggatactaaagggtggtcctgaaggatctgcggtgaaagtgagaaagcaggatattaagaaaggctgcgtagataaaatgtttacagctgttgatcatcaaaagaagacaatatccattaacgacactgttaatgttgtggaagggccatttcagggtaagcaaggggtcgttaaacacttgtacttgggaatactgttcatttataatgaaagtgaaagtgagaactgtggatttttctgtgctcaaagcgggtcatgcgaaaagatacgaaagggtctgggaagctctactactgaaagttcggactttacaactcctatgtttcctgaacctgcttatgagcaaaatgggcatcgggacactgaaaggccttacaggagcaccagagaacaacttttctctattgggcagatgctgcgcattagaaagggtcctttgaagggctacctctgtcgagtagttcggatatttcggaatgatgtgactgttaagctagattctctactgaaaattgttacagggataaacttgtctggtgccccagctagtaaatttggaagtcaagatacatccttctttggttcagaagcaggcaaaacttcatgggacaatgggttgccatcgtttggaaagatttacaggaacccttcatttgagattaggaataaatgtagtcacaaccctctttttgtagtcacatttagttctaaattacctgaaagtgactcatggcaacccttttcgagttcaacactatcagttcagaatgcagttgtccacgccaaaccattgcgaggtggagaatcagaagctgatccatggtctaagaaaacttctgccaaagatgattctgatccatggggtaagaaaactgatggtgattctgatcgatggggtaagaaaactgatggtgattctgatccatggggcaaggaagcggtatctgctgctgatggtgattccaatccatggggtaaggaaacagtaccttccgctgctggtgattctgatccatggggtaagaaagtggtgtcttctgctgatggtgattctgattcatggggtaagaaagcaacatcatcagctgttgacactgaaaaggaaggttctggtggtactgcatgggacaaacaagctggagttggtggatctgatgctgctggcagctcctgggacagagcggttgtcaatgagagtgaaaagagtgacaactggggagaggcttgcagggttatggacatgggaactggagctgaagctgacactgacccttggggaagcaaggtcaaagcagtagatatggaaggaccaaataactgggaaaaggctacagtgcctccaaacaataagctggaggatgtcagtcaaggatggggccaacctaagggcaactcaactgaagaccaagcaatagacaacgtttctaaagacgtggacaacaacagggcttgtgacagttctttgcctgtcactgaagatggtacctggggcaagtcaaaagacaacagttgtggtggagcaggtggtgcgggaggttgggatgtttctgttggcaactggaataaatcatctgttgtggctgatgcacaggatgaaggttggggcaaaggaaactggtcatctgctgagtctgaagaaacaaacaatcaaagcggaaattggaacaaaactggagcttcggaccaagctggttacaacaattgggataaaccgaaatcctttggtggtaatggttggaacaagggtgatgatcagaatagcagttggaacaggcctgaaaattttggaggtggacgtggctttgggcgtggacaagggagaggtaggggtcaacaatctggatatttcaatggcagaaatgatcaaggaagctggaagaagtcatggggtagtgacaatgctgaaagaccctcttggaggtctgataatcaggtagacaatgaggctggagagtctggtggatataggggaaggggaagaggaggaagggggcaatatggaggacgaggtaaagacaatggttggagaaatgatgatagaagcaattctgggtttggaagggaaaataacagtggcgatggaccaaaatggggtggtggaggtaattggaacgctacaaatccaccaagtagcagtgtaggcaccaagtcatatggtcaaaatcagcctttcacttggaataattctgaggataacaaaccatctgtaggtgaacaaggtgatccttgggcaagcaaggtgtcttctactgaagatacagaacaacagaatgattcttggtcaagcaagatgatttctggtggtgctgaggataccagtggtggctgggacaccaaggtgaaagactcttcctgcaatgatgggggtgaaggactacaaaatgatccatgggcaaacaagattggttctaatgaaggtaaagaacaagaaactgatccttgggccagcaagatgtcttctactgtgtgtgctgatgacaagaaaggtagctggaacactacagcaaagggcattccatctaaggaaaaggctgatgatccatggaatagtaaggggggtaatgatgacagcaagaaaactgacacctggggtgctggctcgtcaggtggggatcaggaactttcttggagcaaacctaatttctctttgggggaccaggaatctacttggaacaacccaaggttcagtgacgatgacaatgcgaataatagaggtggatttggacgtggaaatcgaggcagagggagaggaaggaattttggggatggtggtgggtcatcatggaatggaggcaatagaaacgatgaatcaggtggcggaaggtctggagagccatggaacagaagggactttgatggtggcggaggaagaggcagaggtcgttttgggcgaggtgaccgtaaccagggcaacaacttcgggtcaggagatggtggcagctggggctctggcaggggaaatggtggccgcggtggttacaggaactggaacgataacaatgagcgatccttcggtgaaggtggtggctggtcccagtcccagtcttccgattggaatgccaacaaaggaaatggcgaaggaaatcaagctttctcgaaaagcaagcccagctgggaagcacaaaacacctctggtagagatggtcaggcaggaaagggtgatgcaaacaactcctggagtaagaacagatcatctccatctagcgcttggggcgctcccagtggaggagctggcggccgaggttcttggggaaagagcaacgaggatggctggaactcagcgggaggatcagccaaagagaagcctgcatggggtggtgggtcagaagcgtctaccaagaaagaggacaaaggtggtgaggggaacgggagccaaggaggaggtggtgtcagttcctgggataaaggggcagatgatgcatggaacggcaacacgggtagtgatattgggagtggtggatggtaa

SEQ ID NO: 39936 - DNA, 969 bp, Zea mays
  Peptide Sequence Number=SeqID_81715
atggcggtgaaggggaagggtaagcaggtggccgccgaatcccctggccctggcgctggcgctggcggtgcctccgggtccggcgggaagcggcggatggcctctagtgacgcgggggcggggccctcgtcgtcatccgctgcgaagcgccgccgccgcgccggggtcctccagttcgtcgacgacgtagctggcgtcgacgacgattatgaggaggacgagctcgagtccgaggatgacaccgatgatgtcatatcatactctttcaccgtaaatgtatttgaaggtttctttactggtggggaacatgcacaaaatctgagtcacaaaagaactgaaaggtcacaccctcttccatttcttgtgaaggaagaggagcttagtggcgatgaacttgaggaattcatcaagaaccgatacagtaatcgtgtgaaatacgctgctgatcggagctattctagagaagacgatgacattttctccatggattgtgcactcaaagagccgactatttggagagttaaatgcatggttgggcgtgagcgccaaatggccttctgcttcatgcaaaaatttgttgaccttcgaaaaattggtaccaaagtgccaattattacagcatttgcacttgatcacataagagggtttgtttttgttgaagcggagaaggcctgtgatgttacagaggcatgcaaagggttttgtagtgtgtacacaagcagaatcacttctgttcctgcagctgaagttcctagcttgttatccagccgtacgaaaccatttgaaatctctcgtggtacatggatccgcatgaagaatggaaactataaaggtgatctggcacaggttgttagcgtggatgatggacggaaaaaagtgatgataaaaattgtacccagagttgacctccatgctatttcaaaaaaatttgtaatgctcgtatactttcgcgttaaaatgacttattga

SEQ ID NO: 39937 - DNA, 1371 bp, Zea mays
  Peptide Sequence Number=SeqID_81716
atggcatccggcggtggcgcgaccaggcttgggttggaaacaggggggaacacacggacagcgcgcaagcacccccacctcctggacctcaattggatcgtgtcgcgctctcctagaagttggaggatcggcgcgtggagttggggagaagcaagcatgaatccatgcgaggatgctctggaaccttacatgagcaagagaatagttgaacttcactggggtaagcaccatcaagattatgtggatggcttgaataagcaggtggctaccagccctctggtggagtattattcaagggaaatcttcgtggtcaagccaaccaaaagttatgacaagatcacagatcggctacagaacaaaattggtgatgaatataagccttttcttctcatcaacccagaggatgagaagccagttgttgtggttatacccaagcagacttggtttatacacttattcttttctgttagaaccttgctcaaggttgaaccttggtaccagatgacgatgaagaggaaaacaagggaaaacatgtacaaacttggaaggataccagtataccacacattctgtggaggattctgcaattattttagcttggaatggatgcacaagtatcttatgaagaagaatgagaagcagcaggcgacgcactatgggcagagccagtcggagccggcgcaggagcagggcaagaagcaggacgcgaggatgagcaagtcgaactcgagtggcgtcatggcggaggcggaggcgcatcagtgcgtgaacacacgcgcggacgacttcatcaacaagttcgggctgcatctacagctgcagcaactaaactcgctgctcaactacaaggaggtgctcaaccgcggcggtggcaagcagcagccgcaacgttccatgaattccaagattatgcatcttaattcaaagaactactttggagaccatcatgacgctagaagtatacatgatggaggatcaagagatacttcttttaggagaacagatcatgggccttctgtatctgttatcagtggtagttctctcagttcagcaaagtggaggtctcctttatctattaacaaagtagccataaacaatgctgcaaatttgcaacggatgaagactggtgattggcgtgttgaggtgtcagttccaaaacagagtatgatactgctggttgataatgacaagaagggatctagtaaagcctgcagcctaaaagatacaaagagaaatgcatatgaaagtgttgatgtagacaataagtttgactatgacattgtagatgataaacgagaatgctcctctgtgtcagaagtagccagcaggagttttgagacagcatgtcactactgctcaggaatgcactga

SEQ ID NO: 39938 - DNA, 1074 bp, Zea mays
  Peptide Sequence Number=SeqID_81717
atgaagactggtgattggcgtgttgaggtgtcagttccaaagcagagtatgataccgctggttaataatgacgagaagggatccaatgataaacaagaatgctcctctgtgtcagaagtagccagcaggagttttgagacaaagcatgtcactactgctcaggaatgcactgaagattgtgattcagcagaagttacagaacaatgtcccaggggtcgagaaagtaagagcataggctcaacaattacagatgttactactcatgacacacatagttgttgtctgaatactatgaatgaattggcccttgttaggaagcaacttcaagagatggagaggaagcaagcaaatttttttgatttgttgcaggaatttatggccagctcagcagagaacatgtcagtgctaaatttgaaggtgcacaacttggagaatgctgcagacaaaactgtatatacaattactcagagcgaaagccggtatcatcttcctggctccaagcattttaagaaccaaagcgtctcttctttgcctaggctttcgacttctacacctagatcatctatggatgttaactacaagccaccaccaatctcagagttgaaacatgagaagtggatgcgtgatctaccatctcggggctcaaacatgtgttgtaaagagggagctgattttcgaaaggatcatgttcgcagtaaagttaggaagcttgggcctgtgagcttagagggtaacttgggaagatgtgatccaagctcagcaagaagtcgaacatcaggggttaaagggacttatccagtttcatttaccagttcctgtgaacaatctggactgcgaaatgcattgtgcacctcaaatcaacctggtgagtttcaagatactgatggcatggaacctgcatacatggaagccctgaactgtggtgattatgatgatctgattgacctaatggatagaactggaccagttctcgtaaagttgtcgtgtgagacgacaaatgagcttttgagggttatagctgaacaatttcttaataagaagttctttgacttggcactgccttggcttcaacag

SEQ ID NO: 39939 - DNA, 2067 bp, Zea mays
  Peptide Sequence Number=SeqID_81718
atgacgtgtgtgcgcgccgaggacgccgtctcgcccgccgccgccgacgacgtggcggctgccctggtttccaggggcggcttgatccagaaggtggctgccggcggcgggcggagaccggcaggctcggcgcgctcgctgcagcgctcagcacatctggccaccggggacggcaacgctccggcgccggcggtggaggccagttgctcctggtccggggatgggataggtaagagcaacggtggtgggaagagagatgatagacacaggatgcggcagtacaggtcgcagctcgaacaggaggtcaagaaattgcagaggcagcttgaagaagaggttgatctgcacgtggcgttggcggatgctgttacacaaaatgttgcgcctatactgaagtcttctatgaagcttccacacaaggcacaggagctactgattaacatcgcctccttggagattaccgtttcaaaccttgaaaagaagctaaatgatctgtactaccagctttgtcacgaaaggaacgaaaggttacttgctgaaaataatcagggatgcttgccatctacatcctccgatgagcaccagtcattgtcaacttgcacgtgtacgtgggaagagcacatatcatcgttgagagatttgaagtttgggggatctgaatcaatgagatcaatgagacaggacttattccccgagcttgaagatgaccaggatatgggagaagatcctgagggtcaacagatagtttctttaaacaggctgctagaaaagcaccgagattcttctttgaatagacttcttgaaaagcatcgagatgaagagcagatgcaagaatctggctccatggaaaatgaaggcaatgaaaatgagcagcctgacacgttatcctttgaacagtctattctaaagataactagcataaaaggagggaatctttggagcaacccaaatgagctctctgaggagatggttcgctgcatgagaaacattttcctacgcttgtctgaatccttgaagatatcgccgaagacatcttctgattgttcatcttcctccgtggagcgtctatcaggctccacgttagcatctttctcagattcatccataatgccctcaatgctacggagtccttcagttgattctaatcacaatgacgagacgatgaaggaagtcaggaactttgatccgtataaagttaatggaaaggaaacccgaagagatatcggaaactatcgttcagcagctgaagtatcttggatgtctgttggaaaggatcaactagaatatgcatctgaagctttaaagaagttcagatttctagtggaacaattgtcaaaggttaatcctagctgtatggatcgcgatcagcggctagccttttggattaacttatacaatgctttgataatgcatgcgtatttggcatacggagtacctcgaaatgacatcaagcttttttctctgatgcaaaaggcttgttacacagttggcggccagtccttcagcgcagcagaaatagagtttgtgattctaaagatgaagactccagttcatcggccccaactttctttgatgttgactctgaataagttcaagattactgaggatcacaagaagtactcaatcgatgaattcgaaccccttcttttgttcggacttagctgtggaatgttctcttctcctgctgtacgcatattctccgctgcaaatgttaggcaggagctccaggaatctctgagagactatattcaggcgactgtcggtacaaatggcaaagggaagctgctgatcccgaagctagtgcagagctacgccaagggagctgtcgaggactctctgctcgcagactggatctgccaccaccttgcacctgatcaagccacggtcatccgggactcttcctcgcagtggaagcagcggctactcggagctcgaagcttcaccgttctcgccttcgactccaagttccggtacctcttcttgccagacagctgtggctcccagagccagaagccagaggcaaagcaatcttacaaacttcctgagccgtgttcagaatcagaatag

SEQ ID NO: 39940 - DNA, 654 bp, Zea mays
  Peptide Sequence Number=SeqID_81719
atgtgcagggcggtgtcgctgtcaagggtgaacgctgcgctaattggacgaatgaaagtcaaccgagagcttaccccggaccaggagcaactggcctccgccgccggcgccggagcgttgccgtccccggtggccagatgtgctgagcgctgcagcgagcgcgccgagccggccgactggcagcctgtggccggcggcacggggcacggggcgcccccacgaagcagcctgtggccggcggcacggggcagctgcaggtccttccgggcggcttcctccctcactcccggcggcggattcgtcgaattggagctactcccggcgtgggcttgggcggattcgtcgaatcgtagcgaggttgatgaaggccgccgcgccggtgaagaagagtcctgccgcgccgtcgttccgtccgccaggcgccgcgccgccgattcgtccgcggatccgtcgcttggagctcctcccggcgtgatctgccaggccgttgaagacacagccgaggacaccacatctgccatgccaaactcgtgggagacggccgacatcgatgctcacatgagccgactcatcctctccgcgtgtcgtgtgtcctccccgctggacctcgccttctccatgaagaagacagtcacctccgttacccgaggatag

SEQ ID NO: 39941 - DNA, 468 bp, Zea mays
  Peptide Sequence Number=SeqID_81720
atggttcagtggtttacccggtccacatgctccggcggggttacgaactcccgcgagcgtgagcgcactgttccggcggggctggtcctcgactcaagcttgggaaggcttcatggcccctcgaggaagctatccgagggctcggatcgagcggaggtgggcgggagtggtttggtcacgatggtcgccctcgggcggctctggcgggtcgcggagaggtcgccggagctgcgggctggctcgggaaggctaggcgtggtgcggagggggcgacagggaaggtggccgtgcatgagggtgggctttatagccacgcgcgagcatgacacgggcgtgggcacgggggcggccgagggcgcgcaggggcgcgcgtgcgggcgtgctctgggcgttcccgagtgcctgcccacgtcgaacacgtggtggtttacttctgccggtgttcaaaggccagtttggtcgccttag

SEQ ID NO: 39942 - DNA, 444 bp, Zea mays
  Peptide Sequence Number=SeqID_81721
atgggcgtgggcacaggggcggccgagggcgcgcgggggtgcgcgtgcgggcgtgctctgggcatgttcccgagtgcctgcccacgtcgaacacgtggtggtttacttctgccagtgttcaacggcttgtttagtcaccttagcgtgcagatctcagcaaaaatcccgtatacggtcttttctctgcaccatatcctatcttttccattcaggggtgacataagcatgatgaccacggggcgacgagcgataaaggtgctgaatcccaacatgagtgggggaaccatccttctgatggcggcgctccgcgtgcctagcacacagttccgcaatctccgcccgagccttcccctactcgtcaagggcgtggtccagcttggtgttgagcacggcgaccaggttgaccatgctgctcaatctgggattgccctcaccaactggtga

SEQ ID NO: 39943 - DNA, 117 bp, Zea mays
  Peptide Sequence Number=SeqID_81722
atggacgtggccgacctgcgcacggcgcgaccgtcgctcatgcggtggacggacagccacaccccgaccaggcagcaggtggcagttcgcctcctccgcaaggctgggttgttttga

SEQ ID NO: 39944 - DNA, 954 bp, Zea mays
  Peptide Sequence Number=SeqID_81723
atgactttcgtggctttcgactatatcgatagcataatcctaaaaacgacaagagagacctcgaacgacaaggccgaccgagccgactcctacgcctccgggatacggataccttactcatcacctttcgcgaaaggtagctcacgctcggataagaatgaactacctacacaccagaagggctgcaagataacaaactccaagcggctcaccggcgaccactgcaccagcagcgacaacgacctctgcctcgggcggctaaacaacagcagcgattgccccagggcaaatgctactgtgaaaaggccctcgcccccgtccccctacggggggcgagaacaagccattaaagccaaagagccggaggttcggccacaggtggcaccgacggtcttgtcggcggaggcaaccacctctgcagtgggaagcctcacctgtggcggccaccacctcagcaccgacaacagcggccacctgcgcaccaacaccgcaccggcgaatggcggccaccctagcgcgcacaaggaggtcctcgctcccgtcctcgctacgggagtgaggacaagaacatccaggaacgcggacacccgcccctgcggcgtacgacatcttgtacgacccccaatgtggccggtggcgcgggaagggccgtggacatggccgacctgcgcacggcgtgaccgtcgcccatgcggtggacggacagccacaccccgaccaggcagcaggtggcagttcgcctcctccgcaaggctggtgaacgcccttctcccccgaatgctggagggagaagcgggtcgccagcctaggcgaaaggcaggaccccaactcggcttgccctcctcccctgcatggatgatgaacatccttgaagctaagggcagggggaggccacagcccggctcactcttctccaccacaaggctgatggtcatcattctgggtgaccactag

SEQ ID NO: 39945 - DNA, 513 bp, Zea mays
  Peptide Sequence Number=SeqID_81724
atgctctcgatgtttcagaacatacaagacagacaagattcccttcagcagcagcttctccaggatcgggctgagagcagggcattcatggctcttatgctacagcattctggtgtctcagttcccccggttcagtctgctccacctcctccgcttcaggctcctgttgtgccagcgattcagacaggaccccctcttccttctgttggtccttcttcctctccgctccggctggtcactctagctttcacgtcaccggttctcagctctgtctaccctcagccgccagtgccaccagcttctgctgttaccactcctgctgtggcagtatctgtgactacttcagttccggcagcttctgcagcgcgacctcagtccgagtcagtaccagctccagcttctaccacagatcctggatccgagactgactctgaccccccgccggcgttcgctctgctgcctcgaccgcgaccggatgcgcccccgccgcctcctcccgcttcagatgtttag

SEQ ID NO: 39946 - DNA, 1176 bp, Zea mays
  Peptide Sequence Number=SeqID_81725
atgaggttttgttttgagcgagaggatgtcactattactgccagccagattcgccagctctttggttttcatgagtcgtcgactcgacttcacagcttatgctacggcacctctgaccctcctcgtcgccctcacgacggtgtggctccgggcacagctcacgtcgcggctctgttccgctcgcccttctcagttgggtcgcgacgctcaccggcagattacactacagcagcaaagttcctatttcagcttatgagacggacacttctgccgcggatgggatacagggaggctaccacacatatccagctctggctccttggtgccctggtctctcactctgagtttgacgttgttgatttccttatttgtgagatcgaggacaccgtattggatggtatgcgtgctcgtcgtcagctgccatatgctcactacttgtgccacatttttgctcagctgatttggcctccacagttccagggcacacttgaggcctcacgccttgtttttggaccctaccgtccagcgcctgaggatcctgtgccagcttctgctccagtgtttgacactcaggccgaggatgctgctcttcatcagttcgaagctcaggatgcagcagttgatgatgatgatgattttgggattccaccttcgcctccgcctcctatgcctccatgctcacatgatcatgaggctgggagttctcgtgctaccctgttgcccctgctgctattgaccctgcgcttgcttcgattctacagactctcactcaatagcaggctcacttggcagccgagcagacccgccaggcagcagcccatcagcagttatccgagaggatgctctcgatgtttcagaccatacaggacagacatgattctcttcagcagcagcttctccaggatcgggctgagagcagggcattcatggctcttatgctacagcattctgccgccagtgccaccagcttctgctgttaccactactgttgtggcagtatctgtgaccacttcagttccgacagcttctgcagcgtggcctcagttcgattcagtaccagctccagcttctacagcagatcctggatccgagactgactctgacccccagccggcgttcgctctgctgcctcgactggatgcgcccccgccgcctcctcccgctttagatgtgtag

SEQ ID NO: 39947 - DNA, 162 bp, Zea mays
  Peptide Sequence Number=SeqID_81726
atggaggcggagaggatgaggttgcggaaaccaaagcagaaggcaagcacaaatggcagggtaaagaaccaccgttggcccctcttccggggatcaggaaaggggatatttcgaaaaaggatccttctcagcgaaggaaatggccccgagccctcctactga

SEQ ID NO: 39948 - DNA, 471 bp, Zea mays
  Peptide Sequence Number=SeqID_81727
atgaggttgcggaaaccgaagcagaaggcaagcacaaatgacagggtaaagaaccaccgttggcccctcttctgggtatataaaggcccgggcaagagcaagcgacacctatggcaggcaaagcgggcgacgtttcacctccgtcatgatgaccgcatcaaaaaagggaccaggaaaggggatatttcgaaaaggatccttctccacgaaggaaacgggcccccgagccctcctactgatcaggggttcgaaggttgcgccctgcggggtccagcagccgccccagagcactcgggctccgcgcccattactgatcaggggttcgaaggctggcccctcggaagggctcaacagccgccccagagcactcaggctccgcgcccattactaatcaggggttcgaaggctggcccctcggaagggttcgatagccgccccagagcatgcagagtgagggatgaccctgggtaa

SEQ ID NO: 39949 - DNA, 1218 bp, Zea mays
  Peptide Sequence Number=SeqID_81728
atggctgaagggcggctctccccgctcgcgtcctcaggcgtcacggacaaagtcttcaccgacgtgctccagggccctccccctacgacacgagggctgggtcccatacgtcatgcaagctggcccggaacggaagaagccgaaccgccgcgcgtggagcgtataaccgcctcgcggttacaagcactcctccatcctcgccgaaaccagcggtcgaaagggcggaccgatatgcaggtggcgtgccaccgcaccacgggggcgcaccccttcgacttcgtcgcatccagcatggaggcccaggcccacacgtcatgtaatcggcacaccggttactacgtgcaagaaactgcaccgccacttgcgccaatgccgcaccttctcgactgcagaaccagtgccgcgactcgaggcaaccctgcgcatggcccaacagtgccaatcgagcacatcgatcacgggggagccctctcccacggcgcgaagacgacgcgcccgtgttccgttcctcaaacggctcgcacaacgaccgcctcgcgaaccacccgtcccgtcgcattaactccgaggcagggcaagcgacacctttggcaggcgaagcggacgacgtttcacctccgccatgatgaccgcgtcaaaaaagcggccccagagcactcgggcttcaggctcattactgatcaggggttcgaaggctggcccctcggaagggttcgacagccgcctcagagcactcgggctccacgcccactactgattaggggttcgaaggctggcccctcggaagggttcgatagccgccccagagcatgcagagcgagggatgactctgggtacgtccgatacatggccgaggctcgggctacgctcccgaggcgcattcaatgcgaggatcgcctgacaccttatcctgacacacgcgcctcagtcggcaaggtcgaacctcaggcgcaacaggaagctccgcctcgcccgaccttgcgcctcggcctcaggaggaggtctccgcctcgcccgaccccagggctcagcctcaacctcagcctcgaaagtggtctccgcctcgcccgaccccagggctcggcctccacctcgacctcgggaggaatcgcgtcctcacccgaccccgccctcggcctcaggaggagtctccgcctcgcccgaccttggactcggaccgaccgcgccacggaggatacatcattaccctacccctag

SEQ ID NO: 39950 - DNA, 405 bp, Zea mays
  Peptide Sequence Number=SeqID_81729
atgggtgagggaatgcagccgggctgcatgatgaaaatccttgaagccgagcgatggctgaagggtgccaacccccgcgtggttgcgctcctccaacagcagcaagacgaaggcaacgcgggcgctccccatccgggggctcggaaggcggctctccccactcgcatcctcaggcgtcacggacaaagtcttcaccgacgtgctccagggtcctccccctacaacacgagggctgggtcccgcacgtcgtgtgatgcggacatcaacaccaacacgagcacatctacaccagcagcaccttctccagcccaggcgccaccccttccacctgggccagtgactcgggcccgtgcaagagaattgaactacatcatgttgttaaagaacgaaggcccggaagaatag

SEQ ID NO: 39951 - DNA, 336 bp, Zea mays
  Peptide Sequence Number=SeqID_81730
atggtggatgataacatgatagctggacgtgccttcatgcacgttataagaacttattatgaagatcagcatcagttgatcacgcatggactgtataggtttatgcgccatcctgagtattccagctttcttatatggacagtaggaacccaaggaacacagaattttttccatgccagaacacgcgtgcgaacaagtaaaatacaatgctcatcggccactcgtgtaatctgctctgaagtaactaaacaggacaatgatcaacaaccacctagtactaaggacaatagccattgtgtacaaaattatggctttcagatggtattgaatgtataa

SEQ ID NO: 39952 - DNA, 480 bp, Zea mays
  Peptide Sequence Number=SeqID_81731
atgaagctttctggtcaaagtcccaaaagaatgagatacctatcaagtttgtgggtttcactcccttcccacctcatcctttccgtgtctacttgcctcgcttcggctaatgctctaaattctgtgtctgcacagatcagcaagcccgaggactgggaattgatagctggacgtgccttcatgcacgttataagaacttattatgaagatcagcatcagttgatcacgcatggactgtataggtttatgcgccatcctgagtattccagctttcttatatggacagtaggaacccaaggaacacagaattttttccatgccagaacacgcgtgcgaacaagtaaaatacaatgctcatcggccactcgtgtaatctgctctgaagtaactaaacaggacaatgatcaacaaccacctagtactaaggacaatagccattgtgtacaaaattatggctttcagatggtattgaatgtataa

SEQ ID NO: 39953 - DNA, 387 bp, Zea mays
  Peptide Sequence Number=SeqID_81732
atgaaggactgccacacgcgcgcgcgcgccgccgccgccgccggccgggccgggccgtggccgtggctcgtggctcgtgagagagtgggagagcaggcctccgaaatcaccgaccgcagagatacacttgcacggatacgactaatggggaggacgacgccggcggcggtggcggcagctgacgacgacggccagaagacgtcgtggccggaggtggtggggtgggtgacgctgaacgcggcgctgcagatcagcagcgacaggcccgacgtgtcgacggacttctacagtgagaccaccacgctgccgaccgactacgacgccaaccgcgtcatcatcgtcgccgacgaccggaacgtcgtcgtcaggactccggtcatcggctag

SEQ ID NO: 39954 - DNA, 336 bp, Zea mays
  Peptide Sequence Number=SeqID_81733
atggtgaagaagtctagaacaccagtggcggatccacagggtatgccagccgtacgaagtcggtgcaggaagatgtacgctgtgcagtccctcgaacggtcgccggtcgccgggaagaagagcagcaggacgcgtcaactcgggaagacgtcgaacgaagcagctggacaaacagatcacgcgagcagtcgcgaagacgctccccaaaaatctgatcgcccgcacacccgtgcaagtgtatctctgcggtcggtgatttcggaggcctgctctcccactctctgtgctcgcagaagatgggacgagaatgtgttgtttgcaattcgcgtgagatga

SEQ ID NO: 39955 - DNA, 414 bp, Zea mays
  Peptide Sequence Number=SeqID_81734
atggggatctccaaccacacgacatatgtagcacttaacccttgcatatgtcaaccattcccacggatcctccactacatgaattggtccgcgcaacccgggggcacattaccctaccatccagcctcttgccaggaggataactgctactcccaccatctcccatgcccagtgcgcggttgtcaattcacgtatggaatagccgggttcaggcttacccatgacgaggtatgtggtcagctaaaaggtcctagatcaataggcctacaatcggtatcaaggaagggtaatcaattttcaaggaaagaaatgcatcaacggtttagcacacaactcctatcacctaatgcatcaaacaaggtgataaagattttaaaacacaaggaggtggcaaatgcactggggcttgcctag

SEQ ID NO: 39956 - DNA, 393 bp, Zea mays
  Peptide Sequence Number=SeqID_81735
gctttggttcctagccgcgcctggtcttgtgccatcttcaccccgccgtggcgcccgtgcccgctcggtcttgtctgggcatcctgcaccaccgtgccgtcgtgcgctgctgtgagctccaccagcacgcgtcgtcctcgctgcgacttcgcacgcatgtccctcatgcatcccctcctcaagctgcagcagcaccagcgtcaagccgctgccatctccgagctccgtgaagaagtgtacatcaaagagaaatttgctacgctggccacatacctcgtcatgggtaagcctgaacccggctattctatatgtgaaatgacaaccgcgcactgggcgtgggagatggtgggagtagcagttatcctcctggcaagaggctggatggtagggtaa

SEQ ID NO: 39957 - DNA, 242 bp, Zea mays
  Peptide Sequence Number=SeqID_81736
atggaagaaaaagcagggggcatgggcgccatggctgggaagaagctcctgcgcgcagccatgaggaagacagaaacatggagctcgcagggaggagcggcgaccggaaggggagctcggctggcgtccagcctggaggaaggagctcgccgcaggggaaggctggcggccatgggagagcaggggcacccgcgtgctccaaggagcttctgctcctgcgcgcacaaagcagagaaggagct

SEQ ID NO: 39958 - DNA, 846 bp, Zea mays
  Peptide Sequence Number=SeqID_81737
atggctgcatctgctgggcgccatggaagaaaaagctgggggcatgggcgccatggctgggaagaagctcctgcgcgcagccgtgaggaagacagaaacatggagctcgcagggaggagcggcgaccggaaggggagctcggctggcgtccagcctggaggaaggagctcgccgcaggggaaggctggcggccatgggagagtaggggcacccgcgtgctccaaggagcttctgctcctgcgcgcacaaagcagagaaggagcttcggagaaggcgaagtgtgataatttaaaatcgctgtcgatacggggttttgaattcggttcggacatgagatatttggccgagtcgatcagcgctttcttctccgcacgaactcgggcgtgggacttcaaccacttgcgcgcggaaattctggagctcgaccgagtctaccacgtcgtggggataagaccttcccctgggttctccacggttcctcatgcgcgactcatgaaccgtgtttccctccctgctaccttctcgcgagagtatcgctccccagaacccccgccgccttcgtgttcctcgccgccaccgcgggcatccacttacagctcgaattggaccccaatcgggacaccgggcgatcgtgcgggtcacggagaaaccgttcgtgggcgcaatcggtcggcggtgactggggtattgctcgccgtcgattgcagtcgccaggcgccgctcttcgtcgaatctggcccatctgattcctcgccattgatcattattgttaatggaaacatggagcgaccacccgggaaaacagtgctaccacaagggtataatgggacgcccttggctgattaa

SEQ ID NO: 39959 - DNA, 609 bp, Zea mays
  Peptide Sequence Number=SeqID_81738
atggcctcagggcggacgctgctgcaaccttgccctcgcctacgccgacgctcgaggggcgaggacaagtacaaagagccggaggcccgaagcgcggatggtggcggtgatcccgtcggcaacggggacttctcgagctgcctccacctcggcaccgacgataggggccgtcagccctccggcagatccccactcagatcctcccggacgagtggggcaccgacctccgcgtggaggcgccgtaccggtgcaaagcgcgcgatatcttgggcggtcctcccgtgtgcacgacgcggcaaccgccttccggcaggagggggcaccgggagccaagctgacgagcccgacgcgctgaggctgacgacgcccgccgtcgaccagccccgcgttgtcgaagtccgacccgcccgcagggccagtgagcgccctctccctcgaacgtcgaaggagaggccgacccacgaacccgcgcgggaggtagagctccggctcagcccggcctccaccccagcgagcatgatgaacatccttgaagctgagggtgggaccaagattgcagcccggcttgcttctccccacccaggggctggtggtcaccgtcttgggtga

SEQ ID NO: 39960 - DNA, 684 bp, Zea mays
  Peptide Sequence Number=SeqID_81739
atggcgcttccacgcggaggtcggtgccccactcatccgggaggatctgagtggggatctgccggagggctgacggcccctgtcgccggtgccgaggtggagcgtgggcgagggcaaggttgcagcggcgtccgctctgaggccatcgctgctgcagttcgaccacccgtagcgggggccgttgtcgctgctgctggagcgggcgacgagtccctcagctcagtcggccttgctgtccgaggcttctcttgcttagttaaaggaacccctcggccgctcttcgatgagctgaggccaggggtagcggtgtcagcacggacagaggcagagttggctcgaaaagaagacttggtcggccggagcctggccgggtcgtccattagcgggaccgacgccggagtcgatctgccgaggcctcgggccgggctaatatcttcgggggacagctggccgaggcctcggggtgaccagctaagccgcctgctcgagccggattcttggaggagacccaggcggcgatggcccgggcgtgatgatgaagtcgtccttcagagtggagatcctcgggccacgtcgccatcggaggctaggtcggacctcgccgaaggtgtagtcgacgccgagggtgctgctgctcccttcagctgtcaagatccgagcctgcaggatcggattatcttgtag

SEQ ID NO: 39961 - DNA, 234 bp, Zea mays
  Peptide Sequence Number=SeqID_81740
atgaccgtgagcacgactgatataccagttttacactctgcagaggttgcacatctttacccacaagacgtgttccctttatcgcctggagttgatcggaccattaaacactaccaaggagtctcccacctcgagcatggctccgccttgcccgaggacgacgccgctctctccgcctcgcctgaggtcgcctcagctcagtccgtctcgcccgagccagtctcaggcagatag

SEQ ID NO: 39962 - DNA, 330 bp, Zea mays
  Peptide Sequence Number=SeqID_81741
atggccgtgagcacgactgatataccagttttacactctgcagaggttgcgcatctttacccacaagtcatgttacccatctgccaaagggtcatgaatcccatacacctctaccgaggcgaggcagggatcatcaagtttagcttctacttctgcatggttgacctgcccccggagcaacaggtcctgctggggtgcttgcttgaggaggagcagtttgtgtctgttgagtttgctgcccggaactgccacaagcaggtatcttcggactcgtatcagaaagggagaagctcaaaagatacgaaggttgacacagcgccgaagctgtga

SEQ ID NO: 39963 - DNA, 1038 bp, Zea mays
  Peptide Sequence Number=SeqID_81742
atgggggacgaagaagatgatcctgactggctccgcgcgtttcaggtgagtgtgggacaatcagaagcaaagatagaggctataatgaatgacttcattcaactggaaccacaatccaatttatttgaagcagagactatggtggaaggtacccttgatggattcacatttgattcagatgaggagggtgacaaactctatgaaccacaggctaatcaaaacgatctgaataataacgaagatgaaggtcaacctaaggcaaagaccaaaaggaaagcagagaaaacaacggggaaggcaccgaagaaggcgaaggttgcaggaaagggccctaaaaagggcacgaggaaaacccaacctgcgaagagaggtcaaggctccgcccactcaagggacacgatctcgcctcacccagcctcgggcaaagacagccgacccaggaggattcacgtctcgcccgagggtcccctcaagcaacgggcgcaccttcaactcgcccgaggcccagctcgggcaggcttcgcggagaagcaaccttggccagatcgccacgccagccgaccggatcgcaggagcattcaacgcaaggatcgcctgacaccttatcctgacgcgcgctcttcagtcgacagagccgaaccaccaagtccggcctcaggcgccataggaagctccgcctcgcccgaccccagggctcggactcaacctcgacctcggacgacggactccgcctcgcccgaccccagggctcgaactcaacctcgactccggaagacgatctccgcctcgcccgaccccagggctcggactcaacctcgactccggaagacggtctccgcctcgcccgaccccagggctagactcaacctcgacctcggacgacgatctccgcctcgcccgaccccagggctcggactcagcctcgacctcggacgacgatctccgcctcgcccgaccccagggctcggactcagcctcgacctcggaggacggtctctgcctcgcccgacctcgggctcggaccgaccacgtcactag

SEQ ID NO: 39964 - DNA, 897 bp, Zea mays
  Peptide Sequence Number=SeqID_81743
atgtctaaggccgaccctagtcatggtcattctcccatgggctacaacaccgctgtgtatgggtatggcaaggatcttgattccaccgaattcccacataatttcaacattctgagcagaaagggcaatcaaacagaaggtgaacttggaagaactgaaattggcattggcccaaggatatatccaactgtctttgccctccctagaattttacatttggccaataatctcacagaaggcttgatattcttcagtggcttgaggagagaggagtatgaaagttatcttccagattcatattgtcaagaaattcctgaagagaacattctttctttctggcgaacgaaaagaggcaagggaaggaatgtttgggggaattattgttccaaacattctgccaaggaggatggtcctttcatccccaacccgaggcatagcatggcctctaaagagatccaccaatctgaaaacatctttccaccaaaaggagcctttttcaatagagccatgagggacccggctcgaagtatagcattgattgaatgtgatggtgactcgatagatttaagtggagatattggtgcggttgggaggatagtagtttcaaatggtcctactgcaaaacaggatttgttgttggacctgaaaggaacaatatacaaaacaactatagttccatccaggacattttgtgttgtgagtgtgggacaatcagaagcaaagatagaggctataatgaatgacttcattcaactggaaccacaatccaatttatttgaagcagagactatggtggaaggtacccttgatggattcacatttgattcagatgaggagggtgacaaactctatgaaccacaggctaatcaaaacgatctgaataataaacgaagatga

SEQ ID NO: 39965 - DNA, 849 bp, Zea mays
  Peptide Sequence Number=SeqID_81744
atggataagaagggaaagagaccctcggagaagactgtgcacgtctccgtgaagcttcccgagcgaggaatcgggctctgcttcaccggagaggccggcccaaggtcaccggacttcaaccgaccgccggcaaccgtggaccgaggtacaccgtgcgcctctcttcgattccttgcacggttagactccttagacctccacgaagctccctatgcccttggattgaactatgccgccgtggataggccggagcacacgccgccgacgagctcgcccgcctgctcacgtggaccgggcgattccggccatccccgacgacgagctgtacctcgacgtgatcgccagaccctccccgagccaaccctacccttcgccggacctccctcgccgccgtttaagaaaaataggaaaagtgacacaaatattgaaccagagggcacccctatttttgttgaggcaatacaaatccactatgttatccttaatgaaaacctaagcctaaagggtaactgtaatcttgctgacggagagtacatcctcgtgctggagcaaggagctgctcaggaggtagccccagatccagcactagagccagcaccagaggacctgcctgccactgctttggaaggcaagccccgtggactttacccctcacgcgacctgagacgaggtctcccattccggttatggtgggtacaagtgcggtcactgcacgacggccagtcggggtcagtgaggcattgttctctggaggagatggttgctgggataacttggccgaccaccctgccaccgggttggactgtcgagtgggaccctgcctcggctgaggaggagcatgaggagtga

SEQ ID NO: 39966 - DNA, 653 bp, Zea mays
  Peptide Sequence Number=SeqID_81745
gccgtatctgccccggcgtctcacagttgagtgacagccctaggtgccaggaagagagcacgcccgcgcgcacgcccgcgccacgcccaagccaagccagtgccctggtccgcgtccgcgactataaaactcccaggagccttggccgtacccctccgcacgcgctcaaacctcaccggagctcagttcgccgccgtttgcccatacgcgacgtgcccgcgggccacccgagcccctgccaccgtagaccggccagcccagccattcccaaccccgtccagccctcggagaagactgtgcacgtctccgtgaagctccccgagcgaggaatcgggctctgcttcaccggagaggccggcccaaggtcaccggacttcaaccgaccgccggcaaccgtggaccgaggtacaccgtgcacctctcttcgattccttgcacggttagactccttagacctccacgaagctccctatgcccttggattgaactatgccgccgtggataggccggagcacacgccgccgacgagctcgcccgcctgctcacgtggaccgggcgattccggccatccccgacgacgagccgtacctcgacgtgatcgccagaccctccccgagccaaccctacccttcgccggacctccctcgccgccg

SEQ ID NO: 39967 - DNA, 534 bp, Zea mays
  Peptide Sequence Number=SeqID_81746
atgagaaggctcgcccacctctcagtccacgaccgcctacgacgcgccttcggaataaagatctctcgaagcaccccggtgggatgggttctcttactgggctggtcgaacgacagcaatgtcttcgagtggcaggtcaccatcatcggaccgcctggacaccctatattatgttttctgacatcatgcataatatttgagcaaacgccagtctatcctgatgggtgggtttgtatctctattcttcatccacccggtgaagatccaaacggttatgagctcgcaaggtactttcaccacttctggtatggttctgtctttaatgtgccagggattattatattgtttttggtttggatttggaatggtttggggtccacaacgatgatgcgtcagagctgttccaaggattggatgatttccattcccccgctgccaattcgactaggctcgccgtctccactctgcccaactggcaccaagcagccaatggaacttgaggaggttcatcgaccgtcgaggcttgatgcctaa

SEQ ID NO: 39968 - DNA, 726 bp, Zea mays
  Peptide Sequence Number=SeqID_81747
atgatgcgtcagagctgttccaaggattggatgatttccattcccccgctgccaattcgactaggctcgccgtctccgctacgcccaacaggcaccaagcagccaatggaacttgaggaggtatgcacagatgcatggacgatgtattcgtttaaaaactctccaaacaaccaatcaaaatcatgcatatcacttataaagataatcagtaaaaggagttcagcaaagggagcaaacctggcccgaatagttgtcattttagtttctgggctggagaagagaaaactagctttggttctggtaccaagtttgagaatgggaacgctaaccctaatcagggttaggagcatagttgttaaggcgaggtgcactatttggactattgggatcaatgctgttagagctcataacaaattggacgatatacgagaacaaggcttcttcgggaggacaatatacaccacattaattccgcttgttgcgtgccatccagatgtgtgtgagccatgtgatgatttctttggccttgttgatgcacttctatcatacaaagcacaacttttgacactacaaccgaagttatattgtaacctcgctgacagagagtacgtcctcattccggagcaaggagttgctcaggaggtagtccaggagccagcaccagagcctgctactgaggatctgcctgccccagctgttgaaggcaagccccggttttatgcataa

SEQ ID NO: 39969 - DNA, 405 bp, Zea mays
  Peptide Sequence Number=SeqID_81748
atggggagtagctctctccgggcagaaagggaatcacggcttatgggtggcaatgaaattgatggttctggttatggctatggtgctggaaagtggtattctttccgtttggaaagggcgccccctgcaccaccactgggcgccccagcttctggggtagctgctggaggagacccagacgacggaggtggcgacgacagctcgagccacgacaccgacttctctgctgaccaggagccggaaggatgggttgctcgaccgatcacttgcgacgctgctcgcgagtgccacttccacgatgcgctcgataccctgctacgtcgggcacttaaccggcgtacctggtccatcgagtatcgttgtgtggtctaccagcatagtcgtggtgtctacccggaccgctag

SEQ ID NO: 39970 - DNA, 288 bp, Zea mays
  Peptide Sequence Number=SeqID_81749
atggagagtcatgatctccgggcagaaagggaatcacggcttgtgggtggcaatgagattgatggttctggttatgactatggtgctggtaagtggtattctttccgtttggaaaggattgtcagcattgcaaccactgctcaggtgaagataaagctgtggaaggagacttccaggagttccaagactacgacgagttctaggcgtgggttagcggcaacccccaatcagctgcctgtgaaggccgcgtttatctacgtttcttttccgcactttgattatttgtaa

SEQ ID NO: 39971 - DNA, 285 bp, Zea mays
  Peptide Sequence Number=SeqID_81750
atggcgcgtcaaccagcaagggaagcaaaggcagtggaggacttcagaggactaacagttgcatacaaagctggaaaatttcagtgtggaaagggccctcagctaatttattttcatcaagtgatcaacatcacagggaaaattaggtacatcacctcttttgatcaaaaggaacatcgcaaatcagttatcagggcacaattacatgtcagggcaaccatcacaaagcttggaaagggccctcagctaatttattttcatcaagtgatcaagtatagtatctag

SEQ ID NO: 39972 - DNA, 240 bp, Zea mays
  Peptide Sequence Number=SeqID_81751
atggcgcgtcaaccagcaagggaagcaaaggcagtggaggacttcagaggactaacagttgcatacaaagctggaaaatttcagtgtggaaagggccctcagctaatttattttcatcaagtgatcaacatcacagggcaaattagatggaggggagcccgcacctcccgcgaagcggcatcacctgatgctgctgcgggaacggtgggacccgtgaaggaaggaggcgagccggagtga

SEQ ID NO: 39973 - DNA, 573 bp, Zea mays
  Peptide Sequence Number=SeqID_81752
atggcgcgtcaaccagcaagggaagcaaaggcagtggaggacttcagaggactaacagttgcatacaaagctggaaaatttcagtgtggaaagggccctcagctaatttattttcatcaagtgatcaacatcacagggcaaattagatggaggggagcccgcacctcccgcgaagcggcatcacctgatgctgctgcgggaacgcgacttgttgagctggaactcggcaactgcgagtctctccatggatccatgggggatcgccgggacgacgacgagtccgactggatccatgggggattgcatcgcgaggcgcgatttgccggcgaggatggtgtcgctgatggaaggggactgcagggagcggggcttcgtgaaggagagtggggcacacgcgaggatggagggggcgccgcgatgcgagattgccgagggggagcgccgcaccggggggagggcgagggcgggcgcttgctgaggagaggagaccgcggcgaggaggggaggcgaggggagatcgcggcagggaggggatctcgccggcctgcgcgggcagggagcggggcttcgtga

SEQ ID NO: 39974 - DNA, 525 bp, Zea mays
  Peptide Sequence Number=SeqID_81753
atgcgggattgtgctgccgcgctggggggagggcgagggcgggcgcttgccgaggagaggagaccgcgacgaggaggggaggcgaggggagatcgcggcagggaggggatctcgccggcctgcgcgggcagggagcggggcttcgtgaaggagagcggggcacacgcgaggatggagggggcgccgcgatgcgaggttgccgagggggagcaccgtgatgcgggattgcgtcgccgcgccgggggggagggcgagggcgagggcgagggcgggcgcttgccgaggagaggagtccgcgacgaggaggggaggcgaggggagatcgtggcggggatctcgtcgacctgcgtgggattaagggcgggggctgcgggcgcagggaggggacgcgcgggcggaggaatcgggatggtggcgagggctgcgggcacgaggacggaatcacgggcagatgaatcgggatggaggaggggaatcgcgcgatggcagaaccaggcgttgtggacgcctacactgaagacataa

SEQ ID NO: 39975 - DNA, 726 bp, Zea mays
  Peptide Sequence Number=SeqID_81754
atgtggagacttggagacgtgcgctatccgggcgagtcgtcgggctcgcgcgggggtgaaaaatccgagcgcgctgtagtcccgtcgctggcgacttcgattcatctcggcgagggggcctcgcggcgcggctcgtcggcggagccgggcaagctgggctcaaagcggccgtgctcgagcgggtccggcggcggaccgctctcggtggttggaggcaaggaggtggcccgcgaggagaccgagatccaagggtccggtgcaaccgtcggtgttcgtcgccgtcgaaccgccatcgcgaagaagctgagaagatccacgacgccgacgaaggaaggtgcgcagaaacgcaagcgcatctcgtcgccgccatcttcatcggcttccactagctccggtgctccacatccgaagagaaaaagagtagtggaggagcgttgtgccgacatcgtcgatgtcgtccacggtgccttccaaccagttagcggaccagtcttgaatgaaatgaatcgtgcattagttcagatcgaggacctcgccaacgaccttgatcagcttgcactggaaaaagactgggagatggagcacatgacccctacaccaattgctgaatcatcacaaacagaggatgagcttctgattgattatgattcagagttaaacaatgacgaaatcgtcggctacgacgacggccgtgactactccaccgacgacacctatccctactag

SEQ ID NO: 39976 - DNA, 408 bp, Zea mays
  Peptide Sequence Number=SeqID_81755
atgtggagacttggagacgtgcgctatccgggcgagtcgtcgggctcgcgcgggggtgaaaaatccgagcgcgttgtagtcccgtcgctggcgacttcgattcatctcggcgagggggcctcacggcgcggctcgtcgacggagccgggcaagctgggctcaaagcggccgtgctcgagcgggtccggcggcggaccgctctcggtggttgcaggcaaggaggtggcccgcgaggagaccgagatccaagggtccggtgcaaccgtcggtgttcgtcgccgtcgaaccgccatcgcgaagaagctgagaagatccacggcgccgacgaaggaagagttaaacaatgacgatatcgtcggctacgacgacggccgtgactactccaccgacgacacctatccctactag

SEQ ID NO: 39977 - DNA, 192 bp, Zea mays
  Peptide Sequence Number=SeqID_81756
atgacacagaaaagggatcatgccagacgtcgtgacatttacgtcatgatccatgtaatgtgcaaggctgggaacttgggagtgggcagtgacattggtgaggcagatgaggggagagggggcctccagatgaatgaggaagaatggatgaagcaagagagttactccatgaaatggaagctaaaggactga

SEQ ID NO: 39978 - DNA, 2161 bp, Zea mays
  Peptide Sequence Number=SeqID_81757
atgaccgaactgggcgaaaaggaaagggggcaggaagcgtatcagggtcagggagctgctaatggtcatcagccgcgcgcgttgccaaatcttcaaagggcggacgatgccaataatgcaattgacgtcttcggatcggaagtccaagtatctgaagcccaacccgcctccgcctccacgcgacaagcgacggcggaggcgtgcagtagccacgtccaccacgcgcacctcgcggctctcctcaacgcttccgcgcgcttgcctccgctccctctcagccgcctccacctcccgctctcgctccccacggcctcccgcctcgtcgcgtccttccctccactcccgctcctcgtctgcttcctccgcgcgctccgcctcctcccctcctcgccgccgcgcccctttgactcgctcatcaagtcatatgcctcgctccccaaccgcgcctccctcgctgctgcggcgctcgcgttcgccaggtcagccgggtacgtgccctctgtgctcgcctacaacgccgtcctcctcgcgctctctgacgcgtcgctcacctccgctaggcgcttcttcgactccatgcttagcgacggcgtggcgcccaacgtgtacacctacaacatcctcatccgcgcgctgtgcggccgcggacaccggaaagaggcgctcagcatcttgcgtgacatgcgcggcgcaggttgcggccccaatgtcgtgacttacaacacgctcgtcgcggcgttcttcagagccggggaggtggatggcgcggagaggctggtcggcatgatgcttgacggcggcttgaagcccaacctggtgactttcaattcaatggtgaatgggatgtgcaaggctgggaagatggaggacgcacgcaaggtgttcgatgaaatgatgagggagggtttggcgccggatggggtcagttacaacaccttagtgggtgggtattgcaaggcagggtgctcgcatgaggcattgtctgtgtttgcagagatgacacagaaagggatcatgccagacgtcgtgacatttacgtcattgatccatgtaatgtgcaaggctgggaacttggagtgggcagtgacattggtgaggcagatgagggagaggggcctccagatgaatgaggtcacttttacagccttgatagatgggttctgcaagaagggattcttggatgatgcattgcttgcagtaagggggatgaggcaatgcagaataaagccttcagtggtgtgttataatgcacttattaatggttattgtatggtaggaagaatggatgaagcaagagagttactccatgaaatggaagctaaaggactgaagcctgacgttgtgacatacagtacgattatcagtgcgtactgtaagaattgtgatacacattctgcattcgaattgaaccaacagatgcttgagaagggtgttcttccagatgcaatcacctactcatcactcataagggttctttgtgaggagaaacgactcagtgacgctcatgtgctcttcaaaaatatgattaagcttggcctacaacctgatgaatttacatacacatctcttattgatggccactgcaaggagggtaatgtggagagggctctttctctgcacgataaaatggtaaaggcaggagttcttcctgatgttgtgacttacagtgtgcttattaatgggcttagtaaatcagcacgtgctatggaagcacaacagttgctcttcaaattgtaccatgaagagccaattccagcaaatactaaatatgatgccctgatgcattgttgtagaaaagctgagcttaagagtgtgttagctctcttgaagggattttgcatgaaaggtttaatgaatgaagctgataaagtttatcaatcaatgttagacagaaactggaatcttgacgggtctgtctacagtgtgcttattcatgggcattgtagggcaggaaatgttatgaaggctctcagcttccataagcaaatgctgcagcgtggttttgctccaaattcaacaagcacgatttccttgattaggggtctatttgaaaatgggatggttgtagaagcagatcaggtgattcagcagttgttgaactgttgttcccttgctgatgcagaagcatcaaaggctcttattgacctcaacttaaatgaag

SEQ ID NO: 39979 - DNA, 1032 bp, Zea mays
  Peptide Sequence Number=SeqID_81758
atgcagaaagggttgatcgacccccaacccaatccgaagcgtttaatcattgagtcaagtcaagaatgtttcagtgttgacattccacgctcgactgacatggcagaccccacaaatacgccgtctgatggtgatcctccgcagcatagaaagacgggtgttgcagctgctgctaaaaacattgttatgcctaatgtggatgatgatgatgactttgagccacccaaaaagaagtgcaatatctcaatggatgccccaaataagacgcaaatattgaatgaaaggcaacgtcaaactatagtcagaaaaggattttctagtattcttgacatgacaattgatgcaattggatgtcgaacacttctctgttggctcatgcagaagctagaccccagggacatgactcttcgtattggtccagacaaagaactcaaaatcaccaagcagactgtccatcagatattgggtcttccaaatttgggtggtggaaagccccttaatattaatgaagcgaacgctgcggcaacacttcgggcctcattgaatattagcaaggatgagtttgttatttcaaagctccaagacagattgaggctaggccaggatgatgatctgtctatcagatgtttttttctcattctcttcaaccgactgctattcccaacagctagctggtctatttctttcaatgaggttgtacttatagaagaaatggagcgattccctcaaattgattggtgccatctaatttttagtgacttatgtgaggctgcccagagatggcacaacaggagcattaacaatgtgtcggcgacgatatatggttgttccatcattgttcttctgtattatttggatcatttgcatcatgctgctgctccaaacaacaaaaatggcactccacgcataaagtattttaataagaatattataagggcgttgtcaatggccgataagcggaagcctcgccagggtggtgaaccatttggtgtttgcccttttcgtagcctattagttagcttgtacctttga

SEQ ID NO: 39980 - DNA, 450 bp, Zea mays
  Peptide Sequence Number=SeqID_81759
atggcgagagtagcgtgtaccctctatggcaagaggctggacggtggtttatctatgctctcggttggcgtgaacccggtctgggatgtccaagatatgccacgtacgaggaaaactgcgcgcaagtccactggacctattggcgtgcctcgtcatcagttggcttccagacatgaagggagcagcagcggcaacaacgatccaatcggagacttagaggccaaagtggaacagcttcagacggagctacgtcatcgaaacagggtgtgggcagaagacggtcagcgtataaatgagttggcagctgacgtcatacgcttgctagacgagctttctgaatgggatctggcggttgactgggccatcaactcacattcgattgcttgggaccgcgaagccaaagctcgtgctcgtgtaactaagctaagtgaagcccttgatcttctgcaa

SEQ ID NO: 39981 - DNA, 546 bp, Zea mays
  Peptide Sequence Number=SeqID_81760
atggcgagagtagcgtgtaccctctatggcaagaggctggacggtggtttatctatgctctcggttggcgtgaacccggtctgggatgtccaagatatgccacgtacgaggaaaactgcgcgcaagtccactggacctattggcgtgcctcgtcatcagttggcttccagacatgaagggagcagcagcggcaacaacgatccaatcggagacttagaggccaaagtggaacagcttcagacggagctacgtcatcgaaacagggtgtgggcagaagacggtcagcgtataaatgagttggcagctgacgtcatacgcttgctagacgagctttctgaatgggatctggcggttgactgggccatcaactcacattcgattgcttgggaccgcgaagccaaagctcgtgctcgtgtaactgagcttagtgcagcccttgacaatctgcaagtatactgcaatactttacatgaggaagtgcatgtactgtatgcccgactacacctagacgtgccttccgacactgctatgggagccggaccctaa

SEQ ID NO: 39982 - DNA, 324 bp, Zea mays
  Peptide Sequence Number=SeqID_81761
atggagctccaaagtgctctgtcaggtccactgcttacactccgcgatggtacagtagctgaaatggatgagatcgccagcgcgactgccctcaccgctgacgactccctccgccgcgattcgtgtcaccagcgtcgggattcgtgcctggatggttggatagcgccgcaggaaaacgaagaagaaatcgaagtgaccgaagagaagacaccaccaccttcagaatctcaggccggaaattgtttctacttcgatatctgcgggtccgagcctgactcacctactaacgaaggcaagccccggtgcatttgccaccttccttga

SEQ ID NO: 39983 - DNA, 309 bp, Zea mays
  Peptide Sequence Number=SeqID_81762
atggagctccaaagtgctctgtcaggtccactgcttacactccgcgatggtacagtagctgaaatggatgagatcgccagcgcgactgccctcaccgctgacgactccctccgccgcgattcgtgtcaccagcgtcgggattcgtgcctggatggttggatagcgccgcaggaaaacgaagaagaaatcgaagtgaccgaagagaagacaccaccaccttcagaatctcaggccgggaaaattgtttctacttcgatatctgcgggtcccgagcctgactcacctactaacgaaggcaagccccggtga

SEQ ID NO: 39984 - DNA, 939 bp, Zea mays
  Peptide Sequence Number=SeqID_81763
atggaagagtggaggaaggaggatgcagggcgttgggatagggtgatgaaccggttggatcgtttgattcagaagtcggaagtggtggatgacgtccagcaaacaatcccgattcagtcgaggttagcagcagaggtggcaaccgaatggactgtgttggcacgtcaaatgaaggaaaccaaggctagggatatggagatgtggcctgaaaacagggttggttggatccacggtctggtgaacgaggatgtcagtatggcccctctggtgtttgatgaaatgcctcacaacagcagtgaggcggtggttgtcctgttccctgaagattcagattccttggtgttcagtgaactagtgggtctaaaagtggcatgggatgaggagatgcaatctgaaactcacatgcatgaaggtttattgaagcagcttgctcgaggtggagaagatttagaagaatcggctagcaaggatgcttatgttgaagatgaagctagtaggcctgactcaccgagtgaggcaactgcggtggttaagaatggtggaagcatggaggagcttcttcctgctagggctgacagtgtgctagaggatagcctggagaaggagcagaatgctgaagatcaggctgctgttagtaaagtggaagaggttggcacagcggctgaaaatgctgatgttattggagctggcggtattttctcccaagttttggctttggaatcaaccgctgaatttaatggtgcagggagctctgaggctgtgaagcagatcttgaaggagttggcagaatgcttctctaatggtagtatctctcgagagttcatcagtagcagggttgggcagatcatatttgatgaatctgatgctgatgaagatgaagatgatgagggggaggagaaagtatttggttcatcagacccttatttgcagcatgattaa

SEQ ID NO: 39985 - DNA, 2094 bp, Zea mays
  Peptide Sequence Number=SeqID_81764
atggaagagtggaggaaggaggatgcagggcgttgggatagggtgatgaaccggttggatcgtttgattcagaagtcggaagtggtggatgacgtccagcaaacaatcccgattcagtcgaggttagcagcagaggtggcaaccgaatggactgtgttggcacgtcaaatgaaggaaaccaaggctagggatatggagatgtggcctgaaaacagggttggttggatccacggtctggtgaacgaggatgtcagtatgggcttgctgcaccgggtgttggaggtatggcccctctgcttgctcgaggtggagaagattttagaagaatcggctagcaaggatgcttatgttgaagatgaagctagtaggcctgactcaccgagtgaggcaactgcggtggttaagaatggtggaagcatggaggagcttcttcctgctagggctgacagtgtgctagaggatagcctggagaaggagcagaatgctgaagatcaggctgctgttagtaaagtggaagaggttggcacagcggctgaaaatgctgatgttattggagctggcggtattttctcccaagttttggctttggaatcaaccgctgaatttaatggtgcagggagctctgaggctgtgaagcagatcttgaaggagttggcagaatgcttctctaatggtagtatctctcgagagttcatcagtagcagggttgggcagatcatatttgatgaatctgatgctgatgaagatgaagatgatgagggggaggagaaagtatttggttcatcagacccttatttgcagcatgatttcagccctgctcggtcaaattcttttagccttttaaagctcgtagttacggcttaccctacagaagagaggaccggtgaagagctggagattggacttggacagaagatggcagttgcaatcattggcaagcttcttgcagactcggtgttgtcattagagcaaatagtttggagtagactcgatagtgtatccatctactggcctgaagtgctgttgatgattggtccatatggaggtcttgttcaatacaagtatggtgaacccacaaaacatattcctgagtgtgatggtgtgagaatcctctttaactcaagtatgagagttatacaccgagcctcagtcttgactacatcatttgttggcattggaagcaagattctagcagcatttctatacgatgttcatgatcaatgtgccaggcagaacaaagacagtgttcgatatggaataactggactgacacaatggtggctcaaggcttttagccaaggaaacagtgatatggcagttccgtcacagccaaacgttcaaagaaaatccatgaacaaattaaggggattacagttcagaatggtgtacaataaaggcaaagagaatatagtggatgatacattctcaccagtgggttcacttatggctaggaatggtgtccttgctgtccaactacccagctctgttgtgactgatttttatgctcaggatatgttgccaatagtgatcattcacagtccatatgggactgtgttctcagcctcacagtattcttcactcggttgtttctcttttaatgtgttctatgggtatgaaaccttggtgtgggcagccatagtgctcaaggggaatagagatccaaggatggttgcttggactcaacatatgactgctgccagttccatgtttaaagagccactggtcagggctcagcagctcattgagggtgtcgaggagcgcatattgttcaacaatgacacactcaagcttgccacaccattttttggtgttctcaaccatcttatttctgcaaccatgagtggtgtggtgtgctgccttcctttattgggacagcggaattctgattttcagaagcctgctgttaatctgatttccttttcgcatttccatttttttcaactcatctcacgaggtaccaagcagttctgtaatccaatagagtgtgactccacaaacatgatgtctgctgctaaccctcgccacggttgctacttcacggcgccggttatgatccatgggaaaatgagcactaagtggatgagcaaaagttga

SEQ ID NO: 39986 - DNA, 246 bp, Zea mays
  Peptide Sequence Number=SeqID_81765
atggcctgcgggcaatcagcaggctgcggcggcagggatcgagtcactgcgagcggtgttgtgcctcatggaggcggcggtgtgccggtgtcggcaggagcggagacgacggaccaacgcgttcaacctaggatctcactaaattcccctatgttcgtccagattcttaataatagaggtgttctagttggatctagtaccaagagaaagagaaggggagaagtagtgccttcggggccgaggtag

SEQ ID NO: 39987 - DNA, 1518 bp, Zea mays
  Peptide Sequence Number=SeqID_81766
atggcagttgcaatcattggcaagctacatgcagactcggtgttgtcattagagcaaatagtttggagtagactcgatagtgtatccatctactggcctgaagtgctgttgatgattggtccatatggaggtcttgttcaatacaagtatggtgaacccacaaaacatattcctgagtgtgatggtgtgagaatcctctttaactcaagtatgagagttatacaccgagcctcagtcttgactacatcatttgttggcattggaagcaagattctagcagcatttctatacgatgttcatgatcaatgtgccaggcagaacaaagacagtgttcgatatggaataactggactgacacaatggtggctcaaggcttttagccaaggaaacagtgatatggcagttccgtcacagccaaacgttcaaagaaaatccatgaacaaattaaggggattacagttcagaatggtgtacaataaaggcaaagagaatatagtggatgatacattctcaccagtgggttcacttatggctaggaatggtgtccttgctgtccaactacccagctctgttgtgactgatttttatgctcaggatatgttgccaatagtgatcattcacagtccatatgggactgtgttctcagcctcacagtattcttcactcggttgtttctcttttaatgtgttctatgggtatgaaaccttggtgtgggcagccatagtgctcaaggggaatagagatccaaggatggttgcttggactcaacatatgactgctgccagttccatgtttaaagagccactggtcagggctcagcagctcattgagggtgtcgaggagcgcatattgttcaacaatgacacactcaagcttgccacaccattttttggtgttctcaaccatcttatttctgcaaccatgagtggtgtgattgcaagtgtaccagagcaggcgaataagagtgcaaccttgaaggtccaaccgacggaccagagctacggccgccagacaactggggcccggagcggacgggcggtgcagcacggcgcgggtgctcccgcctacacctttccggtggtgacgccggccgggctacgcgagcacggccgtggtgggcgagaagggagcactcgagatgagctgccgtctgccgagggcagagggcatcgcaccggtggagggatcagggagacaggatcgggcagggcgatggcctgcgggcaatcagcaggctgcggcggcagggatcgagtcactgcgagcggtgttgtgcctcatggaggcggcggtgtgccggtgtcggcaggagcggagacgacggaccaacgcaccgtcatcggtcctctaaatctgcgctgctctggtgtgctaattttaagggaatctgggatggcatatctgtggccgatgcagtgggggcactggaacactgttttaaaggcgtcgcctaggcatcccggcggtggtccaacgcctaggcgagttggacgcctacctttcctaggtgccgcctag

SEQ ID NO: 39988 - DNA, 597 bp, Zea mays
  Peptide Sequence Number=SeqID_81767
atggctcaccggagttactctggcccgaccgaggctttctcaccaccgttctactctctctacccgtggattcatggcctcttccccaccactgagttcgtcgtggtgccctctccctctctgcccaactccggcgaccccggagccaccctagcccgcgccagcctcaactccggcgacctcaccgccgcaaagaggagcgacgccgcccgcagccattcaaccccctcggtctgcgcgctctccccctctgtcgctgacactcctagcccgcctgtcagcgcccgcccgctcgcgcgcgcgccctcagccgtagacctaatctcagccattggttttagatctgacggcccctacaacgagcagtccgaggttcctgagtgtgttgttggagacctccctgagcagcaacttggtgaaggcaatgtatccctggccattcaccttggtagtgaagaatgggtccgtacaacccaggctggaaagggatcacgacttgtgggtaaagtgtacaacctctgcagagtgttaaaaaccggaggtgatgctggcaacatggatgacttcgaggagttccaggaatatgacgagttctag

SEQ ID NO: 39989 - DNA, 474 bp, Zea mays
  Peptide Sequence Number=SeqID_81768
atggctcaccggagttactctggcccgaccgaggctttctcaccaccgttctactctctctacccgtggattcatggcctcttccccaccactgagttcgtcgtggtgccctctccctctctgcccaactccggcgaccccggagccaccctagcccgcgccagcctcaactccggcgacctcaccgccgcaaagaggagcgacgccgcccgcagccattcaaccccctcggtctgcgcgctctccccctctgtcgctgacactcctagcccgcctgtcagcgcccgcccgctcgcgcgcgcgccctcagccgtagacctaatctcagccattggttttagatctgacggcccctacaacgagcagtccgaggttcctgagtgtgttgttggagacctccctgagcagcaacttggaggtgatgctggcaacatggatgacttcgaggagttccaggaatatgacgagttctag

SEQ ID NO: 39990 - DNA, 759 bp, Zea mays
  Peptide Sequence Number=SeqID_81769
atggaaaagctcgaccacaatgacatgacaattcgagctagccctggaaaggagctgaaaattacaaaggatacggtgcacctaattttgggtttaccgaatgctgggggaggaactgcattgggcatcgatgaagttgttgctgccaacaatttaagagctgaacttggtctatcgaaagaagattttggggttacagctcttcaagatcgtttgaggaaaggttctgacgatgatttaagcatcagatgctttttcttgatattgttcaataggttgttgttccctactgccagctggggaataacaaaccatgaggttcttttaaccgaggagatggatcgtttccaccagatggtctggtgccagcttattttcaatgatttatgccaagctgccaagaagtggcataataggagcgttacgaacgtttctacaaccatctatggatgttccatcgttattcttcataagaccaggaccaacacttttgatgttcctcgtcctgacccatctggacagcactcaattcacatcgaactcccgctcatcagggatttgatatcaagcaagctgaatcagcttccatcccgccaccgcatgggtttcatagagaagctgtcacattttgatgcggaggttggtaaggcgtgttcagttattaaacagactcttcagcagattgttgagaaacaattcaatctatctgatgtttttggcgagttaattgatgaggtcctccgtgccgaggcggggtga

SEQ ID NO: 39991 - DNA, 1032 bp, Zea mays
  Peptide Sequence Number=SeqID_81770
aatcgaggaggcggttgtgccgcccctgcgttctcctactcgtcagagaccgagacctcgatcttctccaccgcggcggccgaacgccgagtcccctaccccgtcgcgagaggtgtctccaattcagccgccctccaggccaatccacattccggaacatcagtgatgaagaacgtagaccgaccaccttccaatccaaaatggatcataatccagtctactcaggagtgcttcagcgttgacataccccgtgctccggtggggactgttagacccgaaacaaggcatgctgctgatgaggatgatgactttatgccattatccaagaagcgtaacttggacgacagccctgggaaagttttgaagaaggtagtcactaagcggaggaaagcagtgccccccctccgacagaggctgaacgtcagatgcaacccccaagatgtgttagtaagcatacagatattaaatgacagacagcaacaagcaattgcacgtaggggattttctagtattcttgacatgagactggacacactcggcagcagatcacacttagcttggctgatggaaaagctcgaccacaatgacatgacaattcgagctggccctggaaaggagctgaaaattacaaaggatacggtgcacctaattttgggtttaccgaatgctgggggaggaactgcattgggcatcgatgaagctgttgctgccaacaatttaagagctgaacttggtctatcgaaagaagattttggggttacagctcttcaagattgtttgaggaaaggttctgacgatgatttaagcatcagatgctttttcttgatattgttcaataggttgttgttccctactgccagctggggaataacaaaccatgaggttcttttaaccgaggagatggatcgtttccaccagatggactggtgccagcttattttcaatgatttatgccaagctgccaagaagtggcataataggagcgttacgaacgtttctacaaccatctatggatgttccatcgttattctt

SEQ ID NO: 39992 - DNA, 249 bp, Zea mays
  Peptide Sequence Number=SeqID_81771
gaggataggcctgctggtggacaaggaggcctccgccctggtcctggtgctgctgctacagctccagctccagcaccagcaccgactgcttttgttctccacgatgtccctccctatgctaatggtgatcttcacatgggtcatgccctcaataaaatcctcaaggattttataaatcgctacaagctgcttcagaatcataaagtgtcctttgttcctggttttgggattgccacggccttccaatag

SEQ ID NO: 39993 - DNA, 552 bp, Zea mays
  Peptide Sequence Number=SeqID_81772
atggacgaggagagaaaggatcactcgatctgtcaagaactgcccgtcgccagacggtcgcccctacgccccatgctggccagagacgtgcaggccgtcgggctagccctcgccgtgctgggcacgggcacacggccgcaccctccgccttactggattagaaaggaaacacatatctggaagaaaaaattcacacagccaattcgaaagaaatatgcggccaaggcatgggatgcggcggcgtctgctcgtggccgtagaacgggcggacgcgctgacctcgtcgggcgtgaccttggcagggaggataggcctgctggtggacaaggaggcctccgccctggtcctggtgctgctgctacagctccagctccagcaccagcaccgactgcttttgttctccacgatgtccctccctatgctaatggtgatcttcacatgggtcatgccctcaataaaatcctcaaggattttataaatcgctacaagctgcttcagaatcataaagtgtcctttgttcctggttttgggattgccacggccttccaatag

SEQ ID NO: 39994 - DNA, 240 bp, Zea mays
  Peptide Sequence Number=SeqID_81773
atggacgaggagagaaaggatcactcgatctctcaagaactgcccgtcgccagacggtcgcccctacgccccatgctggccagagacgtgcaggccgtcgggctagccctcgccgtggtgattgggttatggggcaccggagggcgagctgtgggtgctccggcgggcgctccgccgtggtgtttggttgccgccgcgatgccttctacttgggctaggaggacgactggtcttcggtaa

SEQ ID NO: 39995 - DNA, 132 bp, Zea mays
  Peptide Sequence Number=SeqID_81774
atggacgaggagagaaaggatcactcgatctctcaagaactgcccgacgccagacggtcgcccctaccccccatgctggctagagacgtgcaggccgtcgggctagccctcgccgtgactggtcttcggtaa

SEQ ID NO: 39996 - DNA, 816 bp, Zea mays
  Peptide Sequence Number=SeqID_81775
atgactctgggtacgtccgatacatggccgaggctcgggctacgctcccgaggtaccctaggacattttcgagaccagcaggagcgattttgtaacggaatcccatcagagggaggcatcgagccctcggaccatatcaaacgggaccaggtccggcaaatcacctgcagaggctcgggggctgctctcgcaaacccggctccggccaaaccgttgacggcgtcaacaaaccagcccgaaaactcggaacctgaccatgcactcggactacgatcagatcgcatgagggaacaaccagggatacccccaacactcctaaactcggctggtaatcaccatcagcgcaaactgcagaggctgatgggcgcaattcaggaaagcagcgccgctcgcccctctccgactgctgtgccacccgccagggtgaggctgacagcagctgagtccagcctcagacgccacaggaagctccgcctcgcccaaccttgggcctcgacctcaggagaagtctccgcctcgcccgaccccagggctcggcccccgcctcggcctcggaagatggactccgcctcgcccgaccccagggctcggcctcgacctcgcccgaccccagggctcggcctcgacctcgacctcgccaggaatcgcgtcctcgcccgaccccggcctcggcctcaggaggagtctccgcctcgcccgatctcgggctcggaccgaccacaccgcagggggtacatcattaccctacccctagctagctcaggctacggggaacaagaccggcgtcccatccaggctcgccccggtaacaagtaa

SEQ ID NO: 39997 - DNA, 351 bp, Zea mays
  Peptide Sequence Number=SeqID_81776
atgtcgtgcgagttcaacgactactatatcaaggactatggtgtcatcttggcgccagagcaatatgctaacgtgtccggcagagaggagccagagccctatgtacatgccaacgtggctgtcggagaggtgctaaagccctgtgcatgcgatgtcgtggccgtcagaggagcgcttgagccctgtagaagcacagctgtcggggctgtcgggaccttgctgaagtctccttgcttccgtatggggctgagagccgccgtcgtcatgggcgcacgcggggagccatcattacttgtcaccgaggcgagcctggatgggacgccggtcttgttcccccgtagcctgagctag

SEQ ID NO: 39998 - DNA, 258 bp, Zea mays
  Peptide Sequence Number=SeqID_81777
atgggaggagcagcaccggcaaagaagctacggaggtcggccatggctgaggatgaacggatgtggttttcccgggagaagaaaggctccctgctcgtgggaagcagaggagggggcgagcgctggaggccttggcgtggccgagaagggaggtggcgtgggggagaaagaggagagggtgggctgccatttattgagctggagctctggacatggcagactgcaccagcaggtggcaggttctacaacttttattaa

SEQ ID NO: 39999 - DNA, 429 bp, Zea mays
  Peptide Sequence Number=SeqID_81778
atgggagggaggagctcggtctgccctaggagatgggtgccatggatgggagagcgcaaagacatcgcaccatggttgagggcgcgtggagccgggagctcgcaggggtcggcggccatggaagacgtaggggcagggaggagctctactcctagggagaagggcgcctgctctcgctgctggaccagagaggaagaagagacgagatggcgtgaaggagaagggagagggtgggctgccatttatagagccaagctctggacatgtcagactacaccaggaggtggcaagtgctgcagtgacgaccttggacgacgtgttttggcattttccgcttggaatcggatcttggttgctgcacaaaatatcttacttgatctatactctacaaatcatgtacagcacgtgaggttctacaacttttattaa

SEQ ID NO: 40000 - DNA, 144 bp, Zea mays
  Peptide Sequence Number=SeqID_81779
atgtcgtgcgcgtccgacgactactatatcaaggactatgacatcatcttggcgccagaggtgtggcacatgctcttcaatgatgagaccatgcaaattgtggcatatatcgaagtttgtataataccgatggttgcaatatag

SEQ ID NO: 40001 - DNA, 156 bp, Zea mays
  Peptide Sequence Number=SeqID_81780
atggacatcatggtcgatcagttcgagcactgtgcatctgccaaaatattccagggggacctcatggttgtcgccaacgtcgacgactctcaggttgttctggacaccgcatccgacgacgacgccatcacgctgtccagctcatcgtccacctaa

SEQ ID NO: 40002 - DNA, 468 bp, Zea mays
  Peptide Sequence Number=SeqID_81781
atgaatccatgtttcctacttcaaaccccgaacaaactccatgagcaggaggcactcacgttgtcgtcgcttatcgatgacgagaagaagcttggcgactgggggcctcatggttgtcgccaacgtcgacgactctcgggttgttctggacaccgcatccgacgacgacgccatcacgccgtccagctcatcgtccacctgaagcccaacctgccacataagtcgctactgaccggacataaattcttccaagggtactacctcgctgatgagcccgaggtgcacttcgtttggcagcccaaccaagagtcatcggtactcgtcatatcgcgtgcgttcgatgactactatatcgaggattgtggtatcatcttggcgccggaggtgacacagaggaggatcgacaatagtgaccagttcgtcatcctcgtcaccgtcagggtagcttttgtgtcggtctgcctttaa

SEQ ID NO: 40003 - DNA, 813 bp, Zea mays
  Peptide Sequence Number=SeqID_81782
atgaagatgcgggaggacgtggtcctccatataggactttttgttttaaaactatcaggaggagtttttgcctcccttggtactatgaatcaacaagaagctcctacaggagttggagagtttctacgagattttggtgttccagtggtcctgtggcgactacttcaagaagttggatataccgaagcacccaagtaccagtggtcacgcactgttcttaggggacaaccatggtatgaggtagtagtgcgtattccagaacgtgctagaaaaccatcttggccatattggatgttccatgctgaaggaatgactccttgggagggtgctcaggtagctgccttagaggtgctaacaaccatttgttaccagaaatgggaagaaatacaagccacatctatgaggatgttccctgtagttgccttaagtgacccatttgtgtatcatcaccaggcccgattaatggaaagcatttctattgggcaggattctgttgaatcggcatctgctcgagttttgatggccgtgctagagttgcaacttactcaagggcacaatcgtcaaaagtggcagcagttgtacactgggagttatgcagcatttaagatgatggaaatggccaagaatagtgcttgtacccaagcacaagaacgacttgaggaaacaaaggttcaagcggaacaggttattggactagaacatcaggtgacagaacttcagatgcaataccaagctgatcagaatcgcattaaggagcttgagcatcagctaactaatgctcattctaaattaaaaattttgagtcagcaataa

SEQ ID NO: 40004 - DNA, 405 bp, Zea mays
  Peptide Sequence Number=SeqID_81783
atggccaagaatagtgtttgtacccaagcacaagaacgacttgaggaaacaaaggttcaagcggaccaggttattggactagagcatcaggtgacagaacttcagatgcaacaccaagctgatcagaatcgcattaaggtgcttgagcatcagctaactaatgctcattttaaattaaaaattttgagtcagcaacaagaagaaatttgtctgcatgctgttgctgttagagaagaccttaaggaaaccatgagcttcataagccatcaggatcaggcgatcaaagaattaaatcgtgctcatcccatggaatttcaagtagcacaacggcttgtcaaccatctgcagcaagcagtgcataggctcaatgctgcctttgatcctactcctgcatcggtggactaa

SEQ ID NO: 40005 - DNA, 948 bp, Zea mays
  Peptide Sequence Number=SeqID_81784
atgaagacaactagacggaccctagagggaccccacgttccttggtctacggagctgaagcacgccatcctccggaggcccttccggattccccacgggtccgggctgcggacaggctcgcagtttagggcccctgacatgaaagtagggaggtccgacagcctgggggcggctctagagaacgagatcccgttccgtagggtgagttataagtcctgcgggtccgacaacctcgggaccagagttagagaatgggcattagtctcctggggtggtccggagcccgtgcagccgctcagcctggtcccgtaccgtgggcctgcacgctccaccgccctgcgacaaggtggtctggagcctgtgtggccggttagcctggttccgtacccaaaatcctgcacactccaccactccgtggcgggaatgaactacgctgcaccagcaagagtcgcactggaagctggcctcggacagccccaccaacggcggcgaccacctctgcatcgacggattgccaacgacggcgaccacctctgcaccagcaacgacaacgacctccgctccgagcggctcgccagcagtagcgatcacctcaggcggaggcaaccacctctgcagtgggtagcctcaccagcagaggcgaccatgatagccccaccagtggaagcgaccacctctgctccaatgggcagcagctgccccaacacccacgaagaggtcctcgctcctgtcctcactgcgggagtgaggacaagaccatccaagaatgccaccgccgcccccacggcgtacgacgtcttgtacgacctcccagtgcggtcggtggcgcgggagaatgagaagcacagatcctacgagcataaaagtataaagcacagcggatttaaaattccacatcaaatggcgtgctccaagtgctatgaatcgtcggcggtactaagtttataa

SEQ ID NO: 40006 - DNA, 507 bp, Zea mays
  Peptide Sequence Number=SeqID_81785
atgggcagcggctgccccaacacccatgaagaggtcctcgctcctgtcctcactgtgggagtgaggacaagaccatccaagaacgccaccgccgcccccgcggcgtacgacgtcttgtacgacctcccgccacgctccgccccagcggcaggaggcagcgccggaggcggcaccagagccacccaggccgaggagccagacacacggcagctgacggcaccacagacgcccggccctgcgtacccggagttcgcctcctccgcaaggccgacgaacgcccttctcccccaaatgctggaggaagaagcggaccgccagcccacgcagaaggcgaagctccctctcggctcgccctcctccctagtgtggatgatgaacatccttgaagctgagggcagggagaggccgcagcccagctcgcttctctccaccacaaggctggtagtcatccttgtggatgaccatcgaccggaggttgcgaccgggctgcatgatgaaaatccttga

SEQ ID NO: 40007 - DNA, 249 bp, Zea mays
  Peptide Sequence Number=SeqID_81786
atggtgccaccagaagttgcagcaatgagagctggaccatctggaacagcaaatggaggaccttatggggagctggacctttttggggcccctccttccatgaaccttgttgatgaacgcgtgaaatggcaggaaatcgatttcaacaacacgaaggaagaggtcaacctcaaggaccacgagacaccaactatctggagttctccaaaacccatccaccgctctttgtcaaggcataggagcccatag

SEQ ID NO: 40008 - DNA, 402 bp, Zea mays
  Peptide Sequence Number=SeqID_81787
atggcgagagtagcgtgtaccctccgtggcaagaggctggatagtggtgtttctatgctctcggtgatgaaacagtcgacttttgttgtttctgctcgaaggtggtgccaacgaaggaggcaaatcaccaaagctctagctcgagtagcagaacttagcgcatccctcaaaaacctacaagtgtaccacaacaccttacatgaagaggtgcacgtattgtatgatcggctgcacccgatggtgccaccagaagttgcagcaatgagagctggaccatctggaacagcaaatggaggaccttatggggagctggacctttttggggcccctccttccatgaaccttgttgatgaacggtctcctgaagcagacagtgaagcagctaaggatgaacaaaattag

SEQ ID NO: 40009 - DNA, 333 bp, Zea mays
  Peptide Sequence Number=SeqID_81788
atggccatgcttgtgctgacaactttttgtggatttcaccctctggagatgtcaacccaccccatcggcttgttccccgctaagaaagaggatgacccgatgtggaaggatcaggttgatcacggcaaggaccttatgggcctagtggagtctaccaagatcaccctcgataacagggaggaccttgtcatagacttgtctaccgagctagtggagaaggatctccaggttgagcagatggccaaccacatccaagagctcgaggatcaagtggaaggcagggataacaccattgacgttctgaaagaccagctccagaacacccagctgtag

SEQ ID NO: 40010 - DNA, 291 bp, Zea mays
  Peptide Sequence Number=SeqID_81789
atggctaaccacatccacgagctcgaggatcaagtggaagccagggataacaccattgaggttctagaagaccagctccagaacacccagcagcagctcgaggaggcaaaccaacacttggacctgcaccatcaggagatagaggccatggaggcaaacgaggtcaacgaggatgtggacatcgagggaggggaggagccggagcccgcttctagtttggatactgccggctcaactcaccctggaggaccaccttccctcgagtctagcgttgcctcttttgttcgttag

SEQ ID NO: 40011 - DNA, 183 bp, Zea mays
  Peptide Sequence Number=SeqID_81790
atggctgtaggcgctctaggactaatatcaaggcttaatatcggcgcacttgaactggaagactatcttgcacttggggcaatattctcggccacagactcggtttgcaccttgcaggtgttaagccaatatgagacaccattcttgtacaacctcgtgtttggtgaagtctggacttcttag

SEQ ID NO: 40012 - DNA, 1434 bp, Zea mays
  Peptide Sequence Number=SeqID_81791
atggggctgggggctgcgatggcgctggcgctgggcgacccgccagcggactacgcctccatcgcggcggtggggctgttcgtggcgctcatgtgcgtctgcatcgtcgtcgggcacctcctcgaggagaaccgctggatgaacgagtccatcaccgcgctcttcatcgggctgggaactggagcggtcatcctgttcgcgtcgagcgggaagcattcgcgcgtgctggtgttcagcgaggacctcttctttatttacctgctgccgccgatcatattcaatgcagggttccaagtgaagaagaaacagttctttcgaaacttcattactattacactgtttggtgcagttggcaccttgatctcttttactgtaatatcccttggcgctctaggactaatatcaaggcttaatatcggcgcacttgaactgggagactatcttgcacttggggcaatattctcggccacagactcggtttgcaccttgcaggtgttaagccaagatgagacaccattcttgtacagcctcgtgtttggtgaaggtgttgtcaatgacgcaacttctgttgtgttgttcaatgcaatccagaactttgatcctggaaatatcagcagtgccaaattactgaacttcattggcagtttcctttatctgttcggctccagcaccattcttggagtagcttctggacttcttagtgcttataccattaagaagttgtacttcggcaggcattcaaccgatcgtgaagtttccattatgatgctaatggcttatttatcttacatgctagctgaattgctcgatttgagtggcattctcactgtgtttttctgcggtatcgtaaatgtcacactatacttggcacaatgtaacagaaaagttcgagggtcacaaccaacccgttgttatgttccttacatgatattggtcattcaggttattgtttggtgggcgggtctcatgagaggtgctgtgtctattgcgttggcttacaataagttcacaagatcaggccatactcaacaacctagcaatgctatcatgatcacaagcacaatcagcgttgttcttttcagcacaattgtctttgggctgctgacgaagccactgatcaggctcttgatcccgtcaaggcacctatccagggaaccaagcgccctttctgaaccttccagcccgaagtctttctttgagcagctggccgccaacagccctggacacccggatcttgagaatggcataagcctacgacgcccggcgagcctccgttttctcctagtaagcccggcacggtccgtccaccattactggcgcaagttcgatgacagtttcatgcggccggtgtttggtggccgtggcttcgttcccttcgtccctggttcacccactgagagcagcttgccattgcttcctggcaatgagaactga

SEQ ID NO: 40013 - DNA, 1596 bp, Zea mays
  Peptide Sequence Number=SeqID_81792
ctcggcgccaagatctgtggcgccgagctacgaggccgcgtcggcgtcgcgccgacgccagcgttccttgcactgctgctcattgcccccctctccggcctactacttttcctctccaccgggaggaagacgccgtacggcggcgatgaaggccggcggttgccgccgtcgcctcggggccttcctctcctgggacacctgcctcttctgggccccctgccgcaccggaagctgtgggcgatggcgcaggcgcacggccccgtcatgctcctccgcttcggccgcgtgcccacggtggtggcgtcgtcggcggccgcggcgcaggaggtgatgaagacccgcgacctggcgttcgcgagccgccccagggtgcgcatggccgagcgcctcctctacggccgcgacgtggccttcgtcccctacggcgagcactggcgccagggccgccgcgtctgcgtgctccacctcctcagccagcgccgcgtcagctccttccgccacgcccgggagcaggaggtcgccgcgatgctcgcccgcgtccgccgcggcggcgcgcccgccgtcaacctcaccgcccacatcatctcctacaccaacggcatcatctcacgcgcggcgttcggagggatcggctactacgacggtcccgacggcggcggcgagaagctcgcgaagttgttcgccgactttgaggggctcctggggaccgtcaccgtgggggagttcgtgccctggctggcctgggttgacgcgctcatggggctggacgccaaggccgcacgcacgtccgcgcagatggatgccttcctggaacaggtgatcgcggaccaccgccggaggcgccgtggcggccaccgtgaaggtggtgacgatcaccgggacttcgtcgacgtgctgttggacgtgaacgaggacgaggcgcacgccggtggagccacgttcgacgacgtggccatcaaggccattatcctggacatgtttgccgccgccacggacacttcctacacgacgctggtatgggccatggcggagctcatcaaccacccacgcgagatgcgcaaggtccaggacgaggtccgcgcggccgtcggcggcggcggtcgcgtcaccgaggaccacctcgaggagctgcgctacctcaggtgcgtcatcaaggagacgttgcggctgcgcacgccgctgccgctcctcgtaccccgggagacgaccgtggacacggagctgctcggctaccacgtgccagcgggcacccgcgtcatcgtcaacgcgtgggccatcgcgcgggaccccgccacgtgggagcgcgccgacgagttcgtgccggagcggttcgccggcgacgacctcacggcggactacttgatgcccgggcaggacttcaggtccgtgccgttcggcgccgggaggcgaggatgccccggggtggggttctccgtgccgaccatggagctggcgctggcgagcttgttgtaccacttcgactgggagctgccggccggcgtggcggcgaagctggagatggacgaggtgaacgggctgtcggtacggcgcaaggcgcccctgtatttggttgctaaggcatggtctcctcagtaa

SEQ ID NO: 40014 - DNA, 1665 bp, Zea mays
  Peptide Sequence Number=SeqID_81793
atggacgtctcagcgttccttgcactgctgctcattgcccccctctccggcctactacttttcctctccaccgggaggaagacgccgtacggcggcgatgaaggccggcggttgccgccgtcgcctcggggccttcctctcctgggacacctgcctcttctgggccccctgccgcaccggaagctgtgggcgatggcgcaggcgcacggccccgtcatgctcctccgcttcggccgcgtgcccacggtggtggcgtcgtcggcggccgcggcgcaggaggtgatgaagacccgcgacctggcgttcgcgagccgccccagggtgcgcatggccgagcgcctcctctacggccgcgacgtggccttcgtcccctacggcgagcactggcgccagggccgccgcgtctgcgtgctccacctcctcagccagcgccgcgtcagctccttccgccacgcccgggagcaggaggtcgccgcgatgctcgcccgcgtccgccgcggcggcgcgcccgccgtcaacctcaccgcccacatcatctcctacaccaacggcatcatctcacgcgcggcgttcggagggatcggctactacgacggtcccgacggcggcggcgagaagctcgcgaagttgttcgccgactttgaggggctcctggggaccgtcaccgtgggggagttcgtgccctggctggcctgggttgacgcgctcatggggctggacgccaaggccgcacgcacgtccgcgcagatggatgccttcctggaacaggtgatcgcggaccaccgccggaggcgccgtggcggccaccgtgaaggtggtgacgatcaccgggacttcgtcgacgtgctgttggacgtgaacgaggacgaggcgcacgccggtggagccacgttcgacgacgtggccatcaaggccattatcctggacatgtttgccgccgccacggacacttcctacacgacgctggtatgggccatggcggagctcatcaaccacccacgcgagatgcgcaaggtccaggacgaggtccgcgcggccgtcggcggcggcggtcgcgtcaccgaggaccacctcgaggagctgcgctacctcaggtgcgtcatcaaggagacgttgcggctgcgcacgccgctgccgctcctcgtaccccgggagacgaccgtggacacggagctgctcggctaccacgtgccagcgggcacccgcgtcatcgtcaacgcgtgggccatcgcgcgggaccccgccacgtgggagcgcgccgacgagttcgtgccggagcggttcgccggcgacgacctcacggcggactacttgatgcccgggcaggacttcaggtccgtgccgttcggcgccgggaggcgaggatgccccggggtggggttctccgtgccgaccatggagctggcgctggcgagcttgttgtaccacttcgactgggagctgccggccggcgtggcggcgaagctggagatggacgaggtgaacgggctgtcgggctcttccagagacgagattagggagttgaataaaagtgcttatgaacttgctcacactctgatctgtggtgtggctgcagccgtgcgcacgagatctgagaccggagccccagtgcttctggtctctctaaagtctactatacaataccgaacaccaatactttcttaa

SEQ ID NO: 40015 - DNA, 459 bp, Zea mays
  Peptide Sequence Number=SeqID_81794
atgggcaagagcaagaaagggggtaactcttcacatcactcgggtgacaagcgcaagcgcgagccgactcccccctcggaggacttcggtgactcggaatactcggaggagttctcctccgagtccgagggctctccagctcctgcctctcccccagcgtcgtctgatgattcagacgactcccaggggatcgccgcggaggtatggacccacatccgggccgtcgagcatgccgggctcgagggctcggatgagtcgaagtactcctcggacgaggaggactcctccgactcgtccgaggagggcagcggcggcgacggcgctgacggcgacggaggcgacggtgatggtggcagcggcagcggcagcggcaagggcggtgacggcaacggcaagggcgacggcggcggcagcgacagcaagggcagcagcaagggtagcaacaaggccagtggctag

SEQ ID NO: 40016 - DNA, 459 bp, Zea mays
  Peptide Sequence Number=SeqID_81795
atgggcaagagcaagaaaggtggtaactcttcacatcactcgggtgacaagcgcaagcgcgagccgactcccccctcggaggacttcggtgactcggaatactcggaggagttctcctccgagtccgagggctctccagctcctgcctctcccccagcgtcgtctgatgattcagacgactcccaggggatcgccgcggaggtatggacccacatccgggccgtcgagcatgccgggctcgagggctcggatgagtcgaagtactcctcggacgaggaggactcctccgactcgtccgaggagggcagcggcggcgacggcgctgacggcgacggaggcgacggtgatggtggcagcggcagcggcagcggcaagggcggtgacggcaacggcaagggcgacggcggcggcagcgacagcaagggcagcagcaagggtagcaacaaggccagtggctag

SEQ ID NO: 40017 - DNA, 1749 bp, Zea mays
  Peptide Sequence Number=SeqID_81796
aggagcttcgaggaggagaacaagctggagccggagcgcaagacggagctggcgcgcaagctgggcctgcagccccggcaggtggccgtgtggttccagaaccggcgcgcccggtggaagaccaagcagctggagcgcgacttcgaccgcctcaaggcctccttcgacgccctccgcgcggaccacgacgcccttctccaggacaaccaccgcctccgctcacaggtggtgtcgttgaccgagaagctgcgagagaaggaggcgacggagggcgacgccaacggcgccgcggcggcgttgccggcggtgggcgttgtcagggcttccgtggccgatgacgtcgaggaaccggagccggagccggagccggaggcagaggcggcggcgttcgaggagcggcaggtgaagtccgaggacaggctgagcacgggcagcggcgggagcgcggtggtggacgcggcggacgcgctgttgtacaacggcaggatcggcggcgcggccgtcgatagcagcgtcgagtcgtacttccccggcgccgaggtccaggaccagtaccacggctgcgggacgatgggtccagtaacccacggcgctggaggcatccagtcggacgacgacgacggcgccggcagcgacgagggatgcagctactacgccgacgaagaagccgccgccgcgttcctctccgaacacacccaccacgcggacggcgacgacgaggacgccggccagatgaaagacatgtaccgagaggcgttgtggcagaagagaggtcgtcctcgggagttatatccggacgtatctagtaaggatgctcttgttcctcctgaattctccgtgcctaactgtgactgtggcagactggcttgggggcatcagatgtgtttctttttccagtggatcgacggtcctgataaatttgaccctcgatatcttcttttcgttaattggttgagtggaaggactagtcatgagcgttttaagcgttgggtacctcctcccccgaatcctccaccaatgacggatgcggagaaggaggtagcaacagaaagacggatggactcaccgcctcgatgcgattgtggagaccgtgttgtcatcgatgaaaactatgagaagcagttctgttgtccgaacattgattatccatacgggtggcgtaagtgtcgttttagagagtggttgtatggtcctttgtgccattggccagagccagaggtaaaggaaaagagatacaatcagtgggcggaagaagaggtgaaatttgatccagtactctgcaaatgtggtattgaagctaagtatggattagttccttccgagcttggtgttggatatttttgtggacatatggtcgattacgatgaggagacgaggaaatgcagttgggagagttacgacaacaaaggagaggtgatgcgcacaatagagtccaagagaataatgggacagaagatgcgttgtggatctcggctcgtcgattcatacattaacgatcgcatacgcgacatgcgtagggaagcaaaatctgccttttatgatagctcgaagcgtgcagagtataggaggttgaaggcggcagatgagaagagagcacaggatgcaagggaatgggaagcggctcaagccgagaaacaaatgttggataatcttgctgatcgccttaagggaaagattggaagtggcgtaaactatttggccgatgaggcgcatgcaagatatgttcaggataaaatggcgacggtttga

SEQ ID NO: 40018 - DNA, 2409 bp, Zea mays
  Peptide Sequence Number=SeqID_81797
atggagtccggacggctcatcttcaacgcgcccggctccggcgccgggcagatgctcttcctggactgcggcgcaggcggtggtcccggcggcggcttgttgcatcgaggcgggagaccgatgcttggccttgaagaagggcgcggcgtaaaacggcccttctacacctcgcccgacgagctcctcgaggaggagtactacgacgagcagctgccggagaagaagcgccgcctgacgccggagcaggtgcacctgctggagaggagcttcgaggaggagaacaagctggagccggagcgcaagacggagctggcgcgcaagctgggcctgcagccccggcaggtggccgtgtggttccagaaccggcgcgcccggtggaagaccaagcagctggagcgcgacttcgaccgcctcaaggcctccttcgacgccctccgcgcggaccacgacgcccttctccaggacaaccaccgcctccgctcacaggtggtgtcgttgaccgagaagctgcgagagaaggaggcgacggagggcgacgccaacggcgccgcggcggcgttgccggcggtgggcgttgtcagggcttccgtggccgatgacgtcgaggaaccggagccggagccggagccggaggcagaggcggcggcgttcgaggagcggcaggtgaagtccgaggacaggctgagcacgggcagcggcgggagcgcggtggtggacgcggcggacgcgctgttgtacaacggcaggatcggcggcgcggccgtcgatagcagcgtcgagtcgtacttccccggcgccgaggtccaggaccagtaccacggctgcgggacgatgggtccagtaacccacggcgctggaggcatccagtcggacgacgacgacggcgccggcagcgacgagggatgcagctactacgccgacgaagaagccgccgccgcgttcctctccgaacacacccaccacgcggacggcgacgacgaggacgccggccagatgaaagacatgtaccgagaggcgttgtggcagaagagaggtcgtcctcgggagttatatccggacgtatctagtaaggatgctcttgttcctcctgaattctccgtgcctaactgtgactgtggcagactggcttgggggcatcagatgtgtttctttttccagtggatcgacggtcctgataaatttgaccctcgatatcttcttttcgttaattggttgagtggaaggactagtcatgagcgttttaagcgttgggtacctcctcccccgaatcctccaccaatgacggatgcggagaaggaggtagcaacagaaagacggatggactcaccgcctcgatgcgattgtggagaccgtgttgtcatcgatgaaaactatgagaagcagttctgttgtccgaacattgattatccatacgggtggcgtaagtgtcgttttagagagtggttgtatggtcctttgtgccattggccagagccagaggtaaaggaaaagagatacaatcagtgggcggaagaagaggtgaaatttgatccagtactctgcaaatgtggtattgaagctaagtatggattagttccttccgagcttggtgttggatatttttgtggacatatggtcgattacgatgaggagacgaggaaatgcagttgggagagttacgacaacaaaggagaggtgatgcgcacaatagagtccaagagaataatgggacagaagatgcgttgtggatctcggctcgtcgattcatacattaacgatcgcatacgcgacatgcgtagggaagcaaaatctgccttttatgatagctcgaagcgtgcagagtataggaggttgaaggcggcagatgagaagagagcacaggatgcaagggaatgggaagcggctcaagccgagaaacaaatgttggataatcttgctgatcgccttaagggaaagattggaagtggcgtaaactatttggccgatgaggcgcatgcaagatatgttcaggataaaatggcgacggttgagctgatggaggagaaggaggacgacacatctagattgagtgagcttatcactctcgcagaggcaggattacatgaagaagaggaggacgacacatcaaggttgagtgagctcatcgcactagctgaggcaggattacgtgctcaagaggaagaggatgagtttatgtctcaagccgccgaagaggtagaggcggctaattacaagaagaagtctgatgaggctgaggctgaggatgagctattctcccaagctgcagatgaagcagaagccaattattacaagagaactggtgacaagtgtgatgcaggacaatgcagcaagtggaatgaggttgtcgttgaggattgcgcgacggatgactccgaagatgagttactcatagattgtgattcagactga

SEQ ID NO: 40019 - DNA, 858 bp, Zea mays
  Peptide Sequence Number=SeqID_81798
atgcccaaggagtatgactcgttggaccaggcccccgtgtcagagactgggccgttgttttcggcggagatgaagaggcgcactaccgcgggcggcggttcgctcctcgcgtggcggtttgccttcttcgcactcagagacccgcacaccagctatatgacttgcaggcccgggcccccgtgtcagaggctgggttgctttggtgcgcgtcgggcgagattttcggcggcgtcttggggcgcgagcgggagagtcttccatgaaaagggattcaccccgcgtgcagcagttacgctttcgcattctctccactcgttgcgccctttcgccttcgagttctccgcgcccctttgcattcgtgttcctctgcttctcgccaccgtagtcgccatggccttgctagctcatcccgagtgcttccagtacgagggggcactcaacctggtgcacaaccttctcggatgggcgcgtaggcgttcgccggaaggatccgcgctggcacctctcccctcggcaatctcgccgccggggagagctcggcctccagcttcagcacctcacccccagtccatcctcaaggccatcttcgcccacctgtgcgagatgttcgtgggggtggtgctcttccgccagtgtgcagatgaaaggatgttgcgcatcgaacttccgaagatggaaagcgagctgagctgcgactccttccatcgcatgaactccatcgcctcttgtagcggcctcgttagctcctccctgggctttacccgcatctcgtgggtgtgcggtaggcttgcgcccagcggttgcggcggtagcggcgctatgacgacgctgagcaaggatgcccacgtgtggtggtag

SEQ ID NO: 40020 - DNA, 354 bp, Zea mays
  Peptide Sequence Number=SeqID_81799
atggaggatgactcgtgggcccggggcccccatgtcaaaggctgggctgttggtttcggcggaggtgaagagacgcactaccgcagatgttggcgtgctcctcacgcggcggttcgccttctccgcacacggagaccaacgcccaaggagtatgactcgtgggcccgggcccccgcgccaggggctgggccgctgctttcgacggagatgaagagacgcactaccgcagacggtggcgtgctcctcacgcggtggttcgccttctccgcacacggagacagacgcccaaggagtatgactcgtgggcccaggcccccgtgtcagaggctgggtcgctgctttcggcggagatga

SEQ ID NO: 40021 - DNA, 483 bp, Zea mays
  Peptide Sequence Number=SeqID_81800
atgtcgggaaatatggtaaccggtaaacctagtaccagagtgaagccgggagcagactttatccctcacgcgacctgggactgggtctcccatgctagctatggtgggtacaagtgcagccactgcacggcagctgccggggtcagtggagcattgtatgccaaggcggtgaggcctggccgcgaacggggaatcgatggggacgaaggagaaaatgtagttaagatactgatgctagaaattgaaaagctaaaattgattttagatacagctagtgcttttggcaaactaaacccctcagccaaacaactgcatggtctagaggtagaggagtggtttcctcccaccggtaaacgaggaataagctgtggtttgaagaagaagttgtcactcaagctgagaatcctcccaaccgagaataacttctacttcgacatctatggagtagaccccagaatctcctgcaacccaaggcaagccccg

SEQ ID NO: 40022 - DNA, 312 bp, Zea mays
  Peptide Sequence Number=SeqID_81801
atgtcgggaaatatggtaaccggtaaacctagtaccagagtgaagccgggagcagactttatccctcacgcgacctgggactgggtctcccatgctagctatggtgggtacaagtgcagccactgcacggcagctgccggggtcagtggagcattgtatgccaaggcggtgaggcctggccgcgaacggggaatcgatggggacggtacgcttcaggatatggttgatggtgtgacttggcctaccaccctgccaccgggttggatggtccagtgggatgctactccaacgggagaggagcaagaggagtag

SEQ ID NO: 40023 - DNA, 621 bp, Zea mays
  Peptide Sequence Number=SeqID_81802
atgcatgtgatgcgatgccctttgtgcaaacggaacagctgccgaggtgagcatgtggatggtgctggaacggggaatgtgtcctgccctgccactgccgggaacaagcagatcctggacgcacgccactatgagctgttcctggagaaggcgtactgggacgagaccttggagtacgagagcctcggcgagcactttcaggacgaggaggtggccgccgccttatgtgtcgttgtcaacgcgaagcagttcgcttccccatccactacatctgtcctcaacagggcctggaccggaaagcacgacgacccgatgaccaggcactgtgcttccgcaactgccgctgccatccacaccaacctccagagcaacggagtgaaaaccttcttcgcaatcactctgcatggtactgccaattcacatttttcaagtgttgtttggaaggcatctgccaactccaatgctctcttcttgacagcgggtgtacagaacctattgtgtttgaagttaggagaggataatggtgttaatatcggaaacccatggattacttggttcgaggttgctagcgtgccagcactttttgggcttttagtgactccttatttaatttactcctga

SEQ ID NO: 40024 - DNA, 795 bp, Zea mays
  Peptide Sequence Number=SeqID_81803
atgaccaggcactgtgcttccgcaactgccgctgccatccacaccaacctccagagcaacggaggactgctatcgacgttcgaggcgatgcgggacacagccagggacgagcagatcgtgtccgtacgcatctcccaggtaagctttgttttcttccattcagtttgttgtattgtgttgatcaaactagccaagggcagagccaaatttggggattcttcaactgaagccttggctggccggtatgaggtagatgggtatgtgtacagtgcagcggaagaactcaaaataatgattacagggaaatggaacaagtcactgagctgccaaccatgtgaccaagaaggcgaccctcttccaggcatggagctgaaggagataataaggtcaataggagatgtgtatatgaagaaaccagaatttaatagagaacctttgcacaacaagtttcgtcttcaggaaacttttaggagaccacttcttagttctgatctagcaattactgtccaccaaatacaaccaactgataagttcatcatttttgcatctcatggactctgggaacatcttagtaatcaggaagtggttgacatggtccaaagtagcccgtgtaatcatgttctaagttcattcaaggtgctatttatggagttctgtgatagtgtactagacttaggtttgagcaacagggagctgcagcttgcagggcttgattcaagaaggtgcaaagctgctggtctgggcagcgagcgtagtgttggatgctcgtgttgtcgatcaagtggaagaggataa

SEQ ID NO: 40025 - DNA, 195 bp, Zea mays
  Peptide Sequence Number=SeqID_81804
atgggcatgggtatgggtacagtttctcgcccgattggcttggtgggtatggatatttgtaaaagtctcgggtacaattttgggtcaggtacgcttcaggatatggttgatggtgtgacttggcctaccaccctgccaccgggttggacagtcgagtgggatgctgctccagcaggagaggagcaggaggagtag

SEQ ID NO: 40026 - DNA, 237 bp, Zea mays
  Peptide Sequence Number=SeqID_81805
atggcgtgcttgcacgagctgttcctggacaggcttttgctctacaataacatatccactggatacccgatacccggtggatacccgatgggcatggatacgggtacagtttctcgcccgattggcttggtgggtatggatatttgtagaagtctcgggtacaatttcgggtcaggtggttgtgggctccttctgcctggcatgcgttatggcgggtgggcatcagacatttgctag

SEQ ID NO: 40027 - DNA, 246 bp, Zea mays
  Peptide Sequence Number=SeqID_81806
atggcgaacgggccaaaaacggattttcgggcacggccgcgaaaacgggcacgtggatgggcacgggaccctcccatggtccccccgcgtgagacgtggaagttcgggtccacccgagagggaaaacgggtctcctcggccgagccccgcaccccctcgcggcctagccgtggccggtcggcaccctaccgcgcccagctccggctggcgctgttggctgcctggccggccatggttcggccgtga

SEQ ID NO: 40028 - DNA, 258 bp, Zea mays
  Peptide Sequence Number=SeqID_81807
atggcgaacgggccaaaaatggattttcgggcacggccgcgaaaacgggcacgtggatgggcacgggaccctcccgtggtccccccgcgtgagacgtggaagttcgggtccacccgagagggaaaacggaactccctgaagtcctgggagggggtctcctcggccgagccccgcaccccctcgcggcctagccgtggccggtcggcaccctaccgcgcccagctccggctggcgctgttggctgcctggccggccatg

SEQ ID NO: 40029 - DNA, 270 bp, Zea mays
  Peptide Sequence Number=SeqID_81808
atggcgaacgggccaaaaatggattttcgggcacggccgcgaaaacgggcacgtggatgggcacgggaccctcccgtggtccccccgcgtgagacgtggaagtttgggtccacccgagagggaaaacggaactccccgaagtcctgggagggggtctcctcggccgagccccgcaccccctcgcggcctagccgtggccggtcggcaccctaccgcgcccagctccggctggcgctgttggctgcctggccggccatggttcggccgtga

SEQ ID NO: 40030 - DNA, 270 bp, Zea mays
  Peptide Sequence Number=SeqID_81809
atggcgaacgggccgaaaacggattttcggccaagaccgcgaaaacgggcacgtggaagggcacgggaccctcccgtggtccccccgcgtgagacgtggaagttcgggtccacccgcgagggaaaacggaactccccgaagtcctgggagggggtctcctcggccgagccccgcaccccctcgcggcctagccgtggccggtcggcaccctaccgcgcccagctccggctggcgctgttggctgcctggccggccgtggttcggccgtga

SEQ ID NO: 40031 - DNA, 258 bp, Zea mays
  Peptide Sequence Number=SeqID_81810
atggcgaacgggccgaaaacggattttcggccaagaccgcgaaaacgggcacgtggaagggcacgggaccctcccgtggtccccccgcgtgagacgtggaagttcgggtccacccgcgagggaaaacggaactccccgaagtcctgggagggggtctcctcggccgagccccgcaccccctcgcggcctagccgtggccggtcggcaccctaccgcgcccagctccggctggcactgttggctgcctggccggccgtg

SEQ ID NO: 40032 - DNA, 270 bp, Zea mays
  Peptide Sequence Number=SeqID_81811
atggcgaacgggccgaaaacggattttcggccaagaccgcaaaaacgggcacgtggaagggcacgggaccctcccgtggtccccccgcgtgagacgtggaagttcgggtccacccgcgagggaaaacggaactccccgaagtcctgggagggggtctcctcggccgagccccgcaccccctcgcggcctagccgtggccggtcggcaccctaccgcgcccagctccggctggcgctgttggctgcctggccggccgtggttcggccgtga

SEQ ID NO: 40033 - DNA, 318 bp, Zea mays
  Peptide Sequence Number=SeqID_81812
atggcgaacgggccaaaaacggattttcgggcacggccgcgaaaacgggcacgtggatgggcacgggaccctcccgtggtccccccgcgtgagacgtggaagttcgggtccacccgagagggaaaatgggtcacgctagcgaaacccctgattctgagcaaaaacgctgtgtccagccatcttagatgggtttcctggggtcctgggaaaatgccctggttttctgaaggcagaactccccgaagtcctgggagggggtctcctcggccgagccccgtgtcacacccggttttagaaggcaaaccgaatgcgaaccat

SEQ ID NO: 40034 - DNA, 387 bp, Zea mays
  Peptide Sequence Number=SeqID_81813
atggcgaacgggccaaaaacggattttcgggcacggccgcgaaaacgggcacgtggatgggcacgggaccctcccgtggtccccccgcgtgagacgtggaagttcgggtccacccgagagggaaaacgggtcacgctagcgaaacccctgattctgagcaaaaacgctgtgtccagccatcttagatgggtttcgtggggtcctgggaaaatgccctggttttctgaaggcagaactccccgaattcctgggagggggtatgcccctcaggtctcctcggccgagccccgcaccccctcgcggcctagccgtggccggtcggcaccctaccgcgcccagctccggctggcgctgttggctgcctggtcggccatggttcggccgtga

SEQ ID NO: 40035 - DNA, 387 bp, Zea mays
  Peptide Sequence Number=SeqID_81814
atggcgaacgggccaaaaacggattttcaggcacggccgcgaaaacgggcacgtggatgggcacgggaccctcccgtggtccccccgcgtgagacgtggaagttcgggtccacccgagagggaaaacgggtcacgctagcgaaacccctgattctgagcaaaaacgctgtgtccagccatcttagatgggtttcgtggggtcctgggaaaatgccctggttttctgaaggcagaactccccgaagtcctaggagggggtatgcccctcaggtctcctcggccgagccccgcaccccctcgcggcctagccgtggccggtcggcaccctaccgcgcccagctccggctggcgctgttggctgcctggccggccatggttcggccgtga

SEQ ID NO: 40036 - DNA, 387 bp, Zea mays
  Peptide Sequence Number=SeqID_81815
atggcgaacgggccaaaaacggattttcgggcacggccgcgaaaacgggcacgtggatgggcacgggaccctcccgtggtccccccgcgtgagacgtggaagttcgggtccacccgagagggaaaacgggtcacgctagcgaaacccctgattctgagcaaaaacgctgtgtccagccatcttagatgggtttcgtggggtcctgggaaaatgccctggttttctgaaggcagaactccccgaagtcctaggagggggtatgcccctcaggtctcctcggccgagccccgcaccccctcgcggcctagccgtggccggtcggcaccctaccgcgcccagctccggctggcgctgttggctgcctggccggccatggttcggccgtga

SEQ ID NO: 40037 - DNA, 870 bp, Zea mays
  Peptide Sequence Number=SeqID_81816
atgaaccggtacgcgatatgggccgcaggatcggcggccaacggccgcgatttaatgaaacgcgatccgaccgactaccacacgatcaggcatcaacggcgcaggatcaatcacgcgaaggacaagcatatgactactggcaggatcaaccaggtagcacgtcctcgcagacgggccagcgccggcctccgcgcggaggcgtcgtgccgggctggccgtcgttcattcgggcggaccgattcttgggcgcgtgacgccaacgcgtctccggccttcagcgtgagccacatccgagaccaaaagcgccagcgaggtgtcctcggtgccgccggccataggaggacggcggaacgaggcaaacgccgcgggcgctctcgagccgacgagccgcacccggggggtgcgctcgacgaaggcaacgtgtatcgagtatggcttcccgtgggacgggtagcagcacgcaagcacttctcaacgcagcaggcacaggatgcccgcacgaacgatgggacacgggcgccgggagtcggccgcacggcagcgggggtcctccaagcagtcacgggtccaagacaactcatgcgccagcgtagccgctacggtcgagccatccaaagcatccctccgcgctgggcggggcgggtctacttgcgaggacgacgaccgaaggtccaccgagcacgggagaaacggaaaacgcatcgagcaatgggccatcccacagtgcagccactcgtccagggcgtctggccggcgctagccagccatagccggtcgtggctgcgtcacgggccgaaccatggccggccaggcagccaacagcgccagctggagctgggcgcggtagggtgccgaccgggccacggctag

SEQ ID NO: 40038 - DNA, 729 bp, Zea mays
  Peptide Sequence Number=SeqID_81817
atggcttgctttgagcactccaatttcttcaaagtaacggcgccggaggcacgacccggccagttaaggccaggagcgcatcgccggcagaagggtcgagccgacaagcatatgactactggcaggatcaaccaggtagcacgtcctcgcagacgggccagcgccggcctccgcgcggaggcgtcgtgccgggctggccgtcgttcattcgggcggaccgattcttgggcgcgtgacgccaacgcgtctccggccttcagcgtgagccacatccgagaccaaaagcgacagcgaggtgtcctcggtgccgccggccataggaggacggcggaacgaggcaaacgccgcgggcgctctcgagccgacgagccgcacccggggggtgcgctcgacgaaggcaacgtgtatcgagtacggcttccagtgggacgggtagcagcacgcaagcacttctcaacgcagcaggcacaggatgcccgcacgaacgatgggacacgggtgccgggagtcggccgcacggcagcgggggtcctccaagcagtcacgggtccaagacaactcatgcgccagcgtagccgctacggtcgagccatccaaagcatcccttcgcgctgggcgcggcggggcgtctggccggcgctagccagccatagccggtcgtggctgcgtcacggccgaaccatggccggccaggcagccaacagcgccagctggagctgggcgcggtag

SEQ ID NO: 40039 - DNA, 272 bp, Zea mays
  Peptide Sequence Number=SeqID_81818
atgaagaacgtagcaaaatgcgatacctggtgtgaattgcagaatcccgcgaaccatcgagtttttgaacgcaagttgcgcccgaagccttctggcggagggcacgtctgcctgggcgtcacgccaaaagacactcccaacacccccccgcggggcgagggacgtggcgtctggccccccgcgccgcagggcgagcgtcccggcgcgcggccggccattcggccctacggatccatcgagcgaccgagcttgtcctcggaccgcgaccccag

SEQ ID NO: 40040 - DNA, 699 bp, Zea mays
  Peptide Sequence Number=SeqID_81819
atgaagaacgtagcaaaatgcgatacctggtgtgaattgcagaatcccgcgaaccatcgagtttttgaacgcaagttgcgcccgaagccttgtggcggagggcacgtctgcctgggcgtcacgccaaaagacactcccaacacccccccgcggggcgagggacgtggcgtctggccccccgcgccgcagggcgaggtgggccgaagcaggggctgtcggcgaaccgcgccggacgcagcacgtggtgggcgacatcaagttgttctcggtgcagcgtcccggcgcgcggccggccattcggccctaaggacccatcgagcgaccgagcttgccctcggaccgcgaccccagggaagcggatgggggctggcgacgcgcactggccgtatgcggaacggctcctgctggtccgccgatcggctcggggcgtggaccgttgtcgcccgcgccggcggccaaagcccgggggccctaggcgcccccggcagccgtcgtcggcgcggacggtatccgcgcgcctctggctcgcccctcggggcgctgcgccgcaacggcctgcgagctccccatccgacccgtcttgaaacacggaccaaggagtctgacatgcgtgcgagtcgacgggttcagaaacctgagatgcgcaaggaagctgacgagcgggaggccctcacgggccgcaccgctggccgaccctga

SEQ ID NO: 40041 - DNA, 1863 bp, Zea mays
  Peptide Sequence Number=SeqID_81820
atggcccacttggagctcccaattccgtggcacggctcaccggagcagccgtgccgtcctacctatttaaagcgtgctccaactcgaacccttcacagaagatcagggtcggccagcggtgcggcccatgagggcctcccgctcgtcagcttccttgcgcatcccaggccgttgcggcgcagtgccccgaggggcgcgccagaggcgcgcggataccgtccgcgccaacgacggctgccgggggcgcctagggcccccgggctttggccgccggcgcgggcgacaacggtccacgccccgagccgatcggcggaccagcaggagccgttccgcatacggccggtgcgcgtcgccagcccccatccgcttccctcccggcaatttcaagcactctttgactctcttttcaaagtccttttcatctttccctcgcggtacttgttcgctatcggtctctcgcctgtatttagccttggacggagtttaccgcccgatttgggctgcattcccaaacaacccgactcgttgacggcgcctcgtggtgcgacagggtccgggccggacggggctctcaccctcccaggcgtccctttccagagaacttgggcccggtccgtcgctgaggacgactctccagactacaattcgggcggcgaggccgcccgattctcaagctgggctgctcctggttcgctcgccgttactaggggaatcctcggccgaatggccggccgcgcgccgggacgctgcaccgagaacaacttgatgtcgcccaccacgtgctgcgcccggcgcggttcgccagcagcccctgcttcggcccacctcgccctgcggcgcggggggccagacgccacgtccctcgccccgcgggggggtgttgggagtgtcttttggcgtgacgcccaggcagacgtgccctccgccagaaggcttcgggcgcaacttgcgttcaaaaactcgatggttcgcgggattctgcaattcacaccaggtatcgcattttgctacgttcttcatcgatgcgagagccgagatatccgttgccgagagtcgtgtcgattaaggtgtaaccgctgcccggggagcggaaggcgggccgaccgctccgtggggcaggaggtagtactggtgttccttggcgcccgaggcgccatgggttctttttcgcggtcccccttccccgcgggaggttcggggggggggcagcgtgccgggccggagcccggcggcacggacaagcatatgactactggcaggatcaaccaggtagcacgtcctcgcagacgggccagcgccggcctccgcgcggaggcgtcgtgccgggctggccgtcgttcattcgggcggaccgatttttgggcgcgtgacgccaacgcgtctccggccttcagcgtgagccacatccgagaccaaaagcgccagcgaggtgtcctcggtgccgccggccataggaggacggcggaacgaggcaaacactgcgggcgctctcgagccgacgagccgcacccggggggtgcgctcgacgaaggcaacgtgtatcgagtacggcttcccgtgggacgggtagcagcacgcaagcacttctcaacgcagcaggcacaggatgcccgcacgaacgatgggacacgggcgccgggagtcggccgcacggcagcgggggtcctccaagcagtcacgggtccaagacaactcatgcgccagcgtagccgctacggtcgagccatccaaagcttccctccgcgctgggcgcggcggggcgtctggccggcgctagacagccatagccggtcgtggctgcgtcacggccgaaccatggccggccaggcagccaacagcgccagctggagctgggcgcggtag

SEQ ID NO: 40042 - DNA, 222 bp, Zea mays
  Peptide Sequence Number=SeqID_81821
atggcagaagcaagcttccacgtgttcgacgcgagctggcatccgggggcgcgctcagagcacgcccgagccgccgacgacccccgccgccttgtgctcgtggccagtgtagctccgaccacctccgacaccgacccgcacaccgacatgaccgtcgatacctctcggacgtcactgaccaccccgccggagctctactgcgcgggtagccccaccacgtaa

SEQ ID NO: 40043 - DNA, 288 bp, Zea mays
  Peptide Sequence Number=SeqID_81822
atggcagaagcaagcttccacgtgttcgacgcgagctggcatccgggggcgcgctcagagcacgcccggacccgcgtcaccggaatagcccaatcatgctcaccggagttcaagaacccgccggcgcacgtggaccgggagccgccgacgacccccgccgcctgtgctcgtggccagggtagctccgaccacctccgacaccaacccgcacatcggcgtgaccgttgcgacctcccggacgtcactgaccaccccgccggagctctactgccgccgatagctaagtaa

SEQ ID NO: 40044 - DNA, 288 bp, Zea mays
  Peptide Sequence Number=SeqID_81823
atggcagaagcaagcttccacgtgttcgacgcgagctggcatccgggggcgcgctcagagcacgcccggacccgcgtcaccggaatagcccaatcgtgctcaccagagttcaagaacccgccggcgcacgtggaccgggagccgccgacgaaccccgccgcctgtgctcgtggccagggtagctccgaccacctccgacaccaacccgcacatcggcgtgaccgttgcgacctcccggacgtcactgaccaccccgccggagctctactgccgccgatagctaagtaa

SEQ ID NO: 40045 - DNA, 288 bp, Zea mays
  Peptide Sequence Number=SeqID_81824
atggcagaagcaagcttccacgtgttcgacgcgagctggcatccgggggcgcgctcagagcacgcccggacccgcgtcaccggaatagcccagtcgtgctcaccggagttcaagaacccgccggcgcacgtagaccgggagccgccgacgacccccgccgcctgtgctcgtggccagggtagctccgaccacctccgacgccgacccgcacatcggcgtgaccgttgcgacctcccggacgtcactgaccaccccgccggagctctactgccgccgatagctaagtaa

SEQ ID NO: 40046 - DNA, 423 bp, Zea mays
  Peptide Sequence Number=SeqID_81825
atggcagaagcaagcttccacgtgttcgacgcgagctggcatccgggggcgcgctcagagcacgcccggacccgcgtcaccggaatagcccagtcgtgctcaccggagttcaagaacccgccggcgcacgtagaccgggagcctccgacgacccccgccgcctgtgctcgtggccagggtagctccgaccacctccgacgccgacccgcacatcggcgtgaccgttgcgacctcccggacgtcgctgaccaccccgccggagctctactgccgccgggcctcggccgtaccccgtacccccacacgctcacagtcccacccaagcccgagttcatcggacttttccctgagcacgacgcgccactgcctgccaagccacccgagcttcgcccaccatgcccagctcaccccagccactcctag

SEQ ID NO: 40047 - DNA, 288 bp, Zea mays
  Peptide Sequence Number=SeqID_81826
atggcagaagcaagcttccacgtgttcgacgcgagctggcatccgggggcgcgctcagagcacgcccggacccgcatcaccggaatagcccaatcgtgctcaccggagttcaagaacccgccggcgcacgtggaccgggagccgccgacgacccccgccgcctgtgctcgtggccagggtagctccgaccacctccgacaccgacccgcacctcggcgtgaccgttgcgacctcccggacgtcactgaccaccccgccggagctctactgccgccgatagctaagtaa

SEQ ID NO: 40048 - DNA, 288 bp, Zea mays
  Peptide Sequence Number=SeqID_81827
atggcagaagcaagcttccacgtgttcgacgcgagctggcatccgggggcgcgctcagagcacgcccggacccgcatcaccggaatagcccaatcgtgctcaccggagttcaagaacctgccggcgcacgtggaccgggagccgccgacgacccccgccgcctgtgctcgtggccagggtagctccgaccacctccgacaccgacccgcacctcggcgtgaccgttgcgacctcccggacgtcactgaccaccccgccggagctctactgccgccgatagctaagtaa

SEQ ID NO: 40049 - DNA, 453 bp, Zea mays
  Peptide Sequence Number=SeqID_81828
atggcagaagcaagcttccacgtgttcgacgcgagctggcatccgggggcgcgctcagagcacgcccggacccgcatcaccggaatagcccaatcgtgctcaccggagttcaagaacctgccggcgcacgtggaccgggagccgccgacgacccccgccgcctgtgctcgtggccagggtagctccgaccacctccgacaccgacccgcacctcggcgtgaccgttgcgacctcccggacgtcactgaccaccccgccggagctctactgccgccggataacttagaaaaaccctacaaaaatgaccccaagtgtaatcttgctgacggagagtacatcctcgtgccggagcaaggagctgctcaggaggtagccccagatccagcacccgagcctgcaccagaggacctgcctgccactgctttggaaggcaagccccggttttatgcataa

SEQ ID NO: 40050 - DNA, 1308 bp, Zea mays
  Peptide Sequence Number=SeqID_81829
atggatatagtggtggaggaaggaaatgccgatgttggcaatactgttgaaccatcgtatgaggttgtggctagaagtggttgttcagcacaattgtcaactaatgacactaatgaacatgaattggagagcgaggatagtaaggtcagtgttggtaatgctgcaaaacaatcacacgatgttgtgggagtaggcattgactgtattttcaatcatgtaaaagtgtcaactgaagccgatcttgggacacaaccggatgtgatacacctgacatctttggatgttccaaatgaatcaagtcaaataagttctgatgcggatatggtagagcagaacaaacaagatgctttggacacacttattagaatatcacaacataagaaaccaaagaaattgaatgtagctcgagttgtctctgaagattataagtgcaccccagaagatgttcagcttattgaatacattaaaacattaccggggaaacaagttgtggtggacatcgacagcgcatggttaaataaaaatgatatggaatgtctttttcatggtgacatccaagtgtctggcgaagccctcagtgcatatatacactgtattagggatgaagagcatttacttcatagagaaggtggaaagagcttcctaggcagcttcgttgccaggcaaggatgtcatccccaggtgcccaaaatcggatgcctggagacgcccacagtgcctgtcaaagctgcctgggagcaaagaaaacaggtcctaaatgctgtcaatcaaagttgtttcgagatgcctgccaacactgattgttctgaagatttattccaaagccatgaagatctgcagaaccaatcaagaacttctaacttggacaatgaacattttccaagggatgcatcaaaccacgctaatgttgaagcaactggacctccatatgatctctcaaatggtggtatatccacacagcactcagattggagtgaaattaaatgggggagtacagatgagatgcttggtaatgctggtcaggatgatgaccatttcactccgatgggcatgttttgtcttaccaataacacatatattcttgatatttcttgcattgagtccaacatgggtgagagaatggaaagcattcgcaatggcaacagtagttgccttactatgcaggaagaacatttacaggcagaatgtggaggatatcctcatccagattatatatctgttgatatggttgatgaaagatcactgcatgatttgccacatgggttatcacaaaacaatgagcagtatgagatggagcagctcccatag

SEQ ID NO: 40051 - DNA, 495 bp, Zea mays
  Peptide Sequence Number=SeqID_81830
atggttatggcttttgcagatctgcagaaccaatcaagaacttctaacttggacaatgaacattttccaagggatgcatcaaaccacgctaatgttgaagcaactggacctccatatgatctctcaaatggtggtatatccacacagcactcagattggagtgaaattaaatgggggagtacagatgagatgcttggtaatgctggtcaggatgatgaccatttcactccgatgggcatgttttgtcttaccaataacacatatattcttgatatttcttgcattgagtccaacatgggtgagagaatggaaagcattcgcaatggcaacagtagttgccttactatgcaggaagaacatttacaggcagaatgtggaggatatcctcatccagattatatatctgttgatatggttgatgaaagatcactgcatgatttgccacatgggttatcacaaaacaatgagcagtatgagatggagcagctcccatag

SEQ ID NO: 40052 - DNA, 558 bp, Zea mays
  Peptide Sequence Number=SeqID_81831
atgcccacgccgagcgcttgcgcctcaccgccctgtcgcaaccgcggccgtggcggcgtcgacgacctcccccgactttcccgcgtgggcgccgtcctggggaagcccacaatgctcgtgggtagtggccaagaagatcggagtcgcgaggttcatgctgaaggaggtggtgcgatgcccagctcccaggtcgtcgtcttcacgctcctcatgctcctgaagttctggtcctggagttctggtcagcgagatgttcgtcttcgtgctcagcctcatcctcgagtcatcgcgcaagcagcgaggtgccggccggccgtaaacccatggatctgcatctccttgatgaagcttgccacagtaatcatggtgtcgtccttggtccttgctacgatgctgcggcatcatatcagcactgcacgtgggccccctggcaatctccagcaggtcggataccgccggtgtgaacgaactgattcgccttctcttcccagaaccgcaggctgtgatcccccccttggctccctgttcagtgttcactcagtcagctcaagctcctga

SEQ ID NO: 40053 - DNA, 453 bp, Zea mays
  Peptide Sequence Number=SeqID_81832
atgctcgtgggtagtggccgagaagatcggagtcgcgaggttcatgctgaaggaggtggtgcgatgcccagctcccaggtcgtcgtcttcacgctcctcatgctcctgaagttctggttctggagttctggtcagcgagatgttcgtcttcgtgctcagcctcatcctcgagtcatcgcgcaagcagcgaggtgccggccagccgtaaacccatggatctgcatctccttgatgaagcttgccacagtaatcatggtgtcgtccttggtccttgctacgatgctgcggcatcatatcagcactgcacgtggcccccctggcaatctccagcaggtcggataccgccggtgtgaacgaactgattcaccttctcttcccagaaccgcaggctgtgatccccccttggctccctgttcagtgttcactcagtcagctcaagctcctgaatcctga

SEQ ID NO: 40054 - DNA, 273 bp, Zea mays
  Peptide Sequence Number=SeqID_81833
atggcgtgtgagccctcggatcagaacgcgacagctcacgattcccccatctaccttcgatctagcagcggcgacaagcaggattccacggtggcgcttcaccagagaaatccccaatcaaaggccccacgacctacccgagtgttattaggtgcaaaaactcccaagcaacctctaaccatcaaggaacacgaggttccaagagtaacaaatccgcacaaggttaagtttgcaatgagctcaagaacaaagagaataggagaatcgagatga

SEQ ID NO: 40055 - DNA, 339 bp, Zea mays
  Peptide Sequence Number=SeqID_81834
atgcctatcttagcaaatagaaaatcacaatcacggatccaagcaagaacacaagacataagattttatttcgaggttcggtcacaccacaaaggtgtcctactccccattgaggagcccacacagggccgggtcttttccaaccctaatcctccacaacccgatcaccaagagagtttcacagttgaagttaagttcaactcagctgaagtcaagctcaactcagctgaagtcaagttcaacccagttgaagaaaatctcgacttagctgaagtcaagttcaacccagttgaagaaaaactcaactcagctgaagtcaaattcaactcaactgaataa

SEQ ID NO: 40056 - DNA, 363 bp, Zea mays
  Peptide Sequence Number=SeqID_81835
atggataatatgaaccaaccaacgaatttaaagcgcttaacaagaacacacaagaacacgcaatataacccgaggttcggcaaccaccacaaaggtgtcctactcctcgttgagaagcccacaaagggccgggtcttttcaaaccctaatcctccacaagccgaccacaaaggtcaaggcaatctctactcaaataagctcaaagagcgggtgatacaaacttcttggggtcgtccacaaatttgggagactcccaagcaacctctaaccgtcaaggaacacgaggttccaagagtaacaaatccgcacaaggttaagtttgcaacgagctcaagaacaaagagaataggagaatcgagatga

SEQ ID NO: 40057 - DNA, 303 bp, Zea mays
  Peptide Sequence Number=SeqID_81836
atgcggtggaggtactcaggcacgtggcacaaggccgtgcgacggcagtcaccggcgttcttatcggtttccaccgtggtgaacatggtacggcggccgaaattgtttatcggccggagtttatccccggcgacgtacaccgggtgttatccactcaccccgagcacaaattggaccggcggcgacacgaatcgcggtggaaatcggtcgtcggcggtgaagctgctgctctggcgtcctgatccatttgggacactgtaccatggcgatctccattcagttggcctgacagtcaacctttga

SEQ ID NO: 40058 - DNA, 555 bp, Zea mays
  Peptide Sequence Number=SeqID_81837
atggggcttccgtttcggatgggacgaggaggaggggtcgcggagcttcggctttatacccaaggagcgacccgcggccgttgcacggaggccgagaatccacggcgagtttggcggagtccgcgcggcgcgatcggcaagctgttgaagacgagcccgacatgcggaccccgcggaccagagagagggagggcaggcgagcgcggggcgagagaccgcccagtgggccccgagtctaattcttggattttgggcttatttgcaaaatggaacctcattgagttctatgctaagtctgaaatcagagatatggctcaactttggagctttatagctttcaaatcagtcgccagggataaactccggccgataaacaattccggtcgccgtaccatgttcaccgcggtggaaaccgataagaacgccggtgactgccgtcgcacggccttgcaccacgtatctgaacacctccgtcgcggcaccgtgactctttatacccgtctaatcatcgccggtgagttcgccacgactgaggacaccaatccactgagctaa

SEQ ID NO: 40059 - DNA, 288 bp, Zea mays
  Peptide Sequence Number=SeqID_81838
atgagtatggaattactcagcaagtcttacccgactaaagaaaagactctcaagggtatgctggttataagggagtcaagcaaggctaagcatcaaaacctttttgtaaaacgggtgatcaaggaagaggtccctcaagttctaattcttcgcagtggtacgcccctgatgtcacacggcggaggtccgaccaccggcgaggttagatgggccggattacgcaaggactggcgctctcgagcggcatacaccaaatcagacccccttcgagcatttcccctaagttaa

SEQ ID NO: 40060 - DNA, 456 bp, Zea mays
  Peptide Sequence Number=SeqID_81839
atggaattactcagcaagtcttacccgactaaagaaaagactctcaagggtatgctggttataagggagtcaagcaaggctaagcatcaaaatctttttgtaaaacgggtgatcaaggaaggtaatcaaattcaaggaagaaaaagaaaaagaaaagagatgaacagtcctgggctgattctggcccgaaccggcccaactacagcagaagcttgcgcgcccgcgctggctgttttgcgaaaagggcctcggcttactgatcaatccgaaagttcctcgacgaagcttccgcacgggaagccaaactccggcgagctatactggccggagagggccaagaccggcgctaatctttggttcacgcctgattctacccctaaggagtattcccctcactcaatttctgaattggagctctaccgtactctgtccacggggatagtgcggagaatctaa

SEQ ID NO: 40061 - DNA, 192 bp, Zea mays
  Peptide Sequence Number=SeqID_81840
atggcgccttacacttcacatgaactcccacctttgatggtcaataccaggaagggaggcggaatcgatctacttgccaacccacacaactggaggattgttagacaacaacaagcagaaatgaatcctccaaatcctccaccggcttggatagatctagtggtcgcaactcagatgcagatgctgcaatag

SEQ ID NO: 40062 - DNA, 327 bp, Zea mays
  Peptide Sequence Number=SeqID_81841
atggcggtcaggcgagggattcctgcactggagcttcctataaacgcaatgctcagcctcagcctcaattttgttgatcagccttacacttcacatgaactcccacctttgatggtcaataccaggaggggtggtcgaattgatttgcctcctaatcgacacactcgaaggatatatagacaacctcagccacagccagcagggatgaatcctcctaatcctccaccaggcggagttgatccactgattgcagctcagatggcggtgatgcagcaaatggcggacactatggctgatatgcgtgcccagatgcagcaagaacgctag

SEQ ID NO: 40063 - DNA, 6252 bp, Zea mays
  Peptide Sequence Number=SeqID_81842
atgcagaggcggcagcagcagctaactccgtacaagctaaagtgtgacaaggacccacttaataacaagcttgggccacctgacttctatccacaaacactaaactgtcccgaagagacattaacaaaagactatgtacaatatggttataaggagactgttgaaggaattgaggaagcaagagagattgtaataagtcagatcccatacttctgtaagccagatgttgtcataaagtgcaaggaggcactaaagaagcgtttaagagctatcaatgaatctcgtgctcaaaagagaaaggccggacaagtttatggagttcctctttctggatctctattaatcaagcctggagtttacccagagcaaaggccatgtaatgaggacacacgtagaaaatgggttgaggcccttgctcagccaaacaagcgactgcgttcattgtctgagcacgttcctcatggttatcgtaggaaatcactttttgaaggtctcattcgatataatgttccattactaagagcaacatggtttattaaagttacatacctgaatcaggcccgaccggcacctaacagtacttcagtagttgcttctgataatcaacgatctaatcaatggacaaaggatgttgttgaatatttacaacagattttggacgaagtttgttctaaagagggtgccattgtacctccatcttttaaagagcagtcatcaccaggacttgctgctggaaccaatcaaataaaaatgaaaacggaatcatctccagctggagacagtgaagaacccttggtgcacttcaaatggcggtatatggttcgcctcatccaatggcatctcacagaagaattgcttgttccctcagtacttatcgaatggttatctaaccaacttcaggagagggattcagatgatgttttagagcttcttttgcctattatacttggtctggttgacaccattactctctcacaaacatatgtgcgcatgttcgtggagctactagtgagacgtctcaatgtcgatcgtccaaaaaggttttcagtttcttctgttatagcagagttactgcgatacatggtacttgcagtgccagatacatttgtttctttggattgctttcctttcccatcatttgtggttcctgatgtatatggtagaggtgctttgttgaagataaccagtggtggtggaattttatgttctaagaggcgtgatgcttatcggtatttgtcctgtggttatgctgtttcttccattcagaaacgtgcacatgatcttgcagcagttgctaaccctagccttcaagcacgtggtgcagccaaagtggtacaggctttggacaaagctcttgtcacaggaaatttgtcagtggcatatttttcactctttaatgatttatctgatgcgttaatggaagaaagatggattaaagaagtgaatccctgtttgcagtcttctctgatgtggattgggactgttgagctatcccttatctgttctatatttttcctttgtgaatgggcgacatgtgattaccgtgattgccgagcatctccctctcagaatgtgaaatttacaggaagaagagatttgtctcagatacacatggcagtgtctatcttgaagaataaaatggatgagatgaataacttgtctcgtcctaagagtagtactcgcatcacccttaataaagttgccaaaggttctttgaatgatgcttgtttgacagcagctgctgtggatgattcttctggactgagaagtaatgcaaaaaatgttgatgagaagaaggatacaaatgatatctttgaaagccctggtccactgcatgatattattgtttatgtcaggcagctaattattagtggaattactgataagaacgatacaatgctggatgttgaaagaaaaaggaggcatcacagaactttgaagcagcttcctgggtcttctttatttgatgttcttgaggaaactaggactgcagaagagcaacagctatatgagatgatgtcaacatactctagtgagcgacgccttgttctctcagaactttcatgtggtcattcattttatgcaagtggcagaggtgagtacacttcaagttcctgcattcggaagcagagtgatcttccagttgcatcagaaggtgataagcatggaagagtgctagaacaagtagaagatgttaaagctcttttgtcaagtctgttgggttttacatatcctcccctagtggaatcaaaactttgtgaaatcaaaacaagctttcaagaatcagtaacgtcaacgctcacacaagttgagactggggaagccaaaagtggatgcgaggattgtatgaggtccaaggggcagaaattggatgacagcgccactcctttccaagggtttccattgattcaatcaggcgaggaggatatttggtgggtgaagaaagggacaaagttacaagaatctttcaacgttgaacctgtacagaagtctgttaagcaaacttctagaggtagggcaaaagttgttcgtaaaacacaaagtcttgcacagcttgcagctgctagaatcgaaggtagccagggggcatctactagtcatgtttgtgaaagcaagatgagctgtccccaccatgaacctaataacgatggtgacaacgtcaaagattttgatcacacaagggcagcaaacgtgactgcaatagggaagtcactaaaaagacttagattgctcgaaagacgatctgtctcttcatggttgttgaaatcaataagacagcttgttgatggaaacggaatgacagcttctaaagctaccaattctataagcatccttcctttgcagcctgatgataaaactgcatccaaatggaggctaggtgatgaagaactgctgtcagttctctatgtactggatacatgctgtgattcagtctctggagtgaagttcctcatatggttactagtgaaaattcgtggagtgggctcctcaggtcaacctgggaggacttatatgcttatgaggaacagagatcaccaagtttgtcaggtcaacgaggcacttgtgttctcatctctgcttaggtatgagaacatacttcttgcgaccgacatcttgcctgatgttctaagtgctttagtgaacagaaattctatgtcagcaactaccaggcatcctggttcaacagcttttgcttatgttcgatattttttgaagaaatatagagatgtggctagtgtggccaagtgggagaaaaactttcggaccacttgtgatcaacgcctgttagctgagcttgataatgggcggtccattgatggtgatttggtatcttcttcgggtattttagcaggcgaggagattgatgagcaggtccgccaaaagttgaatggaaggagttcaagactcgtgcagaatatgaaagagatagtgcaacggcaagctgatggaattcagcgcagtttaaaggaaaagaaagttcttgcaggcgcagcacccaggaatccactcacttttgagaaagaagatagttatcaaattgcacatgacattgttttgggcttagtagaatgcatcaggcaaaatgggggtgcaaatccagatggagacctttcaatagttgcttctgctgtttctgcaatcgttgtgaatgctgggcatatgatagcaaaacatttggattttgcaggaggaaactatcaaggtgttaattctgtggctacttcgctaaattttgttcggcacactttacttattcacataaattctctttgcttactaaaagaaactcttggagatcgcttcagccgtgcctttgaaatagctctggcggttgaaacttctgcagctgttacagcagcttttgctcctccaaagatgcaccgcaatcagtttcaaccatctcctgaggcccatgatgcatatggaaatcatacaagtgagctcagcaactcagggaaaggttttgttgggagaactgcaaaagtatctgctgctatttctgctcttgttgtgggggctgttgttcatggagctgttagccttgagcggatggttgctactctaaaaataaaagatggtctggatattatgcagcttttgagagatattcttggagatccatacattattgcactctcaaggttgcagcggatgcttcctctaactgtaatttttcctccagcctactcaatttttgccatggttctttggagacgatatatttttaactgtgaagatccacaactttatcagtctttttcaaatgcaataaacgatattaccagacatcagccttttcgagagatctacttccgtaatacacatcggctgtataatcttctggcttctgatgttggtgattcgaagtttgcagcaatgcttgaaagtcatagtccggaccggaattcaaaaatattgccatttatacctctccgtgcacgcctttttctggacgctattattgattgcaacacaccaactattcagggggatggtgcttcagagccttgtgatcccaaagataatgaactaaagctttcagagaggcttatgcaacttcttgatactcttcaacctgcaaaatttcactggcaatgggttgagatgaggcttcttttagatgaacaggctcttatggaaaaagttgcagcaggcaagacaacacttgaatcacttcggtcattatcccctaaagctgagggttttgccctttctgatagtgagaaaggatttactgaagtcattctatcaaggctacttgctagacctgacgctgctcctctgtattcagaacttgtccaccttcttggaaagcttcaagagtcacttgttatggatgtaaaatggattctacaagggcaagatgctattcttgggcgcaggtcaacaagacaacagcttgttcatattgcccaacgaaaaggtctttcaacaaaggcacaggtttggaaaccatggggttggtccagcttgcttagcgatgccattcctaataaaactgcaaaaaggaagttggaagtcacatcaattgaggaaggagaagttgtggatgacactgttgatgctaaaaggactaccaagactccccctcatagtgttgatagaagctttgaagggattagatcgataaataaatatttaactgagaaagcccttgctgaattagtattgccttgcatcgacagaagttctgctgatatccgtggtatactttctgttgatttgaccaaacagatgggggctattagtgaacatatcaaagcaatagcattgaatggtgctaaacaagctggttcagtttcttcaggaaatgaagtgccatcgaacaaatcaagtggccgtagaggaattcgaggtggaagcccaaacattggtagaagagctccggttggtaatgacccaagtcctccttcggcttctgctctgcgggcagcgttgtggttacgcctccagttcatcattaggttgcttccagtaatcatggcagataggagcatgagacatacgcttgcttctgcaattctaggcctgcttgcaacgcgcatgatttatgaagatgcagatttgccccttcctcctaccaacgcaactgctttaaggcgggatgtggattccttgctggaacctcccctggatgtcctgcttgaccggcctggcgaaagcctttttgagaagcttttatgcgttctccatgcactgcttggtagctacaaaccaagttggctgaagtcaaggtcagcctctaggtcgtcaattaaaagccaacgagatttctcagcatttgataacgaagcagccgagggcttacagtccgcgttggaccacatggaattgcctgaaacaatcaggcggaggatccaagcagccatgcctcttcttccaccatccaggcgcccttgtatgcaatgccaacctccgcagttgtcgttggctgcattatcaccactccagagcagtacctctggtgtaggtcctcaacagaaaagttcttgtgtgagttgggtgcccactaacgtatcagtcagaagcaaggcagcattgccttctcatgaccctgaaacggaggtagatccatggagcttgctggaagatggcacaaactgccccccctccacagcatctggaagcaatggctcgagtggagtgacgggagaccatgctaatctgaaagcttccagctggcttaagggtgccgtgagggtgaggaggacagaactgacctacattgggtctgtagatgacgacagctga

SEQ ID NO: 40064 - DNA, 294 bp, Zea mays
  Peptide Sequence Number=SeqID_81843
atggctcgcgacctggcttcctccctgtttgcgtgctgctgcgcagtgccccgtcggtgcttgctatgtgctcgacgaaatgtgcagcaagccacgcgtcgtcgatttcctgcagcagccccgacgtctctgcgcggctcgctgctttgtgttgagcagtggacagcacgccgtcgatgcccgccggcagtgcatgtatatgtgtggatgtgtgtgaagcattcgattatgcacattggtaggatcgcgtttgcgattaaagaacaagcggttgttgatgtgtgcgatttgtag

SEQ ID NO: 40065 - DNA, 693 bp, Zea mays
  Peptide Sequence Number=SeqID_81844
atggcagcgagggttttctcaccacgggtttcgacggcgtcgcggatggggctgcgcaaaaacagcaagccaccggcgggcatcgacggcgtgctgtccactgctcaacacaaagcagcgagccgcgcggagacgtcggggctgctgcaggaaatcgacgacgcgtggcttgctgcacatttcgttgagcacatagcaagcaccgacggggcactgcgcagcagcacgcaaacagggaggaagccgggtcgcgagccatggcggggatgctctagggcgtctgctgcagcgcgccatgggagaggtttgcgccagcgaggagaggagggtcgagctgctgctgtcgagtccttgctgctggaatttctgggcaccatgggaggaagaggtggacgagctgctgctcgccgtggagcagggagaacagcgagctcggccaggcagcaaggggagagggctcgcggggaggggctagagcttgggtgccggccatggaaattgaagggagcgccatgggagactagggaagctgctgctgcgcttgaaggggagaggcgtcgagcaccatggtggccgcggggaggagctgcgcaggggccgtcgggacctgggcgtccctgctggaatggagctcggccaggggaactgctccctgcgccagcaccagggaaggagcggtggggaggaagataa

SEQ ID NO: 40066 - DNA, 372 bp, Zea mays
  Peptide Sequence Number=SeqID_81845
atgattgtggttgttattggtgaacataaagccttagaagaagggggcgagcttcatggtaaaacagtttatctgtttggaagcactgagccccaactattggatgttaatggcgaatcaaagatagtgcttattccaattgtagttgctgtagactgccctttccctccatcagacaaaattggcataaactctgtccaaagggaaaatgaggaaatagtgccaatgaaggcgatgaagatggcatgggtgccttatgttccccttgaggaccggtatgtattttgctatttctctattcatttgtacaagcactcaagcagtgtggacacgacaaatatgaaggatctgaagaagatagaagagcactga

SEQ ID NO: 40067 - DNA, 507 bp, Zea mays
  Peptide Sequence Number=SeqID_81846
atggaggatctatggttatctgcttttcctatcggtactgagtgggaaaacattgataagataaaggagttcaactggagctttgaaaatttagagaaagccttagaagaagggggcgagcttcatggtaaaacagtttatctgtttggaagcactgagccccaactattggatgttaatggcgaatcaaagatagtgcttattccaattgtagttgctgtagactgccctttccctccatcagacaaaattggcataaactctgtccaaagggaaaatgaggaaatagtgccaatgaaggcgatgaagatggcatgggtgccttatgttccccttgaggaccggcttagcaggattgacagtttgaaaacaaaaatattcactctcggatgcacgcagcggaggttggtctgcactgaagcatctcaaacacacgtggtaaccacgcggtacagtatatcgatgacatctttagcaacccacgagatgcaaggaattgaatgctaa

SEQ ID NO: 40068 - DNA, 288 bp, Zea mays
  Peptide Sequence Number=SeqID_81847
gtagactgccctttccctccatcagacaaaattggcataaactctgtccaaagggaaaatgaggaaatagtgccaatgaaggcgatgaagatggcatgggtgccttatgttccccttgaggaccggcttagcaggattgacagtttgaaaacaaaaatattcactctcggatgcacgcagtggaggttggtctgcactgaagcatctcaaacacacctggtaaccacgcggtacagatggtcgatgacatctttagcaacccacgagatgcaaggaattgaatgctaa

SEQ ID NO: 40069 - DNA, 690 bp, Zea mays
  Peptide Sequence Number=SeqID_81848
gaggatctatggttatctgcttttcctgtcggtactgagtgggaaaacattgataagataaaggagttcaactggagctttgaaaatttagagaaagccttagaagaagggggcgagcttcatggtaaaacagtttatctgtttggaagcactgagccccaactagtggatgttaatggcgaatcaaagatagtgcttattccaattgtagttgctgtagactgccctttccctccatcagacaaaattggcataaactctgtccaaagggaaaatgaggaaatagtgccaatgaaggcgatgaagatggcatgggtgccttatgttccccttgaggaccggcttagcaggattgacagtttgaaaacaaaaatattcactctcggatgcacgcagtggagaccagatgatcggaagggaacgtaccagattgaaccgagccgccaggcgatgggatccggagatggagcctggcggggggcgagggcgcctgcctccctgcggcggatcgaagtggcgtcctcctggacttgtggttgggagcaggccggcggcggcggcggtgggtggtcgggtggtaggctagctgtggctgagtgcgccagacacgagcgagaaggccgggctgagtgcggcgcggcgggatttggacgaacgagcgggtgcggcaggccgagatggacgatttag

SEQ ID NO: 40070 - DNA, 2502 bp, Zea mays
  Peptide Sequence Number=SeqID_81849
atgcagcggttgggctactttggcggcagagttgctcgtgccccggggacggagaaagtccccgagccggagggcgagttcaagaggatgatcggggacgaagttgctcagtttgggtcctgcacatttacgccgaagaccggcaagaccacgatgcatgtagtcgagttggttccttgcgcccgcaacaagtggggcaactggaatgaattttggttttacgttgctgagggtaccgtcgaaggccacgagggacttcccgtgtccgagatgtgctcacatttttactcggcgtacccgccctttgaagtggcggaggatgatgtggacgaaggggcccttcggtgtgccgccggccagagcagtgggcgcgacttggttgaagagtttgtggcgtacggggtatggcccttggcgcatggttgggcgttgggcgaagtatgccctcgccagatgcctttccgtggtggaaaggtggtgcggagtcccgccttcgcgctaaatctgcgaaaccgtgatccggccgcctttgtgcgtgaggcggaggatgaggcggtgcggcttgttgggtgttatgtgccgaggacagagggccagtgcagctgggagatccgcgggtcgaatgaccgtctggatagggtcttcgaattgaaccaactgccatatgacggctaccctggtcaagacgatgcggaccaccgagggaagaaaccggtggtggagactaaagacgaccctgcgccggcggccgccccatcctctaagaagaggaaactaggtactgccatgggaggacttggggttttcgatggctttgctagagagttgatgaggacgtgcgcggccccgggggaaaggatgtcttcgcccgagctccgggagtcttcggctcggatgctgaagggcaaaaagaggcaaaagcgggggtcggcgaaggctgcggcccccggcggaggcaagccgccgctggcggcgaaggtggcggaggccgcgaaggcggcccgagcgttgccgtcggcaggcaagcgtgtcgccgacttcgccaccgacatttgtgtggaggactatcttggtgcgccgaaggcgaagggcggggctcttagcaccggaggcgacgtggcagccctcgcggctgtgagggatgaggcgggcgctgcgtcccgccggctaaaggaggtggtggagtcgctaagtcaggtggctgactttgccaaccgcacggcgtcgggggccctcacggcagttgtgtttgccgaagtcgagagacttcggacacaacatgctgacgccgtccgagagaaatcggccgtcgacagcaagtgccgcaagctggcggacaaggcggaggccaagctggcccgagcggagggaaatattgccagggagcgcgccgagcagctgcaagagcggctcatcgccctggagagccgtgtggagcgggccgaggccgcgatgcgagcggaggccgaacggacgcgcacacagcttgtgagcacatatcgaagaactgcaggaactccccgctgtcgtggggggttcatgtcgtacgcctccctggtcacctgcgagggggcgatgaacgcgctctcccgcgaagggtgccggcacttcgaggtcttcgaccaggtggatgaagattttgatcgagatgtctataaggttgaagacctcgtgctgaaggattctgccggggccctctacgaccagatgtggggtccgcacggtcgcgaggtggtcagggagcgggcggagacggcgatggctcaggtaacattttcgtttgtttggcgtttgttggatgtgggggtcgccctggagccaaccccggagaccgcggaagacgcaccggatgcccccacatccgcagcggccggcgaagacctgcccccgaaggtggccgaaggcgcacctgatgcccccgcggctgctgcgccgagtgctgaagatcccgcggcggtggcggcggaaacaacagcggaagcagcggcggagccaatggcggaggcttccgcagcgccagggccttcgcaggttcaagattttgggcctgcgcacgcaaccgctactactgaatttttggcggcttcgaccgcggaaggtggtaatgaatatggtggatctgcatctgagttttttgattttactgactctgggagctcggttgagtggactgaggagtcgtcggaggaggacttggactattttgcggccttggacgtggctgcggcggaggcctcgccacatgccgcggacgcgcaagatgtgccaggtcctagcaccgggcgccgacggcgaagggcggttgcaaagcgtagggttagtacggaggaaaggggtcggcttcgtgtgagtaggactggtcggcaggaactgttgtctttgcccgccgccgcgagtacaggggaaggggaattgcggagtctttttgcgggtgaggagcttaggataatgttatttaattatagggagatgggaattattcctaaggttgagccgatgtag

SEQ ID NO: 40071 - DNA, 1275 bp, Zea mays
  Peptide Sequence Number=SeqID_81850
atgtatgtttgcaatcgcatagagaacgatccggttgaagagcccgaggaactcgcaggagaagcccctgagcagcagtcggttggtggaggcaagtgtcccttgacctatctctgtcctattcattctttaattcacctcccgctttacatatttatacctaaggtggttatgagattgatggtttttggttatgactatggtgctgggtacatcgggttaataacttgggttaatgctaaaaacttggcttttctactaatggctcgacttagacacactgcacgaaagtcagtcatccccttcttaccctcccaccttgctgagcgtccgcttcgccgtccagtggccggacagtccagccacttggagagactgcaccaccgcctgcatgaggagcaggaacgtcgacgacaggagcagcagggctcttctttctcgctccaccaggagatagagtctgtgaggagctgctcccctgtgcttcctctggagccgccccctgcaccaccactgggcgtcctagcttctggagtagctgctggaggagacccagacgacggaggaggcgacgacagctcaagccacgacaccgacttctctgctaaccttgagccggaaggatgggttgctcgacccatcactcgcgacgctgctcgcgggtgtcacttccacgatgcgctcgataccctgttacgtcgggcatttgaccggcatacttggtccgtcgagtatcgctgtgtggtctaccagcatagtcgcagggtctacccagaccgctgggaggcaacctgcttggtgcgctgtccggagaacagtctccagggtgcagaggcctgctcagagcactattctatttctgagcgggactccgctgaggcagccatgcaagatgctgcacggcgtgcgctttcgcactactgctcggttttcggtggggcagctgacggtcttgacctgaagtattacccccgccgttcatctggcagcacaggaggcgtgattgtctcacccgtcggtgagggcaatcctaggttgagcagcacagtcaacctagccgccgtgctaaacacggagctggaccatgcactagatgagctgagtagggctcgtgctgagatcgccctgctgcgggctgagcgcgcggaacgtcgtcacttggatggtggttcccccgctcccgtcgggactcagcacccgtaccgctcacctcagcgtggacaccagtcttatggcaaccccgactgcaagaccaagataactctagaaccatag

SEQ ID NO: 40072 - DNA, 249 bp, Zea mays
  Peptide Sequence Number=SeqID_81851
atggccggttcggccgccccctgcgccgcctccctgcccgccggttcggccgccccgccccccggctcggccgccccctgcgccgcctccccaaccgccgagaacgatccggtcgaagagcccgaggaattcgcaggagaagcccctgagcagcagtcgtttggtggaggcaagtgtcctttgacctatctatgtcctattcattctttaattcacctcccgctttacacatttatacctaaggattga

SEQ ID NO: 40073 - DNA, 237 bp, Zea mays
  Peptide Sequence Number=SeqID_81852
atggccggttcggccgcctccctgcccgccggttcggccgccccgccccccggctcggccgccccctgcgccgcctccctgcccgccgagaacgatccggtcgaagagcccgaggaattcgcaggagaagcccctgagcagcagtcgtttggtggaggcaagtgtcctttgacctatctatgtcctattcattctttaattcacctcccgctttacacatttatacctaaggattga

SEQ ID NO: 40074 - DNA, 228 bp, Zea mays
  Peptide Sequence Number=SeqID_81853
atggccggttcggccgcctccctgcccgccggttcggccgcctccctgcccgccggttcggccgcctccctgcccgccgagaacgatccggtcgaagagcccgaggaattcgcaggagaagcccctgagcagcagtcgtttggtggaggcaagtgtcctttgacctatctatgtcctattcattctttaattcacctcccgcactacacatttatacctaaggattga

SEQ ID NO: 40075 - DNA, 408 bp, Zea mays
  Peptide Sequence Number=SeqID_81854
atgacgactactttcacgcacgcgcacacagaaaacgcgatgctaccactccatatgactctaagatgttttgacatggctgttcggctgcttgccaataaagagtcacgtgggccgaaaggagaaatcataaataatagaaaacattatatggacatgcgtttctggagaatggttggttttgataaacttccaaagtaccatcaggatcctacagcagaagagttagccaaaacactcgattgttggccatcaatgaattattatatcacgggttgtagatatgatgcaaagattcttcgaaggaactttgtggttgatctgttaagttatgaggacaattcgtgccgatatgccatccctgcaaacatacaacagagacttatcgatatcgctaaaaaggattag

SEQ ID NO: 40076 - DNA, 288 bp, Zea mays
  Peptide Sequence Number=SeqID_81855
atggaagccctgtgttcaaagattagaatcatccaccccgcatttgcacccagaatttggatcacaaactcaacaaaatacagtattgtcgctcgggtagaagttaaattcccgattgaaccaagttttcgtgacaaacaacatttcgttttatcttacatcaatgatgcaaagattcttcgaagtaactttgtgattgatctgttaagttatgaggacaattcgtgccgatatgccatccctgcaaacatacaacagagacttatcgatatcgctaaaagggattag

SEQ ID NO: 40077 - DNA, 522 bp, Zea mays
  Peptide Sequence Number=SeqID_81856
atggcgaccaccaacaccgcaccggcgaacggcggccgccccagtgcgcaccggcaggtcctcactcccgtcctcgccacaggagcaaggacgggactgtcccagaacacgaacaccgccctcgcggcgtacgacgtgttgtgcgaccccccggtgcagccggcggcgcaggaaggacctggacgtggccggcccgcgcacggcgcaaccgacacccgtgcggcggatgggcagccacgctccgccccagcggtaggaggcggcacccgaagcagcaccaaagccgctcaggccggggagccagacacgcggcagctgacagcgccacggacgacaaacacccttctcctccgaacactgagggaaggagcgggccgctgcccacgtggaggcgggacccaactcggctcgccctcctccccagcacagatgatgaacatccttgaagccgagggcaagggagaggccacggcccggctcgctcttccccaccacgaggcctacgatcatcatcctgggtga

SEQ ID NO: 40078 - DNA, 177 bp, Zea mays
  Peptide Sequence Number=SeqID_81857
atggcgcacgtgccgaaaaccgagtttcgagcatgggcccccggaaataagctaaggcatggcggaacggagggaaaacgacacggaggcgcaaggcgacggggcggcatggctgttcggccttgcgtttcggccgaaaacgagggcttcgcccatggcgcacgggccgaaaactga

SEQ ID NO: 40079 - DNA, 411 bp, Zea mays
  Peptide Sequence Number=SeqID_81858
atggcgacggggcggcatggctgttcggccttgcgtttgggccgaaaacgaggggttcgcccatggcgcacgtgccgaaaaccgagtttcgggcatggccccggaaataagctaagtccaagcgtgtggaaagacaccgaagaaaaagagatagaaaagaaaagaataaaacagaactacactaactgggccccaacttcgttttcggcccactattcgttcacccccgcgcggcccagcgcagaatcgggcttcgtttggcgcactgatgccgccctgattgctcatcggggaggcgccttcgccgtcatgccgcttactcgtgtggacgagcaagccactgtggaaactgaggttcagcaagttgaagtagctgagcaggagctcattgaaggcaagttgtgcccttga

SEQ ID NO: 40080 - DNA, 210 bp, Zea mays
  Peptide Sequence Number=SeqID_81859
atggctgttcggccttgcgtttgggccgaaaacgaggggttcgcccatggcgcatggggcgaaaaggcacagtggaacggagggaaaacgacacggaggcacgcgacgacgggcggcagggccgttcggccttgcgtctgggctgaaaacgaggtgttcgccatggcgcacgggccgaaaacggaggctcgggcacgaactcgaaaataa

SEQ ID NO: 40081 - DNA, 558 bp, Zea mays
  Peptide Sequence Number=SeqID_81860
atggctattcggccttgcgtctgggctgaaaacgaggggatcgccacggcgcacgggccgaaaactgaggctcgggcacgacctcaaaaaattccccgaagtcctgggaggggggatgcccctcaggtctcctcggccgagccccgcaccccctcgcggcctagccatggccggtcggcaccctaccgtgctcagcttcagctgggcgatgttggctgcctggccggccgtggttcggtcgtgacgcagccacgaccggctatggctggctaccgccggccagacgccctggacgagtggctgcactgtgggatggcccgttgctcgatgcgttttctgtttctcccgcgctcggtggaccttcggtcaccatcctcgcaagcagacccgtcgcgcctagcgcagagggatgctttggatggctcgaccgtagcggctacgctggcgcatgagttgtcttggacccgtgactgcttggaggatccccgctgccgtgaggctgactcccggcgcccgtgtcccatcgctcgtgcgggcatcctatgcctgctgcgttga

SEQ ID NO: 40082 - DNA, 1170 bp, Zea mays
  Peptide Sequence Number=SeqID_81861
atggcgctgtgccactgccgaaacaatgttttgatggagccagccgtattgaaccgtgaaagagttgcattggacaagaaaaacaagatgcctgtgttgttcgacgactatagcgatgaagatttttatggggcacaacggaagtatagtattgttgctcgagttgaagttaaattccctattgaaccacgttatcgtgacaggcaacattacattttgtctgacatcaatggagccaagatcgaggccattgcaactcggtatgagatagtcaaatacttcaacagtttgctccatgaaaagcatgtctacaagatgcacaacgtatggtttggtcttaatccgggtgcatttaattttcgacatctaaatggtaccatggagttgtatttcacccaccaaactgtcatagagccatacgctgtcccagttcaaatgccgccatttccaaaacatatattcttgaaccttgatgatattgtcgagctgccaaacatgactttagttgaaaacaagagtgtctcgaatcaactgaccatacaacaatacacttcaaaccgttccatcacaacacccattattttgaacatcagatgggacataatgccggtcgcaaaccattcacagacatctctagcaatatcattagaggtaaaggtcaatacacaaactaaccatacatcgtcgaaacgtagtgatcaaaatgaattgctcgcaccaatggtcgatgctaaggatcgtaagaggaaaagggatagggaaagatatgcagtgatgtccgttgaacaaaaaaacgagaagaataggaagcgtcgtgaagcacgtcaacaaaacaagggacacaatgtgatgcccaatgtgtcaggaggtgaccaaaatgaacagcttaggttgtataatcagacaccaaggcggaaagagggaaagttagagtacataagaaaacgtagagcactgcaagctagcactttgaatcaggggtccatcgccatggaggtcccaacatatacctctgaggttgtacaccctacagcagatgtatcggaacctgattcatcctctgataacgcatgcgactgggttatccctgaatacaccagtacaccgttcatgccagcttcaacacaaatggggatgtcggttcacccgatatgtctactgggccactaa

SEQ ID NO: 40083 - DNA, 4665 bp, Zea mays
  Peptide Sequence Number=SeqID_81862
atggaggtcccaacatatacctctgaggttgtacactctacagcagatgtatcggaacctgattcatcctctgataacgcatgcgactgggttatccctgaatacaccagtacacctttcatgccagcttcaacacaaactgaggatgtcggttcacccgatatgtctactgagccactccgacgtaaacatcatgttctgcctggtgaaagacaagctatcttagcccgtcaaaacaagaaatttgaagcaaacattgcacgtaacgtggctactttgactgaggatactattagtgacgtcggacaaatggatgattcgacacaacccggttcaactatagagaccaacaacactgttgatgacgatgatgagggtgtcatattcggagaggataatgatgagaacgagggatatctattcgctgatgaggacactaacgaggacttcgagatagatggtactcaagatcaatctgttgtcactgatgtgcctgacccgtacgacaaggtctacagtaacatccctgaagaaacacatatgctgaagcacgttcccgactgtggttattgcactgcgaagaagtttgagtatgagccgcctgggttttgctgtcgaggtgggaaggttgagctagccccactagagacccctccccagctcaggaggttatgggatagtgcagactctgatgctaggcactttcgtgataacatcaggttttttaatggccatttttctttcacttccctgtactgttgcctcgacagtatgacaactaatatgagggattctggtatatacacattccgtgcacaaggcatgatgtaccataatatcaagtcattcggtagtgaatgtggggcagagcacaaacacctggagctttacttttacgatgatgatcccagtctcgagcatcgataccgtaagtgtcgtgaagatcagattcagaaagaccaagaggttattaaacagatagttggcatacttcgtggaaatccgtactctgagcaccttaggagcatgggtcatgttgagaaccttgctgactatcacatcgcattgaaccttgaccagacgttgaaccagaagacatataacacacctctcacttcggaggtggccgctgtctggatcgaggggagcgaacggcgaggccagttcagcaagagtgttatgctacatgggaaggataggtcaagccacggcatccgctcataccatggatgctacgatgcgctatcatatccattgttcttccctagaggtgagcttggatggcatgcaaatatcccaaaggttggtgtatccatgggcgaagtggatgcataccgggcgacgcatagggcaagtaatggaaatgatgaagatgcggaacctcctacccatctatgtgtgtccgtgcgtgattactactgctacaaatttcagatacgtccaggggtattcaatccaatacttcatggtaaacgacttttccagcagttcgcggtcgacacatacattaagattgagagctcccgtttagatttcatacgtaagaaccaggatcggttaagggcagacctataccagggcttggtggatagcatgttagatggagatgttagaggagagaaggttggaaagcgaactgtgttgtcaccgtcgtttattggcggtcctcgtgacatgagacgtcgatatatggatgctatggctctggtgcggaagtttggtaaaccagacatctttcttaccatgacatgtaaccctaactgggatgagataaggagagagcttctacctggacagacaccgcaagatcgtccggatcttgtagtgcgtgtctttcatgcgaaactacaggagctaaagcataggttgactaaacaggatatactcggtaaagtccgagcctacgtctacgtcgtggaatttcagaaacgagggttgccacatgcccattttctactcatcatgcaaaggaagtacaagctcacgtgccctgaacagtatgaccttttgatctcagctgagatcccgtccaacaggtaccctgaactgcgaaagatggttatcaagcatatgatgcatggcccgtgcgggtcgctaaaccctaactgcccatgcactaagggtcgtgcatcgtgcaagaatcaatacccccggcatttccatgaggcaaccatgcaagggaaggattcatatcctaattacagacgtcgtgacaatgggcgcaaggaaaaggttcgaggatgtgaattggacaatagatgggttgtcccttacaacccttacctccttcggctcttcaactgtcacatcaatgttgaggcgtgtgggagcatcaaggctgttaagtacctgttcaagtacatatacaaaggccatgatcgtgcgtctgttgttatgagagatgcgagtaaggaaaatggtgatgtagatgagatccagcagtatagagatgcaaggtgggtgactcctccggaagccttatggaggatatatggatttgagcttagtcagaactctccacctgtgatgcagttgcaactccatcttccaaacatgcacatggtgacgtttcacgagcgacaaatggtcgagcgagtcgtcaaccgtccaggtgctgataggtcaatgattacatcatattttgaggcgaataagctgtacgaggaggctcggggcatcctgtatcgtgacttccctgagtggtacacttggcagcagggcaaagtgtggcaaaggaggaaacggaatacgggtggacaagtcggtagaatcgtctctgctctaccatttgagggggagcgcttctatcttcggctcctcctaaatcatgttactggtgctacctcctatgtggatctaaggacagtagacggtgacacactaccaacgtttcgtgaggcagcacaaagaaggggattacttgaagcagacaacacaatagatgagtgtctcaatgaagctgctctttaccaaatgccatcagcgctacggaggttgtttgcaacgatactggttttctgcgagccgaatgatgtggccgaattgtggcagagacaccttgacacaatgtccgaggattatcatcgtattactcagagcaaaagccatttgcagcagatggtcttgattgacattagaaacatgttgcagtcaatgggtaaagacataaagacattccctctacctgctatcatcgatagatatgacgattcacaaggtattgatagagagatttacgaggaggaaattatcgaggcgacggcagaagatgttgctttgcaagaaaccctaaatgaggagcagaagtctgcctatgaaaagatcttatctgttgttgacaccagtaatggcggtgtgttctttgtggatgggcctggtggtactggaaagacttatctgtataaggcattgcttgcggtgctacgtagtcaggacaagattgcagttgcaacagctacatctggggttgcggcttccataatgcctggtgggagaactgcccattcacgcttcaagataccacttactattgatgatggtgctatatgtaccttcacgaaacaaagtgggacatcaaagttgctacagaaagcgtcactcattatttgggacgaggcatcaatggctaagagacaatcaattgaagcgttggacaacagcatgcgtgatatcatgggacgccctgatctgccctttggtgggaagactattgtgtttgggggagatttcagacaagtactccctgttgtacgtaaagggtcaagggctcagatagttgctgcctctctacggagttcttacctatgggaatcaatgtgccacctaaagcttgtccgcaacatgagagcaaagagcgacccatggtttgcagaatatttgttgcgtgtcggtggtggaactgaggaagtgaacaacgatggtgatgttcgtcttccagatgaggtatgtgtgccatataccggtgatgaccgcgaccttgacagattgatagatgacatttaccccagtctaaacgaaaacatgtctaatacaagctacatcacttcaagagcaatattgactactcggaacgattgggttgatatgataaatatgaggatgatcgatcgtttccaacgggagcagatgatgtaccatagctttgacaccgcggtggacgatcctaataactattatccatcggaattcctaaacacgctgactcctaatggactacccccgcacgttctgaagctcaaaattgggtgcccagtcatgttgcttaggaatatagaccctgctaacggactttgcaacggtacacggctggtgcatgctggaatgcgggttttcttgcctcgtatacccctgtgcccttctgatgacgagatgttccctttccattttaaaaggaagcagtttccggtaagactaagtttcgccatgactgttaacaagtcccagggacagacgattcctaatgttgctgtgtacttgcccgaaccagtattctctcatggccagctatatgttgctctctcgagggccacaactcgattgaatgtgaaggtacttgtaattccagtcactgatgacaaaatgaagaagggggtggaaaagaagtcaacaataaatggcgtaacatacacaaagaatattgtctataaggaggtccttacgccatag

SEQ ID NO: 40084 - DNA, 153 bp, Zea mays
  Peptide Sequence Number=SeqID_81863
atggcagttggggtcagtgaggcattgtacgccaaggcgttttatgctttattgtatttgctctgtgcctcacctttgagtgagtacgtgatacttgatcctgttagtgaccttgtcggactatgtaacaccctaggtgttacctttctataa

SEQ ID NO: 40085 - DNA, 189 bp, Zea mays
  Peptide Sequence Number=SeqID_81864
atggcagttggggtcagtgaggcattgtacgccaaggcgttttatgctttattgtatttgctctgtgcctcacctttgagtgagtacgtgatacttgatcctgttagtgaccttgtcggactatgtaacaccctaggtgttaccttctataaaacaacgattatggatttaagcgttggatatcagtaa

SEQ ID NO: 40086 - DNA, 2553 bp, Zea mays
  Peptide Sequence Number=SeqID_81865
atgcccgcgcccgtccccacgaatgtcgcccctgcacccaccccgcgatgcaatccccaagccatcagcgctccctccgccgagcaggagaatcccctccaccgccatcagcgctcgcctgaggccggaggggaccttttcgtggctgccggtatcctgtcctccacgcaggacacgcacccgccgcagcccccgccgccaccggatctctcgccaaggacaggctggtgcaggaggccactctcagatcccgtcttccgccgccataacgccctcctgctaggatcccgtcatcgctgcgaatctccattcagctccccctcgcgctttcatcgtcgccgtggaccgctcgctggcgctgacctctcccaagcgcggcacagtggtgcgggtgccgtacaaggtctcgatcccgctgggcagggtgaagacgaccacgccgggtgggaacaaggaccggccggagcagaagtacgtgcaggcttcgagttctggttcatgggcttcgtcaggtaccaggtgtccctgcacgaactggagaaggccatcgagcaggcgaacgttcggggccagatccaccgactcccgtttgacggcctcgcgttgtgcttttgtgtggctattcgttcactggagaaggccattgaactattgagtaagaggaaagttcaggggagaattcttttgtgtggctattcgttcaattacatttctgggacagcatcaataaagaaagtatctcacacgaccaggaatcttggagcagttggctttgttgttgctgtggagaatatttacccaggaataaaatttgaccctgtaccagtcagcatccctagaattctcatcacagatgtcagcaaaacggaggatcttatagactactacaattcttccaccataatagattgggctggaagggctacaaccttcaaagcaacagcagattttagctttcaagatgttgatgtccttaaacttaaaccagacatacttgctcctggcaatctcatatgggctgcatgggcgcctaatggaacagatgaatcaaactatgctggtgaaggatttgcaatggtttctggaactagcatggccacaccgcatttcgctggcattgcagcactaataaagcagaagaacccaaagtggagcccctcagcaataaaatctgccatgatgacaacaaccaatacactggacaaagggagtcgtcctctcagagcgcagcagtacacaacatcggaaatgatgacactttctcaggccacaccgtttgattgtggtagtggcgctacactgtgccggatgtatataattaatgctggtcaaggcttcaagatgttatggagcacaataaaatcattcctcgatccaaaaactgcttccaagatccatactgcccccgcctccgcccgccgcccgcctgcaaaccccgtcgcgcttcataccgtcatatccctgcgaagcccgcccctgcgcccgccccatccccacgatttggcagcgccaccggcacgtatcgatgtacgcccctgtcctgcctgtgatgccctcccccactccgagagcgcggcccaggaaccaccccacctccgcggtgacaccagatcaaggaccaggttgtcgcgtgatctcgtggagccctctagcagaccgcgcgcaaagtcgtcgccgccctccgaccgcgaccgcccgggcaccagcggcctcactgccgaggagaccgcctcgtggttcccggacaccctcgacgacccgctagagaaggacctgtacatgcagctctggtacagcacgatcgccgacgccgccccgcaacacgaggacacgttcccgggccctacctcgcatccttcgccgctgccgccgccgcccgttgggagcagcggcgtcgagtctagctgggccgacgacatcttctcgaccttctgcggcagcaaccaggtgcccaggacgtcgacagggatcagggggaaggacacgacattgcagtcggaggtgccgagcggtgccggcgcgcacgacgacacatcgtcatccggtgggtacggaagcaactattggggatccgggctgcccagtgacagcgtccatggccacaagaggaaggggatgagaaggaggaggctgatgaggcgatgcccatgccccacgcgccgcacgctgctcaacctcaccacccggaagaccatccaggtggatctgccggagctcgccgggcactccgtggtccccggacccgcaacggcgccggagggcatgctggtggtgcgcgatgagaggagtctcgtcgtgcgcctcctcaacccgctcacccgccacgtcgtcgacctcccgacgctgcttttgcccggtatgattgctggacatgtgtactacttcctggaagatgtatacccacgtatgactgggcgtctccccctaaagacatcgtccttcatcaaggcgttatttgctgatgacaatgttgtggtggcacaaccacccaatgctgggattggtgctggtgcaaggttcggtgctattggtgtagatccccaggctcaatga

SEQ ID NO: 40087 - DNA, 858 bp, Zea mays
  Peptide Sequence Number=SeqID_81866
atggcatgtactcagggcactagctcttctctgctagacacgttagcacactgctacacctccattgtacacctggatcctctccttacgcctataaaaggaaggtccagggccctcttacagggggttggccgcgcggggaaggacgggacggcgctcgcggtatcttgcgggctatggatgataaactatatggaatactgggcagaatcctccctatctgataacgatgatataacaatgtttaggtttaagctacctacaatattatgggattcgagattaaacacaaagaaaagccatcaaaatcttgatcacaatgtggatgaagatggagagagttcaagtgatgttcaaataatcgatactccattaacatcaacaaacacacaagaactgatgtttgtattatgcacatatatcatggagatagacaacgccaaatatttaaagaaacattggattcagagcactaaaccttatccaatttctttaagtcttcaaaaacttaaagatatattggatgtaaataagtcgatggatatagattgttttaatatggctgttcggatgaccgcatgcaatgatgccttgttcttgttggaagacaaataccactacatggatctacagttctgttccataactaaatttgatcgagaccctcgccttcgtgcaaagccagatatcaacatgttggcaaaattattagaatgttggcctgccatggagtacgatgtttcagattgcaaacaaattctattgcccgattctttcttgggtcacttcaccttatatgtacttaacatggacactagaagcatctatataatggactccatgcatataccatcatag

SEQ ID NO: 40088 - DNA, 1077 bp, Zea mays
  Peptide Sequence Number=SeqID_81867
atggcatgtactcagggcactagctcttctctgctagacacgttagcacactgctacacctccattgtacacctggatcctctccttacgcctataaaaggaaggtccagggccctcttacagggggttggccgcgcggggaaggacgggacggcgctcgcggtatcttgcgggctatggatgataaactatatggaatactgggcagaatcctccctatctgataacgatgatataacaatgtttaggtttaagctacctacaatattatgggattcgagattaaacacaaagaaaagccatcaaaatcttgatcacaatgtggatgaagatggagagagttcaagtgatgttcaaataatcgatactccattaacatcaacaaacacacaagaactgatgtttgtattatgcacatatatcatggagatagacaacgccaaatatttaaagaaacattggattcagagcactaaaccttatccaatttctttaagtcttcaaaaacttaaagatatattggatgtaaataagtcgatggatatagattgttttaatatggctgttcggatgaccgcatgcaatgatgccttgttcttgttggaagacaaataccactacatggatctacagttctgttccataactaaatttgatcgagaccctcgccttcgtgcaaagccagatatcaacatgttggcaaaattattagaatgttggcctgccatggagtacgatgtttcagattgcaaacaaattctattgcccgattctttcttgggtcacttcaccttatatgtacttaacatggacactagaagcatctatataatggactccatgcatataccatcatggtttaagggtgatcatcctagcatgcataatatccataatatacattatattgccaataatatgaatgttgtcatggaattggccaatcctacatggaaagacgatatttatatgtggcgtcgtatagtaccaacatgggttccaagaacattaaactggaatttatctggctttcttgttatcaactttatgcatgattggaatgtgaaagttgcctag

SEQ ID NO: 40089 - DNA, 237 bp, Zea mays
  Peptide Sequence Number=SeqID_81868
atggcgagagtaacgtgtaccaaccaggccaatggctggacggtggagtactgtgctctcgggtcgcgtgaacccgttctggtcttgagaaacctgtggcatacccttgagagtcttttctttagtcggctgtatgaggtctttgagacaaggacaggtgcatgtgggcctgataacttgggaggttctgcgatagctgatttgaaaaactataatgctagcgacatcctctgttaa

SEQ ID NO: 40090 - DNA, 306 bp, Zea mays
  Peptide Sequence Number=SeqID_81869
atggcgagagtagcttgtaccctccgtggcaagagactggaaggtggggtgctgtactctcggaaacatggcgggcaccatggcgagagtaacgtgtaccaaccaggccaacggctggaaggtggggtgctgtactctcggaaacatggcgggcaccatggcgagagtaacgtgtaccaaccaggccaacggctggaaggtggggtgctgtactctcggaaacatggcgggcaccatggcgagagtaacgtgtaccaaccaggccaatggctggacggtggagtactgtgctctcgggtcgcgtga

SEQ ID NO: 40091 - DNA, 876 bp, Zea mays
  Peptide Sequence Number=SeqID_81870
atggcgagggcggaggccaactgggagcggctggtgcgcgcggccctgcgcggggagcggctcggcagcgcctacggccagccggtcaccggcatcgccgggaatgtcccgtcgtcgctcggcaacaacgtgcacatcgaggaggtgctccgcgccgccgacgagatccaggatgaagaccccaccatcgccaggatcctttgtgagcatggttacacgttagcccagagtttggatccgaacagcgaagggagaggagtattgcagttcaaaaccggtttaatgtcagtgatcaggcaaaaactagcgaagaggggaggtgctgctattgaccgaagtcaggatattgctaaattgcaagaattttacaagctttatagagaaaagcataaagtggatgagttgattgaagatgaaatgaagctgagggaatctgccgtgttcagcggtaaccttggcgagctagaacggaaaactaggaagcgcaaaaaagtacttgcgactttgaaggtcttatggtcagtaatagaggatatgacaaaggacatatcaccagaggatgcaaacaaattgatatctgaagagatgaaaagggtcatgcaaaaggatgcagcaaggacggaggatgttgttccatataatattattcctctagattccttgacttctaccactaatgcaattgtgaattttccagaggtgagggcagcaatatcaactctgcagtactatactgatctgcccaggcttcctggtaccttttcagtccctgatgctaggaattcagatatcctggatcttttgcaatgtgtatttggttttcaggttgatataactactgtaattgtatcacagcggaacaggcacatgttgtaa

SEQ ID NO: 40092 - DNA, 459 bp, Zea mays
  Peptide Sequence Number=SeqID_81871
atgaagctgagggaatctgccgtgttcagcggtaaccttggcgagctagaacggaaaactaggaagcgcaaaaaagtacttgcgactttgaaggtcttatggtcagtaatagaggatatgacaaaggacatatcaccagaggatgcaaacaaattgatatctgaagagatgaaaagggtcatgcaaaaggatgcagcaaggacggaggatgttgttccatataatattattcctctagattccttgacttctaccactaatgcaattgtgaattttccagaggtgagggcagcaatatcaactctgcagtactatactgatctgcccaggcttcctggtaccttttcagtccctgatgctaggaattcagatatcctggatcttttgcaatgtgtatttggttttcaggttgatataactactgtaattgtatcacagcggaacaggcacatgttgtaa

SEQ ID NO: 40093 - DNA, 462 bp, Zea mays
  Peptide Sequence Number=SeqID_81872
atgggaggacgaccacaagggtattggggtcgtgctgcaaccctaggatgcgtctctaatggacccaacttgatacacgacccattgggccaaaatagggtcacgcagcaccatgggcagaaaaggcaggaaatgtctcgcatagttgcggggtttacccggaccactgggaggcgacctgcttggtgcaccgtccagagaacagtctccggggtgcgaaggttgagcagcacaatcaacctagccgccgtgctaaacacggagctggaccatgcattagatgagctgagtagggctcgtgctgagatcgcccaactgtgggctgagcgcgaggagcatcgtcacctagaggatggctcccccgctcccgtcgagactcagcacccgtacggctcacctcagcgtggacaccatgcttatggtaaccctgagtgcaggaccaagataaatttagaaccatag

SEQ ID NO: 40094 - DNA, 489 bp, Zea mays
  Peptide Sequence Number=SeqID_81873
atgggaggacgaccacaagggtattggggtcgtgctgcaaccctaggatgcgtcactaatggacccaacttgatacacgacccattgggccaaaatagggtcacgcagcaccatgggcagaaaaggcaggaaatgtctcgggggctgagagccgccgtcgtcaccgagtgtgcggggcgccatcattgcctatctggtggagcgagccagatgggacgccggtcttgtttcccgtggcccgagtcaactcggggtagggcgatgatggtgcctcctgttgacgtggccggtctgcgccctaggttgggcgatgtggaagctcctccgaagccgaggtcgagtctgccttccgtggccgaggtcgagtccgagcccttggtcgggcgaggcggagaccgtcggctgaggccagggctgagtccgggccttggggtcgggcgaagcggagttcgtcatcttctgggggctgagcccgagtccgagccctag

SEQ ID NO: 40095 - DNA, 330 bp, Zea mays
  Peptide Sequence Number=SeqID_81874
atgagcaagaacacaagagacacaagatttatcccgaggttcggtcacaccaccaaggtgccctacttcctcgttgaggcgcccacaaagagccgggtctctttcaaccctaatcctccctttgccgaccacaaaggtcaagcccacacaataatctttactcaaacgagcagatttctctccaaagatttgaaatgggagaggcaagaggtgtgtgagagagagtgggaggtgtttctcaggttagaaatggagttttgtgcgtgctctgccgtggggaagagtgtgggaggtgtatataaaggtgccccaaaagctggtggccgttag

SEQ ID NO: 40096 - DNA, 351 bp, Zea mays
  Peptide Sequence Number=SeqID_81875
atggagttttgtgcgtgctctaccgtggggaagagtgtgggaggtgtatataaaggtgccccaaaagctggtggtcgttggggaaatctgactgaaattcggttgaaccggtttcaaattcggttgaaccggattccaccagtcgattttcggttcactggcggactcagccggagactggaccggactcaaattcggttgaaccggtttcaaattcggttgaaccagattcaaaattcggttgaaccggttttccaaaaaaaactgcacatgactttttctaacaggactgactggcagactggcagtgacagaggggaacagtgcagaaaccggttgaaccggttttag

SEQ ID NO: 40097 - DNA, 354 bp, Zea mays
  Peptide Sequence Number=SeqID_81876
atggaatttcacctgctctgctcgccgtcgccggccccaggccttcgctcttcgctgccccaagccctccgcgtcccgccgtcacccgcccgcgccgcgatgctggcgtgggccgaagcggcgctcgtgctcacctcgccatcccccacaaccgtctcctcgaccatgtcgccatttggcgtcaggccgctcgtcgccgtggagtccggcaggctcttctgcaaggtggcttctcccctcctctgcctcctgccatttcctattctgtgcgagggagtcgggcgagagaggagggggccggttgcggctcgcgaagacgaggggagtgggaggcggttgatgggaagggagtag

SEQ ID NO: 40098 - DNA, 474 bp, Zea mays
  Peptide Sequence Number=SeqID_81877
atggaacaggccaattatatctttcatctgaagtgtgcgccactgctccgtacgcttacgccaaaacggctgtctgctcacaagtaccgcatcggcatcgcagtcgcgactgccagaacccaaacagccgatggaatttcacctgctctgctcgccgtcgccggccccaggccttcgctcttcgctgccccaaggctccgcgtcccgccgtcacccgcccgcgccgcgatgctggcgtgggccgaagcggcgctcgtgctcgcctcgccatcccccacaaccgtctcctcgaccatgtcgccatttggcgtcaggccgctcgtcgccgtggagtccggcaggctcttctgcaaggtggcttctcccctcctctgcctcctgccatttcctattctgtgcgagggagtcgggcgagagaggagggggccggttgcggctcgcgaagacgaggggagtgggaggcggttgatgtga

SEQ ID NO: 40099 - DNA, 306 bp, Zea mays
  Peptide Sequence Number=SeqID_81878
atgccgatgcggtacttgtatgctcctcttgatagttgtcttttcacaactgccattaccacttcagatgaaagatataattggcctgttccatggcctgaaagacttgatgttagctatgcaagtttacctgatgattctgcttctaacaaagagaagtttgaagctgatacaaagtattggaaacagctcatttcagaagtttgtgatttcactggtgatgcttttcaaagggaagaacgggaacgatggctgccattggtgccactacctgaactgcgtgccaacatccaagtggaagtgtaa

SEQ ID NO: 40100 - DNA, 513 bp, Zea mays
  Peptide Sequence Number=SeqID_81879
atggagaccagcagtgcgcccaccgccgccaccgaggccggctggaggcagaggaggggagaagccaccttgcagaagagcctgccggactccacggcgacgagcggcctgacgccaaatggcgacatggtcgaggagacggttgtgggggatggcgaggtgagcacgagcgccgcttcggcccacgccagcatcgcggcgcgggcgggtgacggcgggacgcggagggcttggggcagcgaagagcgaaggcctggggccggcgacggcgagcagagcaggtatgctcctcttgatagttgtcttttcacaactgccattaccacttcagatgaaagatataattggcctgttccatggcctgaaagacttgatgttagctatgcaagtgtacctgatgattctgcttctaacaaagagaagtttgaagttgatacaaagtattggaaacagctcatttcagaagtatatttcagtgacttcccatttaattggtcaagcatcgcaatgtaa

SEQ ID NO: 40101 - DNA, 303 bp, Zea mays
  Peptide Sequence Number=SeqID_81880
atggaggccaagtcacaccagcaaccaatcaacctaatgagtacctgcaaaaattatgccacaagcaaggctgagtatactaatactcagctagacttacccggttacaatggatcaagcagtctcattagctgcgagaagcagacgattcgaatcgagtttttatccttgcaagtgaccacacttgtacccaccataaccggaatgggagacctcgtctcaggtcgcgtgaggagggcaatctgcgggcaggttcactcaggtatccgcacgttaatccttattccattttccatctcgtag

SEQ ID NO: 40102 - DNA, 384 bp, Zea mays
  Peptide Sequence Number=SeqID_81881
atggggaagcctgtcccatcactcctcatgctcctcctcagccgaggcagggtcccactcgacagtccaacccggtggcaaggtggacgaccaagttactccagcaaccatttcctcgagagaacctgtaaaaattatgccacaagcaaggctgagtatactaatactcagctagacttacccggttacaatgggtcaagcagtctcattagctgcgagaagcagacgattcgaatcgagtttttatccttgcaagtgaccgcacttgtacccaccataactggaatgggagacctcgtctcaggtcgcgtgaggagggcaagctgcgggcaggttcactcaggtatccgcacgttaatccttattccattttccatctcgtga

SEQ ID NO: 40103 - DNA, 354 bp, Zea mays
  Peptide Sequence Number=SeqID_81882
atggaggcttgggcgagctcggccatggagctcccgcgcgcagggaagaaaaagctccctgctgccgacgctgtggataagggggcgctcccatgggggccctgctcctgcgatggcgtgctgctgcatcccagggagccgagggggaagaatggcgttgttgctgggtggccatggttggagcagagagacccgcgcccatggagcagggagggcgtcgctggtggctgttgctgccgtgaagaagaagaggcagggaagaaagaaggtggcggctgggaaaaatggaggggtgggagtgcaaaattgcctccacttgcaaggagatggctcctatttatagagaggcactag

SEQ ID NO: 40104 - DNA, 330 bp, Zea mays
  Peptide Sequence Number=SeqID_81883
atggagctcccgcgcgcagggaagaaaaagctccctgctgccgacgctgtggataagggggcgctcccatgggggccctgctcctgcgatggcgtgctgctgcatcccagggagccgagggggaagaatggcgctgttgctgggtggccatggttggagcagagagacccgcgcccatggagcagggagggcgtcgctggtggctgttgctgccgtgaagaagaagaggcagggaagaaagaaggtggcggctgggaaaaatggaggggtgggagtgcaaaattgcctccacttgcaaggagatggctcctatttatagagaggcactag

SEQ ID NO: 40105 - DNA, 1140 bp, Zea mays
  Peptide Sequence Number=SeqID_81884
atggaacggtcccggacacctgtgtgtgccatcggacttccaactaaaagggttcggagttgccacgtgtccggaccagtgccagaaggaccccggactccccaaagtaccttcgagacccccaacttggggtggtgcggagctgccacgtctacatacacttatggttgttgctccctgctcagcgcgcctgccatcctcttcggtgtgggcggtggcctcccttccacgacggcgcgccgcactcctcgacctcctccccacgagcacaacctcaaccgctccgtcagctccgccacttacgcacgcacgacctgcactacaccacgcggcgaggacggatggaagagccatggccaccagcacgatgaagctgtcgtcgtcgaagaaggcaagaagaagaacaagtccttgctccgagctcgaaacccacatcgcgtcgacgacaaggtgctagccgagttcatcaccgagctcgaccgcgactccacaaccgtccccgagttcgacgccaagctcaaggagaagggtgacgacttccccgactacttcgtccgtacgctcctcaccatcatccacgccatcctccagcctattgcttccaaccctagctctgtcactgtcgccgagggccctgctggcgcggagtcggccaaattccccgggctcgcccgccccgacgaccccgaccatgcccgcaacctccgcctcgagctcgagcgggatgctgatgcggcccctcctgctccgatgagggacgaccgcgaccgccgctgggatgggagaggccgagaccgggactacttgcctttagttgcacctcacccgtgtaatcctgtttgcttcgaatggtcagggctcgtaacagtttgtttgtgttcttatgtgagcaggcctccagctcaggtgtttctgaatgttgttacatgtaaaatccagtttctttaccctatttatttggttggaagagatccaggtgacggaagccatactcgctttcagcctcctccagcagcgctgcgaagacgaggtgctcgaggtggcttattgactgttagtgtgcatcagcaccgtcaaccttcgtgcatcccccagttcgtgtactggtactttggccgcggcagagtcgacatctggtga

SEQ ID NO: 40106 - DNA, 561 bp, Zea mays
  Peptide Sequence Number=SeqID_81885
atggctgcttactcattgtcaaagttagtttatcgggcaagatttgctattgcatgcctccagctcaggttggaagagatccaggtgacggaagccatactcgctttcggcctcctccagcagcgctacgaagacgaggtgctcgaggtggcccagcgggaccacgaactggtgatggaacctgctcaacaaccacgcacgcttgacctagcccccactggagaccctcgttgtggcctcctgagccagatcacgcctcaccttgaactgcatcgacgcctcaacctgtcggggcaaggtcacgtgccttgcagagagatatatgaggccttggaattgaggaatggtggatctaattattttggcaagggtgttcttaagagctatggatcaaatttgttggctttgaaggacaagatcagattattagctgataacttggctttgaatttggatgccagactgcatgatcttcatccagcatcttggaagttagtgaatggttgtcaaatgtggattgctgagttcttggggcccaggcagagtggtggtttgcgatga

SEQ ID NO: 40107 - DNA, 267 bp, Zea mays
  Peptide Sequence Number=SeqID_81886
atgccggggaaggcgaactgttgctacccagctaggatgcaacattccgccctctccctcgcattcgcggcgaggacggcagcgaggacctgccgctggttcgcgtcccttgagcgggaccgcgaacgagagccctccggtggccgcgtccacccgggaccatggctgctgctgcagaggtcgctggcaggtcccccgacgttcgtcgccccgcaggctcgaggttgctcatacccgcgggggacggaaccagagttccgtttgtaa

SEQ ID NO: 40108 - DNA, 273 bp, Zea mays
  Peptide Sequence Number=SeqID_81887
atgaccgtccttctcgactccttgtggccactcctgaggtctattttcaccattgacacggtggttgtccttcaagatttgcgtgggccggtcagccctaatccagtcgttgatcccatcctcgaaaagggattcaacctttcggagctgatgtcatttgaccctgccttggtgggctcgaccatcatcgatgccggtgatcaaccatcaagacaaaatgctatcttttgtaagctccattgcatcaaggacctgctcttaaccctgacttag

SEQ ID NO: 40109 - DNA, 630 bp, Zea mays
  Peptide Sequence Number=SeqID_81888
atggcggagttctattggggagaggggttgtcacgtcctcagatttgtgacactaaagggggctcgggctatttccgagtacctctccgtaaggacctgttcgttgagagaccacccaggaaaaatagtgcaactatgagggtggtatgggacgcccttggccaagatctaggtacgggcgtcgtcccatggcttttcttgagggtggagggtataggtttgggtacgtcagatggtctctacgaagtggtcatttccaacattcgcatagtgaggaccttagggaaaagctacgtagtgaaaccttgcttactcaccttggaagtgtttaagggtccgtacaacccgaggcaaaagggatcacagctcatgggtaaagttgcctttggtgcaacctatgctcagaccattgacacggtggttgtccttcaagatttgcgtgggccggtcagccctaatccagtcgttgatcccatcctcgaaaagggattcaacctttcggagctgatgtcatttgaccctgccttggtgggctcgaccatcatcgatgccggtgatcaaccatcaagacaaaatgctatcttttgtaagctccattgcatcaaggacctgctcttaaccctgacttag

SEQ ID NO: 40110 - DNA, 1278 bp, Zea mays
  Peptide Sequence Number=SeqID_81889
atggatcgtttgtttcggaccccccattggggccgaggaggccggctcccaaaagcgtcagaggactgctggtggggccgaggagttcggctcctaggcccagggcgcgcagaggcgcgccagtcctccaccaccacaaccattgggtccgccgccaccacaaccactaccacattcgggctcgccgccgccaacagcacctggggatggtgtcccctaggggtaccagcagcagcagcagcaacagtagcagcagcagaaacagtggttgccccgctttcagggtcactggaaggtccagggccccaaggcttcctccccctctgctcccaaggtcgtgcccccaccgccctcggctgctaccgccgagacagcgccatcgggcccccaggctccagctgtgggtctagctgcggcgacgccaacaccaagtggtgccgaagtggcggagggggtccctattgccccgacggctaccaaagccttaacgatggcgatgccgtcgagtacaccatcggcaatggcagaggaggccgcagctgcgcccgccgccgttatcgaggtcgacgtgggggggcgcgtctagctccaactcaccgcccactccggaggagacgaagaagcagcgccagttcctctccccaggtgttgtcccacgcccagcaggccctccaagagactaaggcggcaatcctatgggagtgggaggcacttgaggccaaacaccagcgcctcagtgactggcgcacccagctggaggagcacactaaggcagcatcccgccagttcgtcttcgagcggtctgagcttgagcgggaccataaggactacaagaaggacctccagaaggtgtttgcccaggagctggaggtgaccaagaaggagaagaggctaaccaagaaggaggtgcacttggaccagcgggaggagagggtgcagcaggggcttgatgatagagccagcagccttgccctggccgaagagaacctcaaggagaaggatgcctccctagataagcgggcggtggatctcgcctggcgggataaagaccttgccttcagggagaaaatgtttgagaggtggaataagctgctggccgaccatgagctcgaggcggaggagaaggagcgggcgctggatgtggcaccccaggtgtcagtttcgtgtaatgtcaggagatttgtccctaacttgaatgctcagcgaaaatttcctatttctcgatcgtgtctatctctgtttatcaggcttcctcatggaagttcaccgaattcgtag

SEQ ID NO: 40111 - DNA, 354 bp, Zea mays
  Peptide Sequence Number=SeqID_81890
atggggacgcaccctttcgacttcgacgcatccagcgtggaggcccaggcccacacgtcatataaccggcgcgccggttactacgtgcaaaaaactgcaccgccacttgcgccagtaccgcgccttctcgactgcggaaccggtgccgcgacccgaggcaaccctgcgcatggcccaacagtgccaaccaagcacatcggtcacggggaccggaaaggggatatttcgaaagggatccttctccgcgaaggaagcaggccccgagccctcctactgatcaggggttcgaaggctggcccctcggaagggttcgacagccgccccagagcactcgggcttcaggctcattactga

SEQ ID NO: 40112 - DNA, 1638 bp, Zea mays
  Peptide Sequence Number=SeqID_81891
atggatgacgtgtccaagtatgcgcacagcccggcgcacctcgccgtcctgcggcgcgaccacgcggcgctgcgtcgactggtggcggccctcccgcgcctgccgcgcgccggggaggtggccaccgaggaggagtccgtcgcgggggaggccgtggcggacgcggtctcggccgtcatcgaccgccgcgacgtgccgcggagggagaccccgctccacctcgccgtgcgcctccgggaccccgtcgccgccgacatcctcatgtcggccggcgccgactggtcgctgcagaacgccgacggctggtccgcgctccaggaggccgtctgcacgcgcgaggaggccatcgccaccatcatcgcgcgccactaccagccgctcgcctgggccaagtggtgccgccgcctcccgcgcatcctcgcctccatctcccgcatccgcgacttctacatggagatctccttccacttcgagtcctccgtcatcccgttcatcggccgcatcgcgccctccgacacctaccgcatctggaagcgcggcgccgcgctccggaccgacatgacgctcgctggcttcgacggcttccgcatccagcgctcggaccagacgttcctcttcctcggtgacggcgccaggcccgaggatgccgggggcaaggagctgcactcgggctcgctaatagtgctggcgcacaaggataaggagattacggatgcgctggagggggcgggggtgcagcccacagagtctgaggtggcgcatgaggtagcgctcatgtccaagaccaacatgtaccgtccggggatcgacgtcacgcaggcagagctcgtgccgcacctgaattggcgccgccaagagaggacagaagccgtcgggcaatggaaagccaaggtgtatgacatgctgaatgtcctggtcaccgtgaagtctaggcgcgtgcctggggcgatgacagacgaggagctgtttgccatggatggggaggagaagaatgggaggggcgcagagcttgatgctgagttagacgaagtgttgacagccgaggagaggaagcaacttgattctgcgcttaggatggggaacaacgaagaggaatctgaggagaggggcgacgaaggtgatgctggtgctgatcatacggatgcgagtggcgtgaccaaagataagaagggatggtttggttggggcgccaagaaaggtgccaagggcgatgacaagccatcaaaggtggggagtaaggatgaaacaagtgacccagggaagcaaaaggagaagggcagtgggaagaagaaaaagggtggctcatctgctgagtctgtaaaacatgagagcgagtacaagaaggggttaagaccagtgttgtggttgacaccggatttccctctgaagacagatgaactcatccctctgcttgatgtcctagcaaacaaagtgaaggctatcaggaggcttagggaactcttgacaaccaaacttcctacaggcacatttccagtcaagcagcctcccattcatgagcagttgagcacactgcacaccatatcagcagctggtctcacacaaaagaagacacacagacacaaagtgacacaactgcagttcataagaccagggcatcacaaaaggcttcactactag

SEQ ID NO: 40113 - DNA, 963 bp, Zea mays
  Peptide Sequence Number=SeqID_81892
atggagccggatccagtcgccgctggggcatcctcctcgccagccaggttggctctacatctgatttattcttcgtcttttttccctgctggcttcctgctctgcgagaagaagcaagtgacacagctggcgtggtgtgcgtcttcgcctcaaatgacctggcgtttggttgaatgggatttcttcctaaacctcatagcaccggtcgcttctcgagttccctacatgaccgctattggtaatcatgaaagggattatgtcgagtctggttctgtatatgtgaccccagatttaggtggcgaatgtggagttgcatatgagtcatatttctgcatgccagctattagtaaggataagccatggtattcaattgagcaagggagcgttcactttgtcgtgatgtcaactgagcataagtggtcagagatgtcggagcagtacaaatggatgaatcaagatttgtcatcagtcaatagatcgaggacaccgtggataattttcattgggcatagaccgatgtactcatcccatgtcggaataccagttaatgtagatctaacatttgtagcctccgttgagccactcttgctcaagcaccaggtggatttggttttctttggccatgtacacaactatgagaggacttgtgtagtatacaagaatagatgcaaaggcaagccaaagaaggatgcaagtggaattgatacttatgacaacaacaaatatactgcacctgttcatgccactgttagagctggaggatttagcttggacaagttccctaggattgtgttgaacaagtggagcttatcaagagtttcagaattcgggtatgccagggtgcatgccacaagaggtgatatgctggttcagtttgtaagctcaagtacgatggaggttttggaccaatttagaattgtgaagcctgatccggcaaggaggctatggaacaagccagtttaa

SEQ ID NO: 40114 - DNA, 645 bp, Zea mays
  Peptide Sequence Number=SeqID_81893
atgtccggtggtgcaccggacagtccggtgcgccagaccagaggaactaggtgtaagcctaattccctttcaaccgctattggtaatcatgaaagggattatgccgagtctggttctgtatatgtgaccccagattcaggtggcgaatgtggagttgcatatgagtcatatttccgcatgccagctgttagtaaggataagccatggtattcaattgagcaagggagcgttcactttgtcgtgatgtcaactgagcataagtggtcagagatgtcggagcaggtggatttggttttctttggccatgtacacaactatgagaggacttgtgcagtatacaagaatagatgcaaaggcaagccaaagaaggatgcaagtggaattgatacttatgacaacagcaaatatactgcacccgttcatgccactgttagagctggaggatttagcttggacaagttccctaggattgtgttgaacaagtggagcttatcaagagtttcagaattcgggtatgccagggtgcatgccacaagaggtgatatgctggttcagtttgtaagctcaagtacgatggaggttttggaccaatttagaattgtgaagcctgatccggcaaggaggctacggaacaagccagtttaa

SEQ ID NO: 40115 - DNA, 969 bp, Zea mays
  Peptide Sequence Number=SeqID_81894
atgaagagagcgcctctatgtgaagatgaagtgattttattgtcaaagagcttaaagcttgaccttgtaacgaggataagctgcctttattccaaaggtggatggtccttaagtctctttaaaatccttaagggtataaaaggttcacacttagccaataaaaagatcaagtattggattcaacaaaggaacaaagtggcaaccgaaggcacctctggtctgggggcaccggactgtccggtgtacaccggacagtgtccggtgcaccagaggaccccaactcaaacttgccaccttcgggaatttccagaggcactccgctataattcactggattgtccggtgtacaccggacagtgtcccggtgctcaaaggaagagccgcctcaggaactcgccagcctcgggaaaacgcagcggctgctccactataattcaccggactgtccggtgtacaccggactgtccggtgcaactccggagcaacggctacttcgcgccaacgactacctgcagcgcatttaatgcgcgtcagaagcgcgcagaagtcaggctcgcgcgcactggcacaccggacattgaacagtacatgtccggtgtgcaccggacatccaggcgggcccagaagtcagaagctccagcggtcgaatcccaacggcctggtgacgtggctggcgcaccggacatgtccggtgtgcaccggactgtccgattcacgtggtctgtgataactctccttcgattaattcaccctgatggtgatttgtctcacgaagaggttcatcttaatgatgaagttcctagcaatgcgcgcaatatcattgtgctgggaatacggaacaatgaatctttcgtttttgggaaacgacggagatcattattaaatgtgggagacaaatatgtcgacacctatcttgccgctctagattgcaaatggatccaaaacaaagttctaggcatgagtgcttga

SEQ ID NO: 40116 - DNA, 360 bp, Zea mays
  Peptide Sequence Number=SeqID_81895
atggctagtaccttagcaacacgaagttgcgagtacatcgaaagaaataagaagagtagaaaaatagccatgaaatcccacatcaccacaaagcttgaagctaaattgggcattaatatgtccttggtccttggcaccagaagagccataagtcttgaccacgagattgttcatcttaatgatgaagttcctagcaatgcgcgcaatatcattgtgctggaaatacggaacaatgaatctttcgtttttgggaaacgacggagatcattattaattgtgggagacaaatatgtcgacacctatcttgccgctctagattgcaaatggatccaaaacaaagtcctaggcatgagtgcttga

SEQ ID NO: 40117 - DNA, 393 bp, Zea mays
  Peptide Sequence Number=SeqID_81896
atgtccggtgcaccagggggactcagccttaaactctccaccttcgggaattcccagaggagactcggctataattcaccggactgtccggtgtacaccggactgtccggtgtacaccggacagtgtccggtgcgccaagggagatcggcctcgggaactcgccagcttcgggaaacgccaacggctcgtccgctaaaattcaccggactgtccggttcgtcaaggttggtgaggcagagtgcccctgtggcggtagcgaagaagtcgagagcgtcgaacttgatgcggctcctagggtgaacgttgatgaaccggccataggagtgaaggatgtcgcttggcacgctaacgatccccctggcgcgccaactgtcgtggttttcgaaacctga

SEQ ID NO: 40118 - DNA, 637 bp, Zea mays
  Peptide Sequence Number=SeqID_81897
atgtccggtgcaccagggggactcagccttaaactctccaccttcgggaattcccagaggagactcggctataattcaccggactgtccggtgtacaccggactgtccggtgtacaccggacagtgtccggtgcgccaagggagatcggcctcgggaactcgccagcttcgggaaacgccaacggctcgtccgctaaaattcaccggactgtccggtgtgcaccggactgtccggtgtgccagcggagcaacggtcatctgcgcgcaacggtcgactctgcaaagtgtacagttgaattcagagtgtcagagcagaagtcagaggtttcgcctatccaccccccctctaggcgactttcaattggtatcagaggaacaaatgatgatacatatcaaaagctcaaagaagaaaatgagaggctaaagatgagcttgacacaacttaaagggaaatgcatcgctcaaccttctcaagataaccgtgatcacatggtgaagaagcttgagacgggaacaaccgtggcatgcactacatcccttgaagaaaatgtcaaggatttgaggattgccaagaggaagaaacaaaagatgaaattcaacacctcctccaaaagcctcaaccacgccttcacaaaag

SEQ ID NO: 40119 - DNA, 1035 bp, Zea mays
  Peptide Sequence Number=SeqID_81898
atggaaggtcatccgcgcccgcaatccgccgctggaaggtgctcgccgatggtaggttatcaggtccgtcaatggaaggcagacctccctttcatggaccttccatccgccctcaagaattccagacgccacggtatcccgcactgcctgcagccgctgcggggcgtcctctcccgcgctgcaggaagtaatccgcctcccttcgcgctacctgcagccgcacgctccttcgacggcgggatcccgcaccctcgaatcccgccagcgtccagcgatggcgctccttccttcgacggccagccccgcagcggctcccctcgaatcccgcacgcgcgccaactatggaaggggcgtccctcgcatcccgcccgcagcggatccctcaaatcccatcaacagcggctcccatccccgctcacattccaaattcggctcccatttcgatttcgctgctataaggcctccaaactaccaccgcgctactccgattttgctggagtcgcgagacgttgcaggcccttcgacgttcgaccctcatcttcaatctcctccaaagaggaaaaggttgggaaggcctgcaggaggaatgattatttctcagtgaaagtaaaatctgtggatggtttccaaggcgcggaggaagatataattaccatatcaacagtcaggagtaatggagctggcggacaatttagctggcgaggagacaaggcagcgattgagtaccaggatgaggttttgaaagaggcgtctgatttacagcctagcactggggacgctgccagtgtagacatacataatgtattagacttacgggcacctgttattgtcaaggttcgaagcagcctctacgcatttgctaagggaagctgcagataccttaatgaaggcagtgacggtgacaatgctccagaaacaagcagtgatgtaagcaatgagagtgacaatgacaatgacaatggaagggaacctccccctgttttccaatatatggagcatgatgcaccatatggaagacaaccattagcagatatg

SEQ ID NO: 40120 - DNA, 648 bp, Zea mays
  Peptide Sequence Number=SeqID_81899
atgtcgggcagcactgtagcaccctccgcgacgcggtcgtggtccatggccgcgcagctccgggaagtggctcacgttttttatttcatacatgtaagataccttaatgaaggcagtgacggtgacaatgctccagaaacaagcagtgatgtaagcaatgagagtgacaatgacaatggaaggtctattggaagaacaacccaatgtttagcacaaaatatttgcaccgatcaagaaaggttgtccagtgatgactgtgattccagtaaccaggaacctccccctgttttccaatatatggagcatgatgcaccatatggaagacaaccattagcagatatgatttcagtatttgcatgtaagtttcctgatctaaatacatacaagagctgtgatcttctcccgtccagttggatctctgtagcctgggtatcccatataccggataccaacaggacctacgctacaagatctagatgcttgcttttaacattccattcactgtcaacaacacctgacgacctgacacacacatttctcttcactttccgtttgcgcagaggcgttccggcaccaccaccttcccggactgggaaggagaggaaggttgccgtgaagctgtcgaggttccaaacagcaaccgcttga

SEQ ID NO: 40121 - DNA, 123 bp, Zea mays
  Peptide Sequence Number=SeqID_81900
atggcgcctaggatcaggtctaagcacgtcatgagaggccttccggcaccaccaccttcccggactgggaaggagaggaaggctgccgtgaagctgtcgaggttccaaacagcagccgcttga

SEQ ID NO: 40122 - DNA, 341 bp, Zea mays
  Peptide Sequence Number=SeqID_81901
atgatccccttgctagcaccaccccagtccccacccagcagctggctccgccgggtcgccttccttctcatcctctcgctacacaaccaaaccagcaagaggccttccggcaccaccaccttctcggactgggaaggagaggaaggttgtcgtgaagctgtcgaggttccaaacagcaggcgcttgagctcgtgcagaatcagggaggaaactgttgttaccggtcatcgtcaccacggcggtacatctcccacgcccgtgcggtttgacggcgcctacttcgcctcgctgctgcgcaacatggagtcctccacttggaccagcagctgttcgacgccctc

SEQ ID NO: 40123 - DNA, 321 bp, Zea mays
  Peptide Sequence Number=SeqID_81902
atggcggagaactggctctgcgctgcccgcatcaatcttgaagagttcgaaagtttccagacccccaaaaggcgaagcggcgatgagttccaccggaggcggcggccgcgagcgcgtcggcgctgggcccccgtgtacctctccaccgttctcgagtatctcgccgccgagctggcggtgcggaacgacgaggagctgagcaagctgctgggcactgtgacgatcgcggctggcggcgtgatgccaaacatccatcagaccctgctgcccaagaaagctggtcagaagggggacatcggctctgcctcccaggagttctaa

SEQ ID NO: 40124 - DNA, 570 bp, Zea mays
  Peptide Sequence Number=SeqID_81903
atgaatgctatggtaacttcacacatacccgtctgtttatatagtgtcgcaggtgggaaggtgaatcgtcaaggtcttccgcaccgaacaaacagtcacccgcactcactgaacggtgagccacagggtccgagaagtctcatcacgaaggtgccgcccgctcctccctccaatatccctctgttctcctatcaatatcgcagcgccgcccgcatcaatcttgaagagttcgaaagtttccagacccccaaaaggcgaagcggcgatgagttccaccggaggcggcggccgcgagcgcgtcggcgctgggcccccgtgtacctctccaccgttctcgagtatctcgtcgccgaggtgctggagctggccgggaacgctgctcgtgacaacaagaaccgtatcgtgatgcgccagatccagctggcggtgcggaacgacgaggagctgagcaagctgatgggcactgtgacgatcgcggctagcggcgtgatgccagacatccatcagaccctgctgcccaagaaagctggtcagaagggggacatcggctctgcctcccaggagttctaa

SEQ ID NO: 40125 - DNA, 198 bp, Zea mays
  Peptide Sequence Number=SeqID_81904
atgtcttcttcctccctcatgcgtcgtgtctttccatcttccaagcccccggatgggggccccggccgcacccctccaccggtggtcacccgggatggcgacctccggttcgatggtggaggaagcgagccaggctacgacctctacccctccctcggcctcaaggattttcgtcatccaggccaagatgaaggatga

SEQ ID NO: 40126 - DNA, 348 bp, Zea mays
  Peptide Sequence Number=SeqID_81905
atggggagtagctctctccgggcagaatgggaatcacggcttgtgggtggttatgagatcgatgattctggttatgactatgatgctgctagtccactacagccaaacaggatacttgctgagtatgttgatgtgtactcacccttgctctacacaccaaaccccccccatccccaggttgtcagcattgcaaccactgctcaggcgaagatgaagccgtggaaggagacttccaggagttccaagactacgacgagttctaggtgtgggttagcggcaacccccagtcggctgcctgtgaaggccgcggttatctacgtttcttttccgcactttgatttattgtaa

SEQ ID NO: 40127 - DNA, 336 bp, Zea mays
  Peptide Sequence Number=SeqID_81906
atggggagtagctctctccgggcagaatgggaatcacggcttgtgggtggttatgagatcgatgattctggttatgactatgatgctgctagtccactacagccaaacaggatacttgctgagtatgttgatgtgtactcacccttgctctacacaccaaacccccccccccaggttgtcagcattgcaaccactgctcaggcgaagatgaagctgtggaaggagacttccaggagttccaagactacgacgagttctaggtgtgggttagcggcaacccccagtcggctgcctgtgaaggcccgcggttatctacgtttcttttccgcactttga

SEQ ID NO: 40128 - DNA, 348 bp, Zea mays
  Peptide Sequence Number=SeqID_81907
atggggagtagctctctccgggcagaatgggaatcacggcttgtgggtggttatgagattgttgattctggttatgactatgatgctgctagtccactacagccaaacaggatgcttgctgagtatgttgatgtgtactcacccttgctctacacaccaaaccccccccatccccaggttgtcagcattgcaaccactgctcaggcgaagatgaagctgtggaaggagacttccaggagttccaagattacgacgagttctaggtgtgggttagcggcaacccccagtcggctgcctgtgaaggccgcggttatctacgtttcttttccgcactttgatttattgtaa

SEQ ID NO: 40129 - DNA, 1323 bp, Zea mays
  Peptide Sequence Number=SeqID_81908
atggggagtagctctctccgggcagaatgggaatcacggcttgtgggtggttatgagatcgatgattctggttgtgactatgatgctgctagtccactacagccaaacaggatacttgctgagtatgttgatgtgtactcacccttgctctacacaccaaaccccccccatccccaggttgtcagcattgcaaccactgctcaggagaagatgaagctgtggaaggagacttccaggagttccaagattacgacgagttctaggtgtgggttagcggcaacccccagttggctgcctgtgaaggccgcgatggctcgacttagacacactgcacgaaagtcagtcatccccttcttaccctcccgccttgctgagcgtccgcttcgccgtcccgtggccggacagtccagccacttggagagactacaccaccgcctgcgtgaggagcaggagcgtcgacgacaggagcagcagggctcttccttctcgctccaccaggagatcgagtctgtgaggagctgctcccctgtgcttcctctggagccgccccctgcaccaccactgggcgccccagcttctggagtagctgctggaggagacccagacgacggaggtggcgacgacagctcgagccacgacaccgacttctctgctaaccctgagccggaaggatgggttgctcgacccatcactcgcgacgctgctcgcgggtgtcacttccatgatgcgctcgacaccctgctacgtcgggcatttgaccggcatacttggtccgtcgagtatcgctgtgtggtctaccagcatagtcgcggggtctacccggaccgctgggaggcgacttgcttggtgcgctacccggagaacagtctccagggtgcggaggcctgttcagagcactattctatctctaaacaggactcagctgaggcagccatgcaagatgctgcacggcgtgcgctttcgcactactgctcggttttcggtggggcagctgatggtcttgacctgaagtattacccccgccgtccatctggcagcacaggaggcgtgattgtctcacctgtcggtgagggcaatcctaggttgagcagcacagtcaacctagccgccgtgctaaacacggagctggaccatgcattagatgagctgagtagggctcgtgctgagatcgccctgctgcgggctgagcgcgcggaacgtcgtcatttggatggtggttcccccgctcccgtcgggactcagcacccgtaccgctcacctcagcgtggacaccagtcttatggcaatcccgcctgcaagaccaagataactctagaaccatag

SEQ ID NO: 40130 - DNA, 534 bp, Zea mays
  Peptide Sequence Number=SeqID_81909
atgacaatacgagcgcgacgcaaaaagcgaatgccaagtcagcgtgtacagtacggggatactgttcacctatttatagacacgggacacagcccttacaaaattacattcatgccctttacatttgataataactctatagtagtctatcgaggaccttcggacgccgaaggtccccaacagcgcgctgaggttgatcttgccatcaagcgtgccaccgacaaggagttggagctgaaaagcctgtgcaactactgcgagaaaaccgaggcctccacccgctctggtatcgagcaggcacacatgttgttcgtggatgcgtatcgcgagctcggcgcacagaccactccttttgacagatctagggcggagatgatgaatgaagaagttgatgacctcgccggtcttgagagctcgatgactcggatgggtggcatggaagaggtgggagttgaagggcactcagcacctaaggctggttccggtgaagacccggcagcgtctacttcggcgcaggttgaagaaatgcgctag

SEQ ID NO: 40131 - DNA, 453 bp, Zea mays
  Peptide Sequence Number=SeqID_81910
atgccgactttagtccgagggtacctgttcacacattgtactacagaaatactgttaaatcctgtttttgaggaccttcggacgccgaaggtcccccaacagcgcgctgaggttgatcttgccatcaagcgtgccaccgacaaggagttggagctgaaaagcctgtgcaactactgcgagaaaaccgaggcctccacccgctctggtatcgagcaggcacacatgttgttcgtggatgcgtatcgcgagctcggcgcacagaccactccttttgacagatctagggcggagatgatgaatgaagaagttgatgacctcgccggtcttgagagctcgatgactcggatgggtggcatggaagaggtgggagttgaagggcactcagcacctaaggctggttccggtgaagacccggcagcgtctacttcggcgcaggttgaagaaatgcgctag

SEQ ID NO: 40132 - DNA, 169 bp, Zea mays
  Peptide Sequence Number=SeqID_81911
gtgctacgcggcagcggggtgcgacaaggggagggggcttggtgttgccggcgatgatggtggcggtgggtgcgctgcaaagggggcatggggcggtggtagcttcaagggtaagcttctcggtatcttcttgggtaaggcacttttctcttcagatgggttaagatga

SEQ ID NO: 40133 - DNA, 291 bp, Zea mays
  Peptide Sequence Number=SeqID_81912
atggaggggggcggtgttgccgacgatgatgggggcggtgggtgcgctgcaaagggggcatggggcggtggtagtgtgcacggaggcggggcacgcgtgcggggggcacgggttagtggcggggtcaatgaccctgatgtttgtggtctctggttccaagaatctttgtctctctgtatgcttattccaggcttcaagggtaagcttcccgatatcttcttgggtaagggcttcaacaacaatgacttcatgactttccaaggtagttgcatggggcttgagctatggtga

SEQ ID NO: 40134 - DNA, 351 bp, Zea mays
  Peptide Sequence Number=SeqID_81913
atgggaaggtgccggagccctgtatatacggtctgggcctccaagtttggtccaggacctccacgtgtgcgaactggacccctgaaatgggattcggaccccctgtatggggtctgggccacccatagtggggtcccagggttcctggacagaacatacccgggccttaatcaggacccaggcggagatttgagtcttgtgtgtgttgctctccccaaccttactctgtgctttctttgtgatctcaattgtaagggcaagagactccaaattgtggagatttctcgcaaacgggaaaaatactctaaaggaaaagaccgtgacattcaaattgatcatttgatcacttga

SEQ ID NO: 40135 - DNA, 195 bp, Zea mays
  Peptide Sequence Number=SeqID_81914
atggcgccttacacttcacatgaactcgcaccttcgtttgaccatttccggcatttgcatattgaggactctagggaaaagcctcgtagtgagaccctagccattcacctcggaagtgaatatgggtctgatcaacctaggctagaagggaatcgcgactcatgggtaaagatgtgccacctctgcagagtgtaa

SEQ ID NO: 40136 - DNA, 489 bp, Zea mays
  Peptide Sequence Number=SeqID_81915
atgcagtttgaccatttccagcatttgcatattgaggactctagggaaaagcctcgtagtgagaccctagccattcacctcggaagtgaatacgagtctgatcaacctaggctagaagggaatcgcgactcatggatggtttgtacccttcaaactacccgagtcaacgccaactacgctcctctgccacgacaaattcctgtctacccaatggtagtagaggaagttccgatggatctccctcgcattcgagtggagcatggagtcatcctggaggatagttcagaggaacttctgccgacgcccaccccgttggcagagtcactggccttcgcagctaggtcatcaacctcggcaccgcctgcaccagccgttcaagctcctgcacccggaggcgacgacccagatgactctggggacgatgatgaggatgacaacgatgacgatgatgacgaggaacacgtcaacaaggaggccaactatgcctag

SEQ ID NO: 40137 - DNA, 694 bp, Zea mays
  Peptide Sequence Number=SeqID_81916
tgatacctcggttggcgtcgcacatgatgccttcaacacgttcttcagcaagactggttccggcaagcatgtgcccagggccatcttcatcgaccatgagccctctgtcatcgacgaggttcgcactggctcgtaccgccagctcttccacctagagcagctcatctcggggaaggaggacgcagctaacaactttgctcgtggccactacacggttgggaaggagattgtcgatctatgcctggaccgtgtgcgcaacagcgacaaacaaatgtactcatcagaaggcagagcaccattcggcaattgctactgtcttcgtgtggcgcaacagcgacaaacaaatacacagccgacaattgctactgtcttcgtgtggcgcaacagcgacaaacaaatgtactcatcagaaggcagagcaccattcgacgaagagatcatcttgctccaacctccgcgaaaggacctcggggacggcgtcgggcgccggtggcaggaaaagtttctgctggggtccctgataggttcaacgtcgttcgtccgcttcttcagttctgtcactaatgtccatgctgctgctcgtccgcaggatgagaagaagaagcgcagagctcagtattctactgctgttaagagaaaggaggcagaacaaacagaaaggaagatggctgctgtggcaagagagcgggcatga

SEQ ID NO: 40138 - DNA, 711 bp, Zea mays
  Peptide Sequence Number=SeqID_81917
atgagagactcttttttggtgaatggtgttgcattcaagaagacgttttcatatgcaggatttgagcaacaaccaaagaagtgtggatggcttcagtttgcgctttgcctatatgaacataagccacttctacccgaacctgaaaacaatccaagctactcttggttctgtagggaccgagattctggatacctcactcccttgattcagaatgactccactgagtcattgctccgttggcaatgtcagcctgtttcacatcggaactacaggaccacccgagaaatccagataagaaggttccagggctcggcgaggaagtatgccgattacattccagtggaaacagctccatctgtcaatggggaaaacgaatctccaaggagcttgggcgatgctacagagcgagatgaagatggaggtagtgtggcagctgatgctttgctaactttagtgaactcagagggccaggcggctgggagccagaataatgttgagcaggccagttccaaaataaccgatgatcgccgtgttcttagtgccatgattgggattgttgatcctaaattcaggaagcaaatgtccaggagcggagctggaaacgaggagtcgatgtctgacgctgagacggatgaaggcgtcgaggaaggtgattcagattcaggttcagatggcagcgacagcgaggaggcccgtgcgttgtgtacctga

SEQ ID NO: 40139 - DNA, 513 bp, Zea mays
  Peptide Sequence Number=SeqID_81918
atggacccatggcagcggcggtttcgcgcacctcaaagacatgggtggggaggcatcgcggctgctgcacgccctctggagaatgcttatcgatcatcaggtgcccgttacattctaaggaagtatgccgattacattccagtggaaacagctccatctgtcaatggggaaaacgaatctccaaggagcttgggcgatgctacagagcgagatgaagatggaggtagtgtggcagctgatgctttgctaactttagtgaactcagagggccaggcggctgggagccagaataatgttgagcaggccagttccaaaataaccgatgatcgccgtgttcttagtgccatgattgggattgttgatcctaaattcaggaagcaaatgtccaggagcggagctggaaacgaggagtcgatgtctgacgctgagacggatgaaggcgtcgaggaaggtgattcagattcaggttcagatggcagcgacagcgaggaggcccgtgcgttgtgtacctga

SEQ ID NO: 40140 - DNA, 312 bp, Zea mays
  Peptide Sequence Number=SeqID_81919
gtgacggagaacaaggattttatagaaaggaaaagagaggttgtatccttttcaccaaatgataaggcgtcagttgatagcttccttcagggagaaaaacactttaaaataccaagggaatttctgagagacatctcacatctggaatcggttggtttccaagtgagggccacgaagaaccacatcaatgtagaacattttagtgcagatatacgccgaggcagctattgtgtaacctctagtgagactgattcctacgagtcctcgagtgctcaacaattttgtacgattgtaaccttaattccgaagtga

SEQ ID NO: 40141 - DNA, 1041 bp, Zea mays
  Peptide Sequence Number=SeqID_81920
atgaatcagcttgattcgttcatagaccctgaatttgcaaattttctcgaaaaatggcagtcggagttggagagctccagaagtaaaggagattctgatgaagagggtatggattctatggatgatgacgatgactccaatgatgggaatttaccaaatgctaaggtccttacaagaaagacgataagtgaatggtgccagttagtgtcaaaggaacctaaagcacctgccttgcgtaatctactaaatgcttttcgagatgcttgtcgatatggtgttcactctgatgggcccttgatgcagagatttcaaagtgccagggtgttttatcaaataataatgtttgttctttctgagtcggacaacattttccgtgctcttttggaaattcaagatgacgttaacaaaggaaaaattatgaacctgagaaattcaaagaaatggctaactgttgattctctcataaagtcctacttatcaagttctcttgatcttcttagtcaacttacagacaacaagatacttgcctttgttttgactcgggtgagggtatcagtggtccttttttctgcatatccatcaacatcaagtaggcttgtcaagaaatcatatgagagggcaataatctccgtggagcaactgaatgctattcttagacaggcttctaaaaccaaggaaaaggaagatctcaggaagatagataactggcaatatattagttgtgtcaacctatgggttcggtttctgtgttgtcactataaggattacaatctccatcccttattttctcaagttcttcaagtaataagaggagtggctcacttattcccaggcacaaggtacttaccgttgagactgaagcttgtgcagatgctgaacgagctttccacttgcagtcagatgttctatccaattccatcgttgctctttgactgcctagaattaagagaagtttctcagaaagaacaaacacaaagaacaaagatcaacttttcgtcgttgttgaaggtatgccacttttactggaaacaatttgggtga

SEQ ID NO: 40142 - DNA, 390 bp, Zea mays
  Peptide Sequence Number=SeqID_81921
atggcgaagaagctagggaagaaggcgcgcaagttcgcgcgcaagaacctgcaggttaccgacgatgctgctgctactttgatccacggtttggagtttccagaggacgatgctgaactagatgctgatctgtctgacagtgatggttatctttctgaggatcctggatgtccatactattctgacagtgaggatgagaaagctgccaaagattgtatcatggaagaaggtttggacagacagaatgatgacatgaatcgagatatcaagaagcaaaagaaaaagttgaagaagttgctggataaggttaaacttctgttcaccaaaagacctggcatgctcattttaaattatcaatgttcttacaattacaggctgtctgctcaatag

SEQ ID NO: 40143 - DNA, 1854 bp, Zea mays
  Peptide Sequence Number=SeqID_81922
atgaaggatgaagtctggagtccgtcggtgaactggattcgcgcgtgctggaagcctggaactcgagattggattcccacgtgctggattggaagtctggaggggagcagtggactcaagaacagccgccgagcaggcatatatcagtacctagcagctgggtcactacctgttataaccgactgtttgattcatgatatgcaggatcctggatgtccatactattctgacagtgaggatgagaaagctgccaaagattgtatcatggaagaaggtttggacagacagaatgatgacatgaatcgagatatcaagaagcaaaagaaaaagttgaagaagttgctggataaggaccctgaatttgcaaattttctcgaaaaatggcagtcggagttggagagctccagaagtaaaggagattctgatgaagagggtatggattctatggatgatgacgatgactccaatgatgggaatttaccaaatgctaaggtccttacaagaaagacgataagtgaatggtgccagttagtgtcaaaggaacctaaagcacctgccttgcgtaatctactaaatgcttttcgagatgcttgtcgatatggtgttcactctgatgggcccttgatgcagagatttcaaagtgccagggtgttttatcaaataataatgtttgttctttctgagtcggacaacattttccgtgctcttttggaaattcaagatgacgttaacaaaggaaaaattatgaacctgagaaattcaaagaaatggctaactgttgattctctcataaagtcctacttatcaagttctcttgatcttcttagtcaacttacagacaacaagatacttgcctttgttttgactcggttgagggtatcagtggtccttttttctgcatatccatcaacatcaagtaggcttgtcaagaaatcatatgagagggcaataatctccgtggagcaactgaatgctattcttagacaggcttctaaaaccaaggaaaaggaagatctcaggaagatagataactggcaatatattagttgtgtcaacctatgggttcggtttctgtgttgtcactataaggattacaatctccatcccttattttctcaagttcttcaagtaataagaggagtggctcacttattcccaggcacaaggtacttaccgttgagactgaagcttgtgcagatgctgaacgagctttccacttgcagtcagatgttctatccaattccatcgttgctctttgactgcctagaattaagagaagtttctcagaaagaacaaacacaaagaacaaagatcaacttttcgtcgttgttgaaggtgccaaagaacctgctgaaatcaagggattttcaagaggagtgtattctttcagcgattcagattctatcagcacattttgcccagtggagttaccatgtttccttcccagaagtagccaccattcctcttgtcctcttgaagaggctacatgagcagacaacagtcgaatcacttcgccgtcctattaagcgtttgatagaccaggtgacggagaacaaggattttatagaaaggaaaagagaggttgtatccttttcaccaaatgataaggcgtcagttgatagcttccttcagggagaaaaacactttaaaataccaagggaatttctgagagacatctcacatctggaatcggttggtttccaagtgagggccacgaagaaccacatcaatgtagaacattttagtgcagatatacgccgaggcagctattgtgtaacctctagtgagactgattcctacgagtcctcgagtgctcaacaattttgtacgattgtaaccttaattccgaagtga

SEQ ID NO: 40144 - DNA, 276 bp, Zea mays
  Peptide Sequence Number=SeqID_81923
atgatgccttcagaagaaataaaggactaccttgtagcggtggatgcttatacacagaccagatctaggcgaaagtctgctacagggaagtctgttacaggcgcggacggtccgcggcccagggccggacggtccgcgacctggcgcgaggcggcggtgctctctggtcaggcgcagacggtccacggcgcagggccggacggggcggcggaagattgccggcggcgcctggatctcgctcccgggagggaccccgtcggggaggagagatcctag

SEQ ID NO: 40145 - DNA, 237 bp, Zea mays
  Peptide Sequence Number=SeqID_81924
atgtcggacgaccttgttgttcctgtccactttgaagttggccaagaactttgctttcgcctcttggatcatctgctccttgtgctcctcaaactggagctattcgtcagccggcaaggcgcggatggtctgcggcacagggccggacggttcgcgacctggcgcgaggcggcggtgctctctggtcaggcgcggacggtccacgacctggtgcaggagctcgggttccctgcctga

SEQ ID NO: 40146 - DNA, 306 bp, Zea mays
  Peptide Sequence Number=SeqID_81925
atgcagattattgaaagaaagtgtgaggctcaaaagggtgctggggtaaggtctaacctgaatttttatgtggttttgtggactgtaggagaaaaaaaaacactcgataaactcaccgatcaacctagaaatctgataccacttgatataattgaggtgcccgatctttcgatgagtggagataattccgatttggcagaagatgacccttgcgatccaactacgacaagcaaacctgaggtgccaatgcaatcgctgaaccaactccctgtggttaccgaccttgctgatgcgagattggtctga

SEQ ID NO: 40147 - DNA, 513 bp, Zea mays
  Peptide Sequence Number=SeqID_81926
atgcagattattgaaagaaagtgtgaggctcaaaagggtgctggggtaaggtctaacctgaatttttatgtggttttgtggactgtaggagaaaaaaaaacactcgataaactcaccgatcaacctagaaatctgataccacttgatataattgaggtgcccgatctttcgatgagtggagataattccgatttggcagaagatgacccttgcgatccaactacgacaagcaaacctgaggtgccaatgcaatcgctgaaccaactccctgtggttaccgaccttgctgatgcgagattggaaaaaacacttgataaactcaccgatcaacctggatatctaataccacttgatatagttgaggtgcccgatctttcggtgagtggagataattctgatttggcggaagatgacccttgcgatccgactaagacgagcaagcccgaggcgccaatgcaatcactgaaccaactccctttcgttaccgaccttgctgatgtgagatcggtctga

SEQ ID NO: 40148 - DNA, 345 bp, Zea mays
  Peptide Sequence Number=SeqID_81927
atggcggcacaaggggcaggaagggcggtttcctcttctctggctaagtctctcgggttgcgaaaacctaagagggaggcaggaagcggagcaaagaaccgtcaccagaccctctcccggggaccgggaaagggggataccccgaaaaggatccttccccgtgaaggaaccaggctccgagcctccctactgatcagaggttcgaaggctggccccccaaagggttcgacagccgcctcagatcgcgtgggccctacacccactactggtcagaggttcgaaggccggccccccgaagggttccacggccgcctcaggctactcgggctccgcgcccattactga

SEQ ID NO: 40149 - DNA, 750 bp, Zea mays
  Peptide Sequence Number=SeqID_81928
atggcggcgcaaggggcaggaagggcggttttctcttctctggctaagtctctcgggttgcaaaaacctaagagggaggcaggaagcggagcaaagaaccgtcaccagaccctctcccggggaccgggaaagggggataccccgaaaaggatccttccccgtgaaggaaccaggctccgagcctccctactgatcagaggttcgaaggctggcccccccgaagggttcgacagccgcctcagatcgcgtgggccctacacccactactggtcagaggttcgaaggccggccccccgaagggttccacggccgcctcaggctactcgggctccgcgcccattactgatcaggggttcgaaggctggcccccgaagggttcacagtcgcctcagacgccgagcgagggatgaccatgggtacgttcgatacataaccaaggctcgggctgcgctcccgagctcaccggagacaccatgttcggcgcccatcgagggcaacatggcgctttcccccctcctccttgcggaaaggcgacgcaggggcgtatgtaaaaaagccgagtctgtccctgatcgccctctcgccctgtgcagaggctcgggggctgctctcgcaaacccggctccagccgaaccgttgacagcgtcaacataccagcccgagaacttgggacccgaccgtacacccgggctacggccagctcgcatgagggaacaaccagaccagccgaagcattgcgcgaggcattaa

SEQ ID NO: 40150 - DNA, 456 bp, Zea mays
  Peptide Sequence Number=SeqID_81929
atgcaggcggcgtgcaaccgcaccacggagacgcaccccttaaacttcgacgcatccagcgtggaggcccaggcccacacgtcatgtaaccggtgcgtcggttactacgtgcgaaaaactgcaccaccacttgcgctaataccgtgccttctcgactgcggaaccggtgccgcgactcgaggcaaccttgcgcatggcccaacagtgccaaccgagcacatcggtcacggggcccgggaaggggatatttcgaaagggatccttctccgcgaaggaagcgggccccgagccctcctattgatcaggggttcgaaggctggcccctcggaagggttcgacagccgcgcccagagcactcgggcttcaggctcattactgatcagaggttcgaaggctggcccctcggaagggttcgacagccgcctcagagcactcgggctccgcgcccactactga

SEQ ID NO: 40151 - DNA, 798 bp, Zea mays
  Peptide Sequence Number=SeqID_81930
atggcccaagggcacatttccctttcaagcgggccccgagccctcctactgatcagtggttcgaaggctggcctctcggaagggttcgacagccgcgcccagagcactcgggcttcaggctcattactgatcagaggctggccccccgaagggttcaacagccgccccagaaaacacagagcgagggatgactctgggtacgtccgatacatggccgaggctcgggctacgctcccgaggccactagccgacccttatcgaacgggcacgggcgtccactcggatcacccggttagcaactcactggatacaccatgttcggcgccctccgagggcaacatggcgcttttcccccctcctccttgcggaaaggcgacgaaggggcgtatgataaaagtcgagtcagtccttgatcgtcctctcgctccgtgcagaggctcgggggctcctctcgcaaacccggctccggccaaaccgttgacaacgtcaacaaaccagcccgaggactcggaacctgaccatgcacccgggctacgatcagatcgcatgagggaactgaaagggaaatgtgcccttgggccatttctaagtattttggtgattgagtgtcaacacaagaagaagaagaagagaagaaagttggctgtgtacagccaacaggctgtttcggtctggggcaccggactgtccggtggtgcaccggacagtgtccggtggtgcaccggacagtgtcatgtgcgccaggctatctcggccgaagaggccgctctcgggaatttgctgacggcgtacggctaa

SEQ ID NO: 40152 - DNA, 774 bp, Zea mays
  Peptide Sequence Number=SeqID_81931
atgaggaatttgcgcttgccatgtgtccagcagaaccatatgtcctatcaggaggacaaatctgttgtcttgcggagcatccaagaccatatatctgcccttggggattcctcgtcttctcctggagcatctggcagcaagcagtctgttaaaactgcaaatgaaaaggagagccctaaagttgatcctagaggtatatttcatggacatgacaacacagttgaagatgttcagttctacccttccagggatcagtgcaacttcttcaaaattccccaggttctccacgctctcgcccactacaatgccaggcaccctggtggcgagttcgatgctgtgaagcccctgaagcagagccgcgtgggattccggggccaggcatggttccatatcaacttctgggctcgcccccgcagcagcagcagtaataacaagacaatcaagcgcttctttgctgaggtgcactacaagccaacctcgatcagtagcccctcatcgtcttcgtcatcacttgcaataactgcagttcctatagttgaaatatgcatcattatcgaggaacctctatcccaatataggcgtagctgtgccttttgtcccagctaccgggacattttacaccctaagggttgccgtaagttcgtctgtggaaatgacaaggacctgtttgaacagcgattggacccttgctgctgcactggtatggggattgggaagatgccattcactgcccgcccagacatgtctgcttttctcaacatcagtcctaagtag

SEQ ID NO: 40153 - DNA, 507 bp, Zea mays
  Peptide Sequence Number=SeqID_81932
atggcgcaccggacagtccggtgcacacgggacatgtccggtgccccgccacgtcatcactgccgttggattctgaccgttgaagcttctgacttgtgggcccgcctggatgtccggtgcacaccggacaagtactgtttgctgtccggtgtgccagtatgggcgcgcctgacttctgcgcgcgctgtgcgcgcatttaatgcgccgcagaaagctggtggagagggtctcatgtcaagtgttaccatgcagtgtttaagaattgcttcggtaaaggctgctgatataacaagcaaaataaagaaagcaatattaacaggacataaggaaaatgaggaatttgcgcttgccatgtgtccagcagaaccatatgtcctatcaggaggaaaggacaaatctgttgtcttgtggagcatccaagaccatatatctgcccttggggattcctcgtcttctcctggagcatctggcagcaagcagtctgttaaaactgcaaatgaaaagtag

SEQ ID NO: 40154 - DNA, 704 bp, Zea mays
  Peptide Sequence Number=SeqID_81933
ggcagctaccaaatggtgttccagtggcggtcaaaatgctagagaactctacaggagagggagaagacttcatcaatgaagtagcaaccattggacaaatacatcatgcaaatatcgtccgcctcctaggattttgctctgaaggaacaagacgcattgctagaggaatggagtacctacatcaaggatgtaaccagcgcatcctccactttgacatcaagcctcacaacattctgctggactacagcttcaatccaaaaatttcagattttggtcttgctaagctgtgtgccagggaccaaagcattgttaccttgaccgcagcaagaggcacaatggggtacatcgcaccagagatatattctccaaatttcggtggggtatcatacaagtcagatgtttacagtttcggcatgctggtgttagagatggtgagtggaaggaggaattcagacccaggtatcgagaaccaaaatggggtgtatctaccagagtgggtctatgagagagtagtcactgggcaggacctcacacttagtaagaaaatagctgatcaggagaaagaaacagtgaggcagctggccattgttgcactctggtgcattcagtggaaccccaaaaacaggccatcaatgacaaaagtggttaacatgttgacaggaaggttacagaatttaccaataccacctaagccatatgcctag

SEQ ID NO: 40155 - DNA, 1155 bp, Zea mays
  Peptide Sequence Number=SeqID_81934
atgtacgacttcaacacctcattaatgagagcctggaaggtagaaggctgctttccatctcccctcctgcatgagggctggtatggcaactctgtcactctgtcaggttcacatgtcatcctcattgcagctacaacatcagtagccacattcgttgttctggtagtcactgcactctatctttcactgaagaaaagatataatgaagcaatacatctcaaagtagaaatgtttctcaaaacatatggcacatcaaaacccacaaggtacactttctccgaagttaagaagatagcaaggcggttcaaggaaaaagtaggccaaggtggattcggaactgtttacaaagggcagctaccaaatggtgttccagtggcggtcaaaatgctagagaactctacaggagagggagaagacttcatcaatgaagtagcaaccattggacaaatacatcatgcaaatatcgtccgcctcctaggattttgctctgaaggaacaagacgtgcgcttatttatgaattcatgcctaacgagtcattggggagatatatattcttgccgcaagagctcctagtaccagaaaaaatgctagatatcgctacaggcattgctagaggaatggagtacctacatcaaggatgtaaccagcgcatcctccactttgacatcaagcctcacaacattctgctggactacagcttcaatccaaaaatttcagattttggtcttgctaagctgtgtgccagggaccaaagcattgttaccttgaccgcagcaagaggcacaatggggtacatcgcaccagagatatattctccaaattttggtggggtatcatacaagtcagatgtttacagtttcggcatgctggtgttagagatggtgagtggaaggaggaattcagacccaggtattgagaaccaaaatggggtgtatctaccagagtgggtctatgagagagtagtcactgggcaggacctcacacttagtaagaaaatagctgatcaggagaaagaaacagtgaggcagctggccattgttgcactctggtgcattcagtggaaccccaaaaacaggccatcaatgacaaaagtggttaacatgttgacaggaaggttacagaatttaccaataccacctaagccatatgcctag

SEQ ID NO: 40156 - DNA, 495 bp, Zea mays
  Peptide Sequence Number=SeqID_81935
atgtcttcattaggggttaggttgcatatttccccagcaactcagaatattcgtctgaggatccaagatccacttgaaccaagcctaggcacaggacatgggactacaccttattttgtagatagtccccatgtctgctatactaacgacctaacaaatccacatcagatggactcagcagactccatagccgacaaggcaattggaaggatgcaagagatttccgacaagatattttccgtagcgagggaaacaatccgtcctggacgcgggttgacctcatttgatgctaccaaacttcgtgtagctttggaggagatagcttgcatgctggagcaagactccctggtgttgcaagagcatttggacatcgtgaacaactttaacatcccggttgacagcagctatgaaccttctaccttgtcgtcaccacccccatctgacgacgacctgactccacattgggactttgcggagcatttccaaaacttctag

SEQ ID NO: 40157 - DNA, 891 bp, Zea mays
  Peptide Sequence Number=SeqID_81936
atgcgggggggccgcctgcggcggcgcctatgtagggtttggctgctgccggatggggtggaggctagggtttttgtgtctttgggtgtgtgcgcctatatagcggagaaagacgacatggtgcctgtttggttaagattctgggcggcttctggccgccagaagcagaagccacggccaaacgcccagattctgggcagcttctcacggccgcgcttcgcacagaagccgcgcgcgtcacatgaaaccaaaagccgggcgaagcaggcttcctctggaagccgcggtctcgcgatagggtttccaccgcgcccgcgcctcagaggtctctcccctcgcaaggaccgccaccgccgccgccgccgcagcggctcggggggccacgaccacactcccatttgctcatccgccgcattcctcctcagaagccgaacgaaacaggagtacccttcagatttccgcatcaactctggttattcgtctgaggttccaagatccacttcagccaagatggattcagcagactccatagccgacaaggcaattggacggatgcaagagatttcggacaagatattttccgtagcgagggaaacaatccgtcctggacgcgggttgacctcatttgatgctaccaaacttcgtgtagctttggaggagatagcttgcatgctggagcaagactctctggtgttgcaagagcatttggacatcgtgaacaactttaacatcccggttgacagcagctatgaaccttctaccttgtcgtcaccacccccatctgacgacgacctgactccacattgggactttgcggagcatttccaaaacttctggggagttgaatatgactccgatcagatgccttcgtttaatgacaatgatgtttaa

SEQ ID NO: 40158 - DNA, 381 bp, Zea mays
  Peptide Sequence Number=SeqID_81937
atggattcagcagactccatagccgacaaggcaattggacggatgcaagagatttccgacaagatattttccgtagcgagggaaacaatccgtcctggacgcgggttgacctcatttgatgctacaaaacttcgtgtagctttggaggagatagcttgcatgctggagcaagactctctggtgttgcaagagcatttggacatcgtgaacaactttaacatcccggttgacagcagctatgaaccttctaccttgtcgtcaccacccccatctgacgacgtcctgactccacattgggactttgcggagcatttccaaaacttctggggagttgaatatgactccgatcacatgccttcgtttagtgacaacgatgtttaa

SEQ ID NO: 40159 - DNA, 549 bp, Zea mays
  Peptide Sequence Number=SeqID_81938
atgtcttcattaggggttaggttgcatatttccccagcaactcggattattcgtctgaggatccaagatccacttgaaccaagcctaggcacaggacatgggtctacacctttttttgtagatagtccccatgtctgctatactaacgacctaacaaatccacatcagatggactcagcagactccatagccgacaaggcaattggaaggatgcaagagatttccgacaagatattttccgtagcgagggaaacaatccgtcctggacgcgggttgacctcatttgatgctaccaaacttcgtgtagctttggaggagatagcttgcatgctggagcaagactccctggtgttgcaagagcatttggacatcgtgaacaactttaacatcccggttgacagcagctatgaaccttctaccttgtcgtcaccacccccatctgacgacgacctgactccacattgggactttgcgaagcatttccaaaacttctggggagttgaatatgactccgatcagatgccttcgtttagtgacaatgatgtttaa

SEQ ID NO: 40160 - DNA, 366 bp, Zea mays
  Peptide Sequence Number=SeqID_81939
atggcggtcaatgttggtgtgagttgcgacgagtccacgattgtagccgaagcaaaggcatcgaggaagctgggagagaagaggggttgcgcgggcgggtctagcggcggactgatcgtggctcttacaagcgaggaggagcgagccgccgcaagggcagctgcaagcgaggttcccccagctcctcagaggaaagtcgccatcgctaaacgtcttcgtcgtccaccgtcttcgtcgaagaacactgtgtttgatgtagccatggaatcggagaacgaaaagctccgaaaagcactggctactttgctcagagttgttcaaaagcgtagttgtgacattgttgatgtcgtcaatgcagccttctag

SEQ ID NO: 40161 - DNA, 396 bp, Zea mays
  Peptide Sequence Number=SeqID_81940
atggaatcggagaacgaaaagcaccgtaaagcactggctactctgctcagagttgttcaaaagcgtagttgtgacatcgttgatgtcgtcaattcagccttccagcctttcaactcacctttggtggacgaattgaaccgagcactagttgagattgacgacctcgccaaggatcttgaagacgtagcagtgcaaactcagtgggaggtagaaaatatggctaactgtcaagtaaacaaacatccacgacaagaggaagcagtagaggagcttctaatagaagatggttcagaagacaagctactgatagacgaagagtcaccaattaactatgaagaccttgtgggctacgatgatggtcgtgactactcaaccgatgacacatatccctactag

SEQ ID NO: 40162 - DNA, 384 bp, Zea mays
  Peptide Sequence Number=SeqID_81941
atgaccccatgtggtgcaaacagaactactaagatcactctcgatagtcgagaggacttcatggtcgacttgtcttcggaattggtggaaaaagacctacaggtgcaacagttgagccagcacatcacaactttagaggagcaggtggaaatccgggataacaccatcgatatcctagaaatccagctccatgatgtgcaggaggaacttgaggaagccaatgaccacctagagatgcaccaccaggacatggaggcaaatgaggcaggaagcgagggagaggaggatcctgaggaattagagccacctccaggtccgaatgtgactccctccggaatgcccccttcaccagcatccagcgttgcctctaccactcagggttga

SEQ ID NO: 40163 - DNA, 381 bp, Zea mays
  Peptide Sequence Number=SeqID_81942
atggcaagagtagcgtgtaccctccgtggcaagaggctggacggtggtgtatctatgctctcggttggcgtgaacccgggttgtccaaggtttagggcagacgacaccactgaggccgcaacactgaaagccctgacaaccttctgcgggtatcatcccttggagatgatgatgcacccactaggactcttccacgtcgagaagatggatgaccccatgatcactgtccagtgtatgagcgcactatatcgcctacaggccctgcagagcgatgccatagcacacctcactgatcttgctcagactactgagatcactctcgacagtcgagaggacttcgtggtcgacttgtcttcgaaattggtggagaaagatctatag

SEQ ID NO: 40164 - DNA, 1125 bp, Zea mays
  Peptide Sequence Number=SeqID_81943
atggaggagtgcttgttaccgcggggcggttacatgctccgcgtgcggcggtttggcttcttccgtttcggctcggctgcattccctcaccaatggtcatccaggatgatgaccaccagtttggtggtggggagaagcaagctgggctgcggcctctgcctcgccctcagcttcaaggatcttcatcatccgtgctggggaggagggcggggcgagtcagggcctgcctccgcgtgggacggcgacccgcttcttcctccagcattcgggggagaagggcatcctccatctgtgcggaggaggcgtcctccagccatgcgggggaaggcgaactgctgctgccgggacagggtgcagctgtccgtcctccacctgggcgacggtcgtgctcgtggctggcacgctagctcagctggctctggcgccgcctctgatgttgccgcctgccgcttggtccgggtgtggctgtccgtccaccgcacgtgcgactgtcgcgccgcgcgcaggtcgggcatcacgacgcctccgtgcggaggtcggtgccggcccgtctgggaggacttgagtggggatctgccggtgcaggctggggcggccaccattcgtcggcgtggcgctggcgcgcacgtggccgctgtcgtcggtgctgaggtggtggtagccagaggaggtttctccaccgacgagaccatcgacgccacctgcggtcggacctccggctctttggctttgatggcttgtcctcgcccctcgtgttgggacgtgggcgagggccttttcacagcagcgtttgccctgaggtcatcactgctgctatttagccgcccgacgcggaggtcgttgtcgctgctggtgcagtggtcgccgacgagccacctggagtttgttgtcccgcaggccctctgccgctctgcgatgagctggagccggaggcagcggtgttggcgtggacagaggcggagtcggctcgaaaaagaggcttcgtcggcccaggagcagttggcttcccaggccgaggaggtgcagcagcggcggctggagcttggccaggtcatccgcgagcgggaccaaccccggagtcacgctgccgaagccgtgagccgggctgaggtcctcaggggatag

SEQ ID NO: 40165 - DNA, 1176 bp, Zea mays
  Peptide Sequence Number=SeqID_81944
atggaggagtgcttgttaccgcggggcggttacatgctccgcgtgcggcggtttggcttcttccgtttcggctcggctgcattccctcaccaatggtcatccaggatgatgaccaccagtttggtggtggggagaagcaagctgggctgcggcctctgcctcgccctcagcttcaaggatcttcatcatccgtgctggggaggagggcggggcgagtcagggcctgcctccgcgtgggacggcgacccgcttcttcctccagcattcgggggagaagggcatcctccatctgtgcggaggaggcgtcctccagccatgcgggggaaggcgaactgctgctgccgggacagggtgcagctgtccgtcctccacctgggcgacggtcgtgctcgtggctggcacgctagctcagctggctctggcgccgcctctgatgttgccgcctgccgcttggtccgggtgtggctgtccgtccaccgcacgtgcgactgtcgcgccgcgcgcaggtcgggcatcacgacgcctccgtgcggaggtcggtgccggcccgtctgggaggacttgagtggggatctgccggtgcaggctggggcggccaccattcgtcggcgtggcgctggcgcgcacgtggccgctgtcgtcggtgctgaggtggtggtagccagaggaggtttctccaccgacgagaccatcgacgccacctgcggtcggacctccggctctttggctttgatggcttgtcctcgcccctcgtgttgggacgtgggcgagggccttttcacagcagcgtttgccctgaggtcatcactgctgctatttagccgcccgacgcggaggtcgttgtcgctgctggtgcagtggtcgccgacgagccacctggagtttgttgtcccgcaggccctctggtgtggaggttgttcatacccgcgggagtggaaccggagtcccaaccttcagccgctctgcgatgagctggagccggaggcagcggtgttggcgtggacagaggcggagtcggctcgaaaagaggcttcgtcggcccaggagcagttggcttcccaggccgaggaggtgcagcagcggcggctggagcttggccaggtcatccgcgagcgggaccaaccccggagtcacgctgccgaagccgtgagccgggctgaggtcctcaggggatag

SEQ ID NO: 40166 - DNA, 616 bp, Zea mays
  Peptide Sequence Number=SeqID_81945
atgacgactcaaggaggtttgcagccgacaagcaatgaagctaatatgtgcaccaacgacaatggtagccaacttggtacacggattgtggacgagattatggccgggaagaacgtcttctttgatcttcctcacaagttgactggtgagatatggaccttgaaattccattgcattggagcacaacctggaaaagaaattgtcacagtaaatattgataaagcttatgttgccttttacaacgtgcgaacaaatgttgatgaagaaactatagaagtgtcgattgatgcatataaggagtggcttgcaatactacaacatgataatccagaaatggatttaatggatgacttcagggaggatacgatcaaaacatataaagaatggttaaggcatcaaggcgatcttccagatatcttattgtatgaacgacaaagcaatgatgacctaatattatcagatgaagaaattcatggcagcagcaaacctactgctaattggccatctcatgctagacgtcataggaaaagagatcctgataacgatggagtctttaaaaaggaggggtgtggtacccttaagggtatagcagcagccaccaagcgaatcaagaacg

SEQ ID NO: 40167 - DNA, 616 bp, Zea mays
  Peptide Sequence Number=SeqID_81946
atgacgactcaaggaggtttgcagccgacaagcaatgaagctaatatgtgcaccaacgacaatggtagccaacttggtacacggattgtggacgagattatggccgggaagaacgtcttctttgatcttcctgacaagttgactggtgagatatggaccttgaaattccattgcattggagcacaacctggaaaagaaattgtcacagtaaatattgataaagcttatgttgccttttacaacatgcgaaaaaatgttgatgaagaaactatagaagtgtcgattgatgcatataaggagtggcttgcaatactacaacatgataatccagaaacagatttaatggatgacttcagggaggatacgatcaaaacatataaagaatggttaaggcatcaaggcgatcttccagatatcttattgtatgaacgacaaagcaatgatgacctaatattatcagatgaagaaattcatggcagcagcaaacctactgctaattggccatctcatgctagacgtcataggaaaagagatcctgataacgatggagtctttaaaaaggaggggcgtggtacccttaagggtatagcagcagccaccaagcgaatcaagaacg

SEQ ID NO: 40168 - DNA, 294 bp, Zea mays
  Peptide Sequence Number=SeqID_81947
atgggggcacggcttctgctggtggtctgcccgccggaagcagcttgtgctcgggctcgccgttgctggacgcgccgatcctccgccgcctctacgccgggcaaatccttgccagatggggcgcgagttccatccgaaaagccaataaaagcaggtccagaggtgctttcagatttgcactacaagaaagtcggcttttataaaaagctgcttcctgaatccagccctttggttggcttttggcttttaggggggcaaaagccaaagccaaaagtcaaaccaaacacaccctaa

SEQ ID NO: 40169 - DNA, 159 bp, Zea mays
  Peptide Sequence Number=SeqID_81948
atggaagttggtcagcatgcaccagaggttgaggctgctgaagcatcagatgaagatgttgaggcctacatcggcaaagctaccgttccatccgaaaagccactaaaagcaggtccagaggtgctttcagatttgcactacgagaaagtcggcttttaa

SEQ ID NO: 40170 - DNA, 582 bp, Zea mays
  Peptide Sequence Number=SeqID_81949
atggagcagatatcacagaaatttgccagcgtgcgtgcaaatatgcaatcagagagaacattgagaagggttgaaaagaacttgaagttgttgaatcagcagagcatgatgtgcaaaatgaaattagggataatgacaatgaggatactcaagatcgtgaacactatgatgaggaaatggattctgacgaggaacatgagagattctacaagttatggctcacttcttgctaagcatggcacggtctgctcctccgacctgagaatggctagttttgtcattcagagcaaaaattatgtgatgagaacaaagcatctgaagttggaatatattgacagattaagaagatttgatggctataatgtgatgagtcgggcgatggaagttggtcagcatgcaccagaggttgaggctgctgaagcatcagatgaagatgttgatgcctacatcggcaaagccaccggtgttgtgctgatttatctattacttttcttaaacaacatatatagaaattgtcccactcctgtttactacacaaagatgttcagtgtattgcaacacaatcaatgtttttatgactaa

SEQ ID NO: 40171 - DNA, 252 bp, Zea mays
  Peptide Sequence Number=SeqID_81950
atggagcagatatcacagaaatttgccagcgtgcgtgcaaatatgcaatcaaagagaacattgagaagggttgaaaagaacttgaagttgttgaatcagcagagcatgatgtgcaaaatgaaattagggataatggcaatgaggatactcaagctcgtgaacactctgatgaggaaatggattctgacgaggaacatgagagagcaaaaattatgtgatgagaacaaagcagctgaagttggaatatattga

SEQ ID NO: 40172 - DNA, 1345 bp, Zea mays
  Peptide Sequence Number=SeqID_81951
atggccgcctcaggctactcgggctccgcgcccattactgatcaggggttcgaaggctggcccccgaaggaaggacagcgccacctgcgccactccgactgcagtgccactcgacagagtgagtctgacaggcaatcaggccttgccaagggcgccacgacgaactccgctccgcccgaccccagggctcggactcgggctaagacccggaagacggcgaactccgctccgcccgaccccagggctcggactcgggctaagacccggaagacggcgaactccgctccgcccgaccccagggctcggactcgggctaagacccggaagacgacgaaccccgctccgcccgaccccagggctcggactccgccctggcctcggccgaacgacctccgcctcgcccgaccccttggctcgggctcggccacggcaactgaaggcaagactcaacctcggcttcggaggaaaccccatgtcgccctgcctagagcacagaccgccacgtcaacaggaaacgtcatcatcatcctaccccgaatcgactcgggacaacgtcagcagggactcgaccgctccaacagctgtccctccatcaggctccgccgcacctccgatagccacgacatcacgccagcaggatgcccagatctctccggctgccacatcggcatggccttctcagagaaggttggccgcgcgggaccgaggacgggacaggcgctctcttggggccgctcgcttccctcacccgcgtggacgcttgtaacccccctactgcaagcgcacccgacctgggcgcgggacgaacacgaaggccgcgggacttccacctctctcacgctcggctccggccgcctcgcctctcccccctccgcgctcgcccacgcgctcgacccatctgggctggggcacgcagcacactcactcgtcggcttagggacccccctgtctcgaaacgccgacacttggcccgtgaggaaaggagaccttttccttgtcatgggtggaatgagaagcgtggaattcaaagtgatagagactgacccttatgaatattgtatcgttgccccagatactgaaatattttgtgatggggagcctattaagagagaggatgaggagcgtcttgatgaagttggttattatgatgttggtggagttagaaagcaaatgacccaaatcagagagcttgttgagcttccactacgtcatcctcagcttttcaaatctattggtgtgaagccaccaaagggcatattgctatatgggccacctggttctggaaagactcttattgctcgtgctgttgcaaacgagactggagcctttttctttctaatcaatg

SEQ ID NO: 40173 - DNA, 540 bp, Zea mays
  Peptide Sequence Number=SeqID_81952
atggcggaagaatgccaacccccatggggttgcactcctctaacaacaagaagaagacaagatcggcggcaccaccgcgagcgtgagctcttcggcgatgagatcgccagaggagacggccctgacgcggatccctccagagaacaccggcgcactccatctggaggcccgaaagggccatcgcggaagtctgaaaagttaagtttttcagaaccattacagcgactcgaggcacccacgtgtggcccaacagtgacattaagtacgatggtcacgggccagtcagccgtgggaataggcgtcgcagacggcataggcgggccagcggtaattgcgccaacgggtgcacaggagcagcaggccaaccagactctagccccacctataggctcgcatcctcccctgaggcaggcccgggggccactgttggtacccagaatcaggggtaccctcttctacagtatgaagacgctgcacccgtacgacgcctccaggtcgcatggagagtggcacctgaccccaccacatgggcaggcctaa

SEQ ID NO: 40174 - DNA, 357 bp, Zea mays
  Peptide Sequence Number=SeqID_81953
atggcacccaaccccaccacatgggcagatccaagggtgccacgtggcaaggaaaggaagagcattccatgtattcagcgttgggtccggacctccacaggaggatgccggacccctatgcgcacaagtccagagccccccaagaaggcacgccgggccccttgggaagatcccagtccgcctccgagtgaggtccgagcattggcaaggtcccgggacaaggaccctggcatgagtaagggtccggcggcgcaccgtgctcatcatcccttctacaagaagcttcccttgcacgccgaggatatggagatctcgggtgtcagggcaccagaggaccgcctcagcggcaaacattag

SEQ ID NO: 40175 - DNA, 810 bp, Zea mays
  Peptide Sequence Number=SeqID_81954
atgaagacgctgcacccgtacgatgcctccaggtcgcacgaagagtggcacctgaccccaccacgtgggtcccaggtccccccgagcgaggtccggaccttagcaaggtcccgggacgaggaggaccccgggacaggcaaaggtccagtgctgacacatgtccaggtcatgccctacgctccccgctcagaggacgcgccgcctgccaccacgctgacgggcggcacgccctctcagcatttaatgtgtcctgtccaatccaccgacagacggcgtcagggtcacccagcagacggcgcgcctgaccagtctgttggtgagcagtgcgcccgtgccgagcgacgcacagtactcatcatcccttctacaagaagcttcccctgcacgccgaggatatggagatctcgggtgtcagggcacaagatcgccccagcagcaaacatttgtggctccaagcgctatgttctttatgtccctgggcccacctgtcggggcccgatacctttgtgcatgccccccttcagctataaaaggggaggcatgcgacgttacacacaagctcaatctttcagacccaaccttagcctcacaagttcatacaagctctcaagcagatatttgttggtatacttgctggtttgtatgtttgcttgttcatgttgcatagttatcggagcattcgtgccatctcgtggaggccagatctgcaagtctacgccaggcagtggagctagaagccagttccgcgagctctccttcccccttcgccggataagcacgacaagctcactggatccctttgatgcataa

SEQ ID NO: 40176 - DNA, 159 bp, Zea mays
  Peptide Sequence Number=SeqID_81955
atgctggaagaggtcgcaagatgggacgacctcgtcacaggtcttcgtccggtgacgtatggggcgaagggcagtggagctagaagccagttccgcgagctccccttcccccttcgccggataagcacagcaagctcactggatccctttgatgcataa

SEQ ID NO: 40177 - DNA, 264 bp, Zea mays
  Peptide Sequence Number=SeqID_81956
atggcgccaaaaccacttgggttctataccaaaaatgtgcaataccacttagggcacccactggaaaaagttgagctcgagactcggacgtttgacatgccatggcatggcttttgtcgtgactgtaatcttgctgacggagagtacatcctcgtgccggagcaaggagctgctcaggaggtagccccagatccagcaccagagccagcaccagaggacctgcctgccactgctttggaaggcaagccccggttttatgcataa

SEQ ID NO: 40178 - DNA, 264 bp, Zea mays
  Peptide Sequence Number=SeqID_81957
atggcgccaaaaccacttgggttctataccaaaaatgtgcaataccacttagggcacccactggaaaaagttgagctcgagactcggacgtttgacatgccatggcatggcttttgtcgtgactgtaatcttgctgacggagagtacatcctcgtgccagagcaaggagctgctcaggaggtagccccagatccagcaccagagccagcaccagaggacctgcctgccactgctttggaaggcaagccccggttttatgcataa

SEQ ID NO: 40179 - DNA, 243 bp, Zea mays
  Peptide Sequence Number=SeqID_81958
atggagaagttaaattttcaaaaccaatgcagcgactcgaggcatcccgcgcatggcccaacaaagccattaagtgcggagatcacgggctcgtatcctcccctgaggcgggaccaggggccactgtcgccgcacgaagaacagctcccgaccccaccacgtggacggctcaatgggcaccacgtggcgagaaaagatgatacatcccagggtgcatcagttggacccgacctccgcgagtaa

SEQ ID NO: 40180 - DNA, 579 bp, Zea mays
  Peptide Sequence Number=SeqID_81959
atggctcaccagcggcgacgactacctcagctccgagcggctcgccagcagaggcaaccacctctgcaacgggtagcctcaccagtggcggcgaccacctctacgccgggcagcctccccaccggtggcgaccacctcagcatgcgcgccatggcgaagaggtcctcgcctccgttcccctacgggggtgaggacaagaccatccaagccatggagctaggagcaccggtggaagagcgccgctcccacatggccgcgcacctccagcagaggaaaaacaagaccggtagcaccggcccgctagggaggacaaaaggcacaaactctctagcggcaagctcatcggggtggatgatgccggtgcaaatccttccgccgagtgccgacgcattccatccaagcaggcgactcccctgctcccacctcgaagtgtcgcgagaagcctcccccgatgcacaccgggagaagtcgcaccgccactcgtgccagtaccacgcctcctcagggccgccgcagaaggcggagaagttaaatcttcaaaaccaatgcagcgactcgaggcaccccgcgcatggctga

SEQ ID NO: 40181 - DNA, 441 bp, Zea mays
  Peptide Sequence Number=SeqID_81960
atggcgaacagcgtacggatgcagacggtccagcaacgagcttcacgacggcgaactgtgcaaggaattgcttcgacgaagtggctggcgggcttcgccaggggtccctggagcgacggtgcgacggcgttggattttggtgagctgaactgtgtcggtgatgacgtgacaatctgcaactactacgtggtgacgggatcagacgacgcagaggacgaccgcggcgatcctcgacgtcggaggcgaagaggcgatgcggcgcggtgctggacaagcggcatgatgcggtcgacggccattaatggcaagataatgggcgcgactgagcagtcgagtcgggctgcgcgcttggctcctggcgcggcaggggagaaggcagtgtgtgtggccgcggggcaggggcgcgcctgggcagctcgggtcctcctggaggcgctctag

SEQ ID NO: 40182 - DNA, 444 bp, Zea mays
  Peptide Sequence Number=SeqID_81961
atggcgaacagcgtacggatgcagacggtccagcaacgagcttcacgacggcgaactgtgcaaggaattgcttcgacgaagtggctggcgggcttcgccaggggtccctggagcgacggtgcgacggcgttggattttggtgagctgaactgtgtcggtgatgacgtgacaatctgcaactactacgtggtgacgggatcagacgacgcagaggacgaccgcggcgatcctcgacgtcggtctgttcctacggaacccaaagaaaattatgggatgcttatcttagtgtcatctccgcctaatgatatgatgtctccaaacattacaggtgctcaaggaggtcctaagcttcctgcacaagaggctgatcttccacctccaattatattacaatcaaagaatttagaacaaaaaagcacaaccctgcctaaaggaagtgtttga

SEQ ID NO: 40183 - DNA, 937 bp, Zea mays
  Peptide Sequence Number=SeqID_81962
gttcacaacagtgtttagccatgacaaggattcaattccaagggtctggacaggaaaggaagatgttcgtgcaatagcaaaggaagctcgatctgcggctctcaaacttctgtctgtaatggcggccattcgctgggatgacgagccagataggattgaaagcatcctcacttcaacacttctggaaggctctgttgtatcaaagattgcaagtgctgcttctgctgatccacttgcttctaccacttgggaagagattgctccaaagcatacaatgattaccccgtctcagtgcaagtcactgtggaaacaatttaaagcagaaactgagttcacgattacacaagcagtatccacacagcaagctcacaggcgcggtaatagtaaactgcctcctccttgggcaatcgtggccattgctattcttggtttcaatgagatcatggtgcttattaggaatcccatttatctgttcttgctatttgtgggctacttgatggtcaaagctttggcgatgcagctagatgtcagcagagaattccagaatggagtggttcctggaataatctctgtgtcggtgaagctcctaccagcgatacagaacctggtgaacaaagtggcagccgagcagcaagctgagcaccagcagcagcacccgcaccctcaccctcacactcaggccccaggacccccacagccacagatgcagccgccgccgctgctcctgagcccgagaagccccatgagcgagctgcggaggctgcacatgccgcgcagcccgcgcagcccgcgcaaggtggcgtcgccggcgccatcctcgtcgtcgtcatcgtctgccgtgtcgtcccctaggcacgttggcgaggaccagaagccaagaccaggggcagtcggggcgcctgagaacgaggccaccgtcgccgactcgatagtgtga

SEQ ID NO: 40184 - DNA, 819 bp, Zea mays
  Peptide Sequence Number=SeqID_81963
atggcggccattcgctgggatgacgagccagataggattgaaagcatcctcacttcaacacttctggaaggctctgttgtatcaaagattgcaagtgctgcttctgctgatccacttgcttctaccacttgggaagagattgctccaaagcatacaatgattaccccgtctcagtgcaagtcactgtggaaacaatttaaagcagaaactgagttcacgattacacaagcagtatccacacagcaagctcacaggcgcggtaatagtaaactgcctcctccttgggcaatcgtggccattgctattcttggtttcaatgagatcatggtgcttattaggaatcccatttatctgttcttgctatttgtgggctacttgatggtcaaagctttggcgatgcagctagatgtcagcagagaattccagaatggagtggttcctggaataatctctgtgtcggtgaagctcctaccagcgatacagaacctggtgaacaaagtggcagccgagcagcaagctgagcaccagcagcagcacccgcaccctcaccctcacactcaggccccaggacccccacagccacagatgcagccgccgccgctgctcctgagcccgagaagccccatgagcgagctgcggaggctgcacatgccgcgcagcccgcgcagcccgcgcaaggtggcgtcaccggcgccatcctcatcgtcgtcatcgtctgccgtgtcgtcccctaggcacgttggcgaggaccagaagccaagaccaggggcagtcggggcgcctgagaacgaggccaccgtcgccgactcgatagtgtga

SEQ ID NO: 40185 - DNA, 882 bp, Zea mays
  Peptide Sequence Number=SeqID_81964
atgactgcaatgagatccaccttaatgattggccaacatgatctgaaaaagcgctgctccaatccagctgagctccttcaatctccgagcattggagcccgattcaagagcaaatgctttcctagaagttccaggagccccgaccctagagcatctgcatttcttatagatccactttatcgctcgtcattcatagacctagacaaaggctgtggatcagcgccaattcatatcagcctctccttccccttcagaaaaaacagtgcaaagaagattaaagtcccttccccccaagctccgagtgtgaaaagcagtccaaagtttgagataaatgtcaagtctaaacagaagactcctagaaaatcccagaaattgaatatctgctgcattccttatgatgttattgtctcaacttggataatgagcgatcagcagcgcgatgcagtcgctaggttgggattttccagtatatttgatttgcgaactgatgccttagagagcagatctctcatcaggtggttgatggataaattagatccacatgacatgaccatacgccccaggggctggcaaggaactgaagataacaaaagagacgggggcagagagtttaccgattggtatggtgaagtggatgctgctgcaaaactgagacgtgatctcaaagttggtaaagaagaatttgatgttgtcaagctccaggacaagatagtgcttggcaatgatgatgagttatcaatcagatgcttttttctgattctattcaatcgacttctttttccatctgcttcatggggcattacaaacaatgagatttactatcttgatcacttacatcacccagcatctcctgataacaaatatgggtactccccgcattaa

SEQ ID NO: 40186 - DNA, 234 bp, Zea mays
  Peptide Sequence Number=SeqID_81965
atgtatttcaagttggattacctggaatttctcgggaaagcattggctcttgaatcgggctccaatgctcggagattgaaggagctcagctggattggagcggcagaaatcgcctggcaagtcgcctcggacgcaaggaaagacgccgcggccgctggggtttccttcctatcggcgcgggccttcgaaaatcagtttttgagtgtgaaactgatccgaaccgactccgtttaa

SEQ ID NO: 40187 - DNA, 1212 bp, Zea mays
  Peptide Sequence Number=SeqID_81966
atgacaatacgcccaggggttggtaaagaactcaagatcacaaaagagacggttcgtcttatattgggattgccaagtgttagaggtgacagggatttcactgattggtatggtgaaattgacgctgcttcaaaactgagacgggatctcaacatttgtaacgaagagtttgatgtcgttaagctacaggacaagctagttattgggaatgatgatgagttatccatcagatgtttttctggttttattcaatcgccttctattcccgtctgcttcatgggtcgttggcacaagaggaacagaacaaacattaatgcaacagtttatggatgttcactaattattctttttcatagccgcacagagacatgttatgtcattgctccagaacgaccgatttctgaagtattcaacatatatgtgccacgcataaagcatttgattggcaacaagctgaaatgtctgccctcccagcatcgccccatgtttgaatcaatgtttgatgcgcatgacaaggatgtggataagtattgtgcttctcttcagcagagccatcagatgcttgtttctaagcagattgaactatctgagacatttggtgaaatgatcgacgaagttctaagggctgccacgcagcgtgatactcagcaagaagataactcacccactacctcatcgcccccgacaaatgaccatgtatccactcctgttcaaacccctgatcatcagcatcacgatcagccaacccatgttcctactgatgataataaaatatcggaacaagcgttcacaattccttgtttctgtcgtcgcgctcgcctgccatctccctccgcgctccatccgccaccatccgcgctcgcctcccttcgcgcatcctacaaccgcgtgctccttccttcgatggtgcggatcccccgtgactaccatctccctccgccctcccgcgctccatccgccaccatccgcgcttcctacagccgcgcgctccttcgacggcgcggatcccgcaccctcgaatcacgccagcagatcccacaatcaagcagcggcgacaggaataggggcgggctacgcgggcgctactacgacgagggtgagggcgagcgctccggcgccgcggcgccattcatcataatcggtcgagctcctggagggaacggctgcagagcggacgagatcgaggagcgggcgggcgggtgccgcccgtga

SEQ ID NO: 40188 - DNA, 975 bp, Zea mays
  Peptide Sequence Number=SeqID_81967
atgtatggtactccctgcatcaagtattttgacaacgagacaataagagatttggctaggggtgacagacgtggcccctgccaaactggagaaccatttggtcatgcagagtttcatagccgcacagagacatgttatgtcattgctccagaacgaccgatttctgaagtattcaacatatatgtgccacgcataaagcatttgattggcaacaagctgaaatgtctgccctcccagcatcgccccatgtttgaatcaatgtttgatgcgcatgacaaggatgtggataagtattgtgcttctcttcagcagagccatcagatgcttgtttctaagcagattgaactatctgagacatttggtgaaatgatcgacgaagttctaagggctgccacgcagcgtgatactcagcaagaagataactcacccactacctcatcgcccccgacaaatgaccatgtatccactcctgttcaaacccctgatcatcagcatcacgatcagccaacccatgttcctactgatgataataaaatatcggaacaagcgttcacaattccttggttctgtcgtcgcgctcgcctgccatctccctccgcgctccatccgccaccatccgcgctcgcctcccttcgcgcatcctacaaccgcgtgctccttccttcgatggtgcggatcccccgtgactaccatctccctccgccctcccgcgctccatccgccaccatccgcgcttcctacagccgcgcgctccttcgacggcgcggatcccgcaccctcgaatcacgccagcagatcccacaatcaagcagcggcgacaggaataggggcgggctacgcgggcgctactacgacgagggtgagggcgagcgctccggcgccgcggcgccattcatcataatcggtcgagctcctggagggaacggctgcagagcggacgagatcgaggagcgggcgggcgggtgccgcccgtga

SEQ ID NO: 40189 - DNA, 252 bp, Zea mays
  Peptide Sequence Number=SeqID_81968
atggcgcggcagcctgcccagcgtggtggctcgcggccagtggcaatgagactgatggttctggttatgactatggttctggttctcagcattgcaaccactgctcaggcgaagatgaagctgtggaaggagacttccaggagttccaagactacgacgagttctaggtgtgggttagcggcaacccccagtcggctgtctgtgaaggccgcggttatctacgtttcttttccgcactttgatttattgtaa

SEQ ID NO: 40190 - DNA, 300 bp, Zea mays
  Peptide Sequence Number=SeqID_81969
atgtatgcttgcaatcgcatagagaacaatccggttgaagagcccgaggagcccgcaggagaagcttctgagcagcagtcggttggtggaggcaagtgtcctttgacctatctctgtcctattcatccggggtgtagttcgcttcgccgtcgtgccgtcaatggggctcggtgtggcaatgagactgatggttttggttatgactatggtactggttgtcagcattgcaaccactgctcaggcgaagatgaagctgtggaaggagacttccaggagttccaagactacgacgagttctag

SEQ ID NO: 40191 - DNA, 273 bp, Zea mays
  Peptide Sequence Number=SeqID_81970
atgcagaagccaacacaccatctgctcaaactgctcaaagacagtgaggtccgcgccgccgttagcgtgggcagtggtggggggctgtcgtcgccatcgccaatcgaagtggtgagggacgtcgacgatgtcttcgggaactgctgtggcacctcttcctcctctatcgtgaggaccatctacatccacgccatggagaggaagcaagccctggaggttatgggtgtcgggtccgccatgcgacgccaccagccacccgcacgccgcagctag

SEQ ID NO: 40192 - DNA, 993 bp, Zea mays
  Peptide Sequence Number=SeqID_81971
atgtcaggagtgaacatcctacaattgtttgcatatgacatatcgtgtagctttgaactgtcctccgccttattgttttcttttatcgcttgcgagacttttacttgtgaaattgacattattatgagaaccttggtagaggatgttgaggtggttatatgtttgatgcttcggaagactggtcctctaatgaattatgttcagcaaccgctccctccactcccgagaccgcggcccgacgccgcgccgctcctgagaccgcggcccattgccgcggaacgtcctcaccgacgcgcccccgagcctgcttcccgacgccaccctcacacaacctgccccctgtcaccctctggacgggacgacataggtctggagaagggtccagaaaccgatggtcctcacgatagaggaggaagaggtgccacagcagttcccgaagacatcgtcgacgtccctcaccacttcgattggcgatggcgacgacagccccccaccactgcccacgctaacggcggcgcggacctcactgtctttgagcagtttgagcagatggagaggaaggcggagatacacaatggggctatagaggatggtccaccattcaatttgttcgctgacttaggacagcccaacgatgttgtcctcggcgccgccacctccatctggctgcccgttccggcgaccatgtcttcgcctttggccacgacaagaatgcgtgcttccaggtccatctccgcatatggcattggttttctactgttatctgggcactgcattgctattgctttagtggacaaatttaagctaaagagtgatcatgatgtacaacagcacaatgaggagtcagactacatgggaaggaccgagtttccagtagatgaagatgctcatagtgttggtgactgtgtaaaggaatccataacagatgattctgaccacaatgtttgtttgtcaaggccagagctatgctactatgaagaacctaaggggtag

SEQ ID NO: 40193 - DNA, 354 bp, Zea mays
  Peptide Sequence Number=SeqID_81972
atggacgcccagccctccccctgttcctccctgctcggccagcagccacggccatggcgtccggagcccatgtgctcggcgcccttctccaccccctggggcagaaactccatggccgccgagctccattcctccaagcagcagctccctcccatggacagcgtccctcccctgcgcagtcgttccaagctccctttgccttcttcttccatgggcgcgggcaccccttttttccccctggccgagctcgaccacgcgagcccttctgctccagccatggcacagggcccttctctggttcgagctcgagctggtgagccgccgtcgcccatggccaacgccctgctcaggtga

SEQ ID NO: 40194 - DNA, 345 bp, Zea mays
  Peptide Sequence Number=SeqID_81973
atggcgtccagagcccatgtgctcggcgcccttctccaccccctggtcggcctcctctgcacagcagccccttctctctgtttcctggcacttctctggttcgagcttgagctggtgagccaccgtcgcccatggccaacgccctgctcagcgccatgtagcaacagcacgccgcgcgcgccacctgttcgacgcaatgccgagtcaggtcatcgtgcgtcgtcagccaccgtgggctctgccacgccaaccgatagccacaacagccccttcgtggcgggtgccccaccttgccacgccacggtgcccgtcgtgctccttcgacttcgcttcggtctcccgtga

SEQ ID NO: 40195 - DNA, 482 bp, Zea mays
  Peptide Sequence Number=SeqID_81974
atgaagcacggcaactccgatgacggccatacggccacgtcgccggtcacgcggcggaacgacggtcaccttgtcagccatcgccgaacggaggtggtggaggcggaggggatgagggcaagcgacaccttcggcaggcgaagcgggcgccgtttcacctccgtcatgatgatcgcgtcaaaaaaggttgcgccctccggggttcagcaaccgccccagagcactcgggatccgagcccattactgatcaggggttcgaaggctggcccctcgaaaggattccacagcctccctagagcaggcagagtcagggatgaccctcggtacgtccgttacatggctgaggctcgggctacgctcctgaggtaccctaggacatttctgagaccagcgggaacgatttgtaatggaatcccaccggagggaggcgccgagcccttggaccctatcgaatgggtccgggtccagcaaatcacccgcaa

SEQ ID NO: 40196 - DNA, 354 bp, Zea mays
  Peptide Sequence Number=SeqID_81975
atggagcaaaccatcggcaacaagggcctccagatcctccacaacagtggtggagaaaggccatgggtcgcgcggcggaacgacggtcaccttgtcagccatcgccgaacggaggtggtggaggcggaggggatgagggactgggaaaggggatattctgaaaaggatccttcccagcgaaggaaactggccccgagccctcctactgatcaagggttcgaaggttgcgccctctggggttcggaaaccgccccagagcactcgggctctgagcccattactgatcaggggttcgaaggctggcccctcggaagggttcgacagccgccccagagcatgcagagtcagggatga

SEQ ID NO: 40197 - DNA, 522 bp, Zea mays
  Peptide Sequence Number=SeqID_81976
atgaccgccctcccggagattggtttccaatgtgacaataaccagggcgagtgtcgggctaaattttcttgccatcttgactgttttgcttgggtgaagcgagacagttaccttccacaaggaagccaaggtctaaaggctgttacaaaagccaagctacgttacgatcctctggaggttaatccagaagatatggttcgctttgcaatggagcagccacagacaatggcttcgtattctgtatcagacgatgttgcaacatactatctatacatgacttatgtccatcctttcatcttttctcttgcaaccataatacctatgttacctgatgagccagctcttctcactaaatcagccagctcttctgcttgtcccattgtcatccagatacttatttgggatgttgaagtacaaccaaatagacatgctgtcctaggagcaagcgagtctcgccctgatctgatttatggcttcaatgagatgttggtgctagctcatctgttaagtgatgatagataa

SEQ ID NO: 40198 - DNA, 366 bp, Zea mays
  Peptide Sequence Number=SeqID_81977
atgcccttgctatgggcagttccgaggaggaagaacatccgcatcatagagttcaaagtctctactactacacattcaaggcggcatgaaatggaagcgattccggaatatatgctctgcacagatgattggctgcaggttaacggaatcatgcaacttccacagaacattaagatcatagccactcacactgacagtccaaatgtacttatttgggatgttgaagcacaaccaaatagacatgctgtcctaggagcaagcgagtctcgccctgatatgatatggttcattgttttgttcagtgtgccagatatactcttctttggcacatggcttactagcatatactatttgtttagatattaa

SEQ ID NO: 40199 - DNA, 288 bp, Zea mays
  Peptide Sequence Number=SeqID_81978
atgacagtggatacattgctgtcagagcacagtgcgcaggagttttgtagtgtgggtgatgatgcttgtcttattctgtgggatgctcgaactggcactgccccagctgttaaggttgagaaagctcacactggagatgttcattgtgttgattggaatccccttgatgttaactatatcttaagtgggtatgatggcattaaggttcaatttagcataatcgttgaaacaaattcgatctctattagttccttatacgttcaagtaatgaatctttcaattgattaa

SEQ ID NO: 40200 - DNA, 921 bp, Zea mays
  Peptide Sequence Number=SeqID_81979
gtacttatttgggatgttgaagcacaaccaaatagacatgctgtcctaggagcaagcgagtctcgccctgatctgatattaacaggacataaggaaaatgcggaatttgcgcttgccatgtgtccagcagaaccatatgtcctatcaggaggaaaggacaaatctgttgtcttgtggagcatccaagaccatatatctgcccttggggattcctcgtcttctcctggagcatctggcagcaagcagtctattaaaactgcaaatgaaaaggagagccctaaagttgatcctagaggtatatttcatggacatgacagcacggttgaagatgttcagttctgcccttccagtgcgcaggagttttgtagtgtgggtgatgatgcttgtcttattctgtgggatgctcgaactggcactgccccagctgttaaggttgagaaagctcacagtggagatgttcattgtgttgattggaatccccttgatgttaactatatcttaactgggtatgatggcattaaggctcaattcagcataatcgttgaaacaaattcgatctctattagttccttatatgttcaatggtcacctgacagagcatctgtttttggaagttctgcagaagatggtttcttaaacgtgtgggatcatgagaaggtggggaagaagaaaaattctaatgtcccagccgggcttttctttcagcacgctggtcatagggataagattgtagacttccactggaattcgtcagatccttggacaattgtcagtgtctctgatgatggcgagagcactggtggaggtggaacactgcagatttggcgcatgagtgatttgatctaccgcccagaggatgaagttcttgcagagctggagaatttcaaggctcatttggccagctgtgcaccgaagaattga

SEQ ID NO: 40201 - DNA, 589 bp, Zea mays
  Peptide Sequence Number=SeqID_81980
gctgcgcgtcctttcggcaataaatgcagaggctgcacggtttcgtgggctttacatcaggtttgacccattggcttatgtcgcaagcctcgcggttctggtgtccttctacggaggtctggacccaacggtgaagactgggatgcaccacctttccttgccacgtggcgcccttggacctgcccatgtgaggagaagggtgttcaccagccttgcagaggaggcgaacctcggctacatggggccggctggctacaggctgtcagctgcagcatgtccggccctttgggctagatggcttcggcgccgcctccgatgctacctcctgccgctctgcccagggcgtggctgtccgtccaccgcgtgggcgacggtcgcgccgtgcgtgggtccggcacatccaccccttctcctgcccgccggccgcactgggggggttgtacaagacgtcgtacgccgcggcggtggcggcagcgttcttggatggtcttgtcttcactcccattggtcagccgggagcaaggaccccttcatgcgtgctgagatagccgccgcccaccgctgcagaggtggtcaccgccgctggtga

SEQ ID NO: 40202 - DNA, 567 bp, Zea mays
  Peptide Sequence Number=SeqID_81981
atgaagacgctgcatccatacaacaccttaagtccacgtgaagaatggcgcccaaccccaccacattgggcaggtccaagggcgccacgtggcaaggaaaggtggtgcatctcagtcttcaccgttgggtccggacctccgaagaacaccggacccctatacgtacaagcccagggccccaagaaggcacgccaggacccttgggaaggctctggtccccctccaagtaagagagatttccgcttcgacatttggcgcgccaggtatgggctaggcttcaagtttttgcttgtttcctcgctcagcatgatggtgtggatcatcgagcaccgcgtcgaaacttcaaaggatttcgcgatggagcaaaaggttgcatcctccgcgccacgagtgcccgaccgccctgactccgggactgctgtcatacacgccgcgcagcagcacacgccagcacaggcgtcccggtctccgtcgagggcagcgcctacgacgctgtctgcggccagggagttgctacgccaccccctagctccacggcttcactggggccatgaagcagtggcgtga

SEQ ID NO: 40203 - DNA, 198 bp, Zea mays
  Peptide Sequence Number=SeqID_81982
atggccgatgttcctagggtggattccactgtgtcaatgcgggagtacatggaggccatctgcgtggcgaagagccccagttggcactggacttcggcaagggcggtggtgattgctgccaactccgacggctgggctgaagctgcagtttcggcttcattagatcctggcatatctgataccagactaaaggaatag

SEQ ID NO: 40204 - DNA, 585 bp, Zea mays
  Peptide Sequence Number=SeqID_81983
atggacgttgtgtgccccgtgctggttggtgcttctactgttacagtggactgttgtgctggaataggaaatgaaggtcgctggggaggcctcgacggcttgctgatagttgatgttgcaaactccaagcggtggaagcgaggaacagcagtagatggtggtggagagaaagcactgggtatggtgtgcggtagtgaggaaaaggatggggtgggtgaagtggtgtgtgggaatggtggtaatgatggaatagaagatggtgaatgtggtaacgacagcaagtgcggtggaagtgaggtggtggtgtgtgatggtgccgatatggtggtgcgtggtggtgggagggtggattccactgtgtcaatgcgggagtacatggaggccatctgcgtggcgaagagccccagttggcactggacttcggcaagggcggtggtgattgctgccaactccgacggctgggctgaagctgcagtttcggcttcattagatcctggcatatctgataccaggttggtagaattaccccgactacggaggttgtatgagtggctaatggttggagggttggaggaagaagtgtga

SEQ ID NO: 40205 - DNA, 192 bp, Zea mays
  Peptide Sequence Number=SeqID_81984
atgactgttacagtaggcttcggctttgggatgaaggttttctctcatggtaaaggcatgcgcgatatgaagttacaacccgaaggcgaggagttatatccaattaaagacatgacacaaatatgtagcgctgaacgaagggttttactttacctaaaccatgacatggtgtttattccgataaacatctga

SEQ ID NO: 40206 - DNA, 1998 bp, Zea mays
  Peptide Sequence Number=SeqID_81985
atggaatctctatttgtaggcttgtctcataacaagccaaaaaaatcggtggcaaccgcaatagttcgagaagttttatctcatgactggttgctcctagactatatttgcacacaaggtgatcttgccctcatcgattttattaaggaaatcccttgtgaaccaagggtagaagtcgtgcttattgatgatgcctttgttgaaaggaagtggatggagtgtttatttcagccgaactcatatttaggagacgaggttatagactgttacataaatttgataaaagctcaaaagcatctaaagtgccaatctggaggtcgcgttcacatagaaaatgctttccagttcaatttcctgaagcgagatggtgatgttgaaattaaaacagaggagctatatccaattaaagacatgacacaaatatgtagcgctgaacgaagggtgttactttacctagaccatgacatggtgtttattccgataaacatccgagagacgcactggtatcttgctgttatccatgcaagaaatatggagatacaagtgctcgattcacttggtagttcacaagaccgcaaagacctcactgactctattaaaggactacaaagacaaattgatatgatatctcaacgtatggagttaaaagaccacaggtggccagacctccaagttgcttcttggccgctcagagaaattgacatgggatatgcaaagcagacagatagctcttcatgcggtctctttcttttgaactatatcgaatactggacaggggatgaactgtctgacagttttacccaggatgacatgtcacactttaggaaaaaaatggctgctatattactatcttcagacctgaataagagaagggggtgtctgttatacaaaaatgaaaaagaagttgactctggaagcccatctgatgttgagatattagaaaacccaacagattctaataagaggaaactactccacgtgcttgatgatagcgaagtagtgtatgaagatgaggaaggccctattactcaagcagacttacaaaggtggtttgttgatgattgggataaaagagctcctgtaaaagtcacacctctcacttccgagggttgcaccaatgactttttaatggttggtctttccacaaaggatatgccagtgactaaagccgattcaatagatgttttatgtgattatatcatggcaataaacgacgatacgacactagagagaacatgggtgcgaagtttcaatccttttaagatagaaatatctgtcaaagacctacaaaacatattaacgacaaatcaagatatgattctaagatgttttgacatggctgttcggctgcttgccaataaagagtcacgtaggccgaaggaagaaatcataaataatagaaagcattatatggacatgcgtttttggagaatggttggttttggtaaacttccaaagtaccatcaggatcctacaacagaagggttagccaaaacactcgattgttggccatcaatgaattattacatcacgggttgtagatatgttctcatgccatggaaattcaatggatgttacgccctcttcgtaatagatcatgttaaaaagcatgtgacttttatcgactttacaccgactcaagattggtgtaaacacatgccatacaagaggttcgcggaagcgattatcatgacctcaaaaaaatataagattgcttacagcaagaaacgttctggatgggcggaggatatctttaagtgggaacatacaattcagactggtgttccaattgacttaagagggtttaatactagctatctcgttctacaagctatggccatgtgggggaatgacagaccactgaaatttgttggggatgcaaagactcttcgaaggaacttcgtgattgaccttttaagttatgaggacaattcgtgtcgatatgccatccctgcaaacgtacaacaaagaattatcgatatcgctaaaaaggattag

SEQ ID NO: 40207 - DNA, 165 bp, Zea mays
  Peptide Sequence Number=SeqID_81986
atggcgggcggaggaaagctcgccggagctaaggaggggcgtctggccagcgagggtgaacacggggtgaggcttgcaggttttgctgactggatcaagagatatggaggggttaaagttgggtttgtctcactgccgagcacagagagaagatcccgggtttga

SEQ ID NO: 40208 - DNA, 327 bp, Zea mays
  Peptide Sequence Number=SeqID_81987
atggcgggcggaggaaagctcgccggagctaaggaggggcgtctggccagcgagggttttgctgactggatcaagagatatggaggggtgaagttgggtttgtctcactgccgagcacagagagtagatcccggatttgacgtgtccagagcacgcgtcccgatgccatgttctgttggcttacatgaaatgatggcacttgagttagcactaagaagaaccataggtgacactggggtgtcacagccttcctcccttaaaggaatctcgtcccgagatttgggtcagagtcctcccggggtgaagcgaagggtgagacttacttga

SEQ ID NO: 40209 - DNA, 429 bp, Zea mays
  Peptide Sequence Number=SeqID_81988
atggaacagtggccacggaggaagaaaggggcggaggggcttactggcggcgagactgctctggaagcttcaccagagatcaaggaagatgtgtgcgcgaggaatttgagaatggctcactggattgctcggtccacacagcttggaaagctccacgggccactggcgaagctaatcgaggggcaggcgcaacttggacgtggctggagtgagctggccgcggtggccgaggctcgggcggtgatggcgggcggaggaaagctcgccggagctaaggaggggcgtttggccagcgagggttttgctgactggatcaagagatatggaggggtgaagttgggtttgtctcactgccgagcacagagagaagatcccgggtttgacgtgtccagagcacgcgtcccgatgccatcttctagtatgaggtag

SEQ ID NO: 40210 - DNA, 303 bp, Zea mays
  Peptide Sequence Number=SeqID_81989
atggctcaccagattgctcggtccacgcgtggccgtgggcgaccgatgttcggcgaagatgatctcgggtctccagttaggttctgtcggttccgagagcttggaaagctccatgggccactggcgaagctaaccgaggggcaggcgcaacttggacgtggctggagtgagctggccgcggtggccgaggctcgggcggtgatggcgagcggaagaaagctcgccggagctaaggagggcgtcgagcacgaggcagcgcagagagaggtcgtgttcaagcgcggattggctccaaatctttga

SEQ ID NO: 40211 - DNA, 4671 bp, Zea mays
  Peptide Sequence Number=SeqID_81990
atgaccgttgaacaaaaaaacgagaaaagtataaaacgtcgtgaagtacgccaacgaaataaaggacctcctatacaaccagaggcatctagagttagtccttccgatgggtgtagcacaattgatttcacaaactttccaacacaagttccaaatttgaatctagatgatgatagcgattggttgcataggaatgagacattcaagtcagacgatgttttcacaacgagagaccttctgacaccaggcggtgtgcatgaaactattggtaacacgcctaaccataatttgggaaggaccgcctactttagagagcggtacaaaaacttaactccagccgagagggaacttaggcatgaacgccttaggttgtataataatacaccaaagcggaaagagtcaaagatagagtacataagaaaacgtagagcactgttggctgacacgttgagtcaggagtccatcgccatggagtccccaacatatacccctaaggttgtgcaccctacaacagatgcaattgaacctgatggatccgcagttaccccctgcgactgggttattcctgatatcgccagtaacccgttcctgccagcttcaacaaagactgaggatgctgattcactgcgtatgtctactagaccactaagacgtaaacaacatgtgccacgtggtgaaagacaagctatcttagcccgtcgaaaccggcaatttgaagcatccatttcaaggaacatggctactgcgactgaggatactattagtgacgccgaggaaggggatgattggacacatacccagtcgaagccaagggtcatttccaatgttgatgacgatgacggtgtcgtatttgaagacgatgctgatgagaacgagggatacctattcactgggcaatatgaggataccgatgaggatatagagatcgatggtagtcaagatgaatcgactgccactgatgttcctgacccgtacgacaaggtgtatagcaacatccctgaagaaacacatatgctaaagactgttcccaactgcagttattgcaccgcgaagaagtttgagtatgagtcacctggtttttgttgtcgtggtgggaaggttgagctagccccactggagacccctacccaactcaagaggttgtgggatagtgcagactctgatgctaggcactttcgtgacaacattaggttttttaatggccatttttctttcacttccctatattgttgcctcgatagtatgacaactaatgtaagggattctggtatatacacgttccgagcacagggcatgatgtaccacaatatcaagtcatttggtagggagggtggggcagagcataaacaccttgagctttacttttatgatgatgatcccactctcgagcatcggttccgtaagtgtcgcgaagagcatcaacagaaagacaaagaggttattcgacagatagtcgacatactacgtggaaacccgtactccgagcaccttaggaccatgggccacgttgataaccttgatgactatcgtatcgcgttgaacctagaccagacgttgaaccagaagacatataacacacctctcacttccgaggtggccgctgtctggatcgaagggagcgaagggcgaggccagtttagcaagagtgttatgctccatgggaaggacagttcaagccactgcatccgctcataccatggatgctacgatgcactatcatatccattgttcttccctagaggtgaacttggatggcatgcaaatatcccaaaggttggagtatccatggacgaagttgatgcataccgtgcgacacatagggcaagtaatgcaaatgatgaagatgcggaatctcctagccatttatgtgtgtctgtacgtgactactactgctacaaattccagattcgccccggggtattcaatccaatacttcatggaaagcggcttttccagcagttcgcggtcgacacatacataaagattgagagctctcgtttagattacatacgcaggaatcaggatcggttaagggcagacctgtaccagggcttggtggatagcatggtagatggagatattagagcagagaaggttggcaagcgaactgtgctgtcgacgtcgtttattggtggtcctcgtgacatgagacgtcggtatatggatgctatggctctggtgcggaagtttggtaaaccagacatatttcttaccatgacatgtaaccctaactgggatgagataaggagggagcttctccctgggcaaacaccgcaagatcgtccggatcttgtagtgcgtgtctttcatgcgaagctacaagagttaaagcataggctgactaaacaggatattcttggtaaggtccgagcctacgtctatgtcgtggagtttcagaagcggggtttgccgcatgcccattttctactcataatgcagaggaagtacaagctcacatgtcctgagcagtacgaccttttgatctcagccgagatcccaagcaacaagtaccctgaactacgaaagatggttatcaagcatatgatgcatggcccgtgtgggtcgctaaaccctaactgcccatgcactaagggtcgtaactcgtgcaagaatcattaccctcggcctttcagtgacacaaccttgcaagggaaggattcgtaccctatttacagacgtcatgacgatgatcgtaaagaaaaggtccgagggtgcgaactggacaatagatgggttgtcccttataacccatacctccttcgtctcttcaactgtcacatcaatgtcgaggcatgtgggagcatcaaggctgttaaatacctgttcaagtacatatacaaaggccatgatcgtgcgtctgttgttatgagagatgcgagcaaagcagatgatgatgttgatgagatcaagcagtatagagatgcaaggtgggtgactcctccggaagccttatggaggatatacggctttgagcttagtcagatatctccacctgttatgcagatgcaactccatcttccaaacatgcacatggtggcgtttcacgagcggcaaatggtcgagcgagtcgtcaaccatccaggtgctgataggtcgatgctcacagcatattttgaggcgaataggctacacgaggaggctcgtggcatcctatatcgtgacttccctgagtggtacacttggcagagtggtaagggcaaagtatggcaacgaaggaaacgagatacaggtggacaagtcggtaggatagtctctgctcatccggccgagggtgagcgctattatcttcgtgttctcctaaaccacgtgactggcgccgcctcatatgtggatctaaggacagttgatggtgtcaccctaccgacttttcgtgaggcagcagagagaaggggactacttgagtcggacaacacactggatgagtgtctcactgagcgtgctcttttccagatgccatcggcgctgcgacgactttttgccacaatactggtgtactgtgagccaagcgatgtggctgtactttggcagaaacacaaagattctatgtccgaggactatcaacacaggagtcagaacaaaactcatgttgagcagatggtattgattgacattaggaacatgctgcagtcaatgggaaaggacataaagacattacctctacctcctatcatcgacgcgtatgacgatgctattggtactgctagggaggtttacgaggaggaaattatccaaccgacagtgggagatgtggctcttaaagactctcttaacgaggaacaaagggccgcctatgataagattatgtctgccgttgacaccgatcagggcggattattctttgtggatggacctggtggcaccgggaagacttatctatacagagtgctcctcgcgacgctacgcaaccagggcaagattgcagtggcaacagctacatctggcgttgcagcttccataatgcctggaggaagaaccgcccattcacgcttcaagataccactcactattgacgatggcgctgtatgtagcttcacgaagcagagtggaacagcagagttgctacggaaagcgtctctcattatctgggatgaggcttctatgactaagagacaagccgtggaggcactggacaatagcatgcgcgatataatgggtcgacccgcactgccatttggtggtaaaaccattgtcttcggtggagatttcagacaggtattgcctgttgttcgtaaagggtcaagggctcaagtggtcgcgtcttcgctacggatgtcttacctatgggagtccatgtcccacttaaagcttgttagcaacatgagagcaaaaaacgacccttggtttgcggagtttttgctgcgcgtaggcggtggaactgaggaaacaaatattgacggcgacatccgtcttcctgatgatgtgtgtgtgccttacactgggagtgacaacgatcttgacaacctaatagacttcgctttcccaaatctcaacgaaaatatgtctgattccacgtacatcacttcaagggcgatactgtcaacacggaacgactgggttgatatgataaatgttaagatgattgatcgttttctcaaggggagcatatggtgtaccatagtttcgatagcgccatggatgatccccataactactacccacccgagttcctaa

SEQ ID NO: 40212 - DNA, 4557 bp, Zea mays
  Peptide Sequence Number=SeqID_81991
atgaaaaatcattttgccactgttgatttggcagttccaaatttgaatctagatgatgatagcgattggttgcataggaatgagacattcaagtcagacgatgttttcacaacgagagaccttctgacaccaggcggtgtgcatgaaactattggtaacacgcctaaccataatttgggaaggaccgcctactttagagagcggtacaaaaacttaactccagccgagagggaacttaggcatgaacgccttaggttgtataataatacaccaaagcggaaagagtcaaagatagagtacataagaaaacgtagagcactgttggctgacacgttgagtcaggagtccatcgccatggagtccccaacatatacccctaaggttgtgcaccctacaacagatgcaattgaacctgatggatccgcagttaccccctgcgactgggttattcctgatatcgccagtaacccgttcctgccagcttcaacaaagactgaggatgctgattcactgcgtatgtctactagaccactaagacgtaaacaacatgtgccacgtggtgaaagacaagctatcttagcccgtcgaaaccggcaatttgaagcatccatttcaaggaacatggctactgcgactgaggatactattagtgacgccgaggaaggggatgattggacacatacccagtcgaagccaagggtcatttccaatgttgatgacgatgacggtgtcgtatttgaagacgatgctgatgagaacgagggatacctattcactgggcaatatgaggataccgatgaggatatagagatcgatggtagtcaagatgaatcgactgccactgatgttcctgacccgtacgacaaggtgtatagcaacatccctgaagaaacacatatgctaaagactgttcccaactgcagttattgcaccgcgaagaagtttgagtatgagtcacctggtttttgttgtcgtggtgggaaggttgagctagccccactggagacccctacccaactcaagaggttgtgggatagtgcagactctgatgctaggcactttcgtgacaacattaggttttttaatggccatttttctttcacttccctatattgttgcctcgatagtatgacaactaatgtaagggattctggtatatacacgttccgagcacagggcatgatgtaccacaatatcaagtcatttggtagggagggtggggcagagcataaacaccttgagctttacttttatgatgatgatcccactctcgagcatcggttccgtaagtgtcgcgaagagcatcaacagaaagacaaagaggttattcgacagatagtcgacatactacgtggaaacccgtactccgagcaccttaggaccatgggccacgttgataaccttgatgactatcgtatcgcgttgaacctagaccagacgttgaaccagaagacatataacacacctctcacttccgaggtggccgctgtctggatcgaagggagcgaagggcgaggccagtttagcaagagtgttatgctccatgggaaggacagttcaagccactgcatccgctcataccatggatgctacgatgcactatcatatccattgttcttccctagaggtgaacttggatggcatgcaaatatcccaaaggttggagtatccatggacgaagttgatgcataccgtgcgacacatagggcaagtaatgcaaatgatgaagatgcggaatctcctagccatttatgtgtgtctgtacgtgactactactgctacaaattccagattcgccccggggtattcaatccaatacttcatggaaagcggcttttccagcagttcgcggtcgacacatacataaagattgagagctctcgtttagattacatacgcaggaatcaggatcggttaagggcagacctgtaccagggcttggtggatagcatggtagatggagatattagagcagagaaggttggcaagcgaactgtgctgtcgacgtcgtttattggtggtcctcgtgacatgagacgtcggtatatggatgctatggctctggtgcggaagtttggtaaaccagacatatttcttaccatgacatgtaaccctaactgggatgagataaggagggagcttctccctgggcaaacaccgcaagatcgtccggatcttgtagtgcgtgtctttcatgcgaagctacaagagttaaagcataggctgactaaacaggatattcttggtaaggtccgagcctacgtctatgtcgtggagtttcagaagcggggtttgccgcatgcccattttctactcataatgcagaggaagtacaagctcacatgtcctgagcagtacgaccttttgatctcagccgagatcccaagcaacaagtaccctgaactacgaaagatggttatcaagcatatgatgcatggcccgtgtgggtcgctaaaccctaactgcccatgcactaagggtcgtaactcgtgcaagaatcattaccctcggcctttcagtgacacaaccttgcaagggaaggattcgtaccctatttacagacgtcatgacgatgatcgtaaagaaaaggtccgagggtgcgaactggacaatagatgggttgtcccttataacccatacctccttcgtctcttcaactgtcacatcaatgtcgaggcatgtgggagcatcaaggctgttaaatacctgttcaagtacatatacaaaggccatgatcgtgcgtctgttgttatgagagatgcgagcaaagcagatgatgatgttgatgagatcaagcagtatagagatgcaaggtgggtgactcctccggaagccttatggaggatatacggctttgagcttagtcagatatctccacctgttatgcagatgcaactccatcttccaaacatgcacatggtggcgtttcacgagcggcaaatggtcgagcgagtcgtcaaccatccaggtgctgataggtcgatgctcacagcatattttgaggcgaataggctacacgaggaggctcgtggcatcctatatcgtgacttccctgagtggtacacttggcagagtggtaagggcaaagtatggcaacgaaggaaacgagatacaggtggacaagtcggtaggatagtctctgctcatccggccgagggtgagcgctattatcttcgtgttctcctaaaccacgtgactggcgccgcctcatatgtggatctaaggacagttgatggtgtcaccctaccgacttttcgtgaggcagcagagagaaggggactacttgagtcggacaacacactggatgagtgtctcactgagcgtgctcttttccagatgccatcggcgctgcgacgactttttgccacaatactggtgtactgtgagccaagcgatgtggctgtactttggcagaaacacaaagattctatgtccgaggactatcaacacaggagtcagaacaaaactcatgttgagcagatggtattgattgacattaggaacatgctgcagtcaatgggaaaggacataaagacattacctctacctcctatcatcgacgcgtatgacgatgctattggtactgctagggaggtttacgaggaggaaattatccaaccgacagtgggagatgtggctcttaaagactctcttaacgaggaacaaagggccgcctatgataagattatgtctgccgttgacaccgatcagggcggattattctttgtggatggacctggtggcaccgggaagacttatctatacagagtgctcctcgcgacgctacgcaaccagggcaagattgcagtggcaacagctacatctggcgttgcagcttccataatgcctggaggaagaaccgcccattcacgcttcaagataccactcactattgacgatggcgctgtatgtagcttcacgaagcagagtggaacagcagagttgctacggaaagcgtctctcattatctgggatgaggcttctatgactaagagacaagccgtggaggcactggacaatagcatgcgcgatataatgggtcgacccgcactgccatttggtggtaaaaccattgtcttcggtggagatttcagacaggtattgcctgttgttcgtaaagggtcaagggctcaagtggtcgcgtcttcgctacggatgtcttacctatgggagtccatgtcccacttaaagcttgttagcaacatgagagcaaaaaacgacccttggtttgcggagtttttgctgcgcgtaggcggtggaactgaggaaacaaatattgacggcgacatccgtcttcctgatgatgtgtgtgtgccttacactgggagtgacaacgatcttgacaacctaatagacttcgctttcccaaatctcaacgaaaatatgtctgattccacgtacatcacttcaagggcgatactgtcaacacggaacgactgggttgatatgataaatgttaagatgattgatcgttttctcaaggggagcatatggtgtaccatagtttcgatagcgccatggatgatccccataactactacccacccgagttcctaa

SEQ ID NO: 40213 - DNA, 564 bp, Zea mays
  Peptide Sequence Number=SeqID_81992
atggactggacaagcacgccgcctgcaggatggcctggacgccgcctgccagctgagtggacagagaccgcacggcccagaggcctttacgtcaggctccgcccgctggctgacgtcacgggtaacaagccacatggcagcatcgggtctccgcctgagcggggagcgcaagagcataggataaagcctggacacgtgtcagtaccgggccctttgctaaggccagggtatcccctgtcttgggacctcgctgtgggtggcgtggaccccgctcagaggggtccggactcccggacctcacccaaggggtctgggcttgctttgcatggggagccctggaccatactcggagatccgggtcgtgagtataggggtccagcgctttctcgaggaggtccggacctactgaagggtatatctttggcgaaattacaatcataccctcaagcatatacatttaagcttcgtcaatcctacgcacacattgtctgcccgaagttgttatcttcatgcccgcgtctgtcagtgccacacccagatttaaggggcaaaacccgggtgtga

SEQ ID NO: 40214 - DNA, 555 bp, Zea mays
  Peptide Sequence Number=SeqID_81993
atgccgttggattctgaccgttggagcttctatcttctgggcccgcctggatgtccggtgcaaaccagacatgtactgttcaatgtccggtgcgccagcgagttccggaggccgctcttccttggagcaccggacactgtccggtgtacaccggacagtccggtgaattatagcggagtgcctctggaaattcccgaaggtggcaagtttgagttggagtcctctggtgcaccggacattgtccggtggtgcaccggacacaccggacagtccggtgcccccagaccagaggcgacgcgtcctctccgcaataaatgcagagaccgcacggcccagaggccttacgtcaggctccgcccgctggctgacgtcacggggtatcccctgtcttgggacctcgctgtgggtggcgtggaccccgctcagaggggtccggactccggacctcacccaaggggtctggcttgcttgcatgggagccctggaccatactcggagatccgggtcgtgagtataggggtccagcgctttctcgaggaggtccggacctactga

SEQ ID NO: 40215 - DNA, 327 bp, Zea mays
  Peptide Sequence Number=SeqID_81994
atgaagacgaaagcgctagaggtaaccgtaccggaagtcatgcgtggtggtgggctgtccacagcagttgcggacttcgatcaacgcatgaacggcgacgagcaattgccgcccactggcaatagaatccgacccgggatcggttcctacacctgcggcggaaccttccagtgctctcgaacttatggcgaggagggtgcgccaaacttcgatttatacccagggcaggattcgcccctaccccgaggatctcggcggggttggagccacgtggagagggaaatagtggagtgggccgagctaaggggatttggcccaacgagataa

SEQ ID NO: 40216 - DNA, 582 bp, Zea mays
  Peptide Sequence Number=SeqID_81995
atggcgatgaactatgacgagcaattgccgcccactggcaatagaatccgacccggagtcggttcctacacctgcggcggaaccttacagtgctctcggtacacaccgccgcggccaaggaatcgacagcagcagcatcgacggcggcggcgtgatttcacggttaaggctatggcgtcgggatgtcttgtgcttggctcaaggggacgagagggggaaatgtggtcgggctatataggggcggagagagagttcgggcatgcacggccaaatccgaggtccctggcggcgggattttaccggagcccaatgaatcacgcggagctcaaccgaagctgttcctggccgcggaacttatggcgaggagggtgcgccaaactccgatttatacccagggcaggattcgcccctaccccgcggactccgcaacaacccgaaaagaggggaaaacccggtcaatggatcgcgcgagatttctggcggcgagcttgccgcaatctgttagcgcacgcttcggtgaaggggatgaacccgacatgtgggccccagccactagtgaagaggcacgcgccgcacggctga

SEQ ID NO: 40217 - DNA, 639 bp, Zea mays
  Peptide Sequence Number=SeqID_81996
atgaaaatgctacactttgatgagttgactaaagaacatgaggagctaaagtgctctcatgttgatttggtccaaagcaaatctttctttgagctagaatttgcaggaacaaaagatgatacatatcaaaagctcaaagaagaaaatgagaggctaaaaatgagcttgacacaactaaaagggaagtacattgctcaaccttatcaagataaccgtgatcacatggtgaagaagcttgagacgggaacaaccgtggcatgcactaaatcccttgaagaaaatgtcaaggacttgaggattgtcaagaggaaggaacaaaagaagaaaatcaatgcctctgacaaaagcctcaaccatgcctccatgcaaggaaataaagaattatcctgtgccaagacctacaacatggaggaaagccaaaggatgcttacttatgaaaatctacaagagagtaagtgcaagccgcaagcctcaagggttactcttcagccaaaggaagaaagtattttcaataagtttggaaggaaaaagagtcaactacaaagggaggacactcaaatgaaaaaggaagacatcaagagcaacaacacctacttggataatgagatcttcaaaacaatcaatggtgtggttgcataa

SEQ ID NO: 40218 - DNA, 750 bp, Zea mays
  Peptide Sequence Number=SeqID_81997
atggcaaaatctccaaagatcaagagatacagggatcaaaaaagacatatggaggtccactgccaaaccagcttttgccgaaatgaagatggtttccccaagttgttgatagcatgcacagttcgcctcggaatcaggaatcaactagagtacaccggtcaagatgtagagcggcgcaaccatcagctccatgtggatctcaccacaactcaagcctgtggagctgccttggaaagtcgtgaaggcattattgttcaagccctaaagcaagccaaggacgagcacatacaaaagttgattgaggcctacttggtcacccataaccaacgtagagccatgcggatccaagagcccccttcatccaacccaattcaactcataagagctgaagatccccagattttagaaggcctctcggtctctataaaaggagagaagaaggcttgggaactcctagatggagccatagtcttagaaggaatgccagtctcccctcaagatatggataagcaagagcatcctgagttgtttgatcccctcaccatgaagaagattccagcaccctcccctgaagtcaaggaagaagctacaagcaccccactagcatcgccaccctttgagtccttggagctacaagagccagtcttgcttggagaagagttcgaccccatcctgccatctcagtcaccgctagaaggagtcatcaacaccagctccctcttgacccatccagtagatgtcttagaatga

SEQ ID NO: 40219 - DNA, 590 bp, Zea mays
  Peptide Sequence Number=SeqID_81998
aagatgtagagcggcgcaaccatcagctccatgtggatctcaccacaactcaagcctgtggagctgccttggaaagtcgtgaaggcattattgttcaagccctaaagcaagccaaggacgagcacatacaaaagttgattgaggcctacttggtcacccataaccaacgtagagccatgcggatccaagagcccccttcatccaacccaattcaactcataagagctgaagatccccagattttagaaggcctctcggtctctataaaaggagagaagaaggcttgggaactcctagatggagccatagtcttagaaggaatgccagtctcccctcaagatatggataagcaagagcatcctgagttgtttgatcccctcaccatgaagaagattccagcaccctcccctgaagtcaaggaagaagctacaagcaccccactagcatcgccaccctttgagtccttggagctacaagagccagtcttgcttggagaagagttcgaccccatcctgccatctcagtcaccgctagaaggagtcatcaacaccagctccctcttgacccatccagtagatgtcttagaatga

SEQ ID NO: 40220 - DNA, 520 bp, Zea mays
  Peptide Sequence Number=SeqID_81999
atggcgagggagctcggtcggccagagaaacgcgggctggggcagggaggagcgcggcggccatggaggtggggagctgcgcgctatagagatgggcacacggcacgcaggggagctctggccggcgctggagctgcagaggagctcggccgggaactcgacgacaaccgccatgggaagaagagaagggagctcggactggaggtagcagacagggcacggccggtaccttctggagatgaattcgtgggcaccggaacaaatgatgattcatatcaaaagctcaaagaagaaaatgagaggctaaagaagagcttgacacaactaaaagggaaatgcattgcccaaccttctcaagataaccgtgatcacatggtgaagaagcttgagacgggaacaaccgtggcatgcactacatctcttgaagaaaatgtcaaggaattgaggattgccaagaggaagaaacaaaagatgaatttcaacacctcctacaaaagcctcaaccacgcctccacaaaag

SEQ ID NO: 40221 - DNA, 345 bp, Zea mays
  Peptide Sequence Number=SeqID_82000
atggaagccaagcgttggggctgggcagagcatcgggaactccatggcgagggagctcggtcggccagagaaacgccgggctggggcagggaggagcgcggcggccatggaggtggggagctgcgcgctatagagatgggcacacggcacgcaggggagctctggccggcgctggagctgcagaggagctcagccggtagagaagcggcgcagggagcaggacccagggcgagcaagggaggaagaagacccgggcttgaagacgcggctgcacgcgacgcttgcgcagggaactcgacgacaaccgccatgggaagaagagaagggagctcggactggagttag

SEQ ID NO: 40222 - DNA, 1404 bp, Zea mays
  Peptide Sequence Number=SeqID_82001
atgaaggggcgctttaccgtggggcggttgatgctccttgtgcggcggttcgccttccagaccgctggttgccccgaaaatgaaggggcgcataactgcggggcagttgcacgctccttcttcgggtcagtctgtgtgacatgtggggcctggcccccgtgtcataaggtgggaaccctgatgcacgtcgggggagacttcgcccgtgacgcttcgggggcgcgagtggggagatctgcctttaaaaaggggtcgatctcccgggtagtagccatgcctcactcctctagcgaccatcgcgcccttccgccttctgggcctccagatggggtgtgccggattttcatcatgcaacccggtcgcaacctccggctggtggtcatccacaaggatgactaccagccttgtggtggagagaagcaagccaggctgtggcctccccctgccctcagcttcaaggatgttcatcatccgcgctggggaggagggcgagccgagtcggggctccgcctttcgcgcgggctagcgggcccgcttcttcctccaacattcgggggagaagggcgttcgccagccttgcgaaggaggcgaactttggctatgcggggtcggccgtctgaggcgccatcagctgccacgtgtctggctcctcagcctgggtggctttggtgccgccttcggcgctgcctcctgccgcttggacggagcgtggctgcccgtccaccgcacggacgacggttgcgccgtgcgcaggtcggccacatccacggcttctcccgcgccgtcggccgcaccgggggggcatacaagacgtcgtacgccgcgggggcggcggcgacgttcttggatggtcttgtcctcactcccgcaatgaggacaggagcgaggacctcttcgtgcatgctggggcggtcgccatttgccggtacggcactggtgcgcaggtggtcgctgtcgtcagtgctgaggtggtcgccgccgctggtgaggctccccactgtagaggtggttgcttccgctggcgagaccatcagtgccatctgccgccgggaccccgactctttggctttaatggcctcgttgtcgccccccgtaggaagatgggggcaaggaccctttcgcagcggcgtacatgctgagatgatcgccgctgcttggcgagtcgtcgatacagaggtggccaccgccgtcggtgctgatgtggtcgcttctgccggtgagccgctcggagctagctatcccgtggcccttactggtgtggaggtagttcatacctgcagagtagaaatggaactagggctccacttgaaaacagttgtaatactttcgctttttgtaaggactcgcagttttagtccgggtggccaagttgcatgtctggacccccttgggtcgcggttctag

SEQ ID NO: 40223 - DNA, 981 bp, Zea mays
  Peptide Sequence Number=SeqID_82002
atgaaggggcgctttaccgtggggcggttgatgctccttgtgcggcggttcgccttccagaccgctggttgccccgaaaatgaaggggcgcataactgcggggcagttgcacgctccttcttcgggtcagtctgtgtgacatgtggggcctggcccccgtgtcataaggtgggaaccctgatgcacgtcgggggagacttcgcccgtgacgcttcgggggcgcgagtggggagatctgcctttaaaaaggggtcgatctcccgggtagtagccatgcctcactcctctagcgaccatcgcgcccttccgccttctgggcctccagatggggtcggccacatccacggcttctcccgcgccgtcggccgcaccgggggggcatacaagacgtcgtacgccgcgggggcggcggcgacgttcttggatggtcttgtcctcactcccgcaatgaggacaggagcgaggacctcttcgtgcatgctggggcggtcgccatttgccggtacggcactggtgcgcaggtggtcgctgtcgtcagtgctgaggtggtcgccgccgctggtgaggctccccactgtagaggtggttgcttccgctggcgagaccatcagtgccatctgccgccgggaccccgactctttggctttaatggcctcgttgtcgccccccgtaggaagatgggggcaaggaccctttcgcagcggcgtacatgctgagatgatcgccgctgcttggcgagtcgtcgatacagaggtggccaccgccgtcggtgctgatgtggtcgcttctgccggtgagccgctcggagctagctatcccgtggcccttactggtgtggaggtagttcatacctgcagagtagaaatggaactagggctccacttgaaaacagttgtaatactttcgctttttgtaaggactcgcagttttagtccgggtggccaagttgcatgtctggacccccttgggtcgcggttctag

SEQ ID NO: 40224 - DNA, 429 bp, Zea mays
  Peptide Sequence Number=SeqID_82003
atgcagacggtgcttccttccgtggccgcacgcacgtcgttcgacgaattgccggagccagctgagcataaccgaaggtatgtgaagtaccacgacctccatggaggcgaacaagaatcaaggaagtcaaattacgctgatttggtttcacactcagaatcacatttgcacaatttcctactgtatgaatcaggcaaacaaggcttctacgaatatggatggggcgactcattccattttgtcttacaaacagaaagtcagatgtctgaaaatgattttactttcccttgtgagggaagctgcgaagaggatggcattgttctcattggtgaaattggaggtatggctgaggaggatgttgcaacattcatccagtcactaactggaaagctaaagcggactcaagcttctcccagtttttacatgtga

SEQ ID NO: 40225 - DNA, 888 bp, Zea mays
  Peptide Sequence Number=SeqID_82004
atggccacctttcctggcactgttctccgtccctttgatcctgaaccctccaagtgccctggtgagcgctcatcatcctttgtggtgacgatgacaaacgagagctcaggagtttttgttgctaagtcgagtattgagtatgtgaagtaccacgacctccacggaggcgaacaagaatcaagaaagtcaaattacgctgatttggcaaacaagtactatgatcttgtcactggcttctacgaatatggatggggcgactcattccattttgctggcggatatccgggtgaaacttcccgtgaagccattaagcggcaccagcattttatggcactacaattggggctcaagaagggtatgaaggagcacatcttttcagcaggtttgagtgagcaatgctgctccttgaaaggtatattgggggacttcatgaatatgccaatagctgataacacctttgatgcggcctatgcaatacaggctacatgttacgcaccagaggcacaaggtgtctatagtgaggtctaccgtgtgctgaaacctgggcagtattttgcactggatgaatggtgcctgactgaccgatttgatcccaacaacgctaagcatttgaccgccaaggctgagattgagcttggcgatggcctgcctgacatccgtaccactcgccagtgtgtccaagctatgaaagatgcaggattcgaggtcaatacactagagttcctccgtattgccccagcaggcagcgtgggagcctacaacgtcctaacgagtgcctctgatggccttctaaaaggtggtcgggaaggtatcttcacagcgtccttcttcgtcctgggccgcaagcctctcaaggaaagtgaaatagtgaacggcggcaacctttga

SEQ ID NO: 40226 - DNA, 588 bp, Zea mays
  Peptide Sequence Number=SeqID_82005
atgggcgcagctgatgctgtacgcagagttgcaacaaaagggacatgtgtggaagataatcggcgaactgaagcagtggctcaagcaatgaatgggacaatttggtctggttgcacagatggttcaattattgtttgggatggaaatgggaatagactgcgagaatttcattaccatagttcttctgttcgatgcataaagacactcggagacagggtttgggtgggctatacaagtggcactattcaagttatcgatgtcaaagcaagtgtgaagatagcattcaatttggcaaataggtgtcagaacagtgaggaaaacaatctggtagggcttgaaggcagtggcaatgggcagtggtggatagacagtattggcaaaacacttgatgaggggatatccttccatagagttggttcaaggcagttggcaggactacttattgctgcatgggcaacgaatgaccttaggccacatgttggtgatgttgatgctactgcagtgccatgtggctttgggcgtgctattggcaacaaggtatcaggtatcatttgtttgatctgtgtactaccactaggcatcgcctag

SEQ ID NO: 40227 - DNA, 1351 bp, Zea mays
  Peptide Sequence Number=SeqID_82006
ggcaacgaatgaccttagtccacatgttggtgatgttgatactgctgcagtgccatgtggctttgggcgtgctattggcaacaagggtggcgtcggattaagaataagagtctttggtcgcaggatatgttttgtaaacaatcattttgctgcacatcaagagaatgttagccgccgcaatgctgattttgaccgcatttatcggacaatgactttcaccaaacctcagggatctgcagcttctgctacagctgtccaattgcataaagcagctaatgaaaatcaagcagatgaaggtaggcctgatctggcagaagctgatatggttatcttccttggtgatttgaactaccgacttgatggcatcacctatgatgaagcaagggacatggtctcccagaggagctttgactggcttagagaaagggatcaacttcgagcggaaatgaaggcgggaaatgtgtttcagggaatgcgtgaaggcccaatcagatttcctccaacctacaagttccagagacaccagtcgggtctctcagggtatgattcaggcgagaagaagagaatacctgcttggtgcgacaggatactgtatcgagatagccgtcctgtaccaatagctgaatgctcattagagtgccctgtcgtcgctgcaatcacagccgtcgatattgcaagagtagacgagctgataaggaggcaagagtttggaaaaataatcgaatctaacaaaaaggttcgctctttgcttcgagagctccgttctgttccggacaccgtcgtcaacgcgaacaacattacattggaaaatcaccaagaagatgtcatcctccggataactaataactgtgaaaccagcaaggccgcttttgaaatcctgtgtgaaggccagacagtcagaaagcagggcggaacccaatctgaggagctgctcccaagggcgtcctttggcttcccactttggcttgaggtccaaccatcgatgggtctcatcggcccaggagaaacagcggaagtcgtcgtgcgccacgacgacttcctgacgcaggaagagtacgtcgacggagcacagcggaaccggtggcgcgaggccacccgagacctggaggtcgtgctctcggtgacagtcacgggcagctccagctcctcggccgaggccgtcgcgcacagggtcaccgtccggcactgctgcccggcgcctccggctcccctgcccgccaaccggcgctctgccgctgcctcgcctcgtgacgacgttgccgcgtcggataaccagtcgaaccacctgcaccgttccgatctcgccagcttcggtagctcggaggtgcgtgacctgtgcgggggcttgtga

SEQ ID NO: 40228 - DNA, 312 bp, Zea mays
  Peptide Sequence Number=SeqID_82007
atgcgggggaaggcgaactgctgctgttcggacagggtgcagctgtccgtcctccaccccgagcggcggtcgtgccacgcgcgggtggctgctgtcaccagcctcgcggagggggcgaacttcaacaacgcgggcctgaaccttcggccgctctgcgatgagctggagccggaggcagcggtgtcggcgtggacagaggcggagtcggctcgaaaagaggcttcgtcggcccaggagcaggcggcttctcaggccgaggaggtgcagcagcggtggctggagcttggccaggtcatccgcgagcgggactaa

SEQ ID NO: 40229 - DNA, 216 bp, Zea mays
  Peptide Sequence Number=SeqID_82008
atgggggctggcgacgcgcaccggccgtatgcggaacggctcctactggtccgccgatcggctcggggcgtggaccgttgtcgcccgcgccggcggccaaagcccgggggccctaggcacccccggcagccgtcgtcggcgcggacgaaacctgagatgcgcaaggaagctgacgagcgggaggccctcacgagccgcaccgctggccgaccctga

SEQ ID NO: 40230 - DNA, 636 bp, Zea mays
  Peptide Sequence Number=SeqID_82009
atgaagaacgtagcaaaatgcgatacttggtgtgaattgcagaatcccgcgaaccatcgagtttttgaacgcaagttgcgcccgaagccttctggcggagggcacgtctgcctgggcgtcacgccaaaagacactcccaacacccccccgcggggcgagggacgtggcgtctggccccccgcgccgcagggcgagcgtcccggcgcgaggccggccattcggccctacggacccatcgagcgatcgagcttgtcctcggaccgcgaccccagcccaaatcggggcggtaaactccgtccaaggctaaatacaggcgagagaccgatagcgaacaagtaccgcgaggggaaagatgaaaaggactttgaaaagagagtcaaagagtgcttgaaattgccgggagggaagcggatgggggctggcgacgcgcaccggccgtatgcggaacggctcctactggtccgccgatcggctcggggcgtggaccgttgtcgcccgcgccggcggccaaagcccgggggccctaggcacccccggcagccgtcgtcggcgcggacggtatccgcgcgcctctggcgcgcccctcggggcgctacgccgcaacggcctgcgagctccccatccgacccgtcttga

SEQ ID NO: 40231 - DNA, 649 bp, Zea mays
  Peptide Sequence Number=SeqID_82010
cgtcccggcgcgcggccggccattcggccctaaggacccatcgagcgaccgagcttgccctcggaccgcgaccccagaggcgtcctcagcgacggaccgggcccaagttctctggaaagggacgcctgggagggtgagagccccgtccggcccggaccctgtcgcaccacgaggcgccgtcaacgagtcgggttgtttgggaatgcagcccaaatcgggcgccgtcgtcggcgcggacggtatccgcgcgcctctggcgcgcccctcggggcgctgcgccgcaacggcctgcgagctccccatccgacccgtcttgaaacacggaccaaggagtctgacatgcgtgcgagtcgacgggttcagaaacctgagatgcgcaaggaaagctgacgagcggggaggccctcacgggccgcaccgttggtcgaccctgatcttctgtgaagggttccagaaggagcacgcctgtcgggacccgaaagatggtgaactatgcctgagcggggcgaagccagaggaaactctggtggaggctcgaagcgatactgacgatagctggagcccacacgagttctatcgggtaaagccaatgattagaggcatcgggggcgcaacgccctcgacctattctcaaactttaaataggtag

SEQ ID NO: 40232 - DNA, 203 bp, Zea mays
  Peptide Sequence Number=SeqID_82011
ggttcgagttggagcacgcctgtcgggacccgaaagatggtgaactatgcctgagctgggcgaagccagaggaaactctggtggaggctcgaagcgatactgacgatagctggagcccacacgagttctatcgggtaaagccaatgattagaggcatcgggggcgcaacgccctcgacctattctcaaactttaaataggtag

SEQ ID NO: 40233 - DNA, 203 bp, Zea mays
  Peptide Sequence Number=SeqID_82012
ggttcgagttggagcacgcctgtcgggacccgaaagatggtgaactatgcctgagcggggcgaagccagaggaaactctggtggaggctcgaagcgatactgacgatagctggagcccacacgagttctatcgggtaaagccaatgattagaggcatcgggggcgcaacgccctcgacctattctcaaactttaaataggtag

SEQ ID NO: 40234 - DNA, 203 bp, Zea mays
  Peptide Sequence Number=SeqID_82013
ggttcgagttggagcacgcctgtcgggacccgaaagatggtgaactatgcctgagcggggcgaagccagaggaaactctggtggaggctcgaagcgatattgacgatagctggagcccacacgagttctatcgggtaaagccaatgattagaggcatcgggggcgcaacgccctcgacctattctcaaactttaaataggtag

SEQ ID NO: 40235 - DNA, 371 bp, Zea mays
  Peptide Sequence Number=SeqID_82014
caacggcctgcgagctccccattccgacccatcttgaaaacacggaccaaaggagtatgacatgcgtgagagtcgacggggttcagaaacctgagatgcgcaaggaagctgacgaagcgggaggccctcacgagccgcaccgatggccgacccagatcttctgtgaagggttcgagttggagcacgcctgtcgggacccgaaagatggtgaactatgcctgagcggggcgaagccagaggaaactctggtggaggctcgaagcgatactgacgatagctggagcccacacgagttctatcgggtaaagccaatgattagaggcatcgggggcgcaacgccctcgacctattctcaaactttaaataggtag

SEQ ID NO: 40236 - DNA, 457 bp, Zea mays
  Peptide Sequence Number=SeqID_82015
gcccaagcccacgtcagaacatccatgccgcaccgtcgccatcctcgccttcccactaggcattaaggacccatcgagcgaccgagcttgccctcggaccgcgaccccagaggcgtcctcagcgacggaccgggcccaagttctctggaaagggacgcctgggagggtgagagccccgtccggcccggaccctgtcgcaccacgaggcgccgtcaacgagtcgggttgtttgggaatgcagcccaaatcgggcgggttcgagttggagcacgcctgtcgggacccgaaagatggtgaactatgcctgagcggggcgaagccagaggaaactctggtggaggctcgaagcgatactgacgatagctggagcccacacgagttctatcgggtaaagccaatgattagaggcatcgggggcgcaacgccctcgacctattctcaaactttaaataggtag

SEQ ID NO: 40237 - DNA, 1128 bp, Zea mays
  Peptide Sequence Number=SeqID_82016
atggcgctcctcgcatcccgcccgcccaccgcgctcggccggctcaccaacctccgcgcgctttcgctctgctccaaccgcgtcctcgggaccatccccaacaacgtgctccagctgccgggcctcaaggcgttgttcctgcagcacaacctgctgtccggccccatcccgccgggaatccagaggctcggcggcctcgagcgcctggtcctctcctacttgtcgggtcccatccccttcacgctcaacagcctcaccgcgctacgcgtgctcaggctcgacggcaaccgcctctccgggagcattcccagcatcagcatcgcgggtctcggctccttcgatgtctccgacaacaacctcaacggccccatccccaaatcgctctcgcacttcccacgggaatccttcgtcgggaacctccagctctgcggggacccgcttccgccctgcagcagcccgttctttcccccagcgccgtcgccccggcgggcccggccccgcgccgggctcatccaagaagcagaagctctccggggccgcaatcgcggggggcagcccccgccggcgtccggcgtgggcagcgtcttgacgtcctcgtccaaggaggacctcggaggagacgcattcgggtcggccgcggcagtcgcagcggcggccgccgccgccgcgggggagcagagccgactggtgttcgttgggaagggcgccgggtacagcttcaacctggaggacctgctgcgcccgtcggcggaggtgctgggcaaaggcagcgtggggacgtcgtacaaggcagtgctggaggaaggcacgacggtggtggtgaagcgactcaaggacgtggcggtgcagcggcgcgagttcgacgcgcacatggaggcgctcggcagggtggagcaccagaacgtgctccccatccgcgcctactacttctccaaggacgagaagctcctcgtctacgactacctccccaacggcagcctctctgccatgctccacgcttcgtattctggtcttgtagcattagtggaagaaaaggacaatcaaatccagaaggcggagttcctcatggacatcgtcagcaacgaagagatggcgctcatcgacaccgctaggagaagaaacttataa

SEQ ID NO: 40238 - DNA, 135 bp, Zea mays
  Peptide Sequence Number=SeqID_82017
atggaggcgctcggcagggtggagcaccggaacgtgctccccatccacgcctaccacttctccaaggacgagaagctcctcgtctacgactacctccccaacggcagcctctctgccatgctccacgagaagtag

SEQ ID NO: 40239 - DNA, 210 bp, Zea mays
  Peptide Sequence Number=SeqID_82018
atgccgcaatctgccatcaccagcaagctagcgacgtcgccgttgcccgcgcgatatagcctccaagaagcaagcactccttgcttttgcctctacagtctaccatggcaacaagctgaattggagccaaaaatatcccaatgtgatcatggcatggacatgctgaaaaatctcacaattataccagtcactgtcgattcattggcataa

SEQ ID NO: 40240 - DNA, 948 bp, Zea mays
  Peptide Sequence Number=SeqID_82019
atggtccttctcgggaggttaaatgccttgacatgcttcccggaggtccagagagagaatgtgaaagccatcaacagtggagaacaaagtcaatttgctcgaactgctcaattatcttctccagctcatgtgggcaaatcacaaagtcctgtcatggacttgagcacaacttttacgacttctcttcaaaataagtcaagcctcctccgaaaaaacaatgcattgactgattctggtggtctgatccgaagcagccgctcagaatttggtagaaaggtcccatctgttctggataccagggcatcaccccatgggccacctacatccaatatgagatcaagtgcaggggatatgttccccacagtgggccagagagttgagagtccatttttgaggggggcgaaagatatcagttctagaaaaggagaggagggtttcaaaaaagggattaaatatggtgatcacgatccagtgcctatgtatttgaacttaagttctggtgatacacctatgaaagactaccgaacgagtttgctgaagactgcagttaacaaaaccactatttttcaaggaaaagattctgttggaaaaggagagctccactttggttcacgtgccgagaagcctttcatcttaaatggaactggtgtaggtcaaaatggcctcgctaaggtgtctggatatgctggttttcgtgaggattacaaagtaccaactaaggagaacatcttgagctctagcaagagatcttcaatcgatggagcagaagccagcaaagtttgctatgatagatatagcctccaagaagcaagcactccttgcttttgcctctgcagtctaccatggcaacaagctgaattggagccaaaaatatcccaatgtgatcatggcatggacatgctgaaaaatctcacaattataccagtcactgtcgattcattggcataa

SEQ ID NO: 40241 - DNA, 978 bp, Zea mays
  Peptide Sequence Number=SeqID_82020
atggtgaccgaattttgtgctatctgcattaaaaggaatttagttgataaaatgattgatctgccctgggattctgaggaggagaaacatcttcacaagtccctctttgactctgctcatgaaatgcccatgaaaccaaatggtagtctgcttgttgtctactaccttcgggttaaatgccttgacatgcttccggaggtccagagagagaatgtgaaagccatcaacagtggagaacaaagtcaatttgctcgaactgctcaattatcttctccagctcatgtgggcaaatcacaaagtcctgtcatggacttgagcacaacttttacgacttctcttcaaaataagtcaagcctcctccgaaaaaacaatgcattgactgattctggtggtctgatccgaagcagccgctcagaatttggtagaaaggtcccatctgttctggataccagggcatcaccccatgggccacctacatccaatatgagatcaagtgcaggggatatgttccccacagtgggccagagagttgagagtccatttttgaggggggcgaaagatatcagttctagaaaaggagaggagggtttcaaaaaagggattaaatatggtgatcacgatccagtgcctatgtatttgaacttaagttctggtgatacacctatgaaagactaccgaacgagtttgctgaagactgcagttaacaaaaccactatttttcaaggaaaagattctgttggaaaaggagagctccactttggttcacgtgccgagaagcctttcatcttaaatggaactggtgtaggtcaaaatggcctcgctaaggtgtctggatatgctggttttcgtgaggattacaaagtaccaactaaggagaacatcttgagctctagcaagagatcttcaatcgatggagcagaagccagcaaagggcgaggattttttttgaatatctccacagttattaccctaatgtaa

SEQ ID NO: 40242 - DNA, 801 bp, Zea mays
  Peptide Sequence Number=SeqID_82021
atgtcgggtagctattttttgggaaaaactttggatattatttctgaaaacccaaacttttcgaaatccgaaatacccacccctcctccatataatcatgatgccatctcagtgaggacgcacgtcctggacatcaggaggccctgctctcatcttcccaagatctctagcaaggaaacacatccaaagatagcacaagttcttctggaacgacaaaaatatgatatggcacttcttgtgctaaagtgcacagggcatggaagcttctctgctacagaaaactttaaaaaagatgacatttcatctcttagtgaggcagtgactgtggttcgtgtcagaattgaatgtcgcctcctaacagaagcgtttatgtatcataggagctactgctctaaggtgaaagagcaacactcagcagatatgacacatgctgaggatgcattaaaaaactcttgggtttatcatgttgagatgatggtgaccgaattttgtgctatctgcattaaaaggaatttagttgataaaatgattgatctgccctgggattctgaggaggagaaacatcttcacaagtccctctttgactctgctcatgaaatgcccatgaaaccaaatggtagtctgcttgttgtctactaccttcggcgttatcggtatttggaggcatatgaggttgaccgtagtcttcaaaaatttgagcaaaagatattggaaaatacaactgaagagattgcttcaaaaatcagagcaattgctcgatggagagaaagtttagttttctgctttattacgcatgtctaa

SEQ ID NO: 40243 - DNA, 273 bp, Zea mays
  Peptide Sequence Number=SeqID_82022
atggcgcttggtgaactacaagcgggggttgtgtggccattgatcaccgaccagaggctcgtatacctcaccccacatatgtttccttgtcataggtcacattcttggatttatggtggagaccatttcttggtgtttgccttcgttattgatgaaaatggtcgttcatggctattttcgacaaaaatgggggttgtgtggccattgatcatcgaccaaagatcacattattggatttctggtggagacgatttcttggtgaaaattccatag

SEQ ID NO: 40244 - DNA, 1008 bp, Zea mays
  Peptide Sequence Number=SeqID_82023
atgcccgacataccgagggattttgccgagcactcgctggatatccgagctggagcccgacccgtgaagcagcctctgcgccgattcgacgaagaaaagcgcagagccataggcgagaagatccacaagctaatggcggcagggttcatcaaagaggtgttagccttcagtgtcattgaaaatggtcgttcatggctattttcgacaaaaatgggggttgtgtggccattgatcatcgaccagaggctcgtacacttcaacccacatatgttttcttgccatagatcacattcttggatttctggtggagaccatttcttggtcaaaaatccgttggtgttagccttcggtattattgaaaatggtcgttcatggctattttcgactaaaatgggggttgtgtggccatttatcatcgaccagaggctcgtacacctcaccccacatatgtttccttgccatagatcacattcttggatttctggtggagaccatttcttggtcaaaaatccgaatgtgttagccttcggtactattgaaaatggtcgttcatggctattttcgacaaaaatgggggttgtgtggacattgatcatcgaccagaggctcgtaaacctcaccccacatatgtttccttgccatagatcacattctttgatttctggtggagaccatttcttggtcaaaaatccgtacgtgttagccttcggtattattgaaaatggtcattcatggctatttttgacaaaaatgggggttgtgtggccatttatcatcgaccagaggctcgtcaacctcaccccacatatgtttccttgccatagatcacattctttgatttctggtggagaccatttgttggtcaaaaatctgaatgtgttagccttcgatactattgaaaatggtcgttcatggctattttcgacaaaaatgggggttgtgtgtccattgatattcgaccagaggctcatacacctcactacacatatgtttccttgccatagataa

SEQ ID NO: 40245 - DNA, 360 bp, Zea mays
  Peptide Sequence Number=SeqID_82024
atgcaggatgttggcgggctagaggatgtgaaaaggattcttctagatactattctgctccctttgacgtataatcgcatgatttcttctaaattgcgcaagcgattaggtgtctgggtatatggacctccgggaacagggaaggtaggaaaggactgtttgttcctgtacgatagtaacatggcacaatgccagacaccagaacaacaacgacaaaatcacaaaaagataatgctgagcaacacaccaacacctttcgccatggggagtggggacgcaaacatcttccatgtgctaccggtactactttacagtttacaagtactgtccacatcaacagctgtcttcgccagggaataa

SEQ ID NO: 40246 - DNA, 1476 bp, Zea mays
  Peptide Sequence Number=SeqID_82025
atgacgatgtcgatagaaccagcactgctgaagaaccatccaaacaggatgagcctcggtgagaagggtttctgcttgaactgcagctcctggcgtggccaccatatcctgcatcgctcaatgtccatcactgctaaacaaatggaaattttgtcaatgtcaagagtacggaacgaagaggaaagctcactgtgggcgatgcttattccaccacagggtgtcagttctgaatcagggatgacgctgcagggtgcaatggaagtgccagtgccatcaggcccatcacgcagcaaggtgcagaatgagaaaccaagccttaagcaaaatgaggactgcatcggagcaagtatctattcactagcggcaggggcagccgaacgccggccagccggggccggccaggggctggaggcgtgcgggttgcggttggctgggctcgacgcgcacggcgagggggtggcggcgtggcgccgccggccagcccggggcggggctggacgcctggactggacgcgcgtgctgcgcgcgggcggcggccggggcaaggatgcaggcgcgcgggcggcggccggggggcagccgcgcggggcagggcatggagactggcggtggcctaggccctgggaggatgcgcgggatcctggctgctccttgaggcgctgcagcggctccgcccgacgcccgacaccaacgaagccctccacaaaaaacggcacgcaactgtctccatctccatcggtgccaccgtccgtcctccgcgtgtctgacgacccgagcttggatgttggcgggctagaggatgtgaaaaggattcttctagatactattctgctccctttgacgtataatcgcatgatttcttctaaattgcgcaagcgattaggtgtctgggtatatggacctccgggaacagggaagatacctcgagatcaagaattgctaatgcctggttttaatgggatgaacacgtccggtggatgcaccgaagtgttcaaagactctcccgaccccgaccgcgccccacccccgagccgcctgccccggccgccgctcgccacggccgccgtcccgcccccgaccgcgctccggacccctggagcccgccccggccgccgccgcggccgtctctcccgcccccagcagcgcccgccctcgagtagcagatctctacacccgtctagccgcctgttcctgagcctaagcattgagcagagctccaccccaccctcgcccagctggagaagcagagccggtgcacctagccacgttggccacaacgccgtcgagcaaccaagggctcagcatcctacatgccaccgtgtcatgtgcggactccttccacctcgaggctatgggtggggaggtgatctacctatcggtgaagacttcttccagatgagggaaaaggagaagtttgagaaggaagctgagaggcagaaagatcaaggaaatttggaagacaagagccaagtctag

SEQ ID NO: 40247 - DNA, 336 bp, Zea mays
  Peptide Sequence Number=SeqID_82026
atgtacaacaagctctggcgcagccgccgcttggacgcggtgcagagcggctgctccgcgctgtccatcgtcaagcagggggaccccatggtcgtcgccaacgtcggcgactctcgggggtactaccttgctgatgagcgcagggtgcacttcgttttacagcccaaccaagagtcatcagtactcggtatatcgcacgtgttcgacgactactatatcgaggaccatggcgtcatcttgacgacgcaggaggtgacgcagaggaggaccgacaataatgaccagttcgtcatcctcgccaccattggggtagcttttgtgccgacttgcctttaa

SEQ ID NO: 40248 - DNA, 162 bp, Zea mays
  Peptide Sequence Number=SeqID_82027
atgacgccatcacgtcgtccagctcatcgtccacctgaagcccaacctgccacctcaaccaagagtcatcagtacttggtgacgcaggggaggaccgacaacaatgaccagttcgtcatcctcgccaccgttggggtagcttttgtgccgacttgcctttaa

SEQ ID NO: 40249 - DNA, 363 bp, Zea mays
  Peptide Sequence Number=SeqID_82028
atgatgaagggacgagaattccgcatattcgcgctcagattctcgccctctgctgatgcttctgaattgtgttatgagcagctggagctggagggcatccagagaatctcggcaagaaggaaggaacaggagcaggtgcgtcgtgaggcgacggaggacctggccgaggatctgtcagaaggcgagaagggagacaccatcggcgagcttgcgccggttgagacgaccaagaagaagttccagaggaacttctctgaccttaccgtatggtctgacgacaataaggagaagaagctttacattgtgctcatcaggtctacccacttgcacattgttttgttctatgttgtactaaattgctaa

SEQ ID NO: 40250 - DNA, 246 bp, Zea mays
  Peptide Sequence Number=SeqID_82029
atggcgcgcgccggaatcagcagggtcgacgacgtcgaagcagcgaagtcagcagagtcgacgaggtcagaagatcatgaggagtcacgtgaggacgcttcccaaaaaccttattcgccctctcctggtgcaggatctagaaggcgaagggttccggagacctgctctcctgatcgcagatgcacctctgcggtcgggatgaagagaactgtaaggcggctcagctgtgaagagaggcgaaagtga

SEQ ID NO: 40251 - DNA, 210 bp, Zea mays
  Peptide Sequence Number=SeqID_82030
atggcgcgcgccggaatcagcagggtcgacgacgtcgaagcagcgaagtcagcagagtcgacgaggtcagaagatcatgagcagtcgcatgaggacgcttcccaaaaaccttattcgccctctcctggtgcaggatctagaagatgcacctctgcggtcgggatgaagagaactggaaggtggctcagctgtgaagagaggcgaaagtga

SEQ ID NO: 40252 - DNA, 616 bp, Zea mays
  Peptide Sequence Number=SeqID_82031
atgaccatgtcacccctcccggttgatggtgaagttgaggctcccgaatcggttggacgctccgggagtgcattcgacacgggtgcctccatcgacctcatggtcgtgccaagattcctcggtagagggggttgggcttccagggccctgatcgcctctccttttccattaaaggcgtgccgactgtcggtgtttcatacctcgctccgaccagtaaatttattctacgcgttctgggctctggatggatctcgtggtctggggccaacctcttccttttataggccgaggaagaggtcagccagcagtggcttccttaagaaggagtcatcaggtggcggaacaaatgatgatacctatcaaaagctcaaagaagaaaatgagaggctaaagatgagcttgacacaacttaaagggaaatgcatcgctcaaccttctcaagataaccgtgatcacatggtgaagaagcttgagacgggaacaaccgtggcatgcactacatcccttgaagaaaatgtcaaggacttgaggattgtcaagaggaagaaacaaaagatgaaattcaacgcctcttccaaaagcctcaaccatgcctccatacaaagtaacacccaag

SEQ ID NO: 40253 - DNA, 616 bp, Zea mays
  Peptide Sequence Number=SeqID_82032
atgaccatgtcacccctcccggttgatggtgaagttgaggctcccgaatcggttggacgctccgggagtgcattcgacacgggtgcctccatcgacctcatggtcgtgccaagattcctcggtagagggggttgggcttccagggccctgatcgcctctccttttccattaaaggcgtgccgactgtcggtgtttcatacctcgctccgaccagtaaatttattctacgcgttctgggctctggatggatctcgtggtctggggccaacctcttccttttataggccgaggaagaggtcagccagcagtggcttccttaagaaggagtcatcaggtggcggaacaaatgatgatacctatcaaaagctcaaagaagaaaatgagaggctaaagatgagcttgacacaacttaaagggaaatgcatcgctcaaccttctcaagataaccgtgatcacatggtgaagaagcttgagacgggaacaaccgtggcatgcactacatcccttgaagaaaatgtcaaggacttgaggattgccaagaggaagaaacaaaagatgaaattcaacgcctcttccaaaagcctcaaccatgcctccatacaaagtaacacccaag

SEQ ID NO: 40254 - DNA, 756 bp, Zea mays
  Peptide Sequence Number=SeqID_82033
atgactgtgatcaaggcagctggagcggagccgtgcggagacggcggcgcgtacggcgcgaggcggcggcagtcgctgcgggcgcggtacgcgtacgggttcgtcttcttcgccaccaacctgctggcctggttcgtcagggactacggggcaagggcgctccgcggcttgcatcatgtgccggtctgcggagcaggggactccaagtgcttccagtccggaggagtgcttcgaaatgttaagatatttttctgggtgatgtttgccacaacatttggaactcgcaagctccatgaagctcgtaattcgtggcattctggatgttggattctgaagtctcttgtgtatgccatgtcgatcggcatcccatttatcatccctaacatcttcatccaattttatggtgaagttgctcgactgggtgccgggatatttctcctcctccagctcataagcatgctccacttcatatcatggtgcaataaacgatggatgccagatcctggatcaaatcaatgttacttcagtcttcaggtcctgaagctagaactgaccatggcgtgtcacccttatgtgattctcagtgggttgtttgggttattcttgtcaaccatctcctacattgcttcgtttgttggaattggcgtgctgtatgttctgtatgtccccaactcctcttgtgcgttcaacatcttcactattacatggacggcaatcttggtgactataatgatggcagtatcattgcactccaag

SEQ ID NO: 40255 - DNA, 828 bp, Zea mays
  Peptide Sequence Number=SeqID_82034
atgtcgatcggcatcccatttatcatccctaacatcttcatccaattttatggtgaagttgctcgactgggtgccgggatatttctcctcctccagctcataagcatgctccacttcatatcatggtgcaataaacgatggatgccagatcctggatcaaatcaatgttacttcagtcttcaggtcctgaagctagaactgaccatggcgtgtcacccttatgtgattctcagtgggttgtttgggttattcttgtcaaccatctcctacattgcttcgtttgttggaattggcgtgctgtatgttctgtatgtccccaactcctcttgtgcgttcaacatcttcactattacatggacggcaatcttggtgactataatgatggcagtatcattgcactccaaggtttgtgattttagttcatttttgtttgctgagaaggttaacgagggtcttctctcttctgggatcatgagttcatatattgttttcctttgttggtctgcactccacagtgagccgcaaactgggaagtgccactctcatatgaaaattgcccaggatggcgattcagctactatcgttagcttcattatcgcaatttgttccattgtaatggccacgttttctactggaatcgacaccaaatccttccagtttcggaatgataaagtacaattggatgaggacatcccctacagctacgagattttccacattgtgtttgcgatgggggctatgtacttcgcaatgctgttcattagctgggagcttaatcacccaacaagaaagtggagcatagatgttggatgggcaagtacatggtga

SEQ ID NO: 40256 - DNA, 537 bp, Zea mays
  Peptide Sequence Number=SeqID_82035
atgactagaatgatacaggaggtggaccagctcctcaagctcggcgtcaatgtcaccgtctacagcggacaggtcgacctcatctgggcgaccaaaggcaccatggactgggttcagaagctcaagttggacggcctcaacagtttcctgagctctcccagaacgcccatctactgcaacaaggaggggcagtccggcacccaggccttcgtcaagtcctacaagaacctcaacttctactggatactcgaagccggacacatggggaatggaggagcttatgggaaaggaatctcctcgctcttcaattttgattccttcttcatagatctccttcatttctctgtccacctaaagagaaaaagatttaaatgttttctgcataatgttccacttcctgttttcatgctgatggcaacaatggacaggtacctctggacaacccttgccctgcgctcaagatgctggctgacattacgcgatctcctgccgagtaacaggaggaagcaaacaaggcgatggaatggaacgacctga

SEQ ID NO: 40257 - DNA, 1155 bp, Zea mays
  Peptide Sequence Number=SeqID_82036
atgttgttgtcaaggtttgtgcctaacatgttatatgctctggacgcctgcaagatgccatctcaagtcatggatccgaggcgccacctctcccagttcagcaatccaaccgtggttgcgtcctccttctctgaggagcagtttcgccttcccacagaggtggggcgagcagtgagacgacgtgttcgatgctctggttggagacttcatgaagcccaggatacaggaggtggaccagctcctcaagctcgtcgtcaatgtcaccgtctacaacagacagaggcaggtcagattttggaagcaggagtcgctgcatcacattggtggggcgagcagtcagacgacgtgttcgatgctctggctggagacttcatgaagcccaggatacaggaggtggaccagctcctcaagctcggcgtcaatgtcaccgtctacagcggacaggtcgacctcatctgggcgaccaaaggcaccatggactgggttcagaagctcaagttggacggcctcaacagtttcctgagctctcccagaacgcccatctactgcaacaaggaggggcagtccggcacccaggccttcgtcaagtcctacaagaacctcaacttctactggatactcgaagccggacacatggggaatggaggagcttatgggaaaggaatctcctcgctcttcaattttgattccttcttcatagatctccttcatttctctgtccacctaaagagaaaaagatttaaatgttttctgcataatgttccacttcctgttttcatgctgatggcaacaatggacagatgccttgcgaccgaagtttgtctcgtttgggtggataaaggaggggcggagggtttgctacctggagtaatcgagcttgggtgtggacttcttctcgacgtcgaggacaacagtgttcatgccgcggacggtctcaagagcgtactccacctagaagatgtggccgccattggctgcggggccgccatgcctccagtggcgctgcccgacaaggaggctgggtatttgggggattattggcgaagcatcatggctcccgacgaagcaggggctgcgactagcgcgttggacgttgctgggggctgtctgatactggcggtggctgctgcctgggggcaacgacagagctcatga

SEQ ID NO: 40258 - DNA, 201 bp, Zea mays
  Peptide Sequence Number=SeqID_82037
atgcctccagtggcgttgcccgacaaggaggctgggtatttgggggattatcggcgaagcatcatggctcccgacgaagcaggggctgcgactagcgcgctggacgttgctggggggctgtctgatactggcggtggctgctgcctgggggcagcggcagagctcatgatcgtcgagacctttgataccagattgatgtag

SEQ ID NO: 40259 - DNA, 540 bp, Zea mays
  Peptide Sequence Number=SeqID_82038
atggctcccgacgaagcaggggctgcgactagcgcgctagacgttgctggggggccgcctgatgctggcggtggctgctgcctgggggcagcgacagagctcatgatcgtcgagacctttgataccagattggtggccgcatgcctcggactcgcgcatggacactgccacatgggcccttgtgccagcctcacctcactagccagtcgtgccatgctagaatccacgtgcgcacttctctgctggtgggtccttggtgtcggtctccgcgcgtgctcactcctctacaggtgggacccatttgtcgggttcatctccgtcctcgcaatgacaccctcgcgaatcggatcagaccatggaatccgcatagcatctctgtgcactaacctagatccgcctccacttccttcgggggtctattgcaatggcgcgcgccgcccaccacggactcctcggctcgaaatcgccctcttccatgcatataaaggtggagccatgaccgtggctattgtgcgccgccatgaccgagcgaagagatga

SEQ ID NO: 40260 - DNA, 147 bp, Zea mays
  Peptide Sequence Number=SeqID_82039
atggcgggcggaggaaagctcgccggagctaaggaggggcgtctggccagcaagggcttacaggttttgctgactggatcaagagatatggagggtgaagttgggtttgtctcactgctgagcacagagagaagatccagggtttga

SEQ ID NO: 40261 - DNA, 312 bp, Zea mays
  Peptide Sequence Number=SeqID_82040
atgtgcgagccgccgtcggaagcttcaccagagatcaaggaagatgtgtgcgcgtggaatttgacagtggctcaccggattgctcggtccacgcgtggccgtgggcaaccgaagtccggcgaagatgatcttgggtctctggtgaggttctgtcgggtccgagagcctggaaagctccacgggccactagcgaagcttaccgaggcgcaggcgcaacttgaacgtggctggagtgagctggctacggtggccgaggctcgggcggtgatggcgggcggaggaaagctcgccggagctaaggaggggcggtga

SEQ ID NO: 40262 - DNA, 822 bp, Zea mays
  Peptide Sequence Number=SeqID_82041
atggcgcgacttaccggcggcgaggaaggtccgacgaggggcggggcgggcgggctcgtcggtggtgagcgctccggcctgctcacgcggtggcatcgttcaatccagtggcacagggagcttcacggggagggcgacagtaccaacctcgacgcggctatagagtcgctcctgaacgtggagaagcagatgaggctggccggcgatgtcgccggcacgcggaaggccgtcatcgacatcgtcgagctctgctacaaggccggcgcgtggaagacgctaaacgaccagatcgttctcctctccaagaggagaggccagcttaagcaggccattactgctatggttcagaaagcaatggactacattgatttgacaccagacattgacacacgcgtcgagctaatcaaaacactgagcagcgtctctgctggcaaaatttatgttgagatagagagagcaagattgatcaaaaggcttgcaaatatcaaagaggagcagggaaagattgacgaggctgctgatttgatgcaagaagttgctgtcgaaacatttggctccatggcaaagacggagaaaattgctttcattcttgagcaggtccggctatgcctagatcgtcaagattatgtccgagcacaaattttatcaaggaaaatcagtactagagtatttgacgcagatccatcaaaggaaaaaaagaaaccaaaggagggtgacaacattgttcaggatgctcctgcagatattccttccctcctagaattgaagcgtatctactatgaactgatgattcggtatgtcatgcttctcaatctcaattag

SEQ ID NO: 40263 - DNA, 1026 bp, Zea mays
  Peptide Sequence Number=SeqID_82042
atgactacgagcgagcggcgagcgagcagattgcttgatggcttcctgcgttccaaggaggaggtccaaggccgtgccccaattatcgccgcactccttcaactccctcctcgccgcgctcctgcggcggggccggcgctgctcgccgctttcctgcgctgccccggcgcctcccccgacgtggccacgctcaacaccctcatccacggcctctccaccgcctcgccgcgcccgtcttcccccgcgctcctcaggctcttccgcttcctgccggaggcctacgccttcgcgcccgacgccatcacgtacaactccatgctggctgctctgtgccgagcgggggacctggccaccgcgcgcaggctgttcgatggaatgcgcgcgggcgagcaaggcggggaggctggcgccttccctaacgtggtcgcctacaccaccatgatcagggcgtgctgtgcgagtaggcttgccgatgaggcgctgtcgctcttcaagatgatgctcgcggatggcgtgcggccgaacaggatcacctacaacaccatggtgcagggcttctgccaggccggaaggatggagccggtaaaggaggtgttcgggatggactcatttaagcgggacacgtgcacgttcaatacgctgatggccgcgcactgtagagaagggcggatacaggacgcgaagaaggtgtttgatcagatgatggagctccgcgtgaggcgcgattctgcgagttacagcatcgtgacccgggcgttgtgcgagaacggtgagtttggtcgagcagaggagcttgtggacagcctcttggagaaggaggttctcaagaaaagaggtggttgtgtgccactcattgcatcttacaatccagtttttaagtacttctgtgagaatggcaaggcaaagaaggccaggttgttattcgggcagctgctggatattaggagcaaggtcgatttcctagcattcaacactaccggaatcaacctcttcgccgagtgccggaagcactcggcgaagccttaa

SEQ ID NO: 40264 - DNA, 2037 bp, Zea mays
  Peptide Sequence Number=SeqID_82043
atggcactcggcaaagaaggaaacctgggaaccgacaaagccatctttgccgagtgctgttgccaaggcactcggcaaagggactggcaaagggacccactggaggactctttgtcgagtgccggtccactagacactcggcaaagagtcctcctttgtcgagtgcctacgagagctctcggcacagggactggcggtactgccatttaccttaagcacttgtgtttaagggccgtcacaaatgacttagggatatgcttcgtgggtgacaaaaccatcttcttcacctggagtgccacacacaccaccaaatcccgaacacccacgcgagcgtttcaaaatttaaccaaatttcattcagaacaaagcaaaaacaaaaaaacgccatttccctgtcgtcccaaatgggccacgggcgcaccgccggagacggagccggcgtcgacggcggcggcgcggaagctgcaccacctgctccgctcccgcgacctcctcccggcgctctcgtacctccgcaccctcccttcccccttcaccctgctccccaaccacgcgctcaacgcgctcctccgggccctcgccgccgctggccgcgtgcgcgccgccgcctccctgttccgcgccatccccgcgcctacgccgcactccttcaactccttcctcgccgcgctcttgcggcggggccggcgccgcgcggcgtcggcgctgctcgccgctttcctgcgctgccccggcgcctcccccgacgtggccacgctcaacaccctcatccacggcctctccactgcctcgccgcgcccgtcttcccccgcgctcctcaggctcttccgcttcctgccggaggcctacgccttcgcgcccgacgccatcacgtacaactccatgctggctgctctgtgccgagcgggggacctggccaccgcgcgcaggctgttcgatggaatgcgcgcgggcgagcaaggcggggaggctggcgccttccctaacgtggtcgcctacaccaccatgatcagggcgtgctgtgcgagtaggcttgccgatgaggcgctgtcgctcttcaagatgatgctcgcggatggcgtgcggccgaacaggatcacctacaacaccatggtgcagggcttctgccaggccggaaggatggagctggtaaaggaggtgttcgggatggactcatttaagccggacacgtgcacgttcaatacgctgatggccgcgcactgtagagaagggcggatacaggacgcgaagaaggtgtttgatcagatgatggagctccgcgtgaggcgcgactctgcgagttacagcatcgtgaccagggcgttgtgcgagaacggtgagtttggtcgagcagaggagcttgtggacagcctcttggagaaggaggttctcaagaaaagaggtggttgtgtgccactcattgcatcttacaatccagtttttaagtacctctgtgagaatggcaaggcaaagaaggccaggttgttattcgggcagctgctggatattaggagcaaggtcgatttcctagcattcaagacactaatcctaggacattgtaaggagggagattttgaagaagggtacgagctggtgctctcaatgttgaagagggatcttatgcctgacagtgagtgctatattgctgtaatagatggctttatgcagaaggggaggatgaaatctgcctgggaggctcttcacaggatgttaaacagtggtcttcgacctagcacaagtacgttccactctgttcttctggggcttttgaagaaagatggctgtgcgaaagaagccgcagatttgatagagataatgctggagaggaagatcaggcagaatgttgacctttctactaatctgattggtgtgttgttcaaaagtgatcttaatgaccgtgcatacaagattactaagcatctgtacgacaatggatattacattaagatggaaaaactaatcgcgacactttgtgagggacaagaagttcatagatgccgcggagttttctttgttcagcttgcggaagcgccatga

SEQ ID NO: 40265 - DNA, 2433 bp, Zea mays
  Peptide Sequence Number=SeqID_82044
atggcccttgtgcggaagtttgggaagccagacatattcctcactatgacgtgcaaccccaattgggatgaaataacgagagagcttctccctatgcagtcaccacaggatcgtccggaccttgttgttcgcatattccgtgcaaaactagaggaactgaagaagagattgactaagcatgatattcttggaaaaatccgggcttatgtctatgtcgtggagttccagaagcgaggtttgcctcatgtccatttcctactcatcatgcagagaaagtacaagctaacttgccccgatcagtatgatctccttatctccgctgagatgcctgacaagaagaagtaccctgaactatacaagatggttatcaagcatatgatgcatggaccgtgcggattgctaaatcctaaatgtccatgcactaagggtcgtgcttcatgcaaaaaccattatcctagagcttttagcaatgcaacgtctcaaggaaaggattcatatcctatttataggcgtcgtgatgatgggcatgcaaacaaggctgatggtgacgttgatgagatcaagcagtatagagatgctaggtgggtgacccctccagaagccctttggaggatattcagctttgatctaagtcaaaactctccaccagtgatgcaactgcagctccatcttgaaaacatgcatatggtgtcatttcacgagcgtgctaaagtaaatcatgttgtccaacgtccaggtgccgataggtcaatgcttacggcatattttgaggcaaataggctacacgaggaggctcggggcatcctttaccgtgattttcctgagtggtacactttgcagcaaggcaaagtgtggcaaaggaggaaacgaaacacgggtggacaggttggtagaatagtctctgcttatccagctgagggggagcgcttttatcttcgacttctcttaaaccatgtgacgggtgctacctcctatgcggatctaaggacagtagatggtgacacactaccatcttttcgtgaggcagcacaaaggaggggactgcttgaagcagacaacacaatagatgagtgtctcaatgaagccgctatttaccaaatgccgtcagcactacgaaggttatttgcaacaatactggtatactgcgagccgaacgatgtggcagaattatggcagagacaccttgattcaatgtcagaggactatcagcgtagtactcaaagcaaaacccatgtgcaacagatggtcttgattgacattagaaacattttgcagtcaatgggtaaagacataaagacattccctctccctgctatcatcgacaaatatgacgattcacatggtactgatagagagatttacgaggaggaaagtatcgagccgacagcagaagacgttgctatgaaagaaaccctaaatgaggagcagaggtctgcctatgataagatcctatctgtcgttgacaccaataacggtggagtgttctttgtggatgggcctggtgggactggcaagacctatctgtataaggcactgcttgcggcactacgcagtcaggacaagattgcagttgcaacagctacatctggtgttgcggcttccatattgcctggggggaggactgcccattcacgcttcaagataccacttactattgatgatggtgctgtatgtagcttcacgaaacaaagcgggacagcaaagttgctacaaaaagcatcgctcattatctgggatgaggcatcgatgactaagagacaagcaattgaggcgctagacaatagcatgcgtgatataatgggacggcctgagctgccctttggtgggagaactgttgtgttcgggggtgatttcagacaagtactccctgttgtacgcaaggggtcaagggctcagatagttgctgcctctctacggagttcttacctctgggaatccatgtgccacctaaagcttgttcaaaacatgagggcacagagcgacccatggtttgcagaatatttgttgcgcgtcggtggtggaactgaggaagcgaacaacgatggtgatgttcgtcttccagatgaggtatgtgtgccatatactggtaatgatcgcgaccttgatagactgatagatgacatttaccccaatctaaatgaaaacatgtctaacacaagctacatcacttcaagagcaatattgtctacacggaatgactgggtggatatgataaatatgaggatgatcgatcgtttccaaggggagcagatgatgttccatagttttgacactgcggtggatgatcctaataactattacccatcagagtttctaaacacgctgactcctaatggactacccccgcacgttctgaagctcaaagttggatgcccaatcatgttgcttaggaatatagaccctgctaatggactttgcaatggcacgaggtga

SEQ ID NO: 40266 - DNA, 453 bp, Zea mays
  Peptide Sequence Number=SeqID_82045
atggagattgggggcggcgcgtacctcaacctgaaacccggacgggcgacggctgatgaaacccttgcagtagagcagattaggaaggaggaacgaggaatgcctgcccttgcgcccttcccatttgggaacattgcctgcatgaagaaaggcaagtctacacttacagattcccttgtggcagctgctgggattattgcccaggaagttgctggtgatgttcgcatgactgatactcgtgcagatgaagccgagcgtggcatcacaatcaaatctactgaggaaaaggcaggaaacccgctcaagaaatccgctcaagaaatcccggccgttctacgcccgaacaggcaggcagaggcacagacggacatgccacacacaggcacacagccacacgcgccgagccctttttcctccggcaagctggccgcccccgcacctccggcggcataa

SEQ ID NO: 40267 - DNA, 372 bp, Zea mays
  Peptide Sequence Number=SeqID_82046
atggagattgggggcggcgcgtacctcaacctgaaacccggacgggcgacggctgatgaaacccttgcagtagagcagattaggaaggaggaacgaggaatgcctgcccttgcgcccttcccatttgggaacgttgcctggatgaagaaaggcaagtctacacttacagattcccttgtggcagctgctgggattattgcccaggaagttgctggtgatgttcgcatgactgatactcgtgcagatgaagccgagcgtggcatcacaatcaaatctactgaggaaaaggcaggaaacccgctcaagaaatcccgaccgttctacgcccgaacaggaaccttcggccttgagatgaaggtgcgcatggtatga

SEQ ID NO: 40268 - DNA, 333 bp, Zea mays
  Peptide Sequence Number=SeqID_82047
atgaacgcgtgcaagctgctcggtcccaggtcggcctggagagtggaagccgaacgacgtgccggtgccagagatgaacgcgtgcaagctgctcggtcccaggtcggcctggagagtggaagccgaatgacggacggcgaacggagattgggggacggagctcagagattagaaatggagattgggggcggcgcgtacctcaacctgaaacctggacgggctatggctgatgaaacccttgcagtagagcagattaggaaggaggaacgaggaatgcctgcccttgcgcccttcccatttgggagctggtccatggtccgcgtctgtggttga

SEQ ID NO: 40269 - DNA, 333 bp, Zea mays
  Peptide Sequence Number=SeqID_82048
atgaacgcgtgcaagctgctcggtcctaggtcggcctggagagtggaagccgaacgacgtgccggtgccagagatgaacgcgtgcaagctgctcggtcccaggtcggcctggagagtggaagccgaatgacggacggcgaacggagattgggggacggagctcagagattagaaatggagattgggggcggcgcgtacctcaacctgaaacctggacgggctatggctgatgaaacccttgcagtagagcagattaggaaggaggaacgaggaatgcctgcccttgcgcccttcccatttgggagctggtccatggtccgcgtctgtggttga

SEQ ID NO: 40270 - DNA, 1809 bp, Zea mays
  Peptide Sequence Number=SeqID_82049
atgaagaacgtagaccgaccaccttccaatccaaaacgcatcataatccagtctactcaggagtgcttcagcgttgacataccccgtgctccggcggggactgttagacccgagacaaggcgtgctgctgatgaggatgatgactttatgccatcatccaagaagcgtaacttggacgacagccctgggaaagttttgaagaaggtagtcactaagcggcggaaagcagtgcccccaccccgacagcagaagctgaacgtcagatgcaacccccaagatgtgttagtaagcatacaaatattaaatgacagacagcaacaagcaattgcacgtaggggattttctagtattcttgatatgagactggatgcactcggcagcagatcacacttagcttggctgatggaaaagctcgaccccaatgacatgacaattcgagctggccctggaaaggagctgaaaataacaaaggatacggtgcacctaattttgggtttaccgaatgctgggggaggaactgcattgggcatcgatgaagctgttgttgccaacaatttgagagctgaacttgggctatcgaaagaagattttggggttacagctctacaagatcgtttgaggaaaggttctgacgatgatttaagcatcagatgctttttcttgatattgttcaataggttgttgttccctactgccagctggggaataacgaaccatgaggttcttttaaccgagcagatggatcgtttccaccagattgactggtgtcagcttattttcaatgatttatgccaagctgccaagaagtggcataacaggagcgttacgaacgtttctacaaccatctatggatgttccatcgttattcttctgtattatttggatcatttgcatgactcagcggcacccctgaacaaacgtggaacaccacgaatcaaatactttgataggaatattattcaagccctgacaagagctgacaagggcaagatacgcaaaggagaagaagcatttggacattgctcgcataagaccaggaccaatgcttttgatgttcctcgtcctgacccatctggacagcactcaattcacatcgaactcccgctcatcagggatttgatatcaagcaagcttaatcagcttccatcccgccaccgcatgggtttcatagagaagctgtcacattttgatgcggaggttggtaaggcgtgttcagttattaaacagaatcttcagcagattgttgagaaacaattcaatctatctgatgtttttggcgagttaattgatgaggtcctccgtgccgaggcgggtgacaacgaagatgcttatgatgtgcagaaaaccacatcaaaatcagatgatcatcttccccagacagctgaaggatgtacgtgtccggcccccccaactgtacccgatatgtctactccagtttctcaggtggatacgcagtttacagacacacagggtaaacatggtgacggtggcaagaacatgccgaccaatacaaacgtcactcctaaagcaacaccacacatggatcctgacgcgccgatatttgatgcgacaccgcaaatcaagtctactggcggcgtacaacaagtggcagaaacagacttgcctgacagtggtccatgctttgatcagactccatctgaacatgtttatgttgaaaccgatccagctacaaacactccacaggttggccaggcttctcttgattcggagatgcaaactgtgttagctctacgcgaatatttgtgtggtctgcaatctgacaccggcaggtacgaagttcatacttaa

SEQ ID NO: 40271 - DNA, 468 bp, Zea mays
  Peptide Sequence Number=SeqID_82050
atggagaagaaagtgaagtcgcacgacactcgtcagatgttcgacgacaagctcgagccaggatttatcagcattcgtacgagtattgggtcgcgtttgatgctggtgagccgatttatactttttgagccgccgacgacccccgccgcctgtgctcgtggccagggtaactccgaccacctccgacgccgacccgcacaccgacgtgaccgtcgcgacctcccggacgtcactgaccaccccgccggagctctactgccgccgaataatcatccaaaaatgttcaaaccaattttgctagattctggaaattatgaactatcagactgtaatcttgctgacggagagtacatcctcgtgccggagcaaggagctgctcaggaggtagccccagatccagcacccgagcctacaccagaggacctgcctgccactgctttggaaggcaagccccggttttatgcataa

SEQ ID NO: 40272 - DNA, 777 bp, Zea mays
  Peptide Sequence Number=SeqID_82051
atgccttccgcaccggcggccgcatgccccgcgcccgctacgcctcctctctgtcggctctctgcgcgtgcctcgcacccgccccacaaagtccacaaccgacgcccggcaaaccccgcgcctgactgccgcaaaccccgcaaaccaagccgcgaccaatctgcaaaatctgcccgcctcgctgtgttcccgtgcgcggagtgcaatatagtggtcggggtggacattctcctggataaatttgcatatctccaaagaggatcgctcgagttccctcttcctttgatgatagaccttcctcatggttgggtcatagtaccacatagtccttacaaatacacaggatgtgagcaaatgttgtatgttctcctcttcttgatcacacaatggacagctctcatgatgctcaagtccccacccaaaacttccagatttctttccagatttcagagaacatgtacaaatctatctctgagacagttagtcgtggattacaatgactggatgtgcgaacccattttctatgcgcgattcgatttgctatttgcctatgcacaagcggtggtgcagtgcctaagtgctttgtttgttctgttggatgtttgtgcggatttggtaaagggagccaaggacaagcatttgagggttaagggacctgtcaggatccctattaaggttctccacatcaccactcacaagtccccttgcggtgaaggatttggtcgcaatcctctttcacatatatgcatgacttatttggttactatatggccctaa

SEQ ID NO: 40273 - DNA, 336 bp, Zea mays
  Peptide Sequence Number=SeqID_82052
atggatgttagggaaaaccatgaagatttctgccaggttttggagaacatgtacaaaattttttctgagacagttagtcgcggattacaattgatggattgtgcggatttggtaaagggagccaaggacaagcatttgagggttaagggacctgccaggatccctactaaggctctccacatcaccactcgtgtgtccccttgcgatgaagaggttgatgctatttatctaatgatagtgtggactgatgatccagaagtcatcatgaagttagaaaattaccaatctaccttgtttggtttatttggaatggctgaaaactcaccactatattag

SEQ ID NO: 40274 - DNA, 282 bp, Zea mays
  Peptide Sequence Number=SeqID_82053
atgaaggcggacgcgggcgtggcgttgtactggctgcacccctggttgagcagcgtggcctgcgggtcggcgaaggtgatcgggacccacgcggacgcaactaccaaggtggggtggtactgccgtactgatagctggagtaatggggattggattggaattggaactagggagtgtggactgtggaggcgtaacctggaactggacacctggagggagcagttagcacaacaacaacaacaacaacaacaaagtctttttgtcccaagcacgttggggtag

SEQ ID NO: 40275 - DNA, 1617 bp, Zea mays
  Peptide Sequence Number=SeqID_82054
atgcctgaccccaccaccaaacccccttcgccacgcccccgccgtcgccgcaggctctgcggcctctgcctcggcaccgcgctcctcgcgctcctcgtcgccgcgctcgtccatgtcgtcgccccgcttccgcgcgccgcttccgcctccgcgcgcttctccgtcatcatagacggaggcagcacgggcacccgggcccacgtcttcgtcacggggcacgacggcagcccggatctggcgctatccaccgtgatgcgcgtctccccgggcctctcgtccttcgccgccgacccggcgcgggccggggagtctttgaagccgctgatagattttgcgagggataagattgacggcgcgggcagcgccgctggggaggcggaggtgcgactcatggccaccgcagggctgcgcctgctcgaggagcgcacccaggaggcaatcttagcgtcctgcagggacgttctacgagcctctgggttccggttcgaggacgcgtgggccaaggtgatcccaggctcggatgaaggtatctatgcttgggttgcagcaaattatgctcttggaagacttggaggggatcctaacagaaccgttggaataattgaacttgggggcgcttcagctcagcttgccttcgtttctgatgaagtacttccacccaaactgtcatataattatacttttattgaaacaacatacactctctataccaacagctttttaaactttggtcaaaatgcagctcaagactcgttccatgaaatgctgaggtcaagaggctcttctgaaaatgctacacttgctgatccttgtgctcccagaggatattcacgcaatgaagaaatgatgctgaggatgagtggtgcttcaaggtcaacattagagaaccagtatgttgataatgggactggaaactttacagaatgcatatcttcttcactgcttttactgcaaaaaggaaaggttgttcacatacaacaacaacaacaacaacaacaacaacaacaaagcctttttgtcccaagcacgttgggaatagtgccacatgtatctcatataaatgcagagaagtgccagtatcaacaatgtcacctgggatctactttcgtacctgagctgcgtggatacttcttggcaactgaaaatttctattttacatcaaagttctttggacttaagaagtcttcatcactctctgatttcatgtttgctggagaacaattttgcaatcaggatttgtccacccttagaaaaaaacatcctaataggtcagatgaagatttttcacggtattgcttctcgatggcatatattgtggctctactgcatgacagtcttggtgtatcactggatgataagaggattgagtattcaaaccaggttggagacattcaggttgaatgggctctaggagctttcatcacactgattcaaaatgcaagtttaaagccattacacaccgctgtggaatcaacccatagcaatagaccattgtttgctgtgctgggaatgtttcttttatgtggagtactttttgtatcaagatggaggaagcacaagacgaaagtcatatacgacttagagaaaggccggtacatcataacacacatcagctga

SEQ ID NO: 40276 - DNA, 990 bp, Zea mays
  Peptide Sequence Number=SeqID_82055
cttgccttcgtttctgatgaagtacttccacccaaactgtcatataattatacttttattgaaacaacatacactctctataccaacagctttttaaactttggtcaaaatgcagctcaagactcgttccatgaaatgctgaggtcaagaggctcttctgaaaatgctacacttgctgatccttgtgctcccagaggatattcacgcaatgaagaaatgatgctgaggatgagtggtgcttcaaggtcaacattagagaaccagtatgttgataatgggactggaaactttacagaatgcatatcttcttcactgcttttactgcaaaaaggaaaggttgttcacatacaacaacaacaacaacaacaacaacaacaacaaagcctttttgtcccaagcacgttgggaatagtgccacatgtatctcatataaatgcagagaagtgccagtatcaacaatgtcacctgggatctactttcgtacctgagctgcgtggatacttcttggcaactgaaaatttctattttacatcaaagttctttggacttaagaagtcttcatcactctctgatttcatgtttgctggagaacaattttgcaatcaggatttgtccacccttagaaaaaaacatcctaataggtcagatgaagatttttcacggtattgcttctcgatggcatatattgtggctctactgcatgacagtcttggtgtatcactggatgataagaggattgagtattcaaaccaggttggagacattcaggttgaatgggctctaggagctttcatcacactgattcaaaatgcaagtttaaagccattacacaccgctgtggaatcaacccatagcaatagaccattgtttgctgtgctgggaatgtttcttttatgtggagtactttttgtatcaagatggaggaagcacaagacgaaagtcatatacgacttagagaaaggccggtacatcataacacacatcagctga

SEQ ID NO: 40277 - DNA, 774 bp, Zea mays
  Peptide Sequence Number=SeqID_82056
atgatgctgaggatgagtggtgcttcaaggtcaacattagagaaccagtatgttgataatgggactggaaactttacagaatgcatatcttcttcactgcttttactgcaaaaaggaaaggttgttcacatacaacaacaacaacaacaacaacaacaacaacaaagcctttttgtcccaagcacgttgggaatagtgccacatgtatctcatataaatgcagagaagtgccagtatcaacaatgtcacctgggatctactttcgtacctgagctgcgtggatacttcttggcaactgaaaatttctattttacatcaaagttctttggacttaagaagtcttcatcactctctgatttcatgtttgctggagaacaattttgcaatcaggatttgtccacccttagaaaaaaacatcctaataggtcagatgaagatttttcacggtattgcttctcgatggcatatattgtggctctactgcatgacagtcttggtgtatcactggatgataagaggattgagtattcaaaccaggttggagacattcaggttgaatgggctctaggagctttcatcacactgattcaaaatgcaagtttaaagccattacacaccgctgtggaatcaacccatagcaatagaccattgtttgctgtgctgggaatgtttcttttatgtggagtactttttgtatcaagatggaggaagcacaagacgaaagtcatatacgacttagagaaaggccggtacatcataacacacatcagctga

SEQ ID NO: 40278 - DNA, 567 bp, Zea mays
  Peptide Sequence Number=SeqID_82057
atggcttgggcggaccaggcagacccgacggccacggccagaccctccgcaagggtcccggcccgagcggtcgcctcagtcaaataccattacattcccttacaaacgggaccccagctccattcccacaaaaatgaactacctccacaccagaagggctgcaagataacaaactccaagcggctcaccggcgaccactgcaccagcagcgacaacgacctccgcctcgggcggctagacagcagcagcgattgccccagggcaaacgctactgtgaaaaggccctcgcccccgtccccacacgggaggcgagaacaagccattaaagccaaagagccggaggcaaccacctctgcagtgggaagcctcacctatggcggccaccacctcagcaccaatgacagcggccacctgcgcaccaacgctgcaccggcgaatggcggccgccccagcgcgcacaaggaggtcctcgctcctgtcctcgctacgggagtgaggacaagaccatctaggaacgcgaacaccgcccctgcggcgtatgacgtcttgtacgaccccccggtgtag

SEQ ID NO: 40279 - DNA, 1758 bp, Zea mays
  Peptide Sequence Number=SeqID_82058
atgactttcgtgcctttcgactatatcgatagcggaatcctaaaaacgacaagagagacctcgaacggcaaggctgaccaagccaagggactcctacgcctccgggatacggataccttactcatcaccttccgcgaaagggcaaacactactgtgaaaaggccctcgcccccgttcccacaccgggggcgagaacaagccattaaagccaaagagccggaggtccggccacaggtggcactgacggtctcgtcggcggaggcgaccacctctacagtgggaagcctcacctatggcggccaccacctcagcaccgacgacagtggccacctgcgcaccaacgccacaccggcgaatggcggccgccccagcgcgcacaaggaggtcctcgctcccgtcctcgctatgagagtgaggacaagatcatccaggaacgcggacatcgcccctgcggcgtacgatgtcttgtacgaccccccggtgtggccggcagcgtgggacgggccgtggacgtggccgacctgcgcacgacgcgaccgtcgcccgtgcggtggacggacagccacaccccgaccaggcagtaggtggcagttcgcctcctccgcaaagctggtgaacacccttctccccctaatgctggaggaagaagcgggtcgccagcccatgcggaaggcaggaccccaactcggcttgccctcccccctagcacagatgatgaacatccttgaagctgagggcagggggaggccacagcccggctcgctcttctccaccacaaggctaacgcaagaagaaggcaacaccggtgcaccccatctggaggcccggaagatggaaagacgcgatgaatgcgagaagagcaaaggcatggctactgcccgggagattgatccctttttaaagacagatctccccactcgcgccccaaagcatcacgggcaaagtctcccccaacgtgctccagggttcccgccctacgacacggtggctaggtcccacatggatcgggaaaagggacatttcgaaggagcccttcgcagcaaaagaaacgggccccaagccctcctactgatcaagggttcgaaggttgcgccccgcggggttcggcgaccgccccagagcactcgcgctccgagccctttactgatcaggggttcgaaggctggctcctcgaagggattcgacagccgccccagaacatgcagagtcagggatgaccctgggtacatccgttacatggccaaggctcgggctacgctcccgaggtaccctaagacatttccgagaccagcaggaatggtttgtaatggaatcccaccgaagggaggcaccgagccctcggaccctatcgaatgggtccgggtccagcaaatcacctacagggatcacctgacaccttatcctgacacgcgcgcctcagttggcaagcctcgggcgcaacagggagctccgcctcgcccgacccgaggcctcggcctcagcctcggcctcgggagaaggtctctgcctcgcccgaccccaggcctcgacctcagcctcggcctcaggagaaggtctccacctcgcccgaccccaggcctcggcctcagtctcggcctcaggagaaggtccccgcctcgcccgacctcagcctcggcctcgggaggagtcacaacctctcctgacctcagcctcggcctcaggagaagtcaccgcctcgcccgacctcggcctcggaccgactacgctacaggggatacatcattaccctacctctag

SEQ ID NO: 40280 - DNA, 411 bp, Zea mays
  Peptide Sequence Number=SeqID_82059
atgcaggctggcccatcggatcctcagcgctttctgttcattttggtcgggaacaagattgatttagatggcgggagcaaacggatggttccggagaagaaagcgagggaatggtgcgcctccaagggtgatattccatacttcgagacctctgcgaaggaggtccacaacgtcgacactgctttcctatgcatcgctaggctcgccttggagcatgagcatgaccaagacatgaaagcgggggaatggtgcgcctccaagggcgatattccatacttcgagacctctgcgaaggaggaccacaacgtcgacactgctttcctatgcatggctagactcgccttggagcatgagcatgaccaagacatgttgccaaatcctggccactcccagattgatttgcagttctaa

SEQ ID NO: 40281 - DNA, 822 bp, Zea mays
  Peptide Sequence Number=SeqID_82060
atgcaggctggcccatcggatcctcagcgctttctgttcattttggtcgggaacaagattgatttagatggcgggagcaaacggatggttccggagaagaaagcgagggaatggtgcgcctccaagggtgatattccatacttcgagacctctgcgaaggaggtccacaacgtcgacactgctttcctatgcatcgctaggctcgccttggagcatgagcatgaccaagacatgaaagcgggggaatggtgcgcctccaagggcgatattccatacttcgagacctctgcgaaggaggaccacaacgtcgacactgctttcctatgcatggctagactcgccttggagcatgagcatgaccaagacatcacacacaactcgtcctcggtcctccgtacccttccgcgctccgccccagcacgaaacgccgaaaccctaccctttggcttctccgtcctcgtcctcgcccccgcccatccgcgcaccagccgaatgtcgtcgggaggcggtggggggcagcagttccgctacacgcagacgccgtccaaggtgctgcacctgcggaaccttccgtgggagtgcgcggaagaggagctcgtcgagctctgcaagcctttcggccgcatcgtcaacaccaagagcggcgtcggcgccaaccacaaccaggcctttgtcgagttcgttttctcggcttttgggtatgttcataaaatagccacctttgaaaaggctgcaggttttcaggcattgatccagtacactgatgcggctactgcttcagctgctaaagaatccttagatggaaggagcatcccaaggtga

SEQ ID NO: 40282 - DNA, 918 bp, Zea mays
  Peptide Sequence Number=SeqID_82061
atgcaggctggcccatcggatcctcagcgctttctgttcattttggtcgggaacaagattgatttagatggcgggagcaaacggatggttccggagaagaaagcgagggaatggtgcgcctccaagggtgatattccatacttcgagacctctgcgaaggaggtccacaacgtcgacactgctttcctatgcatcgctaggctcgccttggagcatgagcatgaccaagacatgaaagcgggggaatggtgcgcctccaagggcgatattccatacttcgagacctctgcgaaggaggaccacaacgtcgacactgctttcctatgcatggctagactcgccttggagcatgagcatgaccaagacatcacacacaactcgtcctcggtcctccgtacccttccgcgctccgccccagcacgaaacgccgaaaccctaccctttggcttctccgtcctcgtcctcgcccccgcccatccgcgcaccagccgaatgtcgtcgggaggcggtggggggcagcagttccgctacacgcagacgccgtccaaggtgctgcacctgcggaaccttccgtgggagtgcgcggaagaggagctcgtcgagctctgcaagcctttcggccgcatcgtcaacaccaagagcggcgtcggcgccaaccacaaccaggcctttgtcgagttcgttttctcggcttttgggtatgttcataaaatagccacctttgaaaaggctgcaggttttcaggcattgatccagtacactgatgcggctactgcttcagctgctaaagaatccttagatggaaggagcatcccaagttacttgcttccggagcatgtaacatcctgctgcctgcgaatttctttttctgcacataaggatttgaacatcaagtttcagtcgaaccgcagcaggtaa

SEQ ID NO: 40283 - DNA, 675 bp, Zea mays
  Peptide Sequence Number=SeqID_82062
atggttggcgatggggttttctcggcttttgggtatgttcataaaatagccacctatgaaaaggctgcaggttttcaggcattgatccagtacactgatgcagctactgcttcagctgctagagaatccttagatggaaggagcatcccaaggttgtctcttgcctgctcatggattcaacaggcagttcaaaaggttgacctatttgggaatctctggatctatgcttcagttacaagatcaacacatccacaagcatctgttgttcaagctgaaatgccggctgatgtacatagagaggctagagaaggtgtcctagagtttgagagagcttttagggagaggttctctgcctacacattagctgctaagaggcatattgactccactaccatcttcgatgtccaaggtgtgatttggattttgagcagcaccagtttcttatttttgttaatgcaagccttgaagcgtatcaaactctatgaactgaagcacaaagatattagtaaagtcgagaaggacatcgttctcagctcaatgagtattgtgatgcttggtatttttgttcttcacacccccttcgccaaggccatcagtggcgccgcgctgcacctcttcagcttcgtcgaggccatcagcatcggtcgcccacctagaaactcttcaagatcatag

SEQ ID NO: 40284 - DNA, 321 bp, Zea mays
  Peptide Sequence Number=SeqID_82063
atgggcgcaaaccggacccctaggatgggttccggacccctctgtgtgtggtccggcctactcacagcagggtcccaggattctgggacaaagaatacccagaccttaatcaaggccaggcaggggtctggagccgacacgtgtccggaccatactgtgtacgcttctgctccccgctcaggcggagccccgatgctgccatgtggcatggtgcatgtgacgcgatgtgccgcctccgcattaaatgagacatgtccattccgcgggcaggcggcgaccagtccattccgcaggcggcgtgcctgtccattccactggtag

SEQ ID NO: 40285 - DNA, 726 bp, Zea mays
  Peptide Sequence Number=SeqID_82064
atggctcgcccaagtctcgggcgactactctgggtccacagcagcgcccgactcaactacatgggtaggtccggagccgccacatgtccagagaaggtgatatactccaaggcatcaacagtgggtcaggacccccatgggagagcgtcggacccctggatatgcggtccggacctccaaggcggcgacctgtccattccgctggcaggcggcgacctgtccattccgcaggcggcgtgcctgtccattccactagcaggcggcatgccccatactgtcgcatgcactacgctcatcattactcgcacgttaccaaggaagcagccgccacatatcaatactgcacggattgtggacatcatggcgcccggagattgcacaggcgtacttgcattagttactcctatagtgtattccttctgttatgttcctgggcccacatgtcggggctcagcatccttgtatgtgcctcccttgagctataaaagggaaggcacacaacgtttacaagacaggcactcagactctcagacacactcacaagctctcaaacatattcaatacacatacacagtggagatcgtcgagcaccacggcttgacttctgaggacttcgtgatggaggaagaagctgcatcttccatgccacgaagctccaaccaccctgcgcctagtgctgctgctgtgtgtgctgcgcagcagcacacgcctgcacatacatcctaa

SEQ ID NO: 40286 - DNA, 267 bp, Zea mays
  Peptide Sequence Number=SeqID_82065
atgggcaagaacaacaagcgcaagcgtgaaccaactcctccatcggaggagtttggtgactcggagtactcagaggaggagttctcctctgagtctgaggggtctccggctcccatacccttgcgtgagtcgtctgacgactcagacgactcccaggggcttgcggcggaggtctggacgtacatccgggccgtcgagcgctctgggctcgagggctcggatgacgactgtaacaccctgaatttgggtatctacccctccgtctaa

SEQ ID NO: 40287 - DNA, 456 bp, Zea mays
  Peptide Sequence Number=SeqID_82066
atgggcaagagcaagaaaggcggaagttcgtcgcaccactccggcgataagcgaaagcgcgagccgagtcccccctccgatgactttggtgactccgagtactcggaggaggagttctcctccgagtccaaggggtcgccagcctacacctctccccggtgtcgtccgatgactcggacgattctcaggggatcgtcgtcgagttgtggacgtacatccgggccgtcgagtgctctgggctcgagggctcggatgagtcagagatcttctcggatgaggaggattcctccgactcgtccgagtaggggagcagtgatgatggcgatgacgagggcgatggcggcgacaagggcgacggtgacggcggcaagggtgacggcgacaacggcaagggcgacggcggcagcggcaaggacgatggtggtagcggcagggccagtggcaaagcgccactag

SEQ ID NO: 40288 - DNA, 876 bp, Zea mays
  Peptide Sequence Number=SeqID_82067
atgggtgtcggggtgcaaacaaaacacgagtttttgccaacggaaccaattcttcgtttttcgcaacgaacatgcccaatcctctactttaggtccaaaactcatgtttggggtggtttcgcgctatatcgttgccgcacgtcacccattccgaaaacgggtgtcggggtgcatacaaagcacgagtttttgccaccggaaccatttcttcgtttttcgcaacgaacatgcccaatccactactttaggtccaaaactcatgtttgggatggtttcgcgcaatttcgttgccacacgtcacacattccgaaaacgggtgtcggggtgcatacaaagcacgagttttcgccaccggaaccaattattcgtttttcgcaacgaacatgcccaatgcactactttaggtccaaaactcatgtttggggtggtttcgcgctatatcgttgccgcacgtcacccattccgaaaacgggtgtcggggtgcatacaaagcacgagtttttgccaccggaaccatttcttcgtttttcgcaacgaatatgctcaatcctctactttaggtccaaaactcatgtttggggtcgtttcacgctatatcgttgccgcacgtcacccattccaaaaacgggggtcggggtgcatacaaagcacgagtttttgccaccggaaccatttcttcgtttttcgcaacgaacatgcccaatccactactttatgtccaaaactcatgtttggggtggtttcacgcattttcgttgccacacgtcacacattccgaaaacgggtgtcggggtgcatacaaagcacgacttttcgccaccggaaccaattattcgtttttcgcaacgaacttgcccaatgcactactttaggtaa

SEQ ID NO: 40289 - DNA, 282 bp, Zea mays
  Peptide Sequence Number=SeqID_82068
atgggtgacgtgcggcaacgaaacgatcttcgtgatcaggccgatctcgcatcagcaaggtcggtaaccacagggagttggttcagcgattgcattggcgccctcgggcttgctcgtcgtagtcggatcgcaagggtcaacttccgccaaatcggaaatatctctactcgccgaaagatcgggcacctcagctacatcattccggtggcaaaaactcgtgctttgtatgcaccccgacacccgttttgggaaagggtgacgtacgacaacgaaattgcgtga

SEQ ID NO: 40290 - DNA, 270 bp, Zea mays
  Peptide Sequence Number=SeqID_82069
atgagttttggacgtaaagtagtggattgggcagaaatagttccggtggcaaaaactcgtgctttgtatgcaccccgacaccagtttttggaatgggtgacgtgcggcaacaaaattgcgagtgatgaggacatcactatgagtacgactacaccagcagcacctccacatcaagcgccacttccttcattagctgggccaatcactcgggcccgtgccagagatcttaacttcgtcatgctactgaagaatgagggcccagaagaatag

SEQ ID NO: 40291 - DNA, 1485 bp, Zea mays
  Peptide Sequence Number=SeqID_82070
atgggtgtcggggtgcaaacaaaacacgagtttttgccaacggaaccaattcttcgtttttcgcaacgaacatgcccaatcctctactttaggtccaaaactcatgtttggggtggtttcgcgctatatcgttgccgcacgtcacccattccgaaaacgggtgtcggggtgcatacaaagcacgagtttttgccaccggaaccatttcttcgtttttcgcaacgaacatgcccaatccactactttaggtccaaaactcatgtttggggtggtttcgcgcaatttcgttgccacacgtcacacattccgaaaacgggtgtcggggtgcatacaaagcacgagttttcgccaccggaaccaattattcgtttttcgcaacgaacatgcccaatgcactactttaggtccaaaactcatgtttggggtggtttcgcgctatatcgttgccgcacgtcacccattccgaaaacgggtgtcggggtgcatacaaagcacgagtttttgccaccggaaccatttcttcgtttttcgcaacgaatatgctcaatcctctactttaggtccaaaactcatgtttggggtcgtttcacgctatatcgttgccgcacgtcacccattccaaaaacgggggtcggggtgcatacaaagcacgagtttttgccaccggaaccatttcttcgtttttcgcaacgaacatgcccaatccactactttatgtccaaaactcatgtttggggtggtttcacgcattttcgttgccacacgtcacacattccgaaaacgggtgtcggggtgcatacaaagcacgacttttcgccaccggaaccaattattcgtttttcgcaacgaacttgcccaatgcactactttaggtccaaaactcatgtttggggtggtttcgcgctatatcgttgccgcacgtcacccattccgaaaacgggtgtcggggtaaaaactcatgtttggggtggtttcgcgcaatttcgttgccgcacgtcacacattccaaaaacgggtgtcggggtgcatacaaagcacgagtttttgccaccggaaccaattcttcgtttttcgcaacgaacatgcccaatccgctactttaggtccaaaactcatgtttggggtggtttcgcgctatatcgttgccgcacgtcacccattccaaaaacgggtgtcggggtgcatacaaagcacgagtttttgccaccggaaccaattcttcgtttttcgcaacgaacttgcccaatccactacgttaggtccgaaactcatgtttggggtggtttcgcgcaatttcgttgccacacgtcacctattccggaaacgggtgtaaggtccaagactcatgtttggggtggtttcgcgctatattgttgccgcacttcacccattccgaaaacaggtgtcggggtgcatacaaagcatgagtttttgccactagaaccatttcttcgtttttcgcaaagaacaagcccaatccactag

SEQ ID NO: 40292 - DNA, 462 bp, Zea mays
  Peptide Sequence Number=SeqID_82071
atggtcatccgtagggatgatcaccagcctcgtggtggggagaagcaagccgggctgcggcctctgccccgccctcagcttcaaggatgttcatcatccgggctggggaggagggcgcaccgagttggggctgcctccgcgtgggccagcgacccacttcttcctccagcattcgggggagaggggcatcctccagctgtgcggaggaggcgtcctccagccatgcgggggaaggtgaactgctgctgcctggccagggtgcagctgtccgtcctctatccgggcgacggtcgcgccgtgcgcaggtggctgctgtcgccgatgctgaagcggcggctgccgctggagaggcttcccaccgcagcggtggttgcttccgccgacgagaccgttagtgccacctacgctcggggcctccggctctttggctttaatggctggttctcgtcccccgtgaggtga

SEQ ID NO: 40293 - DNA, 609 bp, Zea mays
  Peptide Sequence Number=SeqID_82072
atgcctcataatatctacaaagaagggctacgctccgataccagctgtgacggaacctcccaaaagcagcaaaagtctgctacttcctcacctaaaaacaacgaagggataaaccctgagtatggaatactcagcaagtcttacccgactaaagaaaagactctcaagggtatgctggttatatgggagtcaagcaaagctaagcatcaaaaagcttttataaaacaggtgatcaaggaaggtaatcaaattcaaggaagaaaaggaaaagggttaaacagaactgggccggattcagcccagcggcccagggaggaaaggcgcccgcgcgcggccgcgccctggcggctttgcaaaaagggccccgagtttttgactaactgtgaacgagttccttcactgttcctgtgtgtcgctgaccgatcacaaaaaggcccctgcacttctactaattcacaattggaagtccacgacgccgttcaagcgcggccgtgctccggcgagcatctacgccggccgattgaggctaagacaggtgctaagcttcggccgagaccaaatccgagtccccatgaatgtttcccccaacttaatttggctcatgattga

SEQ ID NO: 40294 - DNA, 714 bp, Zea mays
  Peptide Sequence Number=SeqID_82073
atggaggctatggcgagctcggctgctgcggtgcgaggaagaaggagcagaggcaccgcgccatgggagaggaggagccgagctccttgctacagccgtgggaagaagggctcggcagccatgggaggaagagagttcttgcgcgctgaacagagaaaggagttgtgcaagcagcaaaagtctgctacttcctcacctaaaaacaacgaagggataaaccctgagtatggaatactcagcaagtcttacccgactaaagaaaagactctcaagggtatgctggttatatgggagtcaagcaaagctaagcatcaaaaagcttttataaaacaggtgatcaaggaaggtaatcaaattcaaggaagaaaaggaaaagggttaaacagaactgggccggattcagcccagcggcccagggaggaaaggcgcccgcgcgcggccgcgccctggcggctttgcaaaaagggccccgagtttttgactaactgtgaacgagttccttcactgttcctgtgtgtcgctgaccgatcacaaaaaggcccctgcacttctactaattcacaattggaagtccacgacgccgttcaagcgcggccgtgctccggcgagcatctacgccggccgattgaggctaagacaggtgctaagcttcggccgagaccaaatccgagtccccatgaatgtttcccccaacttaatttggctcatgattga

SEQ ID NO: 40295 - DNA, 363 bp, Zea mays
  Peptide Sequence Number=SeqID_82074
atggaaatcgttgctcgccggcaggggacgcgctggagagatggcgaccaggggaaaactcacggccatggaagtcgcagggaaaacaggggcgccagtgacctgttgttccatgagcgctggagcttaggggagggagagccgaggcgctgcgcggggaagaaaggcgccatggctggggcgtcgggcttcatccctgagcagggcgtcggccaagggaaactgctccctacagggagcgagcgccagggaggagggcgccatggtggccgaggggaggagctgagctccctgcgcctgctgctcgctggaggaagaaagaaggccagggaaaaaggaaagtggcggctgaaaaaaagatag

SEQ ID NO: 40296 - DNA, 234 bp, Zea mays
  Peptide Sequence Number=SeqID_82075
atgggggaggaactagcaagggcgtcgcgccatggctgctggccggagctggagctggagctcggccagcagcagaggggctcggccttggaggttgcagggagttggaaatcgctgctcgtcggcaggggacgcgctggagagatggcgaccaggggaaaactcacggccatggaagtcgcagggaaaacaggggcgcaagtgacctgctgttccatgagcgctggagcttag

SEQ ID NO: 40297 - DNA, 302 bp, Zea mays
  Peptide Sequence Number=SeqID_82076
gttgtattgttaatccacgcagcatcgctggtagtgcttggggagaagacaacattgatgtctccagatgttcttgtagcccgtggtgtgccccgttgtaggttactacagtatcctagagagtttgtggtgacattcccaagggcataccacattgggtttagtcatgaggttattgctgacagtagcatcaatcttgcatttcgtgtaggaatttcaaatggtggtgtggatatgactacagatacagaacatcctccaactatagataattaccaaacaagtaataatggctccgaatg

SEQ ID NO: 40298 - DNA, 846 bp, Zea mays
  Peptide Sequence Number=SeqID_82077
atggccaccgtaggcgattgcaaggagaaggcggcgggcgatgaagactccaccgagaagttggcagtgcagctcacgggcatatacctattctctactattctatatgagcctaacgaaggcgtccacaactacactgtgcccccgcccccgtcaaccacgcgcgtcatgcccctgcccacgctctaccgcaatctccgccgccgtccgcacttgggtcagctattcccaggcccgttcaaggccatgcgtgcctatctgtgtgccgagggtaacatggaggacaccgtccgccaggtgaacagtacccccgtactgttcacgctgacttggcatttgcttttgcgtcacacttgtattttcatctccttccaagccgaaggatctatggatatctgctttcctattggtactaagcttttcattcactacactaaaccagttaacttcctttcacactggggcacccaagacatggttgtattgttaatccacgcagcatcgctggtagtgcttggggagaagacaacattgatgtctccagatgttcttgtagcccgtggtgtgccccgttgtaggttactacagtatcctagagagtttgtggtgacattcccaagggcataccacattgggtttagtcatggaatttcaaatggtggtgtggatatgactacagatacagaacatcctccaactatagataattaccaaacaagtaataatggctccgaatggtatgcttctcacatatatgatgcatgggctcgtgcatccaaagctttagatgctttggagctagagagcttcggcagcgccgacatatacttagcctattgtagttag

SEQ ID NO: 40299 - DNA, 390 bp, Zea mays
  Peptide Sequence Number=SeqID_82078
atggccaccgtaggcgattgcaaggagaaggcggcgggcgatgaagactccaccgagaagttggcagtgcagctcacgggcatatacctattctctactattctatatgagcctaacgaaggcgtccacaactacactgtgcccccgcccccgtcaaccacgcgcgtcatgcccctgcccacgctctaccgcaatctccgccgccgtccgcacttgggtcagctattcccaggcccgttcaaggccatgcgtgcctatctgtgtgccgagggtaacatggaggacaccgtccgccaggttggctggcaagtcgcccccgtagcttcatctccattgaggggattgggaacaagaggaggccactgcacttgggacttcgaaaacttatag

SEQ ID NO: 40300 - DNA, 396 bp, Zea mays
  Peptide Sequence Number=SeqID_82079
atgcccgaatcctcgctagctgtctcccctgctcgcgagatcgacgccgacgggtccaagaacaccagagccacccctctgcgagcacccactatggccgccgcaggggagtgcaaggagaaggcggcaggcgatgaagactccgccgagaagttggcagtggtgctgcccgcacgcaatagcctgtgggttaggacgggcagcctggcagtggataattgctttacatcctgcaaggcaaagggagcaagcaactgcaatcaatggcagaaaatggatcttggcgtctatctcggcgccaagggtgatgacgccgacctgctgccacgtcaggtcgacgttgggcgccgattcttacatgtacacgccaaaataagtgacgccgacatgttgtag

SEQ ID NO: 40301 - DNA, 516 bp, Zea mays
  Peptide Sequence Number=SeqID_82080
atggcgggtggcgggggactgaaccggtcttcatcgagggggcagctgccgccgagtaacttgttggttgctgaggatgatgcttttaaccgtaaccgcagggaatgcgctagggcggcttatcagcttccataccctggctctgaaagcaaggcagatgcggtgtacaggatgtactcaagcccaagctcggcttcgtcgcgcttcaatcccctgacaagaagctattgtcaggttcacaagaagttctataaagcaatacaatccatgggaagaacactgaagtgccctgaggaggaatgttctattggtacaaggatcctattgttggaccaggattttccaagacacttaatgatgcacttcgtctgttctctactcccaaatctttgtaaggacacaaaacaattgatgaaaagatgcattttatcttcagatgcatttttagaagattcttgtgcggagggccaagaattggtatacatgcttggattcagggagttcctgctgcgctga

SEQ ID NO: 40302 - DNA, 1902 bp, Zea mays
  Peptide Sequence Number=SeqID_82081
atgcacggtagcacggaacgtggctcggtcgcagctcacctcgccggggctgaggacgggctggccggagagcggctaggcgcgacggggctcgcgtcgaccaagggagtggagagcggtgcacgccatggacggcatttggggagggaaagggcagcacgacatggaagaaaagggagaagagacttgccgagcgggagaagcggtttgggaagaggaaaatcgacttgtttgccgcttcttgccggccgtaggaacagccgcgtcggggcgaagcgcttgcgggagaagcctcccagaagttgtgtttggttcagcttccggcttctggcggccagaatctccccagaagctgaaccaaacaggggcgttgtgtcgcgtttccctgcgggtggctggggcggctgtcccgcgagctgcactggaccttcgtgctcgcggtcgccgccgtctacggtctacggcgcctgtcaaggcgtcggcaacgccatcggcggagtcgccgcggggtactactggaaggacgtgcagcgcgtgcagccttcggtggcccagttctaccaaggcgtcacggacgcgccgtggatcgtcaaacccatctggggcctgctcaccgacgtcgtccccgtggccgggttccgccgccgcccatacttcgttctcgcaggcgtgattggcgtgtcatctatgctgatgttttccctaaaccacgagctggggattatgccggcgttgctgatgctgacggcgcagagtgcgggcgccgctgtaggcgacgtgacagtggacgctctggttgctcagaacagcatcacgcacccgccccttgctgctgatatgcaaagcttgtgtgggtttagctcctctattggagcgctgcttggattctccctaagtggcttgcttgtgcactcaatgggctcccagggggctcttggtctgttgagtatcccctctgcactggtgttattagctggcattctgctgaaggagaaccgtggtacagaatttgattacatgcaggttcacaagaagttctataaagcaatacaatccatgggaagaacactgaagtgccctcaggtctggagaccatgtgcatatatttttgtttctctcaatttaagcctggatattcaaggaggaatgttctattggtacacggaccctgttgttggaccaggattttctgagggatatattggtctcatctattcaattggttcagttggttcactaattggagttttactataccaaagcaccctaaaggactatacttttcggagcatgctattatggggtcaagtgctctcaagtctggcaggaatgcttgatctggtgttagtgacccggctaaacctgaaaattggcatgccggattacttctttgcggtggctgataacacagtttcccaaatggttggtaggctccaatggctaccactacttgtgctttgctctaagctttgtcctcctggcaccgaagggacattgtatgcattactcatgtctctacaaaatgccgggttgctgatgtctgcttggtggggtggcctgctgctgcacatgctgaacgtgacccgattggagttcagtaacctctggatcgccgtcttgattagaaacatatcaaggtttgtccctttgatgctactgtttcttgttcctgactgtgatcagaactcagcactcctgcctgcagagatgcttcatggcagtgaatcaacagaaaccatggaaaaaggatcaaatgagttttctgttcttgttggagacgattgtggctgcatttctcctgatgtgacagttgataatgagcaaatcaaaatgtttgatgctgaaattgatgatgtcgaattgatcccactggttaacaagagcggattgaccatctcatga

SEQ ID NO: 40303 - DNA, 468 bp, Zea mays
  Peptide Sequence Number=SeqID_82082
atgggggttttgcccaaggtcaccacatcaaaattgaagctcaactataggagaacacctttgcttaaaggtgtgagcattgttgttaaggaaaaactgaagataatcatgcctgaagttggactgtcaggctgtaaaatcgccgtggataaggattggctcgccggcgataaggatgtcgccgtggctcggctttcccaagcttcaattgggtcgttcgcgccaccggttggccggaacacttccatccatatgaccatccgccctgtcaccgtggaccggcgtgctgaccgaggaccctttaactggtcacatgcctcgtcatggcatacccttgagagtcttttccttagtcgggtgaggaagcgacaaatttttgttgcttttgctccaaggtggtaccaaatgaggaaaaacaagactgaagtgcgggaggacttggtcctccacataggatcttttgcttaa

SEQ ID NO: 40304 - DNA, 744 bp, Zea mays
  Peptide Sequence Number=SeqID_82083
atggtgacaaaatgcttcattgaatacgaagatgcttcgtctcagagaaaacttcatggtgtatggaggcgctttgtctttaatgaaaaatgcttcgatgtgaacgaaaagaagggaaggaatcctaaagtcttcaggacctttggaacatgcttcagtctaacggtcttcggcaccaccatcctgcagatagataaagttcaaccaccaaaattacttaggaaaaggttttaccctatttccctttcaaaggctttggggatatcttcagccgaaggggcaatttcttcagaggtcaccacatcaaaattgaagctcaactataggagaacaactttgcttaaaggtgtgagcattgttgttaaggaaaaactgaagataatcatgcctgaagttggactgtcaggctgtaaaatcgccgtggataaggattggctcgccggcgataaggatgtcgccgtggctcggctttcccaagcttcaattgggtcgttcgcgccaccggttggccggaacacttccatccatatgaccatccgccctgtcaccgtggaccggcgtgctgaccggggaccctttaactggtcacatgcctcatcatggcatacccttgagagtcttttccttagtcgggtgaggaagcgacaaatttttgttgcttttgctccaaggtggtaccaaatgaggaaaaacaagactgaagtgtgggaggacttggtcctccacataggatcttttgcttaa

SEQ ID NO: 40305 - DNA, 363 bp, Zea mays
  Peptide Sequence Number=SeqID_82084
atggaggccaagtcacaccatcaaccaaatcaaggaggtacctgcaaaaattatgccacaagcaaggctgagtatactaatactcaactagacttacccggatacaatggatcaagcagtctcattagctgcgagaagcagacgattcgaatcgagttttatccttgcaaggtaaacctaaacacacgacatgtcagggcactccgtccccacacacgtcaaccgtccccatcgattccccgttcgcagccaggcctcaccgccttggcatataatgctccactgaccccaaccgccgtcgtgcagtggccgcacttgtacccaccatatctagaatgggagacccagtctcaggtcgcgtga

SEQ ID NO: 40306 - DNA, 831 bp, Zea mays
  Peptide Sequence Number=SeqID_82085
atggcggtagaattcaatccaagggcgcagagagcttcacggggtgctaaggagtttacccgtgcaaggaatcaaagaaagactcaccgtggagctcggtctacgtacaccggtggtcgggtgaagtccggcgacatcgatccggtgtctccggcgagatatgccctagttctcaagataggcgggcgccaaatcgggtctgtcggcactgttcaccccaagacaaaatggatgtcaaatcatgccaaatggtcttggcttctgttcaaatttttccagggtgttcctaagtacaatggatcaagcagtctcattagctgcgagaagcagacgattcgaatcgagttttatccttgcaaggtaaacctaaacacacgacatgtaggggcactccgtccccatcgattccctggcaacagaaaggggctcaccgccttggcgtacaatgcctcactgaccccgactggccgtcgtgcagtgaccgcacttgtacccaccataaccggaatgggagaccacgtctcaggtcgcgtgaggagggcaatcatcgggcaggttcactcaggtactaggcttaccgatttaccatatttctcggtcaccacatcaaaattgaagctcaactataggagaacaactttgcttaaaggtgtgagcattgttgttaaggaaaaactgaagataatcactcctgaagttggactgtcaggctatctaagtctgaaaattcagactgacagtggactgatagcaacttcaagaccaagttcatgcatgatctgctgcctttttgtgacaataccatatagcaaagttgtagctggtatgtag

SEQ ID NO: 40307 - DNA, 426 bp, Zea mays
  Peptide Sequence Number=SeqID_82086
atggagaaagtttttattgtgttatggcatgaaatcccagcaaggcagcagcaattaacatctggagaacataaaaatcatgtgcaaagggaaagaaaaaaaagagagaagagactgaatctgcgctcaggtcttgctgtcatcgtccctggtgtttccttgcgggacagtgtttatttgcttttgaaaaagtcatggtgttgccatttaatgttgaatattgttgaacctgtgataaaattatgttgggttcgatacatttgttatgctggtacttatttttgcgattcaaatgattatgtctatcgtaatgttaatgggtatgggtacccgatgggtacccgctacccatggtgggtatgggtatggcgtaattttgtacccatgatgggtagtgggtatgagtatgggtcaaatttttcctag

SEQ ID NO: 40308 - DNA, 444 bp, Zea mays
  Peptide Sequence Number=SeqID_82087
atggcgcaccggacagtccggtgcacaccggacatgtccggtgcccctgccacgtcatcagtgccgttggaatctgaccgttggagttctgacttgtgggccacccttgatgtccggtggcgcaccggacagctcctgttcattgtccggtgcgccagtatgggcaaacctgacgtctgcgcgcgctgcggcgcatttaatgcctctgcaggcattatattgccatttaatgttgaatatgttgaacctgtgataaaattatgttgggttcgatacatttgttatgctggtacttatttttgcgattcaaatgatcatgtctatcgtaatgttaatgggtatgggtacccgatgggtacccgctacccatggtgggtatgggtatggcgtaattttatacccatgatgggtagtgggtatgggtacgggtcaattttttcctag

SEQ ID NO: 40309 - DNA, 420 bp, Zea mays
  Peptide Sequence Number=SeqID_82088
atggtggtggccccctgggcgaggtaccttagacaagaatacgtccccgtgttaacgtgggctgccagcacctaccgctccccctcttgcccatatttcagggagaacaacggacggtcgcggcggttttcgctcggcttggggcgtgcgcatcgcgcggctgcgcgcagggtcgggctcgcgctcgggcgctgcgatggcgcagtagggagcgcaggccggccaagtgccgcaggtgggaaggtgaatcgtcaaggccttccgcaccggacaaacagtcacccgcactcattgaacggtgggccacagagtccgagaagatcacgaaggtatgaccttcgtgatattttgctcaaggccttcgtccgaagttcattaaatcctcggggagataatgcttcagcggacgaaggacattaa

SEQ ID NO: 40310 - DNA, 1371 bp, Zea mays
  Peptide Sequence Number=SeqID_82089
atgaacgaacaccggcactcaaggtgccattacaaacggaactccggttccactcccgcaggtacgaacaacccccacattagagggcctgcggggcgacaaaacccctggtggctcgccgacgcccgctccggcagcagcgacaacgacctccgctccgagtggccaaacagcagcagcgatgacctcagggcggacgctgctgcgacgagctcctcgcccacgtccccactcgaggggcgaggacaagctatcaaagccaaagagccgaaggcccggagcgcggatggtggcggcgatctcgtcggcaacgaggacttcttcagccgccatcacctcaacgtcgatgacgacagccatccgcccaccggcagatccccactcggatcctcccggacaggcgtgcaccgacctccgtgcaagaggcgtcgtaccggagcaaaggcaggacagcccaagaacacgaacgccgccttagcagcgcgcgacgtcttgggcggccctctggtgcgcgcggcgcggcgaccgctcgtacggcgggaggggacaccgggagccgagccagagccagctgagccagagagggtgacccacgaacccatgcgggaggtagagctccggctcagcccgccctccaccccagcaaggatgatgaagatccttgaagctgagggcggggcagaggccgcagcccggtttccttctccccaccatcaagctggtggtcaccgtcttgggacagaagaagccaaaccgccacgcgtggagcgcgtaactgcccagcggttacaagcattcctccactttcgcctggaccagcgggtgaaaagtcggaccgccgtgcagacggcatgccactgcaccaaggggacgcaacctttcgacttcgacgcgtccagcttggaggtccaggcccacacgtcatgtaaccggcgcgccgattactacgtgcaagaaactgcaccgccactcgcgctagtatcgcgccttctcgattgcggaaccggtgccgcgactcgaggcgaccctgcgcatgacccgacagtgccaaccgagcacatcggtcacgggtcagtcaaccgcgggagaaggcgcgacggtcgatacggccagaaatgggccgacagtaatggcggtggcaggcgggcggaagcagcagtcaagtcgtcagcaagctcatgccccctcctgggacagcgagagaaccctctccgacggcgtgaagacgacgcgcccgtgttccgttcctcgaacggctcgcgcacgcacaacggatgccccgcgaaccactcgtcccatcgcattaactctgcggcgggacaggcggcacctttggcaggcaaagcagacgacgcttcacctccgccataa

SEQ ID NO: 40311 - DNA, 1143 bp, Zea mays
  Peptide Sequence Number=SeqID_82090
atggccaaatgtgggccggcagtaatggcggtggcaggtgggcggaagcagcagtcaaatcgtctgcaggctcacgacagacgacacctttggcaggcgaagcgggcgatgcttcacctccgccataatgaccgcgtcaaaaaagggaccgggaaaggggatacttcgaaagggatccttctccgtgaaggaagcggaccccgagcccacctactgatcagaggtttgaaggctggcccctcggaagggttcgatagccgcctcaaagcactcgggctccgcgcccactactggtcagaggggttcgtaggctggccccctgacgggttcgacagtcgccccagagcacacagagtaagggatgactctgggtacgttcgatacataaccaaggcccgggctacgctcccgagaggcttaggggctgctctcgcaaacccggcttcggccaaaccattgacagcgtcaacataccagcccgagaacccggaacctgactatgcacccgggcaacgaccagaaaacagcgccgcctgcgctgcttcgactgctgcgccacccgccagggtgaggctgacagcaaccaagtctagcctcgggcgccataggaatctctgcctcgcccgaccccagggctcggactcgacctcgcctcggacgacgatctccgcctcgcccgaccccagggatcggactcagcctcaacttcggaagacggtctccgcctcgcccgacccagggctcggacttgacctcgactccggaagacgatctccgcctcgcccgaccccagggctcggactcgacctcgactctagaagaaggtctccgcctcgcccgaccccagggctcggactcagcctcgacctcggaggagtcaccacctcgctcaggccgaccacgccacaaagggaggccatcattaccctatccctagctagcctaggctacagggaacaagaccggcgtcccatctggctcgccccggtaaaacaagtaatgacggcacctcgcgtgctccatgacaacggtggttctcagccccctacggaagcaaggatacgtcagcaaggatccgacagccccgacagttgtgcttctacagggctcaagcgctcctccgacggccacgacgccacatga

SEQ ID NO: 40312 - DNA, 513 bp, Zea mays
  Peptide Sequence Number=SeqID_82091
atggcgagagtagcgtgtaccctccctgctacagggttgtccgaggtccgttggacaaggacaactgtaggtgggcctaatgacttgggaggttccgtcacagctggtatcggagcgaagcccatctcttcagatattatgaagcatttcaaaaagaattttcaaatacttatccaagaaaatttatttcattcttaccttgccactttctggaagtactcatcttgcaagaccaggaaaaccgcgcgtaagtccactggacccattggcgtgcctcggcatcagttggctccaagacatgaagagagtagcagcggcagcaacgatccaattggagacttagagacccaagtggaacagcttcggatggagctacatcaccgaaatagggtgtgggcaaatgacagtcagcgtatagctaagttgtcagccgaagtcggccgcttgcagtttgagctcctcgaacgagactcggccattgattgggccatctactcgcgctcgatcgcctga

SEQ ID NO: 40313 - DNA, 498 bp, Zea mays
  Peptide Sequence Number=SeqID_82092
atggcgagagtagcgtgtaccctccgtggcaagaggctggacggtggtgtatctgtgctctcggttggcgtgaacctgttctgctttcgcttattcgttccttcgatgtgttgtaatatctatgtgacgggtgaaacgctcttgggaaagtttgagctctccgaacgagactcggccattgattgggccatcaacttgcgctcgattgcttggcatcgtgaagcaaaagctcgagctcgtgtggatgagctcagcacgacccttgataacctgcaattatattgtaataccctacatgaggaagtacatgtattgtatggtcgactacacctggacgtgcctgccgacccagttggaatgggagccggaccatcagggacagcaggtgaaggacctgatggggaactggatctttttaagccccctccttctatgaacctggctgatgagcgatctccggcagcagacagtgaagcaacaaaagataatgaagactag

SEQ ID NO: 40314 - DNA, 1506 bp, Zea mays
  Peptide Sequence Number=SeqID_82093
atgactgaagagcaccaacccccgcggggtcgtgctcctccaacagcaacaagacgaaggcaacacgggtgcaccccatccgggggcccggaaggtggaagggcgcaatgcatgaggggagtgcagaggcatgtccactgcccgggggatcgatacctttttaaaggcggctctccccacttgcattccaagcgtcacgagcaaagtctccacagacgagctccagggttcccaccctccgacgcgggggctgggtcccacacgtcatgcgggctgaccagaaacggaagaagccaaaccacaacacacgaagcaggtaaccacctcacggttataagtgttcccccattctcgccgaaaccagcgggcgaaagggcggaacgccatgcaggaggcgtgcaaccgcaccacggttgtgcaccctttcggcttcatcgcgcccggtgggtcagcgtgaaggcctgggcccgcatgtcatgcaaccggcgcaacggttactgcgtgcaaggaaaccgcaccgccactcggccaatgccgcgtcttctcgactgcggaaccagtgccgcgactcgaggcatccctgcgcataacccaacggtgccaattgggcacaacgatcacgggtcggtcagccgcgaggggaggcacgacggtcgatatggccaaaagtgggccgacagtaattgcagcagcagacgagcagaagcagcggtcaaatcgcccgcaggctcgcatcccctcctgaagcggcaggagagccctctcccacggcatgaagacgacgcgcccatgtttcgttcctcgaacgactcaagcacgcgcaacgccaagcgacacctttggcaggcgaagcggacgtcgtttcgcctctgccataatggccgcgtcaaaaaagccgccccagagcactcgggctccaagctcattactgatcaggggttcgaaggctggcccctcggaagggttcgacagccgccccagagcactcaggctccgcgcccactactgatcaggggttcgaaggctggccccccggaagggttcgacagccgccccagagcatgtagagtgagggatgactctgggtacgtccgttacatggctgaggctcgggctgcgctcccgagtcacttcgcccttccactgaccgacctgacaggaaaacaacgcctctcaccccgctccgactgctgtgccagccacccgggcaaggctgacaacagcaagttcagcctcgggcgcaacaggaagctccgcctcgcccgaccttcggcctcggcctcgggcacaacaggaagctccgcctcgcccgaccttcggcatcggcctcgggaggaggtctccgcctcgcctgaccccaagactcggcctcagcctcggcctcggaaggaatcacgtcctcgtccgaacctggcctcggcctcaggagaagtctctgcctcgcccgaccttgggctcggacccaccgcgccacaggggatacatcattaccctacccctagctag

SEQ ID NO: 40315 - DNA, 225 bp, Zea mays
  Peptide Sequence Number=SeqID_82094
atgcgggggaaggcgaattgttgctgcctgactagggtgcagctgtccgtcctccatccgggcgatgggtttgagacggctcttgacgaggccgtcaagaactgcaaggcgcttgccgaggcggctgagcagaaggaggccgagcgtgtggccatgtccgaggccatctcggctttctgccaggcctttggcctcgacggcgtcccctcgggtagctccccctag

SEQ ID NO: 40316 - DNA, 225 bp, Zea mays
  Peptide Sequence Number=SeqID_82095
atgtctgacattgaccatgccctagaggaaattcttcttgaagaccttttattggagcctcctgaaaccgaaagttctgtcgtccgaacagaggtcctagatgacgtccctttggctgtgcgagaggctccaacttgtggagattcctcgcaaataggaagaatactcaaaagagaaaagacggtggtattcaagttgatcattggatcacttgaaaggggttga

SEQ ID NO: 40317 - DNA, 273 bp, Zea mays
  Peptide Sequence Number=SeqID_82096
atggagaagagttggctctgtacagccaaaaccagctcgagcctggtgcaccggacagtgtccggtgccccagggctgctcgacggtgaactggctgctctcgggaatcgaacgtgcgacgtggctaaaattcaccggactatccggtggtgcaccggactatctgagcgagaggctccaacttgtggagattcctcgcaaatgggaagaatactcaaaagagaaaagaccatggtattcaagttgatcattggatcacttgaaaggggttga

SEQ ID NO: 40318 - DNA, 315 bp, Zea mays
  Peptide Sequence Number=SeqID_82097
atgcaggtggcgtgcaaccgcaccgtgggggcgcaccccttcggcttcgtcgcatccagcatggaggcccaggcccacacgtcatgtaaccgacgcgccggttactacgtgcaagaaaccgcaccgccacttgcgccaatgccgcgccttctcgactgcgaaaccggtgccgcgactcgaggcaaccctgcgcatggcccaacagtgccaatcgagcacaacgatcacggggaccgggaaaggggatatttcgaaagggatccttctccgcgaaggaagcgggccccaagcccttctactgatcaggggttctaa

SEQ ID NO: 40319 - DNA, 1299 bp, Zea mays
  Peptide Sequence Number=SeqID_82098
atgcaggcggcatgcaactgcaccgcggggatgcaccctttcgacttcgacgcatccagcatggaggctcaggcccacacgtcatgtcagtcagccgcgggagagggcgcgatggtcgagatggccaaaagtgggctggcagtaatggcggtggcaggcgggcgaaagcagcagtcaaatcgtctgcaggctcacgtcccctcctggagcagcaggggagccctctcccacgggaccgggaaaggggatactccgaaagggatccttctccgcgaaggaagcgggccccgagccctcctactgatcaggggttcgaaggctggccccttggaagggttcgacagccaccccagagcactcgggccccgcgccctcctactgatcagaggttcgaaggctggcccctcggaagggttcgacagtcgcctcagagcacttgggctcacgcccactactgatcagaggttcgaaggctggcccctcggaagggttcgacagccgcctcagggcactcgggctccgcgcccactactgatcaggggttcgaaggttggccccctgaagggttcgacagccgccccagaacacgcagagcgagggatgactctgggtacgtccgatacatggccgaggctcaggctacgctcccgaggtcaaagctccttccactcaagggacacgatctcgcctcgcccgagcccagcctcgggcaggaacagtagacctaggtggattcacgcctcgcctgagggcctcatcaagcaacgggcgcaccttcgactcgcccgaggcccagctcgggcaggcttcgcagtgaagcaaccttggccagatcgcctcgccaaccgaccaaatcgcaggagcattcaatgcaaggatcgcctgacaccttatcctgacacacgttcctcagtcgacagggccgaagaaaacagcgtcgtctgccctgctccgactgctgtgccacccgccagggtgaggctgacagcagccgagtccagcctcaggcgccataggaagctccgcctcgcccgaccccggggctcggcccccgccttgacctcggaagacggtctccgcctcgcccgaccccagggctcggactcagcctcgacctcggaagacggtctccgcctcgcccgaccccagggctcggactcagcctcgacctcggaggagtcaccgccttgcccgaccttgggctcggaccgaccacgttacagggggtacatcattaccctacccctagctagctcaggctacggggaacaagatcggcgtcccatctggctcgccccg

SEQ ID NO: 40320 - DNA, 570 bp, Zea mays
  Peptide Sequence Number=SeqID_82099
atgagctacttaaaagtgaggataattcaaaggagcgtggtatcccgagaatatgaacactccagagatgcaatatttgagtggtacttccaaacagtggccactaaccatcatggtgaggatgcatcatcagtagcagtcagaatatccatcttgcagtttttgactgaaaagaaagatttaacaattacattgatcaggaaccggattctcccattatattctttggatccttgcagcccatatttgatttcaatggctaattgggttattggtcagcttgcgatatgcctaccagaggacatgagttctagtatttatcagtccttaatgaaggcgttgaccatggagtatgtggaggacataacttgttatccggtttgtgcctctgcttctggtgctattgcagaactcatcgagaatagttatgttccacctgactggctcattcttctgcaagtggttctgaaaagaataagtactggagatgaaaatgagtctgctcttctgttcaagcttctgggcacaatagttgagggtggacaggaaaaagttgtttcatattcctga

SEQ ID NO: 40321 - DNA, 834 bp, Zea mays
  Peptide Sequence Number=SeqID_82100
atggagtatgtggaggacataacttgttatccggtttgtgcctctgcttctggtgctattgcagaactcatcgagaatagttatgttccacctgactggctcattcttctgcaagtggttctgaaaagaataagtactgaagatgaaaatgagtctgctcttctgttcaagcttctaggcacaatagttgaggtcctcgtagcaatggtgcaagcttgggagagctctgcaccagatgaaaacaagacacctgaaaagaggttttggcagtcaggccagtctgctattgcccaaacaatttcattactgttacaaaaagcttggttgtttcaagctgacaatatggagggctctgcattaccacctctgtcatgcgtaaatgatgcttctgtgttacttgagtttgtcatgagttctgtcacttgcatggaagaaactgaaagtctgaaggtctttgagctggtagctacatgggctgacgctattgccaactgggactcctgggaggagatggaggatcagggtgttttcaacacaattaaagaagttgtcaatttccaccagagatttgacctcgacggtctcttcctgaaaacacactttgtgagatgtcattccactagaaatggcaccatcaagatcggtctggagaccaacaagatcatggacttcatcaagtttgacgtcggcaacgtggtcatgatgaccggtgggaggaacaccaggcgtgtaggagtgatcaagaacagggagaagcacaagggcagcttcgagaccatccacgtgctgcttagagatttttctatgtctagttttctcctatttgttgtatag

SEQ ID NO: 40322 - DNA, 603 bp, Zea mays
  Peptide Sequence Number=SeqID_82101
atggatgtggatgagtttatcaccctgctaccagatggagtgcatcatggcatgcctcatatacaaggatcttataaaaggttactttgctcaaaagatccagcgaagctcgtcatccctagcggtggacaagctgatgccacccccgagtgcggcaccctacacccgcaggtccaacctccgctccatctcgtctctccctccgcgctccggctccggatcctatgccggcgccctcccccacccgctcagatcacacagatcgttatcttagtttgtaccactggtactgttgatcctctgtttgatgatctttgtaggagggtattgttcaacaatctgctgaagggtgatttcgagactataacaacgctagatgttgagaaacatgaagttgatgtcataatggatgttcttggaactcaaacatacttgcatcaaatgttatcttttgaagtacaagatacaggtatagaaccagctgtatcaggttggcatgacttaggcactagtgccctagctgttcacagtttgaatcagctcactcttttacttttcgcttggtactttgttttcttgatgaccaagatgttcacaatatga

SEQ ID NO: 40323 - DNA, 519 bp, Zea mays
  Peptide Sequence Number=SeqID_82102
atggatgtggatgagtttatcaccctgctaccagatggagtgcatcatggcatgcctcatatacaaggatcttataaaaggttactttgctcaaaagatccagcgaagctcgtcatccctagcggtggacaagctgatgccacccccgagtgcggcaccctacacccgcaggtccaacctccgctccatctcgtctctccctccgcgctccggctccggatcctatgccggcgccctcccccacccgctcagatcacacagatcgttatcttagtttgtaccactggtactgttgatcctctgtttgatgatctttgtaggagggtattgttcaacaatctgctgaagggtgatttcgagactataacaacgctagatgttgagaaacatgaagttgatgtcataatggatgttcttggaactcaaacatacttgcatcaaatgttatcttttgaagtacaagatacaggtatagaaccagctgtatcaggttggcatgacttaggcactagtgcctag

SEQ ID NO: 40324 - DNA, 1230 bp, Zea mays
  Peptide Sequence Number=SeqID_82103
atgacgcgcccgcccgcccacccccaccccgccgcgattcccctccgcgcgcagatcacgcgcacgcccgcccacccgcgccgcgccgcagcccaccgcgaatcccgcctcgcgacgccactacagcacaatcctcccgcccctacatcccgcgcgtgctcctcgccggcacaatcctcgcgcgtggattccagaccactctttggctctctccatggaaggccgcgtccgtggattctggtcaccggctgtccgcaacccacgcaaggccgacggcggcggcgcggtgacaaagagacccctgcctcctcccctctctcaggtgcgcctccccctctagcatcctcctccatcgtccatcctctactcacaaagaaattcttctcgccaccaccaaccctagcccttaaacgtgcgcatagcatgggaaacatcgctcacctcgccacggagggtagcagtggcagggaggaagggttgcctgcgggagagtctaagaggtttggtgttgtcaagttgctcctatattctcagatcacacagatcgttatcttagtttgtaccactgctattgttgatcctctgtttgattatctttgtaggagggtattgttcaacaatctgctcaaggttgggtgcatggaggcagacatcgcgaagccgtcgatggctccggcagaagtcggcatcgttgcgggcccactgcccaacacggttggtctggaggcgctgaccggcgccatggacaagctggaggccctcttgaggcccaaggagggtcagtccaatccggtcgggcataagcggggcactaatgacaaagatataacagcgaagataaagagagccatggatttatcggaggatttatcggcacatataaagaaaacaaaggataatgtggctggaatattgaataagccacaagcggtagccaccagcaggcgtcaggagccctggtgcagactaatttcacaatataccatgcaccctaccctttctatttacggtgcgcttttcattatcggtcatggagcacatcatgatttcagactgggcgtatcatccactgtctcacatgtttgtagactgaagcaggctaagcgaggtgcactccttgaagtctttgaatccaaagttgtctatgtcaatgggaaatctttggacaaggctgccaaggttaccttgaatggaggagataaaattatcttccattcaccagttaaatag

SEQ ID NO: 40325 - DNA, 1347 bp, Zea mays
  Peptide Sequence Number=SeqID_82104
atgacgcgcccgcccgcccacccccaccccgccgcgattcccctccgcgcgcagatcacgcgcacgcccgcccacccgcgccgcgccgcagcccaccgcgaatcccgcctcgcgacgccactacagcacaatcctcccgcccctacatcccgcgcgtgctcctcgccggcacaatcctcgcgcgtggattccagaccactctttggctctctccatggaaggccgcgtccgtggattctggtcaccggctgtccgcaacccacgcaaggccgacggcggcggcgcggtgacaaagagacccctgcctcctcccctctctcaggtgcgcctccccctctagcatcctcctccatcgtccatcctctactcacaaagaaattcttctcgccaccaccaaccctagcccttaaacgtgcgcatagcatgggaaacatcgctcacctcgccacggagggtagcagtggcagggaggaagggttgcctgcgggagagtctaagaggtttggtgttgtcaagttgctcctatattctcagatcacacagatcgttatcttagtttgtaccactgctattgttgatcctctgtttgattatctttgtaggagggtattgttcaacaatctgctcaaggttgggtgcatggaggcagacatcgcgaagccgtcgatggctccggcagaagtcggcatcgttgcgggcccactgcccaacacggttggtctggaggcgctgaccggcgccatggacaagctggaggccctcttgaggcccaaggagggtcagtccaatccggtcgggcataagcggggcactaatgacaaagatataacagcgaagataaagagagccatggatttatcggaggatttatcggcacatataaagaaaacaaaggataatgtggctggaatattgaataagccacaagcggtagccaccagcaggcgtcaggagccctggtgcagactaatttcacaatataccatgcaccctaccctttctatttacggtgcgcttttcattatcggtcatggagcacatcatgatttcagactgggcgtatcatccactgtctcacatgtttgtagactgaagcaggctaagcgaggtgcactccttgaagtctttgaatccaaagttgtctgtgtcaatgggaaatctttggacaaggttgccaaggttaccttgaatggaggagataaaattatcttccgttcaccacgaggtgcactccttgaagtctttgaatccaaagttgtctatgtcaatgggaaatctttggacaaggctgccaaggttaccttgaatggaggagataaaattatcttccattcaccagttaaatag

SEQ ID NO: 40326 - DNA, 375 bp, Zea mays
  Peptide Sequence Number=SeqID_82105
atggcccgcgcccgcgcctataaagcccgctcaggcgtcgaccacactcttccgcgcacgctcaaacctcacaggagctcagttcaccgctgtttgcccgcgagtgtgcacgccccagtgaagctccccgagcgaggaatcgaagcctacttcgccggagaggccagtccacggtcaccggagttcacaaccccgccggagtgcgtggaccggatcgccgtgatttggccggcacacccgccgccgacgaggaccaccgcctgcgcacgttctctggaggacatggttgctggagtgacttggccgtccatcttgccaccgggttggactgtcgagtgggaccctacctcggctgaggaggagcatgaggagtga

SEQ ID NO: 40327 - DNA, 504 bp, Zea mays
  Peptide Sequence Number=SeqID_82106
atgactgagcacacctcagtgaagctccccgagcgaggaatcgaagcctacttcgccggagaggccagtccacggtcgccggagttcataaccccgccggagtgcgtggaccggatcgccgtgatttggccggcacacccgccgctgacgaagacacccgcctgcgcacgtggaccgagcgattccggccacccccgccgtcgagccgtacatcgctgtgaccgccagagcctccccgaaccaaccccgcccctcgcccggacctatctcaccgcctactgtaaccttgctgacggagagtacgtcctcgtgccagagcaaggagctgctcaggaggtagccccagatccagcactagagcctgcaccagaggacctgcctgccactgctttggaaggttctctggaggacatggttgctggagtgacttggccgtccatcttgccaccgggttggactgtcgagtgggaccctacctcggctgaggaggagcatgaggagtga

SEQ ID NO: 40328 - DNA, 1101 bp, Zea mays
  Peptide Sequence Number=SeqID_82107
atggcggcatggggaggcgtctcagatctagcccgtgcagaagccggggatcatgggagagccagcgtggatcggcccacggtgacaccgggaacgctcgagagggtgcggataccgcaatctcatggactgcatcagaggttctgccagcagtgcagcaggttcctggaccacttgatcatctccatggtttgttggcattggaagaacttctgtgcaggggctgttatcaagaaggtaactgttttactcatatacatccagttcatccaaagtgcagtctttaaacctgttattagtgttgataatgttgattctattctgtcgcacattgttgtgaacagcttggaaataccttgcgagatgaaccactcaattgacaagcgatgcaggataaataatttgtccacaagcatgattgcattatcccagctggcttcagttttcaagcaggacaacagtgttgtgattgccaatcttgatgctgacaagcacactgacttggctgaaaaatatggtgtttctggtttccctacattgaagttcttccctaagggaaacaaagccggtgaagattatgatggtggccgggacttggatgactttgtcaagttcattaatgagaagtgtggcaccagtcgggatccaaagggccacctgacttcagaggctgggcttgtgccaagcttgaatcctcttgtgaaggagtttctcaatgctgctgatgacaagcggaaggaagtcctctctaaaatagaagaggatgttgctaagctcagcggttttgcagccaagcatggaaagatatatgtgacagctgcaaagaagatcatggacaagggctctgactacactaagaaggagactgagaggcttcaccgcatgctggagaagaaattcttgtgtatagattccaagttcacacagcaggagttgccagcttgcaagccgattcttactccaaaatgggtaggcttacgagttgtgaagattatgatgctactggttacgcctaatctttatggcaatttggtggctaacacagctgcaggtattgttggagggacgggcatcatgcctggagatagggattgcagctaa

SEQ ID NO: 40329 - DNA, 768 bp, Zea mays
  Peptide Sequence Number=SeqID_82108
atgggcgcctccgctccgacggccgctctgtcctctgcgcctccactgccgctctccttgtcagtcgccaatggccaggaggaggaggaagggtcggccgggccaccgctggtggccatggcatcccagtgtgccccgcccttgcctcctcggccacgcgccgccgcgccgttcctcctcggccacacaccgccgcacgcccgtcctcctcggtgcgccgccctcaccccctcggtgcgtgccgctgcgcgcccgtgcttcctcgcctccacgcgcgtcctgctgagaccacagagcgaagaagccccagcctcctgtagctggtctgcctctgaccctctcctctgcgcttcccctgcgtcggccctgctcgtagcttggaggcggcggcattctccggcaatggggtgcaaggcgtgcgacaagcccaagcccaactaccgcaagggcctgtggtcgctggaggaggaccagaagctccgcgactacattctcctccacggccacggctgctggagcgcgctccccatgaaagccggtaccaatgtcaagatagctgccattccttcaagcgtcgtggttctgacttcagagacctttgactcaattgtccttgatgagttttatgccccatggtgtggtcactgcaagcatcttgctccgatttatgagaagctggcttcagttttcaagcaggacgacagtgttgtgattgccaatcttgatgctgacaagcacactgacttggatgaaaagtatgcattctga

SEQ ID NO: 40330 - DNA, 423 bp, Zea mays
  Peptide Sequence Number=SeqID_82109
atgactcaagatggagtagtatgctgccagcagcttatgaaatcactaggtgttcaggtcttcgaatggcgcaaaggcaagcaaatccgaagcgtagcagaagtttcagaccctctgcactcgacacagtctacagcaaaccgggggcataggagaagtttcaggattgggaagaaaagaaagctcaatattgctggagttttacaaaactatgtggacattagggcaaatgaaacaaaaatatttatgaatgaactcaatgagacaactaaggaagcaggtgactattctatcaagtggtgtctggatcttctaaaatcaattgaagaactttcagatgaggaaaaggcgcaggcaacaaatgtgctgaagtgtgaggtcaatagagaatttttcatgaacttcaagatttcaaaggtctaa

SEQ ID NO: 40331 - DNA, 735 bp, Zea mays
  Peptide Sequence Number=SeqID_82110
atggctattcacagctactaccttaacaccaaagaagagttcgacccaatgctttatttctgtcttagtgaattccgattcgacattaaaagatcatttaagtcaggtttctttgttattgggataggtgaattctttaggatccatcccccaaaggaaccggacatgagaatttttcatcatccggctcgagcaagaatgaaagaaataagaccgtggaggatccacaatagaataggggtatataatgactcaatgactcaagatggagtagtatgctgccagcagcttatgaaatcactaggtgttcaggtcttcgaatggcgcaaaggcaaggtctgtgcacccatacattgcctggtggcgcatcttgatacaatggctaagagatacacaaatccgaagcgtagcagaagtttcagaccctctgcactcgacacagtctacagcaaaccggggcataggagaagtttcaggattgggaagaaaagaaagctcaatattgctggagttttacaaaactatgtggacattagggcaaatgaaacaaaaatatttatgaatgaactcaatgagacaactaaggaagcaggtgactattctatcaagtggtgtctggatcttctaaaatcaattgaagaactttcagatgaggaaaaggcgcaggcaacaaatgtgctgaagtgtgaggtcaatagagaatttttcatgaacttcaagatttcaaaggtctaa

SEQ ID NO: 40332 - DNA, 366 bp, Zea mays
  Peptide Sequence Number=SeqID_82111
atggcgagagtagcgtgtaccctccgtggcaagaggctggacgggttgtccgaaatctactggacaagcacaactataggtgggcctaatgacttgggagggtctgtcacaggtataacccgcgacgatgatggtagactacacaacggtactcgatggacaaaggtctcctccagcagctgggatgccctgtggtggtgcaggggggcatctctggctggggtgcaggggaaggtggcctctcagactccacctcccactgaggcgagggggaagagtcctgctgctcttgctcctgctcctgctcctggcgtcgacgctcctgctcctcgtgcaggcgacgatgcagtctctccaggtggctag

SEQ ID NO: 40333 - DNA, 855 bp, Zea mays
  Peptide Sequence Number=SeqID_82112
atgtcttttgtagatggcatgtatcagcaggaggtggagtctgagaggccaccttcccatgcacctcagctagagaggccccctgcaccaccacagagcatcctagctgctggaggagaccctgacggagacggtgacgacgacaacgctagtggcagttcgagccacggtacggagctctcggaggagccggagccaaagggatggatcgctagacccatcactcgtgacgctgctcgcgggtgtcacttccacgacgctctcgataccttgctgcgtcgggccttctaccgacacacttggtccatcgagtaccgttgtgtagtctaccagcatcgtcgcgggttatacctggaccagtgggaggctacttgcttggtgcgtcgtccggacgatgatctccagggtgcagaggccttctcagagcactattctattactgagagggatactgccgaggcagccatgcaagatgcagcacgatgggcactttctcagtattgctcgttcttcagcagggtagctgacggtctcgacctgaagtactgccctcgccattcgaccggcagtgctggaggtgtgattgcctcgccagttggtgagggcaatcccaggctgaacagcatggtgaacctggctgccatgctcaacatagagttggaccatgcccttgacgagttgggcaaggttcgggcggaggttgcggaattgcgtgctgagtgcgtagcacgccactatttggatggtggttctctcgcccctgtcgggattcagcacccttaccgttcaccgccccatggtcgcttcgactatggtaccccaaactgcaggacccagatagatttggatccctag

SEQ ID NO: 40334 - DNA, 474 bp, Zea mays
  Peptide Sequence Number=SeqID_82113
atgggacaaagccctgagtacgaagtgtactttcgcaagtcttacccgactaaggaaaaagactctcaaggatatgctggatttaggaatcaaggagaggctcttaacaagaatcaacttagatacttttgcagaaataacttactaaagcagaagccatccttccttaggataacccctgagctaggcattaacgcaaaggacaacctttatccacaagatctaagaagggataagcatttttgtaaatcatattttgatacttcatcagaagtatctataaaggttggtctaactgacgacatcgttcttgtcgtcgaacatctgacaggtgttgagatcttccgcccacatgacccagacgggactgattacgaggaggcgaagcatggcaaggcgcgtattggaagagctattgagattaaagacgacgacacgcgtcatgacgaggtggcatatggtagaggaaaatag

SEQ ID NO: 40335 - DNA, 414 bp, Zea mays
  Peptide Sequence Number=SeqID_82114
atggcgctgcttggagcttgctacgagcaagaggtactgcgcggacgcaaggaaggcactgagcaggttgacttgatctgcaatggacagctgacagctgagtcagcccaaggatcggcagggaacggagaagtgtggcagccctcccaacttatcgggcccacgtgcaccaatccttgtcttgatggcctcagatggctatgcacgtgtaccaggaaggtaggaaccctacaaagcttatacacaagcctaactaatcctcctccagaactggaaacaccctccagccaaaggaactcctggaatactcctcatcacctacaacaatatgggttcgaaaaccctgagtacggagtgtactttcgcaagtcttacccgactaagaaaaaagactctcaaggatatgctggttaa

SEQ ID NO: 40336 - DNA, 474 bp, Zea mays
  Peptide Sequence Number=SeqID_82115
atgaaggccaagtcacaccatcaaccaatcaacctaagaagtacctgcaaaaattatgccacaagcaaggctgagtatactaatactcagctagacttacccggtcagcatggatcaagcagtctcattagctgcgagaagcagacgattcgaatcgagtttttaaaccttgcaagatcagggctcaccgccttggcgtacaatgccccactgaccccgactggccgtcgtgcagtggccgcacttgtacccaccataaccggaatgggagacctcgtctcaggtcgcgtgaggggtaaagtctgcgggcaggttcactcaggtactaggcttaccgatttaccatatttctcggattcagctattagcaaggtcaaaaagtgcaattacagcagcactgtccagatttggacagatcctgacttgcaacttcaaaaattcacaactgaagattcagacatccaaacaaagtga

SEQ ID NO: 40337 - DNA, 270 bp, Zea mays
  Peptide Sequence Number=SeqID_82116
atggccacttgtttgacgcgccctggcagcgcaagagcatgcccggcgctcggccccgcgcgcgccgcgccgcgcctcgccagaccccacaccaacgcccgcgcccgcgcatataaagccgaccccggccttgaccggataaaggccaagtcacaccatcaaccaatcaacctaagaagtacctgcaaaaattatgccacaagcaaggctgagtatactaatactcagctagacttacccggtgtgaggagtctactcctctacctctag

SEQ ID NO: 40338 - DNA, 384 bp, Zea mays
  Peptide Sequence Number=SeqID_82117
atgtcgtcggtatcgaggaaatgggcaaggcctagcccactactcctcgtgctcctctcctaccagagcagcatcccactcgaccgtccaacccggtggcagggtggtaggccaagtcacaccatcaaccatttcctgaatggtacctgcaaaaattatgccacaaacaaggctgagtatactaatactcagctagacttacccggttacaaggggtcaagcagtctcattagctgcgagaaagcagacgattcgaatcgagtttttaaccttgcaagggagatcctcgatagcagcctcggaagcctgctcctggtcctcctcttggacagatccttgctcggggatgagcacgtactctccgtcggcaagattacaatctaa

SEQ ID NO: 40339 - DNA, 177 bp, Zea mays
  Peptide Sequence Number=SeqID_82118
atggatcaagcagtctcattagctgcgagaaagcagacgattcaaatcgagtttttaaccttgcaaggcctcaccgccttggcatacaatgctccactgaccccgactgccgtcgtgcagtggccgcacttgtacccaccatatctagaatgggagacccagtctcaggtcgcatga

SEQ ID NO: 40340 - DNA, 330 bp, Zea mays
  Peptide Sequence Number=SeqID_82119
atggctcaccggagagcttggtccacgcgcgggggcgggcgaccgaagtccggcgagggtgatctcgggcttccggtgaagttctgctgggtccgagggcttggagagcttcacggacctatggcgaagctaaccgaagcactggcgcggcttaggggcgactggggtgggctggccacggtggccgaagctctagcggcaatggcgggcagaaaagagctcgccgaagctaaggaggggtggctggccggtgatgagatatggagcccggaaatccggtttgtctccctgctcaaatccgaggcaaatccagggttttgtcgtgtctag

SEQ ID NO: 40341 - DNA, 645 bp, Zea mays
  Peptide Sequence Number=SeqID_82120
atggctgacacctccggttcacgcccgttcgcgcacccgcgcctcccagtgcacgcccacgcgcgctcaccgaacttcaccggaagcccgagatcaccctcgccggactttggtcgcccgcccccgcgcgtggaccgagctctccggccggactcctcgccgccgacgagctccccagcctgcgcacgtggaccggccgactccgaccatccccgacggcgacccggacatcgtcgtgaccctcaggacctccgctacaccctcgaccacctcaccggagcagtctcgccgccgatgaattcacccacccccgccagtggaggagatactcgtttcagcgctgacttcctttctcatgatggctttccttccattttgtgggaagtgcttaactccgccggttaccctacgccccctttgtacatggtgcagctgtatgaggagcatcgggtacctcgttgtcgggactggctgactttggaggctcatccccttcagccgggttggcgttctcttgattcggagatggttggatttaggacggacgacaccactgaagcggcagccatgaagactctgacgacttttctgtggctaccatcccctggagatggtgatgcaccccttgggactcttccctgctga

SEQ ID NO: 40342 - DNA, 363 bp, Zea mays
  Peptide Sequence Number=SeqID_82121
atggcgtcgctcatcggcgacgagaagaagcttggcgactgccagttcgactctgaaagcagtactacgtggccgcatgcgtcgctgtgctcggcaagctccggcgcagccaccgcttggacgcggtacagagcggctgcaccgcgctgtccatcttcaaatagggggacctcatggtcgtcgccaacgccggcgactctcgggttgttctggacaccgcatccgacaacggcgccgtcacaccgtccagctcatcatccacctgaagctcaacctcccacccaagagtcatcggtactcgccatgtcgtgcgcgttcgacgactactatatcaaggactatggcgtcattttggcaccatag

SEQ ID NO: 40343 - DNA, 522 bp, Zea mays
  Peptide Sequence Number=SeqID_82122
atggaggagcaccacccgcgctgcaatgccacggcgcccacggggagggttgccggtggtggcaagatgaaagcggtggcggcgagcgcgccggcggagccgaggtacaggggcgtgctgagatggcgtcgagggaggtacgtagcgaggacccgcgaccgaaagggcaagcggatgtggctaggcacgttcgacaccgccgaggaggcggccaggaggtacaacaacgagacgcgtcggctccgcgggccgtcggcgatcaccaacttccccgcgacgtctgatgatcgtgtcctgcttccggcgccgtcgctgcacgccgtggacgagcactccttcgctgccgacgagtcccggacgccggtccggcctgggcgcgtggcgtggcgtctttttgacttcttgttcgactgcgtcttcacggcggagacggctagatgggagaccccctccgtcggcagccgaccgatagtcgccgactcgtcggagacacctagatgccgagacgggcgtgaagcctga

SEQ ID NO: 40344 - DNA, 684 bp, Zea mays
  Peptide Sequence Number=SeqID_82123
atggaggagcaccacccgcgctgcaatgccacggcgcccacggggagggttgccggtggtggcaagatgaaagcggtggcggcgagcgcgccggcggagccgaggtacaggggcgtgctgagatggcgtcgagggaggtacgtagcgaggacccgcgaccgaaagggcaagcggatgtggctaggcacgttcgacaccgccgaggaggcggccaggaggtacaacaacgagacgcgtcggctccgcgggccgtcggcgatcaccaacttccccgcgacgtctgatgatcgtgtcctgcttccggcgccgtcgctgcacgccgtggacgagcactccttcgctgccgacgagtcccggtcggtggtggggtcgccagtctccaccacgccgccgccgaaaccgatggacgccaccgcagaaaccctctccacgttctcctccagcgacgaggctgacgccggtggcggtgctgaagcggcggcaggggcccagtggcggacccagaattttgacatagggacgccggtccggcctgggcgcgtggcgtggcgtctttttgacttcttgttcgactgcgtcttcacggcggagacggctagatgggagaccccctccgtcggcagccgaccgatagtcgccgactcgtcggagacacctagatgccgagacgggcgtgaagcctga

SEQ ID NO: 40345 - DNA, 2079 bp, Zea mays
  Peptide Sequence Number=SeqID_82124
atgtctgatgtggcggcgcttcctgagaccgtggcggagggtaagatgacgacgactatgaacgacgcgtgggactacaagggccgtcctgccgtccgcgcctcctccggcggctggtcgtccgccgccatgatcctggtggtggagctgaacgagcggctgacgacgctgggcgtgggcgtgaacctggtgacgtacctgatcggcaccatgcacctcggcggcgccgcctctgccaacgctgtgaccaacttcctcggcgcctccttcatgctatgcctcctcggtggcttcgtggccgacacctacctcgggagatacctcaccatcgccatcttcaccgcagtacaagcggcgggcatgtgcgtcctgaccgtgtcgacggcggctccagggctacggccgcctgcgtgcgcggaccccactggccccagcaggaggagcagctgcgtggagcccagcggtacgcagctgggcgtgctgtacctggggctgtacctgacggcgctgggcaccggcggcctcaagtccagcgtgtccgggttcggctccgaccagttcgacgagtcggacgacggcgagcggcggagcatggcgcgcttcttcggctggttcttcttcttcatcagcatcgggtcgctgctggcggtgacggtgctggtgtacgtgcaggaccatctggggcggcggtggggctacggcgcctgcgtcgcggccatccttgcgggcctgctgctcttcgtgacgggcaccagcaggtaccggttcaagaagctggtgggatccccgctgacgcagatcgccgctgtgacggcggccgcgtggaggaagcgcgcgctgccgctgccgccggacccggacatgctgtacgacgtccaagacgcggtggccgccggagaggacgtcaagggaaagcaaaagatgccgcgcacaaagcaatgcaggttccttgagagggcagccatcgttgaggaggccgagggttccgccgccggcgagaccaataagtgggcggcgtgcacgctgacggacgtggaggaggtgaagcaggtggtgcggatgctccccacctgggccaccaccatccccttctggaccgtgtacgcccagatgaccaccttctccgtgtcccaggcgcaggccatggaccgccgcctcggcagcggtgccttcgaggtccccgccggctccctcaccgtcttcctcgtcggctccatcctcctcaccgtccccgtctacgaccgcctcgtggtgcccctcgcccgccgcttcaccgccaacccgcagggcctctccccgctgcagcgcatctccgttggcctcctcctctccgtcctcgccatggtcgccgccgcgctcaccgagcgcgcgcgccgctcggcctccctcgccggagccacgccctccgtcttcctgctcgtgccgcagttcttcctcgtcggcgtcggggaggccttcgcctacgtcggccagctcgacttcttcctgcgcgagtgccccaggggcatgaagaccatgagcacgggcctattcctcagcacgctgtcgctcggcttcttcttcagcaccgccatcgtcagcgccgtgcacgccgtcaccacctcgggtggccggaggccctggctcaccgacgacctcgaccagggcagcctccacaagttctattggctgctggccgccatcagcgctgtcgacctgctggccttcgtggcagtcgccaggggatacgtctacaaggagaagcgcctggcggcggaggctggcatcgtccatgacgacgaccccagatgggtcggcgcgagacggagcacgaaggagggaaacaaggagacaggcataaaggggaaacccgcggccttcgtgtttgtcctgcgcctaggtcggggttcgtcgtcttccggggccctggggtcgggcgaggcagagcttcctatcgcgcccgaggccggacttggctgctgtcagcctctctctgtcgagtggcacagcagtcggagcggtgcaggcggcgctgtcttcttgtcaggccggtcagtggagcggcgaagtgactgtggtcacttcggctctgtcgactga

SEQ ID NO: 40346 - DNA, 2079 bp, Zea mays
  Peptide Sequence Number=SeqID_82125
atgtctgatgtggcggcgcttcctgagaccgtggcggagggtaagatgacgacgactatgaacgacgcgtgggactacaagggccgtcctgccgtccgcgcctcctccggcggctggtcgtccgccgccatgatcctggtggtggagctgaacgagcggctgacgacgctgggcgtgggcgtgaacctggtgacgtacctgatcggcaccatgcacctcggcggcgccgcctctgccaacgctgtgaccaacttcctcggcgcctccttcatgctatgcctcctcggtggcttcgtggccgacacctacctcgggagatacctcaccatcgccatcttcaccgcagtccaagcggcgggcatgtgcgtcctgaccgtgtcgacggcggctccagggctacggccgcctgcgtgcgcggaccccactggccccagcaggaggagcagctgcgtggagcccagcggtacgcagctgggcgtgctgtacctggggctgtacctgacggcgctgggcaccggcggcctcaagtccagcgtgtccgggttcggctccgaccagttcgacgagtcggacgacggcgagcggcggagcatggcgcgcttcttcggctggttcttcttcttcatcagcatcgggtcgctgctggcggtgacggtgctggtgtacgtgcaggaccatctggggcggcggtggggctacggcgcctgcgtcgcggccatccttgcgggcctgctgctcttcgtgacgggcaccagcaggtaccggttcaagaagctggtgggatccccgctgacgcagatcgccgctgtgacggcggccgcgtggaggaagcgcgcgctgccgctgccgccggacccggacatgctgtacgacgtccaagacgcggtggccgccggagaggacgtcaagggaaagcaaaagatgccgcgcacaaagcaatgcaggttccttgagagggcagccatcgttgaggaggccgagggttccgccgccggcgagaccaataagtgggcggcgtgcacgctgacggacgtggaggaggtgaagcaggtggtgcggatgctccccacctgggccaccaccatccccttctggaccgtgtacgcccagatgaccaccttctccgtgtcccaggcgcaggccatggaccgccgcctcggcagcggtgccttcgaggtccccgccggctccctcaccgtcttcctcgtcggctccatcctcctcaccgtccccgtctacgaccgcctcgtggtgcccctcgcccgccgcttcaccgccaacccgcagggcctctccccgctgcagcgcatctccgttggcctcctcctctccgtcctcgccatggtcgccgccgcgctcaccgagcgcgcgcgccgctcggcctccctcgccggagccacgccctccgtcttcctgctcgtgccgcagttcttcctcgtcggcgtcggggaggccttcgcctacgtcggccagctcgacttcttcctgcgcgagtgccccaggggcatgaagaccatgagcacgggcctattcctcagcacgctgtcgctcggcttcttcttcagcaccgccatcgtcagcgccgtgcacgccgtcaccacctcgggtggccggaggccctggctcaccgacgacctcgaccagggcagcctccacaagttctattggctgctggccgccatcagcgctgtcgacctgctggccttcgtggcagtcgccaggggatacgtctacaaggagaagcgcctggcggcggaggctggcatcgtccatgacgacgaccccagatgggtcggcgcgagacggagcacgaaggagggaaacaaggagacaggcataaaggggaaacccgcggccttcgtgtttgtcctgcgcctaggtcggggttcgtcgtcttccggggccctggggtcgggcgaggcagagcttcctatcgcgcccgaggccggacttggctgctgtcagcctctctctgtcgagtggcacagcagtcggagcggtgcaggcggcgctgtcttcttgtcaggccggtcagtggagcggcgaagtgactgtggtcacttcggctctgtcgactga

SEQ ID NO: 40347 - DNA, 2286 bp, Zea mays
  Peptide Sequence Number=SeqID_82126
atgatgattgcagctaatgcattatttggttacagcaagaagcttaatgtgaggtgcaaccctcaagatgtcattgcaagcattaacattttgaatgaaagacaacgtgaggctataagacgcaaaggcttctcttccattcttgatatgacagtagatgcgctgtgcagtagatcacacctccaatggttgatggacaagctagaccccaaggatatgacaatacgtcctggtccaggaaaggaactcaagatcacaaaggatattgttcatcttattcttggcgtgccaaatcatggaggtggtaaacctttgggtattgatgaagcagttgcagcaagcaacttgagggcagagcttggtgtggccaaagatgagttcaatgtggcatttctacaggatcgattaaggaaaggcgaggatgatgacctttcaatcagatgtttcttcctcattctattcaacagattgctgtttccaactgctagctggggcatcacatatcatgaggtgcttctcacagaagaaatgcaccgtttccatgagatcgactggtgccagttgatttttaatgatctatgtgaagctgccaagaagtggcacaaccggatcaccacaaatgtctccacgactatctatggatgctccattgttgtccttaatagcataaaagctttgaccaaagctgacaagaggaaggttcgccatggggctgaatctttcggacactgtgaaaatacgaaggtggacatggattcttactattttttgctgaacaaccagccggagtgcaggaccaatatttttgatgcaccgcgccctggccccatgcctcggccaacttttaacatcaaacttccatctatcaaagagatgatgtcaagtaagatcaacgatctcccccatcgtcatcgatctaaattcacagatattcttgctgcatatgacttggaggttgacaagtcatgcgtagccataaaagacagcatcgacaaaattattgtcaagcaatatgacatagcagacaagtttatagaattgatagacgaggtactacgtgccgagtctgaaaatttggaaaacgagacggatgagccacagcaaccggtgaattcggctgattcagcaggacacacagttgatgccacccagcccacacccgatatgccatcccaagcttcgcagcttgagacccaactgggtgctactcagtttgaagaaattcacgaaagacaacagcatatccgtacagtccttgagacctttcccgacgaatcggatgtggtttcagatcaacagagaggtgcaatggcaacagaggagatggaacaaaatgacagtgggccagtttttgaccagaccccaactcctcatgttgatacactcaaaggtactacaatctctggatctgatccaccacttacagagcaagagtgtatccgttctctgtgggatttaatttgttccaaggacattgaccaaagcagggtagttattgattacggtgattacagtgcaaactgtatggatatttatgaatctttcgcggagggtaaatgtcttgaggatgtcttcatgcagtgtttcatagagtgtgttcgtgatgattctaaaaatcatcgtcgaactctgacatctaacagattaatacttgatgtcaacgttggggctctgttaaattttgaagaacaggaacgtcacagcaagaatcctcagccgtttgatcaaaatgtcctacagaattgcttgcacaacacattgcctgctttggtgaatctggataaatgcaagtcgataatggtacctatgcttagcaggggtcattggacactctatgtgatcaatctacaccaccgggttatccacattttagattcgaatccctatggtatacaacttggtggcaccgaatggaaggactatcattgtgatccaatttatttaggtggcaggaaattcccatgggctagggtgataatgagtagattgagcaaagcgttacaacacgtttgccccaacgcagaatttcctaagtttggtaattttccattggatatgccatctaactgcccaacaatgaggacagggtcaaatgactgtggattttttgtgatgagttacatgaaatcttatgatcacaatgcaggtgtcatatcttctttcaatcaaccagacaattcccgagatctacgtgctcatgcccttcatcaactcacattccatcgcatcaacaaggcgttgccacttccattagatatccagagatttatgtttgcgcgcaattag

SEQ ID NO: 40348 - DNA, 363 bp, Zea mays
  Peptide Sequence Number=SeqID_82127
gggagccgaagttacaagagcgcgaaggtggcagcaaagaggctggaagaggcagcgctctcctgcaaaggggacgaacgggtgcagctgctgcgccggtggctcgtcacgctcaaggagacccagcgcgcgaccacggtggtccgagagctgcaacttggggacaatccggaccagactgcgcccctgctggatttgtacatcgattacgacagcggtgcggagccgacgaactttttccatgtcttcctctacagtcaagccctcgagtgtgttgttctctccttgggtgcgatctcagggctaaagataaatgctgacattgcaaggttctatattttctgttgggcagttgaagattag

SEQ ID NO: 40349 - DNA, 314 bp, Zea mays
  Peptide Sequence Number=SeqID_82128
atgtacggacatctaactagtgtatatgtgtctgcgaagagcaaggggagccgaagttacaagagcgcgaaggtggcagcaaagaggctggaagaggcagcgctctcctgcaaaggggacgaacgggtgcagctgctgcgccggtggctcgtcacgctcaaggagacccagcgcgcgaccacggtggtccgagagctgcaacttggggacaatccggaccagactgcgcccctgctggatttgtacatcgattacgacagcggtgcggagccgacgaactttttccatgtcttcctctacagtcaagccctcga

SEQ ID NO: 40350 - DNA, 531 bp, Zea mays
  Peptide Sequence Number=SeqID_82129
atgtacggacatctaactagtgtatatgtgtctgcgaagagcaaggggagccgaagttacaagagcgcgaaggtggcagcaaagaggctggaagaggcagcgctctcctgcaaaggggacgaacgggtgcagctgctgcgccggtggctcgtcacgctcaaggagacccagcgcgcgaccacggtggtccgagagctgcaacttggggacaatccggaccagactgcgcccctgctggatttgtacatcgattacgacagcggtgcggagccgacgaactttttccatgtcttcctctacagtcaagccctcgagtgtgttgttctctccttgattgagactgaaaagctgctagcccagttatttgagactgagatgaacagacgtttgaaggaggacacttacaaaggaaagaagtttaatgcaatctgtcacttcttgggctaccaagctaggggagcattgccttcaaagtttgattgtgattatgcctacgcaagtccctcaccagctcatttaataaagaactag

SEQ ID NO: 40351 - DNA, 330 bp, Zea mays
  Peptide Sequence Number=SeqID_82130
atggccatttacaaaactacactcaaatccaagagttcaataaatgaggtgaatcaggttgctcagctgaggatcatcataaaatcaaaatcttgcaatggtgttgggccattgtgcacttcacaacagactgagactgaaaagctgctagcccagttagttgagactgagatgaacagatgtttgaaggaggacacttacaaaggaaagaagtttaatgcaatctgtcacttcttgagctaccaagctaggggagcactgccttcaaagtttgattgcgattatgcctacgcaagtccctcactagctcatttaataaaagaatattga

SEQ ID NO: 40352 - DNA, 201 bp, Zea mays
  Peptide Sequence Number=SeqID_82131
atgggcgggggcagtaggttgggaaggaataatagggcgaaggccgagaagacgaacgagacgtcccacgacggcgaaacgatgccactgcgcgagtcggtgtcgaggctggtgtccaacgaatacagggaggagatgcatgctcctacgacctctgccgagaatggggtggtgcggaggtggagacatgaggggagatag

SEQ ID NO: 40353 - DNA, 870 bp, Zea mays
  Peptide Sequence Number=SeqID_82132
atggatcccaggccggtggccgcaactccattacctcgacgcgcggtggcggaggttcctcgatccgcagcgaggcccttgtgcgggcaagcggcggcgtccccgaagccccgaggaggcggcacttccaaggccgacgagcaagcgacacctgtcgacacactattaaatgggtcgtgcgtcggaccggttcaccagacacggtccatctggcctctatacctccgcacgataatgataattctcgcctcagttgccactacctcgttcgtcattctacttcttttctatctcccctcatgtctccacctccgcaccaccccattctcggcagaggtcgtaggagcatgcatctcctccctgtattcgttggacaccagcctcgacaccgactcgcgcagtggctattgcacgaccacgagaacgtttcacatcatgcgcgcaccatcgttttcgccgtcgtgggacgtctcgttcgtcttctcggccttcgccctattattccttcccaacctactgcccccgcccatggtcgcagctgcgagccgaccgacgctcgtcgacgcggttatgggcggtatactatctatgtcggctctagatgcccaggtcttcgtcgtgtccttctccggtaacgaacaggacggagccaaggattgcccccctctcatgtgggcaatcatggggagcaagccgcagacacacaagggttggaaagcatgcgggagagccgagaaggcggcggcgttggccaacctggatctgacccccggaagggaccccgtcaaggagcagagatcctatggtttgtcttgggatcggcaggccacccaagatgcctccagacgacgtatagtcgaagagaggtga

SEQ ID NO: 40354 - DNA, 549 bp, Zea mays
  Peptide Sequence Number=SeqID_82133
atgacggcgaaccggtccctagcggcggcgccatggtcggtccacagccggaataccagtgaggcacagcagcacgcatacgatggttccaaaataacgagaaggcgattacagaaggctcaggagggcgcgacgaaggtcgttggccaaccacgcgccccaatttgcttcaccggcgaagaacgggtgcagcagcggccgcctcccttcacggtccgcagcaacgctccaacaggtgattctcggggatggtggaacagggcaagggcgcacacgtggtctttaagacgtgtaggagcgcggccgttacgcaactccgaggtccccgaagagctccccgcgcgaggtgagcgcggtccgcgcggcgaggatctcgcgggctcggttacgaaggagagggagcagcgactgacgcgtgggcccggcggagcagcgcaagggagagagtccgaccgttggcccccaccagtcagccagatgcggaatcaagtggacgcgtggggtgagactgacgtgtcgggcccactggtcggcgcaacaacgttgtag

SEQ ID NO: 40355 - DNA, 606 bp, Zea mays
  Peptide Sequence Number=SeqID_82134
atgacgttacctaaggataaatcctcgcattcccttccccgaccacgtgtgcacccttgccctgttccaccatccccgagaatcacctgttggagcgtcgctgcggaccgtgaagggaggcgtccgctgctgcacccgttctttgccggtgaagcaaattggggcgcgtggttggccaacgaccttcgctgcgccctagagagtgagattggcgccgccgcggaaccaatcgggccacgaatccagtggatttcctcaccggtgtgggtagaacgcggcaaactcgcccatcaccgtgggtggggcgctctgctgctgaatccccaacgaggttggggcgatgtggaggctcctccgaggtcgggatcaagtccgtcttccgtggccgaggtcgagtccgagcccctaggtcgggcgaggcggaggctgttggctgaggccagggcagaatttgagtcctggggtcgggcaaagcggagttcgtcgtcttctggggctgagcccaagtccgagccctgggtcgggcggagcggagttcgccgtcttccggggcttagcccgagcccgagccctgggtcgggcggagcggagttgaaagggaattag

SEQ ID NO: 40356 - DNA, 357 bp, Zea mays
  Peptide Sequence Number=SeqID_82135
atgccgccgggctccggcccggcacgctgcccccccccgaacctcccgcggggaaggggggccgcgaaaaagaacccacggcgcctcgggcgccaaggaacaccaaatcccgcgaaccatcgagtttttgaacgcaagttgcgcccgaagccttctggcggagggcacgtctgcctgggcgtcacgccaaaagacactcccaacacccccccgcggggcgagggacgtggcgtctggccccccgcgccgcagggcgagcgtcccggcgcgcggccggccattcggccctacggacccatcgagcgaccgagcttgtcctcggaccgcgaccctaggtcagtcgggactacccgctga

SEQ ID NO: 40357 - DNA, 272 bp, Zea mays
  Peptide Sequence Number=SeqID_82136
atgaagaacgtagcaaaatgcgatacctggtgtgaattgcagaatcccacgaaccatcgagtttttgaacgcaagttgcgcccgaagccttctggcggagggcacgtctgcctgggcgtcacgccaaaagacactcccaacacccccccgcggggcgagggatgtggcgtctggccccctgcgccgcagggcgagcgtcccggcgcgaggccggccattcggccctacggacccatcgagcgaccgagcttgtcctcggaccgcgaccccag

SEQ ID NO: 40358 - DNA, 261 bp, Zea mays
  Peptide Sequence Number=SeqID_82137
atgaagaacaatcccgcgaaccatcgagtttttgaacgcaagttgcgcccgaagccttctggcggggggcacgtctgcctgggcatcacgccaaaagacactcccaacacccccccgcggggcgagggacgtggcgtctggccccccgcgccgcagggcgagcgtcccggcgcgaggccggccattcggccctacggacccatcgagcgaccgagcttgtcctcggaccgcgaccccaggtcagtcgggactacccgctaa

SEQ ID NO: 40359 - DNA, 272 bp, Zea mays
  Peptide Sequence Number=SeqID_82138
atgaagaacgtagcaaaatgcgatacctggtgtgaattgcagaatcccgcgaaccatagagtttttgaacgcaagttgcgcccgaagccttctggcggagggcacgtctgcctgggcgtcacgccaaaagacactcccaacacccccccgcggggcgagggacgtggcgtctggccccccgcgccgcagggcgagcgtcccggcgcgcggccggccattcggccctacggacccatcgagcgaccgagcttgtcctcggaccgcgaccccag

SEQ ID NO: 40360 - DNA, 272 bp, Zea mays
  Peptide Sequence Number=SeqID_82139
atgaagaacgtagcaaaatgcgatacctggtgtgaattgcagaatcccgcgaaccatcgagtttttgaacgcaagttgcgcccgaagccttctggcggagggcacgtctgcctgggcgtcacgccaaaagacactcccaacacccccccgcggggcgagggacgtggcgtctggccccccgcgccgcagggcgagcgtcccggcgcgcggccggccattcggccctacggacccatcgagcgaccgagcttgtcctcggaccgcgaccccag

SEQ ID NO: 40361 - DNA, 294 bp, Zea mays
  Peptide Sequence Number=SeqID_82140
atgggggtgccgcgaaaaagaacccacggcgccccgggcgccaaggaacaccagtactacctcctgccccgcggagcggtcggcccgccttccgctcccagggcagcgaatcccgcgaaccatcgagtttttgaacgcaagttgcgcccgaagccttctggcggagggcacgtctgcctgggcgtcacgccaaaagacactcccaacacccccccgcggggcgagggacgtggcgtctggccccccgcgccgcagggcgagcgtcacggcgcgcggccggacattcggccctaa

SEQ ID NO: 40362 - DNA, 585 bp, Zea mays
  Peptide Sequence Number=SeqID_82141
atgaagaacgtagcaaaatgcgatacctggtgtgaattgcagaatcccgcgaaccatcgagtttttgaacgcaagttgcgcccgaagccttctggcggagggcacgtctgcctgggcgtcacgccaaaagacactcccaacacccccccgcggggcgagggacgtggcgtctggccccccgcgccgcagggcgagcgtcccggcgcgcggccggccattcggccctacggacccatcgagcgaccgagcttgtcctcggaccgcgaccccaggcgagagaccgatagcgaacaagtaccgcgagggaaagatgaaaaggactttgaaaagagagtcaaagagtgcttgaaattgccgggagggaagcggatgggggctggcgacgcgcaccggccgtatgcggaacggctcctgctggtccgccgatcggctcggggcgtggaccgttgtcgcccgcgccggcggccaaagcccgggggccctaggcgcccccggcagccgtcgtcggcgcggacgaaacctgggatgcgcaaggaagctgatgagcgggaggccctcacgggccgcaccgctggccgaccctga

SEQ ID NO: 40363 - DNA, 358 bp, Zea mays
  Peptide Sequence Number=SeqID_82142
atgaagaacgtagcaaaatgcgatacctggtgtgaattgcagaatcccgcgaaccatcgagtttttgaacgcaagttgcgcccgaagccttctggcggagggcacgtctgcctgggcgtcacgctaaaagacactcccaacacccccccgcggggcgagggacgtggcgtctggcccccgcgccgcagggcgagcgtcccggcgcgcggccggccattcagccctaaggacccatcgagcgaccgagcttgccctcggaccgcgaccccaggcggcctcgccgcccgaattgtagtctggagaggcgtcctcagcgacggaccgggcccaagttctctggaaagggacgcctgggagg

SEQ ID NO: 40364 - DNA, 708 bp, Zea mays
  Peptide Sequence Number=SeqID_82143
atgggcaaggtggccatagagttcttgttttatatcccaggcggaccaatagaatccgcagtgcggaaccggaaagcaaaggtatcttttatgtcaagtcacccagtaggaaagctgagggatggttatagcagggataagttgtggctagatcatggttgttactgtagagtgggatatgtatgcctattagaacaagataaatccataaggataagatgtaatagtggactaattccacaactcatcacactcaatcgaagatccaaatcaaacaagtatcataagaacaaacattcaagcatacaaatacttataaaaatagttttgtttttattcctaagagtaggtctcctagtcctaaaggtcactttaggcacaggatttcaaagtgtgaaatccacatttgtctttagaatgaaaaggtttcgtcctacagtcaacattcctctgataccacttctgtcacacccggatttcggggcaccaagacccgggcgcgaacataatcaccagagaagcacagggtctattacgcaaatagcaccaagactcaggactggactgcgggttgaatacctaaacggacaggggcttatttgtgaaactggctcggcgaaggggattagagatcaacggcttgatttaatctatgaaggggtacgcgatctggaccaccggatcagcgatcaagggcttggattttaa

SEQ ID NO: 40365 - DNA, 246 bp, Zea mays
  Peptide Sequence Number=SeqID_82144
atgcggcaacctctgcagaggtgtaaaactggtatactagccgtgctcacggtcatgagcggctcggacactcacatgattaaattatggaacttaaactcaatttgtcatatgcattgcatcgcagaactcctattatatagtaaagatgtgacattcgatcctgtgccactatgcatcatatgtgtgagacttggtcccagcacacctggtgtttatgttcgcgcccgggttttggacccctaa

SEQ ID NO: 40366 - DNA, 300 bp, Zea mays
  Peptide Sequence Number=SeqID_82145
atgaacgtatgtgagctcactcttgctgtctcacaccccccacaggtcaagaacagaactcctgttatatatagtaaagatgtgacattcgatcctgtgccactatgcatcatatgtgtgagacttggtcccagcacacctggtgtttatgttcgtgcccgggtcttggtgcccctgaaatccgggtgtgacagaagtggtatcagaggaatgttgactgtaggacgaaacctagatagaactggacaaccattctttacttacccttgctactctgattcttttctaaacttttcttaa

SEQ ID NO: 40367 - DNA, 174 bp, Zea mays
  Peptide Sequence Number=SeqID_82146
atgaacgtatgtgagctcactcttgctgtctcacacccccacaggtcaagaacagaactcctgttatatagtaaagatgtgacattcgatcctgtgccactatgcatcatatgtgtgagacttggtcccagcacacctggtgtttatgttcgcacccgggtttttgacccctaa

SEQ ID NO: 40368 - DNA, 216 bp, Zea mays
  Peptide Sequence Number=SeqID_82147
atggagaggaaggaagagcaggtgaggcagcaggagatgtcagcgccagtgagacaaagcaaaggctcacgcggggatgtggcctggccgccgccggggactagctgctgggcgggggcgcgaggatgtggcgtggggcgctggggtcctggcctcctgggagtggcggctggggtgggcggccgggatgggagctcgggaagggaagggaagtag

SEQ ID NO: 40369 - DNA, 1170 bp, Zea mays
  Peptide Sequence Number=SeqID_82148
atggcacgcaagaaggtgaatctgcagtggatctccaacaacgctacgcggcgcgcgacgtacaagagacgcacccagggcctggagaagaaggccagcgagctggccacgctctgcggcatcaagctgtgcgtcgtggtgtacggcgagggcgaggcgcagccgaaggtatggccctcgcacgaagaggcgaagcagctcctcctgaaattcaacggcatgctggatgtcggtagcctcaagaagacgaagaaccaggaggagttcctccacggccgctccctgaggctccgcgagcaggtgagcaagctggacctcgagaaccgcgagcgggagaccctggacctcctccatgacagcatgtgcggagggcgtctcgccggcggcgaaggcagaggcaaggacgagctccttagcctgagggagatggtggagacgaagatgaggagaatcaaagcgcggctccagcagctcgtcgggcagggagtcctccccccaaagccgccattgccggcggcaccatcatcgttgcaggcacaggcttcttgctacacctacaataacatgcaaagcatggcactgctagaggaacaccggcactcgcagcaggattggagagctgttcacaacctagccccaaactacagtcccttcgcagatttagcagcagctacacgtgaacacaggcacttactaaccacactgcaggattcaatcagtgaggaacctccaatattaactaaccccggcaacggagaggaaggaagagcaggtgaggcagcaggagatgtcagcgccagtgagacaaagcaaaggcgcgtaggcacagctcgaggacgccggtcgggcctagggctcagggacgccgcaggttggggacggtcgccggtcgcagtcgcagtcgcagcttggggacggtcgccggtcgcagccgcgcaggccgcaggcatagctcgaccgctcggggctcgtcgcaggctcgcgcggggatgtggcctggccgccgcctgggagtggctgctgggcggggatgtggcctggccgccgccggggactagctgctgggcgggggcgcgaggatgtggcgtggggcgctggggtcctggcctcctgggagtggcggctggggtgggcggccgggacgtgagctcgggaagggaagggaagtag

SEQ ID NO: 40370 - DNA, 770 bp, Zea mays
  Peptide Sequence Number=SeqID_82149
atggagtcctccgacgacgggggctccgggccggcggcagggagtcccggccctccgtcggcccccgcagccgttggcggtgcgagtagcgctcctggcgcgtctggatccggcgggaagccgccggtgaagcgcgtcatgaagacgccctaccagctggaggtcctcgagaggacgtacgcagaggactcgtatcccaacgagacgaagcgggcggagctgtcggtgcagttgaacctcacagacaggcagcttcagatgtggttctgccaccgccggctcaaggaccggaaaccgccggccaagaggcagctaagggacgaggaggttagcgtcccagtcatagggccgccgccacctgtgcttccgcctccattgcctcccagcgagatgatggtggggactgtcggaacctatggtgagcagctgctgccctattccaggagagggtctggccggttatcggctgcacctaggttatctgtgccggagattgggaggaggtactatgaaccgccacaagtcatgctgcctcatatggcaccagtgcaccttatgcaagcagagcaccgggtgatcgattctgtggaagcacttataggggaacctttgagggacgatggaccagtgcttggtattgaatttgatccacttcctcctggtgcatttggagcacctatcgagctcgggggcagcagcggggcagagctcgggagagcaggagaggcggcactgagacagagcagcggcactgagagtctgagactggg

SEQ ID NO: 40371 - DNA, 5502 bp, Zea mays
  Peptide Sequence Number=SeqID_82150
atggagtcctccgacgacgggggctccgggccggcggcagggagtcccggccctccgtcggcccccgcagccgttggcggtgcgagtagcgctcctggcgcgtctggatccggcgggaagccgccggtgaagcgcgtcatgaagacgccctaccagctggaggtcctcgagaggacgtacgcagcttttgatcgaactgtgcgtgtggttttcatggggattctgttttgcgcagaggactcgtatcccaacgagacgaagcgggcggagctgtcggtgcagttgaacctcacagacaggcagcttcagatgtggttctgccaccgccggctcaaggaccggaaaccgccggccaagaggcagctaagggacgaggaggttagcgtcccagtcatagggccgccgccacctgtgcttccgcctccattgcctcccagcgagatgatggtggggactgtcggaacctatggtgagcagctgctgccctattccaggagagggtctggccggttatcggctgcacctaggttatctgtgccggagattgggaggaggtactatgaaccgccacaagtcatgctgcctcatatggcaccagtgcaccttatgcaagcagagcaccgggtgatcgattctgtggaagcacttataggggaacctttgagggacgatggaccagtgcttggtattgaatttgatccacttcctcctggtgcatttggagcacctatcgtccctgagcaaccgaggcagccctttcgatcatatgagaccaagatgttttctggtcccaaaaccatgaaggcttcggcaatcttgcctaccacagaccctttacttcaaaatacagggaaacggaaatccttcattggctcttctcatcttggctcacaggcagtacatgaataccagtttcttcctgagcagccaagtgatacatatgagagggcaagccagtcacacttctatgattcttcagcagaagcgtcaaacttgagggtagctccgctgtctacaggatcacgctttctccatggagttgagcaggcacctagctatacatttcacagtcaatcatctggttctagccatttgactcaacgtggcagtggcaggtcacctattgcatcggcattgacagatcatgagggggctttgtcaaatattaatgctagcacaactccaatccacggccaacttggcatccctcaagttgccggattcgaaagccccctggcatcccctgaaagattgggttatcatgatgaagatacatatcacatggacagaaagcgcaagcataatgaggaagctaagattgctagggaggttgaggctcatgaaaagagaatcagaaaggagcttgagaagcaagatctgctgaacagaaagagagaagaacaaatgcggagagaaatggagagacatgatcgtgagagacgtaaggaagaggagaggttgatgcgtgaaaggcagagggaagaagagaaattccaaagggaacaaagacgcgaacacaagcgcatggagaagtttatgcagaaacaatctatacgagctgaaaaactgagacaaagagaggagcttcgacgagagaaagaagctgcgaggcagaaggctgctaatgagagggctacagctcgtagaattgcgcgagagagtatggaactgatggaagatgagcgcttggaactattagagttggcctctcgtagtaaagggctgccctcaatggtttctcttgatagtgacacattacagcagcttgattcattcagaggaatgctggggaagttccctcctgaaactgtgagactgaaggtgcctttttcaataaaaccatgggcagcttccgaggatattattggaaaccttttgatggcttggaagttttttgttaccttcggtgatgttcttgggcttccgtcatttacgttggatgaatttgtgcaggctcttcatgattatgattcaaggcttttaggtgaattgcatgtttctctgctgaaatctgttataaaagatattgaggatgttgcccggactccttcagttgctttaggtgtaaatcagagcagttctgctaatcctggaggtggtcacccacaaattgttgaaggggcctatgcttggggcatcaacatactcaactggcagagacacttgaactttcttacatggcctgaaatattgcgccaatttggtttatgtgctggttttgggcctcagttaaagaaaagtgatgctgaaattgtccatcaccgcgatgataacgagggtcgtaatggtgtagatgtcatttccattctgcgaaatggttcagccgctgtgaaggctgctgctttaatgaaagaaagagggtatactaatcgtcgtaggtctcgacaccgtctgacacctggaacagtaaagtttgctgctttccatgtactgtcacttgaagggagcaaaggtctcacaatattggaagttgcagaaaagatccagaaatctggacttagagaccttacaacaagtaagacaccagaggcatctatatctgcggcattgtcgagagacactaagctttttgaaagaacggcaccttcgacatattgtgttaaaactccttacagaaaggacccagatgattctgaggctgtgttggcagcggcacgtgaaaaaatcagggcgtttcagaatgcgcttccggagtgtgaagaagtcgagaaggatgtggatgaggctgagagggatgatgattctgaatgtgatgatgccgatgatgatgctgatggtgatgatgtgaatattgaagacaaggatgccaagtcgccccttgttggagctcaatatggtgcacaaattacagtagttggtgacataaagaaagaatcaaacatcgtgatgaacacatcagtgccaccaagcattcagattaaatctagtgcaagtgtaccatttcatactttagacagtaaagcaagtagttcaactgatccagaggttggagatgatgctaaagacattgagatagacgaaagtaatcaaggggagtcctgggtacaggggctagctgagggtgactactgtgatcttagtgtagacgaacgcctcaatgctttggttgcacttattgccgttgctaacgagggaaattctatccgtgcaattctggaggaacgcctagaagcagcgagtgctttgaaaaaacaattgtgggctgaggcacaacttgataagaggcgtataagggatgactttactagtaagatgcagtatgattcttatgtgagtatgaaggttgatacagatcaagaaaataatgctgctgaaattacccttacaccagtgcatgaccctattaaaaacaataacggaaatgccaatttgatgaacaatggtttgcttgttgataagcagaaccagcttactactggtgatgtatatcatcagcggaatggtgcaagccgagaatcgagtactaacgcagaaagcttgtctgttcagcaatatgcttcatctgagaaaactcgatctcagttgaaatccttcataggtcacaaggcagaacagctttatgtgtacaggtctctaccacttggacaagaccggagacggaaccggtattggcagttctctgcatcttcatcatcctatgaccctggttcgggaagaatcttttttgaatctagagatggatactggagggtcattgatacatcagaggcatttgaagctttggtagcttcccttgatactcgtggcatccgcgagtcacatttgcactcaattttgcaaagtatcgagccaaccttcaaggaagctgttgagaggaaaaggtgtgctaatttagaacacccaactggacggacttcggaaaatggaagtaatgaaagtccaaattgcaacaatgaatttggaagtccatgcagtaccctttctggtgttgcttctgataatcttatggcacattcagatattttcaagatagaggttgggcgcaatgaagctgagaagaattctatctcgaaaagggcttccgtgtttctgaaatggatctggagagagtgctacagtcaccaatctacatacgccatgagatatggaaagaagcggtgtcctgagttgattcactcttgtgattattgctaccagatatacttagctgaagaaaggcactgttcttgccacaaaacattcaaacacattcacaatttcttggaacactcatcacaatgtgaagaaaaacaaagaacagatcccaattggaagatgcaaactgtggacctttctgtacccgtaggattgagattgctaaggctgctcttagctaccattgagtggcagagtctggacaggattagagaagagatgcttagtgtgctggaaagtgcaataaagcgagactacttatcatctaactttgaaacgacaactgagttgcttaattcaagcacacaagattttgctactcagaattcggctggaggttctggatctgccactgcacttccatgggttcctgacactactgctgctgtagccttgagattgttagacttggatgcttccatctcatacacccttcatccaaagttgggttcaaataaggagcaagaatctggagatttcatgaaacttccaccgagatatccttctatgaataagggcaaacaagaaatagaacagttcaggcctattggttttgatcaacaggatggaacgttgctacctaacagcaatggtcgtagaggtcggggaaggggaggtagaggaggcagcaggggaggtagatctcgtggtcatggtggtagggttcccagaggtattggcagctcttccaggattcagttcagggatgacaatagtatgctctatgggagagccccacgaaagaatgcacgtggtggccgcggccgtggacgtggacgtggacgtggacttcgaactgttagacctcggcaaccatccgagctcagtgccagatcaattccaaaggcaaacctattgggcagttttagcatgttaagtaagacaaatcacactggcactacgcattctcccgagagctcaggtgcagaagagtgggcctttgagaggagggaatatgtgaaggatgatgagaacaatttggtctctcaatccgatgagtctgaggaaaatgtcgaacctatgaatgaggaatatggtgagcatatttcaggctatccaagagacaattccgactccagacccgtacagatgatgggtgatgggagcgacgataatgatgaggatgctgaaggagatgagggtgaggaagatggagaggactatgaagctgaagatcctggtgatgaggatgatgacgttgagatggatggggatgatgatgtcgaggtggatgaggatgatgacattgagatggatggggatgatgacattgaagatgatgatgacgacgacggtggagatggagcagccaacggagatgaggatggaggtggtacatcatcatattcttcagagtatagtgaatga

SEQ ID NO: 40372 - DNA, 4200 bp, Zea mays
  Peptide Sequence Number=SeqID_82151
atgaccgcgtcaaaaaaggctggcccctcggaagggttcgacagtcaccccaaagcacgcatagtgagggatgactctcggtacgttcgatacatagccgaggctcgggctatgctcccaaggtaccctaggacatttccaagaccggcgggaatgatttgtaacggaatcccactggagggaggcatcgagccctcggaccctgtcgaaggggtctgggtccggcgaatcacccacaggtacttttggagcgcgcctctgggccaccagccgacccctaacgaacggggcacgggcgtccactcggatcacccgttagcagctcactggaaacaccataggctcgggggctgctctcgcacccggctacggccaaaactattgacagcgtcaacaaatcagcttgataacttggaacccgaccacgcacccgggctactgccgggccgcatgagggaacgatcagaccggccgaggcaccacgaaaagcattcagacctcagaggagtcaaaccactcctccgaggcctcgggggctacacccggcaggaaaacagcgccgctcgctccgctccgactgccgtgtcagccaccccggcaacgactgacaacaagtcacgatcaatcaccgagttcagcctcgggcgcaataggaagctccgcctcgcccgacctcatgctccgacctcaggaagaggtttccgcctcgcccgacctcatgcttcggcctcaggaggaggtttccgcctcgcccgacctcaggctccggcttcgggaggaggtctccgcctcgcccgaccctcggactcggcctcgaccccggtctcgggaggaatcgcgtcctcgcccgaccccggcctcggcctcaagagaagctacaaggaacaagaccagcgtcccatctggcttaccccagtgacgggtaatgatggactcaggcactcctccggtggccacgccatcacatgtacagggcccaagctctcccccaacggccacgttggcatgtacacagggcttaggcactccactgccggacacgtcgctcatgcgaccttcaacatagtggtcgaccatatcggcactcacgacttcgtgcaagaattccttgccaaccaaacattccccacgctatttggttggggaatatcgaagcctaagaagaaagatgaagagacaaagagtggtgtgctgaaggtttttccatattgcttcaaaaagcaccctgtattcaaatgcccatgtgctgattggttaacttatattgagttagtatgcgatgagattcttgggaattatacaataaaagaagaccgactgatgatggctgccttcagtaatcgagcaaaatcaaggctgaatagagttacagatgctttaggatttgaatatctagattatccaaagatagcagagaaggctgatgtcaggggtttctcagctgcatgcccctgctgccttggttcccggagtacgctccgaggcctgccagcttggcacccgttgctggtgctgctactcgtcgccggcgttgctgccttcgcagagtccaaggtgtacgctccggcggacagggtgttgctcaactgtgggtcgacgacggacggcctggactcggacgggcggaggtgggcggccgacacgaacgacaacacgtggctgactgactctggcaagtcgtccgtgatgatggcggcagacagggcggacaatgggctgccgtcccccatcccgtacatgacggcgcgggtgttcaccgtggaggccgtgtacaacttcaccgtgaacccgcgggaccggcactgggtgcgcctccacttctacccgtcctcctacaacgggctcgccgccgacagcttccacttctccgtgtccacgtccaccggcatcacgctgctccgcaacttcagcgtctacacctacgcaaaggcgctgacccaggcgttcatcatccgggagttctccctcccgccgacgcccgcggggttcctcgccctcaccttcacaccgacgccgatgggcaacgagagctacgcctacgtcaacggcatcgaggtgatctccatgcccgacatcttcgtcgacccggcgatcatggtcggcttcgcggaccagaccgtggacatcgccagctccacgctccagaccatgtaccggctcaacgtcggcggctcgtacatcccgccgtccaacgactccggcctcaccaggcactggtacgacgacacgccgtacgtgtacggcgcgacgcagggcgtcacctacagggccggcccgcatttccagatcaagtaccccagcgagaccgccgagtacgcggcgccgccggaggtgtacctggacacccgctccatgggctccgacccgcgcctgaaccagaactacaacctcacctggaccatggcggtggacggcaacttcacctacgtcgcgcgcctccacttctgcgagctgctgctcatccgggccaaccagcgggcgttcgacatctacgtcaacaacaagacggcgcaggccgacgccgacgtgatcgggatgacgtcggagaagggcgtgcccatgtacaaggactacgcggtgtacatggccgaagagcccgatgggcaggccatgtgggtggcgctgcacccgtccgtggcgctccggccgcaattctacgacgccatcctcaacggcctcgagatcttcaagctcaatgacaccgccggcaacctcgccgcgccaggccccgagccgtccaggttgctcgcgaaggcggagctgggcgctggagagcagaacgcgcccgagagtcagccgcatccccacatggcgagggtgatgggaggcacggcaagcggcgcggccgtgctcgggatcgtcgctgcgatctgcgtcgtgtggtaccatgagaagaagagcagggagacggccagcaactgtgggtcgcacaactccgggtggctgccgctgttccactcgaacaccagcggcaagtcgtcgggccatatcccggcgaacctcgcgggcatgtgccgccacttctcgttcgccgagatcaaggtggccaccaggaacttcagcgagtcgctggtgatcggcgtgggagggttcggcaaagtgtaccggggcgtcgttgatggcgacaccaaggtggccatcaagcggtcgaacccgtcgtcggagcaaggcgtgcaggagttccagacggaggtggagatgctgtccaagctgcggcaccggcacctcgtctccctcatcggcttctgcgaggatgccggcgagatgatcctcgtgtacgactacatggagcacggcacgctgcgggagcacctctacatgggcggcaaggcgccgctgtcgtggcggcaccgcctcgacatctgcatcggcgccgcgcggggcttacactacctccacaccggcgccaagtacaccatcatccaccgcgacgtcaagaccaccaacatcctcgtcgacggggactgggtcgccaaggtctccgacttcggcctctccaagtccggcccgacgacggtgaaccagacacacgtgagcaccatggtcaagggcagcttcgggtacctcgacccggagtacttccggcggcagcagctcacggacaaatccgacgtgtactccttcggcgtcgttctcttcgaggtgctcctggcgcggccagctctcgacccggcgctgccacgggagaaggtcagcctcgcggactacgcgctcagctgccagcggaacggcaccctgctggacgtcctcgacccaacgatcaaggaccagatcgcgccggagtgtttcaagaaggtcgcggacacggccgagaagtgcctcgcggagcagagcatcgaccggccgcccatgggggacgtcctgtggaacctcgagttcgcgctgcagctccaggacaccttcgaaggaggcagttgcgggcggcggaccgtgggtgacgacgacggcagcggcacggggcgcccggcgctcgagccgagtgacagcaacgggagcaccgcaagtttcacgacgctgaggacgttgtccacgtcacgggcgcgcgagacgtgcgtgatcatggaggagaccgacgacgaggtggctaacagcgcggctttctcgcagctcgtgcgcccaagtggccgtagaatttatgtagccaagaacttgataaggccctattcggcagcccggtttcagttccaggccacgttttag

SEQ ID NO: 40373 - DNA, 309 bp, Zea mays
  Peptide Sequence Number=SeqID_82152
atggaacacgtgcgtactgagccacatccattgaaaaatgaatgggggagaaatggcaagaaggatgatgacctgaaaaatgaagcattaccttttggtgatttctcttgtgggactatctctgcaagttcagactttgcaggagaggcagctccaaggctttgcaaagagcacaccgctgatgctgaaagtatatggatccgttcagttgtgagtgtcataggtaaagagcacaatctatccaaaaaacaccgaaaaagaactctaaaaaaggaaacaaaacacacaagaatcgaagccatggtctga

SEQ ID NO: 40374 - DNA, 1254 bp, Zea mays
  Peptide Sequence Number=SeqID_82153
atggtggagactcgccggagctccgccgccgccgccgggaagcgcacgtctccatcgccatcctcttcgtccgtacctcccccgaagcggcccaagatcaaggagtcgataagcagtcttccgctgctgcagagagttcaaagcggaggaaggagcaggagcaacagcaacccgcagtgccatgggcaaagctgctctcggagtgctcacaggttcgcggacgcggcgatcgaggcctccgacggcacggtctactttagcgacgctagcaccaggttcggcttcgacaagtggttcctccagcagtccagcatgcatcatgcaggcttgctctgcccacagcgcggcgacggtaaaatggttgtctttgtcatgcgacaggctgtttggaatgctgtcactaataatgaggtcgttcaaggtttcagaagatctttacatgatgaggctgctcaacatgaggaatctgaagttatggatggtgaggatgacgatgatgaagacaatgatgatgattatgatacaaagaagaacaagggaactgctggaggggaagggcaacagggaaaacgacctacaaagtgcaagcagcaatactgtgttcttatgcttggggtgaagatggttgccactctgaggttcctgagcttcaagaagaagcatagggggagggaggtcactgtcatcgactgcacgtcgccgcccgtgccctggccagccgacgacgccagcggcagccttggagctgcctctcctgcaaagtctgaacttgcagagatagtcccacaagagaaatcaccaaaaggtaatgcttcatttttcagcttccattcaaccaatgccgccgagtccaaggtcttctacctcaagatgaagggcgactaccataggaaggatgctgcggggagcaccatgaattcctacaaagctgctcaggtttcctctgactgttcaccattattggaagcagggcaggcagagagccttggaaccgaactcttggagatggtgcctagcagggaagaggagattaagttgaaagaatacagggaggatgttgtgtcgacttttgtagttgatgattatgtgagacttgagtttaagggctcaacttttaccggttcttggaagtcatttagtagccctaagatttcatcaacattcttattagtaattgctatagtatcaaatgggattgtggtacgagttgctcgagtactaacgttgttgtacattgtgaagctaagtgggtaa

SEQ ID NO: 40375 - DNA, 261 bp, Zea mays
  Peptide Sequence Number=SeqID_82154
atgtccacgagaagcagagcctccggcacggctccaacctcgtacttcgacttcgaccaaatccatgaactacaggaatccaccttgcttactctgcaaatctgggctgccagtgttgatatccagatgtttgagatcttgttatgcattggaaataaagcagatcttatacctgatcatagcgtgcagaacatagaatatattgaggcatttgcttccaatgctgactttgataagtgtaagttgtctcctcggctgtaa

SEQ ID NO: 40376 - DNA, 423 bp, Zea mays
  Peptide Sequence Number=SeqID_82155
atggcggacttgagacagttgatggtttgtccgaagcattggaaatctgagagtgagctcccttgcatgattgctttggctaatttggttttgataatgcccgcgactattacttctgtgaaaattatacggaacaagcagactgggcactcagaaggctatggttttattgagttttcctctcgagctactgcagaacatactctgataaacttcaatcggcagatgatgtcgaatgttgagatgacttttaagctgaactgggcttctgctagcactggtgataagcgtggagatagtggttctgatcacacaatatttgttggtgatttggctcatggtgttactgactccatgttggaagatgtgttcagagctaagtacccttcagttagaggagctaatgttgttgttgatacttga

SEQ ID NO: 40377 - DNA, 1737 bp, Zea mays
  Peptide Sequence Number=SeqID_82156
atggtgggtctcgtcggcggcagcacggcgcgggcggagcacgtcgtcgccaacgccggaggggaggcagagtacgtgcgccgcatgcaccgccacgcgccgaccgagcaccagtgcacctccaccctcgtcaagcacatcaaggcgcccgtccacctcgtgtgggagctggtgcggaggttcgaccagccgcagcggtacaagccattcgtcaggaactgcgtcgtgcgcggggaccagctcgaggtgggcagcctgcgcgacgtcaacgtcaatcccggcctgccggcgacgaccagcaccgagcgcctcgagcagctcgacgacgacctgcacatactcggcgtcaagttcgtcggcggggaccaccgcctccaggtccgtgctgctgccgcccacacaattaaggcaataaggcctactggagtttctgcataccaaaactgggggccccttcggcaccatgaagaaccccgccgagcaggcgcacggagccaacgccggatagaaattgtcgtcaggctgctagagcccatcaaggagcaatcccccatcctatcctacgctgacttctaccagcttgctggagtcgtggcagtcgaggtaactggcggacctgatgtccccttccaccccgggagggaggcggtcgtgttgtgcatggcggacttgagacagttgatggtttgtccgaagcattggaaatctgagaccgaggcggctaggcagctcgcgctaatgctcgaagtcgagaggccaagctaccaaggccgcaactcagtctaccaatcttcctcaaagatgatgtcggctatctccgtggctcatttggggtgcaaagacatggacgccgtggacgtcggagtggtagggatggtggactcgcagagcctatcctcggcacttgagaaactctatttctgggagaggaagctgtatgctgaggtcaagattacttctgtgaaaattatacggaacaagcagactgggcactcagaaggctatggttttattgagttttcctctcgagctgctgcagaacatactctgataaacttcaatgggcagatgatgtcgaatgttgagatgacttttaagctgaactgggcttctgctagcactggtgataagcgtggagatagtggttctgatcacacaatatttgttggtgatttggctcatggtgttactgactccatgttggaagatgtgttcagagctaattctacttcacgtcttgaccacgtccgcctcggcccctggtctcctactctcctccccactcctccctcggcctggagtccagtcctcgactccgcctgccgcctgctgcctgacaagccacgcgctgcggcagccgtacgggcactagggttttcttccacttcgaccgcgggctcgggatctcgcgccgcaccgcaatgcagcacacgtgccgctgatcccgtggccgcctccttcctttcctcctcctgcggtcctgcgccgcctctgctgcagcgggcagccgccatggcgcggcgccacgggtggcagctccccgcccacaccctgcaggctttatctgtgctgattctatatgtcagatgtactgcgattgatcctgctgactctggcatcctgatttccatggatgacatactaatttataaatcagaagacactcaagatgaagctggtaagccaggattgaggaacgatgaggatatccgaaagcataaatcatgctttggaagg

SEQ ID NO: 40378 - DNA, 234 bp, Zea mays
  Peptide Sequence Number=SeqID_82157
atggaagcggcggcggcggcgtccctgtcctcctcgcgcgtcaacgtccgtgtcctcctcgcctgctcgcggaagaagaagtcgaagagcggcgcggcggcgtcccggcctgtcctcgcctcctcgcgcgcggaagaagacggtgtccctgtttggacgttgcaaataatccgacagatagatgtagcgtcctcgcggaaaaaatatgaaaatatgatgttgcgtcgcgcgtaa

SEQ ID NO: 40379 - DNA, 498 bp, Zea mays
  Peptide Sequence Number=SeqID_82158
atgaatgtggttctgttcatgatgaggcagcttaatgaccttaagatggacaagaatcagaatctagcatatgctccttatattattcctctgatcaaggccaaaactaggtttgaggtgcgggacgccgtcttcttccgcgcgcgaggaggcgaggacaggccgggacgccgccgcgccgctcttcgacttcttcttccgcgagcaggcgaggaggacacggacgttgacgcgcgaggaggacagggacgccgccgccgccgcttccatttccgcgaggaggcgaggataggccggtacgccgccgcgccgctcttcggcttcttcttccgcgagcaggcgaggaggacacggacgccggcggcttccattttcgcgaggaggacagggacgccgccgcagtcgcttccatttccgcgaggaggacaggtacgaagcatgggtggcgatgatgggatggagggtgcctttgatttcatatttttgatgtctgggtag

SEQ ID NO: 40380 - DNA, 1374 bp, Zea mays
  Peptide Sequence Number=SeqID_82159
atggctatcgttcaggcgtcgtgcaccactgaatttatcgtcgccggctgtctgtctgcaatacttgccagcagatttctcaacacaaaagtgttcttcggctatgctccttattccaatagatatatgcacccataccagaaaaagaacataaaaatattttcaaatttgaacttaaaaatattttcaaataaggatcagatagttcatgaagacacatgtcgagatattgttggtgggactaatggcagagccactactcagacaccctataggactgctaggtggcaatgtccaacccaaccgcgcgcaacaaagagcaacagtagcagcaccgagcccaggccagtacgacctcttgattccaaaatccccaaattcaaacatatcgaacaaggagatggcaaattcttgcatattcctgttcttgatggagatgggcgggttgctgcttgtttggacgttctgcaacttacccatgctgcaatttcaatggtctccctttccatggctcatgccctctctttcttaatccatcttagtaatcttagtccatctgaaatggttttccctctgaaggttgaaggaggtcctggtgctgcaactgatgtggcaaacacgataatgcagaaattctgggactctgcacttgctctagagcaacctcaagaggaggattttgatagtcacaggacaagaagggacgcatgcatagattcacttgtggtaggctctgaaagtttagatgagctgatatcttctgtaatccaaaggttaggcatggttgatgagaagagagtgattcaactgttgtatgaagataacgaaagcgacaaggtgctattgacaaccaattctgatcttactggtgctgtgttttgtgcgaaatcatctggattgaaggtctttggcttctctgatgtggacccccttttacatcaaaaatatgaaatcaaaggcaccctccatcccatcatcgccacccatgcttcgtacctgtcctcctcgcggaaatggaagcgactgcggcggcgtccctgtcctcctcgcgaaaatggaagccgccggcgtccgtgtcctcctcgcctgctcgcggaagaagaagccgaagagcggcgcggcggcgtaccggcctatcctcgcctcctcgcggaaatggaagcggcggcggcggcgtccctgtcctcctcgcgcgtcaacgtccgtgtcctcctcgcctgctcgcggaagaagaagtcgaagagcggcgcggcggcgtcccggcctgtcctcgcctcctcgcgcgcggaagaagacggcgtccctgtttggacgttgcaaataatccgacagatagatgtagcgtcctcacggaaaaatatgaaaatatggtag

SEQ ID NO: 40381 - DNA, 1008 bp, Zea mays
  Peptide Sequence Number=SeqID_82160
atggctatcgttcaggcgtcgtgcaccactgaatttatcgtcgccggctgtctgtctgcaatacttgccagcagatttctcaacacaaaagtgttcttcggctatgctccttattccaatagatatatgcacccataccagaaaaagaacataaaaatattttcaaatttgaacttaaaaatattttcaaataaggatcagatagttcatgaagacacatgtcgagatattgttggtgggactaatggcagagccactactcagacaccctataggactgctaggtggcaatgtccaacccaaccgcgcgcaacaaagagcaacagtagcagcaccgagcccaggccagtacgacctcttgattccaaaatccccaaattcaaacatatcgaacaaggagatggcaaattcttgcatattcctgttcttgatggagatgggcgggttgctgcttgtttggacgttctgcaacttacccatgctgcaatttcaatggtctccctttccatggctcatgccctctctttcttaatccatcttagtaatcttagtccatctgaaatggttttccctctgaaggttgaaggaggtcctggtgctgcaactgatgtggcaaacacgataatgcagaaattctgggactctgcacttgctctagagcaacctcgagaggaggattttgatagtcacaggacaagaagggacgcatgcatagattcacttgtggtaggctctgaaagttttgatgagctgatatcttctgtaatccaaaggttaggcatggttgatgagaagagagtgattcaactgttgtatgaagatgacgaaagcgacaaggtgctattgacaaccaattctgatcttactggtgctgtgttttgtgcgaaatcatctggattgaaggtctttggcttctctgatgtggacccccttttgtacggttataccatatttatcgcactgtggggctatttagtttgtaaccatagtttcccacaactaacctga

SEQ ID NO: 40382 - DNA, 1758 bp, Zea mays
  Peptide Sequence Number=SeqID_82161
atggatgagagaggaccatggtctgctaacccttttccaaatgatgttgtgactcactggaaacttgacaagacagaggatagatggaggcggcggttcaagttcaaacgtaattacaaatttgatgaacgattatgtcagccttcacagtcaaggaatgaaagtacagcaactttagctgaccagctgtacattagtgccaaaattactcagaaaatgaagcaattccttgttaaaggagtgcggggaatcacagaggatagtagttacgaacaatttgaagacactaatgacgcgagtgaatcttcccagagtaatccttcagagagccaaaaccttaataatgctgcagatacctctgatcatcatgcttctgcacattataagaaagagccatcatctactaatggagataatgattatacaaaggtgctatgttcagttcgttgtgtttttgttaccccaaagcgaaaattagcaggacaactggatatcacacgaactgtcatgcatttttcttttgaatttttggttgaaggaactggaggatcatctgtttttagcaagtttaaagacaaaaaagattcagactgcaagaacgagctgggaggtgtggacagacttgacggatgccgagacagtatgattgaaaccaatggtgttttgatgcaaaaccagtctaacaagatcaaacgtcacaaaaggtggaacataactaagataaaaggagttcattggacacgctacctactgcaatatactgcaatggagatcttctttgatgattcaactgcacctatatttttaaacttttcttcccaaaaggatactaaaaatgctgggactttgttagtttctcttaggaatgaagctttgttccctaaaggaagtaccaaagacaaaaataatatcatttcattcgtggacaggcgagttggacttgaaatggctgagaatgccagggaaagatggaaaaggagggaaatcagtaactttgagtatcttgtgattttaaatacccttgctggaagatcttacaatgacttaactcagtatcctatatttccatgggtattggctgattacacctctgaaaagcttgatttcaacaagtcatcgactttcagggatctttcaaaaccagttggtgcgttggatgaaaaccgcttcaagggtggcaagtttgaccatgcagatcgtttgttccaaagcattgagagcgcttacataaatagcttatcaaatacaagtgacgtcaaagagcttattccagaattcttttacatgcctgagtttcttgaaaattcaaattcatatcatcttggtgtcaagcaggatggggaacctataggcgatgttgctctccctccatgggcaaagggatcgcctgaagaattcatccacatcaacagagaagcccttgaaagtgaatatgtgagctctaatctgcataactggattgacctcatatttggttacaagcagcgtggacaaccagctgttgaggaacattcctttggaattggttcagatgttatctctcctcgtaaaattggcactttccttgctgaaaacgttaagtttggaagacaattcttagcaacgatgcaaaatagtcgtgataattatttgattttatgtggaaactgggagaacagttttcaaataatttctcttagtgatggaagaattatgcagagcatcaggcaacacaaggatgttgttagctgtgttgcagtaacctatgagaacttctaa

SEQ ID NO: 40383 - DNA, 2925 bp, Zea mays
  Peptide Sequence Number=SeqID_82162
atgggtgcggagatgggcagacgagcgccgcgacgacgctcagatcccgaacaagcaaacacatgttcgcgcgaagacgacaaagacgaagacatacggctctgcgtcgattccaatgggaactgtgacgacaggctcccacgacggacggtgcgcgccgtggacggcacgcgaactcctctaaccggcggcgcggagattccccttcgtctgacggacggctttattggtgtacaggctgctaatgaggttaagcacatgaaggctgttcaggctgatcgtttaaagaagctgcaggatcttcgcatgaagcttaacgagtgttctgctacggagataaagctagcgcaggccattgaagatgagatacatttaactattactgctgtgctttcagcggatgacaatagaaagacagcttgtcaacttgctttccgcgaggatcagcaaattatcagggataagtggatacatatttcccgtgctctgatggatgagagaggaccatggtctgctaacccttttccaaatgatgttgtgactcactggaaacttgacaagacagaggatagatggaggcggcggttcaagttcaaacgtaattacaaatttgatgaacgattatgtcagccttcacagtcaaggaatgaaagtacagcaactttagctgaccagctgtacattagtgccaaaattactcagaaaatgaagcaattccttgttaaaggagtgcggggaatcacagaggatagtagttacgaacaatttgaagacactaatgacgcgagtgaatcttcccagagtaatccttcagagagccaaaaccttaataatgctgcagatacctctgatcatcatgcttctgcacattataagaaagagccatcatctactaatggagataatgattatacaaaggtgctatgttcagttcgttgtgtttttgttaccccaaagcgaaaattagcaggacaactggatatcacacgaactgtcatgcatttttcttttgaatttttggttgaaggaactggaggatcatctgtttttagcaagtttaaagacaaaaaagattcagactgcaagaacgagctgggaggtgtggacagacttgacggatgccgagacagtatgattgaaaccaatggtgttttgatgcaaaaccagtctaacaagatcaaacgtcacaaaaggtggaacataactaagataaaaggagttcattggacacgctacctactgcaatatactgcaatggagatcttctttgatgattcaactgcacctatatttttaaacttttcttcccaaaaggatactaaaaatgctgggactttgttagtttctcttaggaatgaagctttgttccctaaaggaagtaccaaagacaaaaataatatcatttcattcgtggacaggcgagttggacttgaaatggctgagaatgccagggaaagatggaaaaggagggaaatcagtaactttgagtatcttgtgattttaaatacccttgctggaagatcttacaatgacttaactcagtatcctatatttccatgggtattggctgattacacctctgaaaagcttgatttcaacaagtcatcgactttcagggatctttcaaaaccagttggtgcgttggatgaaaaccgcttcaagggtggcaagtttgaccatgcagatcgtttgttccaaagcattgagagcgcttacataaatagcttatcaaatacaagtgacgtcaaagagcttattccagaattcttttacatgcctgagtttcttgaaaattcaaattcatatcatcttggtgtcaagcaggatggggaacctataggcgatgttgctctccctccatgggcaaagggatcgcctgaagaattcatccacatcaacagagaagcccttgaaagtgaatatgtgagctctaatctgcataactggattgacctcatatttggttacaagcagcgtggacaaccagctgttgaggaacattcctttggaattggttcagatgttatctctcctcgtaaaattggcactttccttgctgaaaacgttaagtttggaagacaattcttagcaacgatgcaaaatagtcgtgataattatttgattttatgtggaaactgggagaacagttttcaaataatttctcttagtgatggaagaattatgcagagcatcaggcaacacaaggatgttgttagctgtgttgcagtttcgtctgacgggaacgtggttgcaactggtagttatgacacaactgttatgatctggcatgcatttcgtggaagaccaattgataagaaaatcaggggtgccaattttgaactttcagaaaaggaacaagttatagtggaaaggcctgttcatatcttatgtgggcatgatgacatcataacatgcttatttgttagcacggaacttgacattgtaatcagtggttcaaaagatgggacttgtatttttcatacactgcgtgaagggagatatgttcggtccatccagcatccttctggtgttggtttatcaaaattggtagcatcgcagcatgggagggtggtattgtattctgagaatgacctctctttgcacatgtactccatcaatggacggcatattgcttcttcagctacccttggacgtctcaattgcatagaacttagttgttctggcgatttcattgtttgcgctggtgagcttggacagatagtcttacgctcaatgcattctcttggtattgtttggaggtacgatggaaatggcaagacaattacttccctagctgtgacccctgaggagtgcatcctagcaggaaccaagaatggcagcctcttggtgttttcaacagaaacttctcttcttcgaagggggagcatgcaacgaaataaaataaaaccctccacatctggttaa

SEQ ID NO: 40384 - DNA, 426 bp, Zea mays
  Peptide Sequence Number=SeqID_82163
atgggcgccctatgctcggcagcttgctgctcgctgctcggtagccctgcaccatattctaaggacgcctggtggatggcggaaactgggccagcgcctggtggaggtggatgcctgcagccctgcaccacagacgagcagattgggacttgggacttgggagggagcttagccttggcggctagggttagaaactgggagacaagagagagtgagagagagactgaccgagactctaagactccgtccgaggcgctcgcgttggcgtcgctcatcgacgatgaaaagaagcttggcgactgccagttcgacctctggaagcagtactacgtgaccacatgtgtcgctgtgttcggcaagctccggcgcagccgccgcttggacgcggtccagagcgactgcatcgcgctgtccatcttcaaatag

SEQ ID NO: 40385 - DNA, 432 bp, Zea mays
  Peptide Sequence Number=SeqID_82164
atggcgctttcccccttcctccttgcgaaaaggcgacgaaggggcgaaaacagcgccgctcgcccctctccgactgctgtgccacccgccagggtgaggctgacaacagctgagtccagcctcaggcgcaacaggaagctccgcctcacccgaccctgggcctcggccgcctcgctcgaccctagggctcggcctcaacctcgacctcggaagggggtctccgcctcgcccgaccccaggggtcggcccccgcctcagcctcggaaggtggtctccgcctcacccgaccctagggctcggcctcgacctcgacctcgggaggaatcacgtcctcgcctgacctcggcctcaggaggcgtctccgcctcgcccgaccttgggctcggaccgatcgcgccacagaggatacatcattaccctacccctagctag

SEQ ID NO: 40386 - DNA, 420 bp, Zea mays
  Peptide Sequence Number=SeqID_82165
atgttggcctcaagcggagctctgctgcttccactcgtgccgtggcacgagcagacctttgacgatttaatgtcgtttttaggccttttgctgggcgctataaatcatgacgacaatataatatgtctcggcgtcatgacttataatgtcgagttttcaaatccgacattctcgccgctggatcgagtcatgcagctctgcgcgtccgtggtcaatggcgccgagctaggtcagcctcaccctggtgggtggcacagcagtcggagcggggcgagcgacgctgtttttcctgttaggttggtcagtgaaagggcgaagcgactgcggtcacttcgacctcgccgactgaggcacgtgtgtcatgataaggtgtcaggcgatcctcgcattgaatgcgcctgcgatacggtcggttggtga

SEQ ID NO: 40387 - DNA, 630 bp, Zea mays
  Peptide Sequence Number=SeqID_82166
atgggtttaataaatatatattatatgactgtgcccgcgggtgtacctgcgggtgccataaacccgcgggtagcgggtttgggtaacatacgctacccgtcgcgggtagcgggtgcaggaaaacaacactattcaccctgttccgactattgtgccaaccacaagggtaagactaacaacagtaagtcacggcctctcccgagttcagcctcgggcgcaacagggagctccgcctcgcccgacccctggcctcggcctcagcctcagcctcgggagaaggtctccgcctcgcccgaccccagacctcggcctcgggagaaggtccccgcctcgcccgacctcagcctcggcctcgggaggagtcacaacctcacccgacctcagcctcggcctcaggagaagtcaccgcctcgcccgacctcggcctcggaccgactacgctacaggggatacatcattaccctacccctagctagccgcctcaggctacgaaggaacaagaccggtgtcacatctagattactccggcaacaggtaatgatggttccctgcatgcgtcagcaggacccagggccgcaccgccagctacgcttctacagggctcaagcacttctccgccggccacgttag

SEQ ID NO: 40388 - DNA, 504 bp, Zea mays
  Peptide Sequence Number=SeqID_82167
gaaaacaacactattcaccccgttcggactactgtgccaaccaccagggtaagactaacaacactctctacaaaggcaaagaaacgtcagcaggacccagggccgcaccgccagctacgcttctacaaggctcaagcacttctccgccagccacagacaagcagcgtcaaattcactagtcggttgagggtcctcgcgggtccaaaatgccgacactatcattgttccaaaaattcagttactaagagacagactaagaaaagtttgacggcttccatatatgcaagatcgatacaaggatacaagcaactgcctttaaaaggaaaacttctgaggaggagcaagatcaaggagaagatgaaggctttgcagagcttgataccgaactcaaacaagattgacaaggcatccatgcttcatgaggccatcgagtatccgaagacattgcagtatatttctttttacggaatttcaaataagactttagttactcctttcagttaa

SEQ ID NO: 40389 - DNA, 495 bp, Zea mays
  Peptide Sequence Number=SeqID_82168
atggcgtgggagctcattgaagttccgggcaacttgaatccctctctcaaagactcttcagttgatgtggtggccgccaagattgatcccaagttagccaatactctcattaggcagttaagccaggtgtgccctttggagaatctgaggcatgtaaagcgtgtacgtcgacgtactgaatgtggtgactgtaattacagggatgcctttacagatctggcccgtaactcgcagcggccacgcagggcctgttacaatgggccggaacgcacgtgggcctctgagctggacgaggccgcactgtgggatgacttcgtcgccggtcttcgtctggtgccgatcaagcgaagggtgtccccgcctgttctgtccctgtctgaccagcggttatcagcgaagacttcgagcgaggggtggcgcctttgccttcgccccaacatttgccctccgagggaccagttcaacaaagtcacctggtgccgaagacgtcgctag

SEQ ID NO: 40390 - DNA, 498 bp, Zea mays
  Peptide Sequence Number=SeqID_82169
atggcgtgggagctcattgaagttccgggcaacttgaatccctctctcaaagactcttcagttgatgtggtggccgccaagattgatcccaagttagccaatactctcattaggcagttaagccaggtgtgccctttggagaatctgaggcatgtaaagcgtgtacgtcgacgtactgaatgtggtgactgtaattacagggatgcctttacagatctggcccgtaactcgcagcggccacgcagggcctgttacaatgggccggaacgcacgtgggcctctgagctggacgaggccgcactgtgggatgacttcgtcgccggtcttcgtctggtgccgatcaagcgaagggtgtccccgcctgttctgtccctgtctgaccagcggttatcagcgaagacttcgagcgaggggtggcgcctttgcctttcgccccaacatttgccctccgagggaccagttcaacaaagtcacctggtgccgaaagacgtcgcttag

SEQ ID NO: 40391 - DNA, 1593 bp, Zea mays
  Peptide Sequence Number=SeqID_82170
atggagggcgagatcagggggtgccattgggatactctgagagcgttgctgcccatctatcaagcgatcagttcgtctcaggttggggatggctgcagcactgatttttggcatgacgcttggtctgggcctgacgacctgtctacagccttcccagccctgtactcacactgcatcaggcaaaaagtctgcgtgagggaggtggtgctgcagggtttgcacctagtcccgcgcctcacgccacaagcccgggaggaactagaagatgtgctaacaatagtaaacaacacaagcctcgccgatcgaccagataccagacattgcttccttgcggatcacactggtaattttcagacctctactctctacaacctgcttaaagggtccttggggcatggtgataagaagcaaggttatgagctgcgacagttgaaggacttgaatgagcttggtggcagtttaagagtggaaaatcttgagaatgtcattggaaaggatgaagccgtagagtcgaagctatatctgaaaagtcgccttaaagagttggcacttgagtggagttccgagaatggaatggatgcaatggatattctagaaggtctgagaccgccaccccaactgagtaagctcacaatcaaaggttacagatctgatacatatcctgggtggttactagagcgatcctattttgagaatttggaaagttttgagcttagtaattgcagtttgctagaaggcctaccaccagatacagagctccttcggaattgctctaggttgcgtataaactttgttccaaatttgaaggaactatctaatcttccagcaggccttacagatttatcaattgattggtgcccactgcttatgtttatcaccaacaatgagctaggacagcatgacgtgagggaaaatataataatgaaggcagacgacctggcatctaaacttgcattgatgtgggaggtggattcaggagaagaagttaggagtgtactgtcgaaagactattcatctctgaaacagttgatgacattgatgatggatgatgatgtatcaaagcatcttcaaattattgaaagtggtctggaggaaagagaagataaagtatggatgaaagaaaacatcatcaaggcatggctctttttccatgagcagaggataagattcatttatggaaggaccatggagatgccattggttctaccgtcaggactctgtgaactttctctttcttcatgcagtattacagatgaagctttagctatttgccttggtggcctcacttcactgagaaatttacgattgaaatattatatggcattaactacacttccatcagaaaaggtgtttgagcatttgacaaagcttgtctggttggttgcacctcgatgtcaccccaacacgacgctctctcctcttgaagctccagagttcaggatcaagtcagaagcgaatgggtcagctaatgttgttgtccccgcgcttcaagctccaggaaattcttttttcctcaacaacaagtatgccgagagcccgagaggactggtgtctagctgtctgctgtactttgtagacaggatgggcatctag
